United States Patent Application Publication US 2006/0134663 A1 - sequence listing, part 47

SEQ ID NO: 96931 - DNA, 861 bp, Homo Sapiens
cggcatggaaagcatgggtgccgtggggcagtggtgtctgggcccagtagcgggcagtcttctcagagcagacgtggccgcaaggtgcaaaggcatggctaggcggcccagggtccaggcagaggccggcctcctggccaagccatagaggcacataaggccccacaaggcggcagagaggacatcgcgctcctgggggccccgctcccgccggcagccccagccgtggtagccatggacgtgcccgcagcggacgtagacccagggctgctgtttgtcgggcgctgtgcggccacgggctgggctggggaaggccagagtgctgaggcccacggggcactggggccgcgctgcatttgcctcctgccgctgggcctccagttgcttcagtgtgggagcccgcagcagccccgccggtgtgcgccacagcagtgtggccccacacaggtcgatgagagagccgtcctgcagcacgttggactcgttttccaccagcttgccccgctgctgggctgagcggctgtcccgcaatgtgtacacattcccacagacgcgagatctcccgccagacacccggggctgagtcctcggagaagccgcctgccgggtgcatcaccaggactccattggtggtcagtccatccatcaggccatctggggtccgccatttggccgctcgctctccaaggaagatgttgctagaggcgtcgaagccagcggcatagatgcgggcagtatagggtggccggcggtcacagaggatgcggcaggcatagcgggagatggtgctctgggcagaagggccctcggcctcgtgccgattcgccacccagcctgctacctagcgttagtggggtgggg

SEQ ID NO: 96932 - DNA, 1175 bp, Homo Sapiens
aggctaagagataggaggctgcgttgaaatcggcacgagggcggagccgcgcgggccgggcccatcccgccgcagcggcccggggccgagcaggggctaggcggggagggagcggcgcccagcggggcccggagcgtggccagaatggtgctggaaggaaaccctgaagtggggtccccccgaacctcagacctccagcaccgggggaacaagggctcttgcgttctctcctctcccggtgaagatgcgcagccaggcgaggagcccatcaagtatggtgaactcatcgtcctgggatgctgtgaggaaggaggtgaggaaaccgaggctcagagaggggaagtgactggcccaagggcacacagctgctacaatggttgtctggcaagtggggacaagggccgccggcgaagccgcctggcactgagccgccggtcgcacgccaacggggtgaagccagacgtcatgcaccacatctccacgccgctcgtctccaaggcactgagtaaccgtggtcagcacagcatctcgtatacactgtcccggagccactcggtcatagtggagtatacacatgatagcgacacagacatgttccagattggccgctccacagagaacatgattgacttcgtggtaacagacacgtcccctggaggaggggctgccgagggcccttctgcccagagcaccatctcccgctatgcctgccgcatcctctgtgaccgccggcaccctatactgcccgcatctaattgccgtggcttcgaaggcctctagcaaacatcttccttggagagcgagcggcaaatgggggaccccagatggctgatggatggattgacacaatggagcctggtgatgcacccggagcggtactccgagggattcagccccgtgtgtctggcaggaagaatcccgcctgtgcggaatgttgtccctttgggggaaaagcggtctagccaagaaccgggggacgctgtgtaggtgcacatatatatatcgcgaccatatttatcggcgagcccacaagggccactcccgtgcaaagcaggaaaagtccaaccactatatgaccaggataccatcagtgctatcgggaacagcccggggattatacatgcacctcacagaagtacaaacacaatactacatgacaggtcgcatcagctcga

SEQ ID NO: 96933 - DNA, 1566 bp, Homo Sapiens
  misc_feature (868)..(869): n is a, c, g, or t
  misc_feature (888)..(889): n is a, c, g, or t
  misc_feature (997)..(1005): n is a, c, g, or t
  misc_feature (1131)..(1131): n is a, c, g, or t
  misc_feature (1142)..(1142): n is a, c, g, or t
ggcgtgctcgagcctctacgatcctgtgtgcggcagcgacggcgtcacatacggcagcgcgtgcgagctggaggccacggcctgtaccctcgggcgggagatccaggtggcgcgcaaaggaccctgtgaccgctgcgggcagtgccgctttggagccctgtgcgaggccgagaccgggcgctgcgtgtgcccctctgaatgcgtggctttggcccagcccgtgtgtggctccgacgggcacacgtaccccagcgagtgcatgctgcacgtgcacgcctgcacacaccagatcagcctgcacgtggcctcagctggaccctgtgagacctgtggagatgccgtgtgtgctttcggggctgtgtgctccgcagggcagtgtgtgtgtccccggtgtgagcaccccccgcccggccccgtgtgtggcagcgacggtgtcacctacggcagtgcctgcgagctacgggaagccgcctgcctccagcagacacagatcgaggaggcccgggcagggccgtgcgagcaggccgagtgcggttccggaggctctggctctggggaggacggtgactgtgagcaggagctgtgccggcagcgcggtggcatctgggacgaggactcggaggacgggccgtgtgtctgtgacttcagctgccagagtgtcccaggcagcccggtgtgcggctcagatggggtcacctacagcaccgagtgtgagctgaagaaggccaggtgtgagtcacagcgagggctctacgtagcggcccagggagcctgccgaggccccaccttcgccccgctgccgcctgtggcccccttacactgtgcccagacgccctacggctgctgccaggacaatatcaccgcagcnnccgggggcgtgggcctggnntggctgccccagggccctgcccagtgcaacccccccatggcttcttacggccggcaccctgtgaacccagcccacagggccagttgctccctgcccgcccagggtgtnnnnnnnnnccttcaggtgtggacccgcttgtggatccctgcctttctggaaccttttcaagggcatcgctccccggaggggtcgggacgtgtcttgtaaccctcctgcacggctttgtatccctaaaaggcacnccgcggcgggnaagactcggtaaaccacaatgacccgggtcttacggctatcggtctgacccccgggcactgccttggaacgccaccctgttggtccaagcgcacccagcacggtcagtggcccctcggccccccttcggcgtttggcgcagattaccatccttatttcacacctgattcatccctttattagtcatacagcgaactgccgaaaaacgccgctgcgctacacacacccgcccaagctactccgttctcccgagcccgcgcactagtgtccggacctggctggtcacaccgcgtatcaacgcatcgtcgccgactctatctcagcgtcctctggacttcatatcatgccagatgccgccacgcctccactctagatgggccctatccacccccgtcgccgcacctctccgtacgcacctgtgacat

SEQ ID NO: 96934 - DNA, 1339 bp, Homo Sapiens
tagggttcgctaagcccttgcgcattcgttcagctgtagggccgttgtgcctttgggtgctctggtgtcgcggtagttaggactgtcgcccaaggccttgccacaatgtgggcactgtgagggcttctggccagagtgagtgcgctggtggcgaagcaggtaagagctgtcggcgaaggccttgccgcaacgggacatttgtaggccgctcgccagtgtgggtgcgctggtgtttgatgaggtcagagctctgggagaaggccttgctgcagacctcacattggtagggcttctgcaccggtgtggatgcgctggtgctggatcaggctggagccccgcccgaagctctttcccgcagatgccgcagatgttaggccgagggccctgcccacccctggcccggccaccccgccgacctggacctcgaagggctcctgtgagacccaggggattctgaagcatctcaaactgcggtgtagacagcagggcccctgtgggcatctcaaaaggtggccctatgggcaggtcccctgtgggctgctccccaaacccctgagtgaaggagtccagggggtgaactcctacggagatattcaaaggactcttgttcgtcggggttcagaagcatctccgcaccttcctggaatttggaactttgagcttcaaattctgggctttgggttttgagctcagtgttctgggattcatatctagagctctcagattcatagccagggctccggggttcatacccggggctccgaggttcatagccagggctttggggttcatacctagggctctgggattcaaactcagggctctgagaatctgattcagggcttctgggtgcaaactcagggcttgggggcacaagcccagggcttcgggactcaaaccccgggctttcaggctcaaatctggggctttggggttcaaactctgggctttgtggctcaaacccagggctctggggttcaagcccaaatggtatctcttcgaccttcatagtccccactgccttcttgctgagaaatttcctcttcctcattctcactcatgttgcctcctgaggtaccctctcggggctcctcactttcgtcacgaactctgcaccatcctggggctcgacggccccaacggcaacgcctcccgctccagtaccccgcgggctcccagtccactcggcggcggcgatggcggccgatcccgcgatccccggcctcggttgccccgaaccgcgcccacgcgtccgcgacgcgtgggtcgactgatatcccgggaattccgaccggtaccagcctgcttttttaaccacctgttctatattatcatgcgt

SEQ ID NO: 96935 - DNA, 876 bp, Homo Sapiens
aataggctaggtacaggctgggtgtgtaattcggcacgaggcggggccggggtcctgaaggcaacatgagtgagaatgaggaagaggaaatttctcagcaagaaggcagtggggactatggagagtcgaagagataccatttgggcttgaaccccagagccctgggtttgagccacaaagcccagagtttgaaccccaaagccccagatttgagcctgaaagcccggggttcgagtcccgaagccctgggcttgtgcccccaagccctgagtttgcacccagaagccctgaatcagattctcagagccctgagtttgaatcccagagccctaggtatgaaccccaaagccctggctatgaacctcggagccccgggtatgaaccccggagccctggctatgaatctgagagctctagatatgaatcccagaacactgagctcgaaaacccaaagcccagaatttgaagctcaaagttccaaattccaggaaggtgcggagatgcttctgaaccccgacgaaaagagtcctttgaatatctccgtaggagttcaccccctggactccttcactcagggggtgtggggagcagcccacaggggacctgcccatagggccaccttttgagatgcccacaggggccctgctgtctacaccgcagtttgagatgcttcagaatcccctgggtctcacaggagcccttcgaggtccagtcggcggggtggccgggccagggttgggcagggccctcggctaacaattctgcggcatcttgcgggaagagctttcggggcggggggtccaaacctgattccagaccaaggcattccacaccggtggagaaaggccctaacaaattgttgagggtctgacaagg

SEQ ID NO: 96936 - DNA, 1046 bp, Homo Sapiens
cgcacagccacacgatcacgctggcacgcactcagtgacatatagaacagtgtttcaaaaagcaggctggtacggtccggaattcccgggatatcgtcgacccacgcagtccgcctcacgcgtacggaaaataagcagcaacccaaatcctgttgtccagatgtcagttgggcacaaggcccaggagagcaagattcgatacaaaaccaatgaacctgtgtgggaggaaaacttcactttcttcattcacaatcccaagcgccaggaccttgaagttgaggtcagagacgagcagcaccagtgttccctggggaacctgaaggtccccctcagccagctgctcaccagtgaggacatgactgtgagccagcgcttccagctcagtaactcgggtccaaacagcaccatcaagatgaagatggccctgcgggtgctccatctcgaaaagcgagaaaggcctccagaccaccaacactcagctcaagtcaaacgtccctctgtgtccaaagaggggaggaaaacatccatcaaatctcatatgtctgggtctccaggccctggtggcagcaacacagctccatccacaacagtcatagggggcagtgataagcctggtatggaagaaaaggcccagacccctgaggccggacctcaggggctgcacgacctgggcagaagctcctccagactcctggactccccaggacaacatctcagtcaaggagccgacccacagcaacgcctcggacatctcgctgcccatcggcaccaggagctgcgggaaaggctgaggcaacaggaaaacgggacgacacatgggacaagcgtccaaatggggcagatacacgaagaccaaaccggcaaagcacgaagagagacaagcaaacagaggacagaccatgccggccaaaaccacaatgggccggaccggagacggacagacccaaagccggcgaactcaaacagaaaaaagcagaaaaacgacgcaacaacggagcacacaacacacaacgcggccgcacaaccaaacaaaggcaaacaaaaag

SEQ ID NO: 96937 - DNA, 1455 bp, Homo Sapiens
ccatggacctataggaaccagtggttcaaaaagcaggctggtacggtcggaattcccgggatatcgtcgacccacgcgtcgcaaaaactgattattccaagtggaagttgcccgttattctgaatacttactttgtgagaaagttgtgccaaagaagattcagaaaaaactgtgaagtgtactgtccggacataccccttccaagaagaagcatctcttggcccagatgttgtaattaagggtctaacaaataattcacctgaaatccaggttgtgtgtagtggtgtagccactacagggacagcctggacccatgggcacaaagaagcaaaacagcgcatcccaaccagcactcccctgagggattctctcctggatgtggtggaaagccaggagctgcctcgtggccaggagctggagtccgagtggtggtgcaaagagtgtattctcttcccagcagagacagcaccagggtcagcagggggccagctcaggacacacagacccagctggaactcgagcctgccttctggtacaagatgcctgtggaatgttcggtgaagtgcacttggagttcaccatgtcgaaggcaagacagttggaagggaagtcttgcagcctggtgggaatgaaggttctacagaaagtcaccagaggaaggacagcggggattttcagtttgatggacaccctgtggcccccagcgatacctctgaaaacacctggccgcgaccagccctgtgaagagataaaaactcatctgcctcctccagccttgtgttacatcctcacagctcatccaaatctgggacaaattgatataattgacgaagaccccatttataagctttaccagcctccagttacccgctgcttaagagacattctccagatgaatgatcttggtacccgttgcagtttctatgccacggtgatttaccaaaaaccacagctgaagagtctgctgcttctggagcaaagggagatctggctgctagtgaccgatgtcactctgcaaacgaaggaggagagagaccccaggctcccccaaaccctgctggtctatgtggcccccttgtgtgtgctgggctctgaagtcctggaggcactccctgggggctgcccctcacagcctcttcttcaaggacgctctccgtgaccagggttggattgttttgggctgaaagaaactgccctcttggcttcagaaacccctttttgaggggggctccttggggcaaattccttgtgaagcttgcctggccccgggggatgctccaaaagcctgggaattcctgcaaccacctggtccaattccattcttgcagggttccaaggcccctgtgggtttgggcgggtggacacaaaaaacccctgtccttttccttatgggcccggtggggggggacactggtgggtggccacaccggggagaaaattggacaacacagaaga

SEQ ID NO: 96938 - DNA, 1615 bp, Homo Sapiens
  misc_feature (1488)..(1488): n is a, c, g, or t
  misc_feature (1573)..(1573): n is a, c, g, or t
tggcacgaggcagaaaaatggtggtgatggcgcgactctcgcggccgagcggccggaccttgtcttcgaggaagaggacctcccctatgaggaggaaatcatgcggaaccaattctctgtcaaatgctggcttcgctacatcgagttcaaacagggcgccccgaagcccaggctcaatcagctatacgagcgggcactcaagctgctgccctgcagctacaaactctggtaccgatacctgaaggcgcgtcgggcacaggtgaagcatcgctgtgtgaccgaccctgcctatgaagatgtcaacaactgtcatgagagggcctttgtgttcatgcacaagatgcctcgtctgtggctagattactgccagttcctcatggaccaggggcgcgtcacacacacccgccgcaccttcgaccgtgccctccgggcactgcccatcacgcagcactctcgaatttggcccctgtatctgcgcttcctgcgctcacacccactgcctgagacagctgtgcgaggctatcggcgcttcctcaagctgagtcctgagagtgcagaggagtacattgagtacctcaagtcaagtgaccggctggatgaggccgcccagcgcctggccaccgtggtgaacgacgagcgtttcgtgtctaaggccggcaagtccaactaccagctgtggcacgagctgtgcgacctcatctcccagaatccggacaaggtacagtccctcaatgtggacgccatcatccgcgggggcctcacccgcttcaccgaccagctgggcaagctctggtgttctctcgccgactactacatccgcagcggccatttcgagaaggctcgggacgtgtacgaggaggccatccggacagtgatgaccgtgcgggacttcacacaggtgtttgacagctacgcccagttcgaggagagcatgatcgctgcaaagatggagaccgcctcggagctggggcgcgaggaggaggatgatgtggacctggagctgcgcctggcccgcttcgagcagctcatcagccggcggcccctgctcctcaacagcgtcttgctgcgccaaaacccacaccacgtgcacgagtggcacaagcgtgtcgccctgcaccagggccgcccccgggagatcatcaacacctacacagaggctgtgcagacggtggaccccttcaaggccacaggcaagccccacactctgtgggtggcgtttgccaagttttatgaggacaacggacagctggacgatgcccgtgtcatcctggagaaggccaccaaggtgaacttcaagcaggtggatgacctggcaagcgtgtggtgtcagtgccggagagctggagctccgacacgagaactacgatgaggccttgcggctgctgcgaaagggccacggcgctgcctgcccgccgggccgagtactttgatggttcagagcccgtgcagaaccgcgttgtacaagtcactgaaggtctggtccatgcntcgccgaactggaaggagagactcggcacctttccagtcacccaagggccgtgtacgaacgcgcatccttggacctgcgtatcgncaacaaccccagatcgttcatcaactatgccccatggttcca

SEQ ID NO: 96939 - DNA, 1205 bp, Homo Sapiens
  misc_feature (935)..(949): n is a, c, g, or t
aggctatttaggctataaaccagtggtatcaaaaagcaggctggtacggtccggaatcccgggatatcgtcgacccacgcgtccggcggaggcgcgggtgccgtgctgagagcgcctgcctgtgcgccccgagcggggctgggactcttccaagatgcccacgttcgcacagagaccccggatcgcggaagctcgcgtctcgaaaggcctgtgggtcaaggggggccatctcggtgggatctggggcgggacgacccccactgctgaaccctgggcgcggggcagggtcagaggctccgctcggcctccccctggatgagacgcgcatgcccggtgtcccccggccgccgtcggcgtcgtgtcttcagtccttatcgactccagactttggggatgcgtattaacgccagactcctgcaaagtcttgccttcaacactcagcccctggggagagacgggtggagggatgactggaaacgtggcctcgacgtccctacagagcccctccagcgtggggaggcctaagtacctcaaggttcaggcccacggaaggagtcgggggagcgaggcccggtgatctacgtgtgaaggagcttggacaggacctcacaaacgccagggagacggcgagggggttcgtgcgtttgtaacgtcttgacatcgctgatcctcccgcaggcggtctcacgccctgcccgtcctgggttcacggtttttcatcacctgcggctgtcctgcgatcgaccacagctgtgccagaggggcagggaggtatctggttgctgcaggttaccggaaccctttgcccgggactaattacaggacccaccggggctggtaacttcagggaatggtctcggtctgtgaagtttacaggcttgcacgctccttcccagggaaagaaaggaattttcccccccttcttcgtggaaaannnnnnnnnnnnnnnagcatgggtcttctccattgggaggctcggccttgccccctattcccctgaaacttgcgcacctggcccacaaaccaaatggcggcctcttgcgtgtggcccttctcactcccctaccagggggccagggccccccgcggtacaccctccttgtgtaaaacgcgggaggccttattgcccacccacaccctatacctatactccctctggatacaccaacccccatcgcggggccttctccaccatatcttcgctt

SEQ ID NO: 96940 - DNA, 949 bp, Homo Sapiens
gagtaccgcgatcggatatcccggcgatatcgtcgaaccacgcgctcggtctgtccctagcggaggcgcgggtgccgtgctgagagcgcctgcctgtgcgccccgagcggggctgggactcttccaagatgcccacgttcgcacagagaccccggatcgcggaagctcgcgtctcgaaaggcggtctcacgccctgcccgtcctgggttcacggtttttcatcacctgcggctgtcctgcgatcgaccacagctgtgcaggaggggcaggaggtatctgttgctgcagttaccggaacctttgccaggactagtacaggaccacgggctggtagctcagggatgtctcgtctgtgagttacagctgcacgctctccaggaaagaaggaatttcctcttctctggaaaccccaccacacagctggtttctcattggtgctgcttgcccattccctgagctgtgactgccagaggagtggggttggtggtgcctccagcccatcaggggcaggccctgggaccgcctgggaacaggaggactatggcacaaaccgagtgagtgatgggagcaacccgcagggctctgccacatccctgtcttccttcactgacatgaaacgcagaaaaggcagctttgccacaacacaggagcacgcaccgaatgtggccgcccagggctctgtccttgaccctgttgtccaggactgtttaccaagggctgacaggcactgagtgccccgtgcacctggcagacactgcactcatgcagcggaaaggacagtgaacgagactttgtccctggcctccaaaggcttagggcgtagtggctgtcatgaggcacagtgacaagggccaggagggggacctcttaggggggccatgcaggtgatggaagccagaactgacactcaaggcttcattacgatgggtggtcgccttaagcattcctg

SEQ ID NO: 96941 - DNA, 689 bp, Homo Sapiens
gaaggtaaaacagctgattcgcctcagccacggcatcgacctctccaaacctgtagactctgaggccactgtgggggccatctccaatggcccggactgcaccccccctgccaatgccgccacctccacgccggccccttccccctcctcccagagctgcacagcgaactgtaaccagggggaagagactaaataacagagcccctctaggagaagccacgggatcccggcggcaaggagaacagaacactgaagactctagaaaagcaaagccggatttctggaaagtgcagaattcttttggttctttggttccagagagagagaagatgcttgtgccaggtggcaccagagtttgccaattgatccttcttattctgtgtgtacatgcaaagattggaccatgttacatgaaatagtgccagctggaggttctttgccagcaccatgccaagtgaaataatatatttactctctctattatacaccagtgtgtgcctgcagcagcctccacagccacgatgggtttgtttctgttttcttgggtggggagcagggacgggcggagggaggagagcaggtttcagatccttacttgccgagccgtttgtttaggtagagaagacaagtccccccgagtgtgtgggctttcctgtttaataaaactttcgattgttattaaaacctaa

SEQ ID NO: 96942 - DNA, 1644 bp, Homo Sapiens
  misc_feature (19)..(19): n is a, c, g, or t
  misc_feature (1354)..(1407): n is a, c, g, or t
tgtgactatagaaccagtnttgtaaaaaaagcaggctggtccggtccggaatcccgggatatcgtcgacccacagcgtcgcccacgcgtcgcagctgggcagcatcatggacctcttcaccaccagcctggcccttgcgggcctgacgccgcccagcgacagggccattgatggcctcaacctcctccccaccctcctgcagggccggctgatggacaggcctatcttctattaccgtggcgacacgctgatggcggccaccctcgggcagcacaaggcgcacttctggacctggaccaactcctgggagaacttcagacagggcattgatttctgccctgggcagaacgtttcaggggtcacaactcacaatctggaagaccacacgaagctgcccctgatcttccacctgggacgggacccaggggagaggttccccctcagctttgccagcgccgagtaccaggaggccctcagcaggatcacctcggtcgtccagcagcaccaggaggccttggtccccgcgcagccccagctcaacgtgtgcaactgggcggtcatgaactgggcacctccgggctgtgaaaagttagggaagtgtctgacacctccagaatccattcccaagaagtgcctctggtcccactagcacctgcgcagactcaggccaggcctagaatctccagttggccctgcaagtgcctggaggaaggatggctctggcctcggtcctcccccaaccctgcccaagccagacagacagcacctgcagacgcagggggactgcacaattccacctgcccaggacctgaccctggcgtgtgcttggccctcctcctcgcccacggcgcctcagatttcaggaccctcctcctcgcccacggcgcctcagacctcaggaccctgccgtctcacgcctttgtgaaccccaaatatctgagaccagtctcagtttattttgccaaggttaaggatgcacctgtgacagcctcaggaggtcctgacaacaggtgcccgaggtggctggggatacagtttgcctttatacatcttagggagacacaagatcagtatgtgtatggcgtacattggttcagtcagccttcccactgaatacacgattgagtctggcccagtgaatccgcatttttatgtaaacagtaagggaacggggcaatcatataagcgtttgtctcaggggagccccagagggatgacttccagttccgtctgtcctttgtccacaaggaatttccctgggcgctaattatgagggaggcgtgtagcttcttatcattgtagctatgttatttagaaataaaacgggaggcaggtttgcctaattcccaggttnnnnnnnnnnnnnnnnnnnnnnnnnnnnnnnnnnnnnnnnnnnnnnnnnnnnnngcgagagagcaagaaccgacacacgcggcagcgcaagccgcgcagcacaccgggccccactggacccacaccaaggaaaccacacgaagaccaccgccaacacggaacacgaacgcgaccaagcaccccacggcacacaccaacagaccaacagcccacaacacaccgcccacacggaggacacaacgacacacaacagcggcggccacgcaagacgacacaaccgcgccaacacac

SEQ ID NO: 96943 - DNA, 785 bp, Homo Sapiens
  misc_feature (98)..(158): n is a, c, g, or t
ttagtacctatagaacacgttggtacaaaaaagcaggctggtacggccggaattcccgggatatcgtcgacccacgcgtccggctgtgaggcgccagnnnnnnnnnnnnnnnnnnnnnnnnnnnnnnnnnnnnnnnnnnnnnnnnnnnnnnnnnnnnnaaactccaagggcggaccgcggcagggagcgatcggcctcgggctgcgggagccggagaccgcggcggcggcggctgctgcagctgcaggaggagcccaggaacaccgcccctgcctgtgctctgcctcgggccatcgctcctccccagggcccagtgcggactcgcctccgtgaagtgtcacaccatgtctgaccggaaggcagtgatcaagaacgcagacatgtctgaggacatgcaacaggatgccgttgactgcgccacacaggccatggagaagtacaacatagagaaggacattgctgcctatatcaagaaggaatttgacaagaaatataaccctacctggcattgtatcgtgggccgaaattttggcagctacgtcacacacgagacaaagcacttcatctatttttacttgggtcaagttgcaatcctcctcttcaagtcaggctaggtggccaaggcgaaggtgtcagtggcggcggcagcgatggcaagcaggcggcgttgctgggactgtttgcactggagccagcatcaggaagtcctctccaatggctgtgctactgcatggactgtgtactcgatttcatgtgtgtgtcgcagtaaacaaaaaccaaactcc

SEQ ID NO: 96944 - DNA, 939 bp, Homo Sapiens
ggcatggtgaactataaacaagtgtgtacaaaaagcaggctggtacggtcggaatcccgggatatcgtcgaccacgcgtcggatggaggagacccggatgagggcttccacactgctctcaaaggtcttcctgcagcacctgtctccactgctgtcactctccacctttgcggccctctggctcaccatcctagacttcatggacaagtacatgcacgcaggctccagcgacttactgtcagaagcgatccccgagtctctgaagaacatgctgctggtgatggacacagcggagattttccacagtgcagatgcaagaggaggaggcccctcggccctctgggagatcacctgggaacgcattgactgttttctccctcacctacgagatgaactcttcaagcagaccgtcatccaggaccccatgcccatggagcctcaaggccaaaagcctctcgcctcagcccacctgacttccgctgctggcgacactaggacacctggccatccaccgcccccagagattccatctgagctgggggcctgtgactttgagaagcccgagagcccccgagccgccagcagcagctccccaggatcaccaatggcctcaagccccagcaggctgagccccaccccgacgggctccacccttggctcagccccactgatcctgcagcctttggcctccccactgcaggtgggcgtgcacctatgactctgccattcattctcaaaccctgcgctcatcgaggacactcacagtgaccctctggccacaccccgccccacagatccataaccactctgaggtccacttaagcggtccttcaaagtccggaccgtggttcccacaggtttcttgaaccccatttggtgcctgggggcacaagtcttagccaataaacttggtgtgccttggttgggctcaaaaaagtg

SEQ ID NO: 96945 - DNA, 1374 bp, Homo Sapiens
taagggcgagagagtatgaagtcgacggcgcgccgaattcggcacgaggggaagagacaccatcaaaccgaggagagtcaacagtgctgagctttgtgagctggctaacactgagtggtcctgagcagtctagtgttcggggcccatccactgaaaaccaagaggccaagagagtggccttagagtgtataaagcaatgtgacccagaaaaaatgatcacagaaagcaagttcctccagctggagtcactacaggagctcatgaaggctctggtctcagtgacaccagatgaagagacatatgatgaggaagatgctgctttctgcctagagatgctgctaaggattgtgttggagaacagggatcgtgtgggctgtgtgtggcagactgttcgagaccatctataccacctctgtgttcaggcacaagatttctgcttccttgtggagcgggcagtggtggggttgctacgcctggccattcggcttctccggagagaagagatcagtgctcaggtgctgctctccctgcgcattttgctactgatgaagcccagtgtgctatcccgagtcagccaccaggttgcgtatgggctccatgaactcctgaagaccaatgcagccaacatccactcaggtgatgactgggccacactcttcacactgctggagtgcatcggctcaggtgtgaagcctccagctgctctgcaggccacagccagggcagatgcacctgatgccggggcccagtcagatagtgagctcccatcctaccatcagaatgacgtgagcctggatcgagggtacacttccgactcagaggtctacactgaccatggcaggcccgggcaagatacaccgatcagccacagatgccgatgtggtcacagtggttggttagtggttgggaaggatgacgttgataactccaagccagggcccagccgcccaggcccttcacccctgatcaatcaatacagcctaacagtgggactggatttggggccacacgacactaagtctctgcttaagtgtgtggaatcgctgtccttcatcgtgcgtgatgctgcccacatcacacctgacaactttgagctctgcgtcaagactctccggatccttgtggaggccagtctgaatggcggatgcacagtcccacgagaaacgttggcaagagccacaaatatgacagcaaacggaaccgcttcaagaagaaatccaaagagggatcaatgcttcgccgggctcgaacctccagccaacatgcctctcggggcgggcagagtgatgatgatgaggacgaaggcgtgcctgccggggtacccatacggtgtcttaacaggtcagtcaggacttgctagacctgattggcaca

SEQ ID NO: 96946 - DNA, 977 bp, Homo Sapiens
tgggggcaattgggggtcccctgggattgaccgggtcctgccttggaaggagttcaatctccgtaggttgaggggagaaaaaccagtccaatgcgttttccccaggtgatctctcccagagggcccaaggggcccgcctcccccgggcatctgcacctgtggaaaatctcccgctgtgtccatcaccagaaagcatgttcttcagagactcagggatcgcctctgacagtaagtcgctggagcctgcgtgcatgtacttgtccatgaagtccaagatggtgagccagagggccgcaaaggtagagagtgacagcagtggagacaggtgctgcaggaagaccttagagagcaatgtggaagccctcatccgggtctcctccatcccacccacatctgcagggctgatgttctccaagagcttggtaagtagaggaaacagcaccttgttaaaacaggactcccattccagggcatctagcttttgcagatcatgtacaagtagtgctcgctgcagataggtcagtgcctgcatccgtacctggcgccgggcatcgcagcacaggcaggcaataccctgcagtaaagggcaccagcagtgggcccagagggtgcgagaatcagcttcaatcttctggccacctgtctccaggtggcgttgctcctccgcccatgagctgtagatagaggctgcccgcgtgtgcagggtgtgcatcaggtctagcaactgtaaagacaccgtatggtagctggcaggcacgccttcgtcctcatcatcatcactctgcccgccccgagaggcatgttggctggaggttcgaggccggcgaagcattgatccctctttggatttcttcttgaagcggttccctttgctgtcatatttgtgactcttgccacgtttctcctgggacttgcatccgccattcagactggcctccaccctcgtgccgaattcgccacccaggcctcgcgtccgt

SEQ ID NO: 96947 - DNA, 820 bp, Homo Sapiens
  misc_feature (25)..(25): n is a, c, g, or t
agcaatagtactatagaaccagctnggttacaaaaagcaggctggtacggtccggaattcccgggatatcgtcgacccacgcgtccgagatttccaattttaaacttcttcaaaaatttttggctagattagatcctttgcctttccatatgaattttagaatctgcttgtcaacttctgtaaaaaatcctgcaagtatttttgattaggattcattgaatctatacgttaatttgggaagaattatcatcttaaaaatattgagtcttccaacacacatatgtataatttcatcttcttaggtcttctttagttttttttcaccaatgtcttactgttttcagtgtgcaagtcttatacattcttggctaaatttatctttaagtatatcattgtttttgatgtggttataaatgatattggtttttaaatttcaatttccagttgtttgttcctaatatatgaatatgcaatcaattttgtatactgattgggtattcttcaaccttgctaaactccctacttcagttctagtagtttttcgtagattctttaagattttctacatagatgatcatatcttctgagaatatagacagttttacttctttcttttcaacttatattctgttacctttatttatttcactggctagaacttccagtaatacgttgaataaaggtagataaagcagatatttgtgctttagtcctaatcttaggaaaaaaggcattaggtcatttacatgtatgatgtaacatgttatgatgtcacaatgtttttaactgtgatgtaactgtgaattatcttaatgctatt

SEQ ID NO: 96948 - DNA, 728 bp, Homo Sapiens
gtggagacgtcgtttcaccggcggcgcgtgaccccggcagctgtccagagacccagagatgtccaatcacaggcgcacggtgcacaggcgcgcagggctgcctggaaccggcccaggcaggcagtgaccgggacctctccggaggggagaggacggtgccctcccgggcaggagctggccaggcaggcgctgcccagggcggcctccctgctggactacggcattgccactgagttatataaagacactatttggggaaggacagcgggtatactctggataataatgttctaaccctggaacagagaaaattttatgaagaaaatgggtttctagtaatcaaaaatcttgtacctgatgccgatattcaacgctttcggaatgagtttgaaaaaatctgcagaaaggaggtgaaaccattaggattaacagtaatgagagatgtgaccatttcgaaatccgaatatgctccaagtgagaagatgatcacgaaggtccaggatttccaggaagataaggagctcttcagatactgcactctccccgagattctgaaatatgtggagtgcttcactggacctaatattatggccatgcacacaatgttgactaaacaaacctccagattctggcaagaagacgtcccgtcaccccctgcaccaggacctgcaactatttccccttcaggcccacgatctcatcgtttgcgcctggacggcgatggagca

SEQ ID NO: 96949 - DNA, 301 bp, Homo Sapiens
catagttgtactcatgcgaaagcgttgaatatcggcatcaggtacaagattttgattactagaaacccattttcttcataaaattttctctgttccagcgttagaacattattatccagagtatactggaattgttgaggatggaaactggcagaggaaatagtccctgaagtgggatgagctacgacagccccggccgaggggcggccgaggtggcccagaacaatctgcagacgggcggcggcgcgaagctgctccatggctgcggcgcggggaaccccccgcaatgagtacagattca

SEQ ID NO: 96950 - DNA, 1099 bp, Homo Sapiens
gcaatggaatatgaccgctggtataaaagcaggctggtcccgctccggattcccgggatatcgtcgaccacgcgtccgaacaacactgatcatctgtccgctttctgtgttaagcaactggatgaccagttggacaacatataaaatcagatgtacacttgaatttttatgtttattatggtcctgatcgtattagagaaccggccttactttcaaaacaggatatgttttgactacgtataatattttaactcatgactatggaactaaaggagatagtccattacatagcataaggtggctaagagtgatcctggatgaaggacatgccatacgaaatccaaatgctcagcagacaaaagctgtacttgacttagaatcagaaagaagatgggttttgacaggtactccaatccagaattctttaaaggacttgtggtctcttctttcctttttaaaacttaaaccatttattgatagagaatggtggcatagaacaatacagcgtcctgtcacaatgggagatgaaggaggacttaggcgtttacagtccctaattaaaaatattacacttagaagaacaaagacaagcaaaattaaaggaaaacctgttttggagttaccagaacgtaaagtatttattcagcacattacactttcagatgaagagagaaagatttatcagtctgtgaaaaatgaaggcagagccactattggaaggtattttaatgaagggactgtcctggcacattatgcacgatgtcctgggtcttgtgctttagactgcggcaaaattgtggccatacttaccttcttacaaatgcagtggtcttccaatggcccctcaggaaatgatacacctgaagaactgagaaagaagttaataaggaagatgaagttaattctgagctcaggttcagatgaggaatgtgcaatttgcctggattctttaacagttcctgtgaatacacattgggcacatgtatttttgaaaccctgtatttgcccagtcattcataatgagcagccacatgctagatgccctttatgcagaaatgatttacatgaagataatgtattaaggtgtccttcaaaagaa

SEQ ID NO: 96951 - DNA, 921 bp, Homo Sapiens
cggcgcccagtggcactgtgagcgattcggaaagtagtaacagcagtagcgatgcggaggagctggagcggtgccgcgaggcggcaatgccggcttggggcttggagcaacgcccgcacgtggcagggaagccaagagccggtgctgcaaatagccagttgtcaacctcccaaccgagcctcaggcataaggtgaatgagcatgaacaagatggcaacgagcttcagaccacccctgaattccgagcccacgtagccaagaagctgggagccctgctggacagcttcattaccatctcagaagcagcaaaggagccagcaaaagctaaggtacagaaagtcgctttggaggatgatggtttccgccttttcttcacatctgtccctggaggccgtgagaaggaagagtctccccaaccccgccgaaagcgacagccctccagctccagcagtgaggacagtgacgaggagtggcggcggtgccgggaggcagctgtgtcggcgtccgacatcctacaggagtcagccatccacagccctggaacagtggagaaggaggcaaagaagaaaaggaagttgaaaaagaaagccaagaaggtggccagtgtcgactcggctgtcgctgccaccacccccaccagcatggccacagtccagaagcagaagtcaggtgagctcaacggggaccaggtgtcgcttgggaacaaaaagaaagaaaaagcaaaagaaagccagcgagacctctccattcccaccagcaaaagagtgctaccagctatacctgcaaactgaacccagccatgggcacagggctcagccagctcccaggacaagggggtccccccccaccctgggggacaggaatttccaaggccccacctcccttctccaagttcaaggactggggctggcaaacccagaa

SEQ ID NO: 96952 - DNA, 846 bp, Homo Sapiens
gggacatccgccgcctgggcgcccaattccggaaggtgctgcacagctgtggcggcgggtactgcgttagtgattagagtttcttccctgccggaggtgggatacacggtagcatcatggtcgaggaggtacagaaacattctgtacacacccttgtgttcaggtcgttgaagaggacccatgacatgtttgtagctgataatggaaaacctgtgcctttagatgaagagagtcacaaacgaaaaatggcaatcaagcttcgtaatgagtatggtcctgtgttgcatatgcctacttcaaaagaaaatcttaaagagaagggtcctcagaatgcaacggattcatatgttcataaacagtaccctgccaatcaaggacaagaagttgaatactttgtggcaggtacacatccatacccaccaggacctggggttgctttgacagcagatactaagatccagagaatgccaagtgaatcagctgcacagtccttagcggtggcattacctttgcagaccaaggctgatgcaaatcgtactgcccctagtggaagtgaataccgacatcctggggcttctgaccgtccacagcctacagcgatgaattcaattgtcatggagactggcaataccaagaactctgcactgatggctaaaaaagcccctacaatgccaaaaccccagtggcacccaccgtggaaactctacagggttatcagtgggcatcttggctgggttcgatgtatagctgtggaacctggacatcagtggatagtaactggatctgctgacagaactataaagatctgggactggctagtggccaattaacactggtcattgactg

SEQ ID NO: 96953 - DNA, 842 bp, Homo Sapiens
cacagctgtggcggcgggtactgcgttagtgattagagtttcttccctgccggaggtgggatacacggtagcatcatggtcgaggaggtacagaaacattctgtacacacccttgtgttcaggtcgttgaagaggacccatgacatgtttgtagctgataatggaaaacctgtgcctttagatgaagagagtcacaaacgaaaaatggcaatcaagcttcgtaatgagtatggtcctgtgttgcatatgcctacttcaaaagaaaatcttaaagagaagggtcctcagaatgcaacggattcatatgttcataaacagtaccctgccaatcaaggacaagaagttgaatactttgtggcaggtacacatccatacccaccaggacctggggttgctttgacagcagatactaagatccagagaatgccaagtgaatcagctgcacagtccttagcggtggcattacctttgcagaccaagtatgaaatattataattacaaagatcttaaaagcatatttcactgttcacattttttctttttaaaatttctttataactattatatgacattttcctttatcaggactttataacaatttaaaataaagggttagtttgcgcagaaatacatgacttggaggcattcagttactttagacaattattaatttcttttggccccagggctgattgcaaaatcgtaactggacccgtaattggaacgtgaaataacggaccatacctggggcttcctgagcggtcaacaggccttacaaggatgaagtcaattgtcatggcaaacctggcataccaaggaacttctgcattgaagagtaaaaa

SEQ ID NO: 96954 - DNA, 512 bp, Homo Sapiens
  misc_feature (333)..(449): n is a, c, g, or t
cagctggatgtctggatgaactactgaaagctgctgagtgtcctgcaagcaggccatttccaatccagaggaagaccttctagaagaagtgatgggtgggagagtgctgacatactatgtgaagctactatttggagttggacacgagtgcatgtgaccttgtgccacagcgggaatgtgagctggatgacaaatggagatttggacttgtgataattggcctctgtgtcattgtgtggaagactgactggtccctttatttcctgtagcttgactaccacacaaattaatccactcaaatgttggcaagtggagcagagtcccaggacgggnnnnnnnnnnnnnnnnnnnnnnnnnnnnnnnnnnnnnnnnnnnnnnnnnnnnnnnnnnnnnnnnnnnnnnnnnnnnnnnnnnnnnnnnnnnnnnnnnnnnnnnnnnnnnnnnnnnnnatataatacgtaagtttggaggtggatgctttcagccattaagttcaaaagtactgccacaag

SEQ ID NO: 96955 - DNA, 1538 bp, Homo Sapiens
agcagtccagctgccccccaagagggacgagacggccctgcaggaggaggaggagctgcagctggccctggcgctgtcacagtcagaggcggaggagaaggagaggctgagacagaagtccacgtacacttcgtaccccaaggcggagcccatgccctcggcctcctcagcgccccccgccagcagcctgtactcttcacctgtgaactcgtcggcgcctctggctgaggacatcgaccctgagctcgcacggtatctcaaccggaactactgggagaagaagcaggaggaggctcgcaagagccccacgccatctgcgcccgtgcccctgacggagccggctgcacagcctggggaagggcacgcagcccccaccaacgtggtggagaaccccctcccggagacagactctcagcccattcctccctctggtggcccctttagtgagccacagttccacaatggcgagtctgaggagagccacgagcagttcctgaaggcgctgcagaacgccgtcaccaccttcgtgaaccgcatgaagagtaaccacatgcggggccgcagcatcaccaatgactcggccgtgctctcactcttccagtccatcaacggcatgcacccgcagctgctggagctgctcaaccagctggacgagcgcaggctgtactatgaggggctgcaggacaagctggcacagatccgcgatgcccggggggcgctgagtgccctgcgcgaagagcaccgggagaagcttcgccgggcagccgaggaggcagagcgccagcgccagatccagctggcccagaagctggagataatgcggcagaagaagcaggagtacctggaggtgcagaggcagctggccatccagcgcctgcaggagcaggagaaggagcggcagatgcggctggagcagcagaagcagacggtccagatgcgcgcgcagatgcccgccttccccctgccctacgcccagctccaggccatgcccgcagccggaggtgtgctctaccagccctcgggaccagccagcttccccagcaccttcagccctgccggctcggtggagggctccccaatgcacggcgtgtacatgagccagccggcccctgccgctggcccctaccccagcatgcccagcactgcggctgatcccagcatggtgagtgcctacatgtacccagcaggggccactggggcgcaggcggccccccaggcccaggccggacccaccgccagccccgcttactcatcctaccagcctactcccacagcgggctaccagaacgtggcctcccaggccccacagagcctcccggccatctctcaacctccgcagtccagcaccatgggctacatggggagccagtcagtctccatgggctaccagccttacaacatgcagaatctcatgaccaccctcccaagccaggatgcgtctctgccaccccagcagccctacatcgtcggggcagcggcccatgtacccactcacgacactcgttgacgatcgcccacctgcaacacttcatcccggc

SEQ ID NO: 96956 - DNA, 1478 bp, Homo Sapiens
  misc_feature (549)..(605): n is a, c, g, or t
  misc_feature (1074)..(1074): n is a, c, g, or t
  misc_feature (1138)..(1138): n is a, c, g, or t
  misc_feature (1285)..(1342): n is a, c, g, or t
cccgcctccaggcctcgccttcctcagctgtagaaggggctgcttgcataaggagcagatggactctgctccaggcttgagtatagctgggtgcctccatcccaggccccaccagggaggctggctggggcgtggccgcactcatccagaaccctgctctgcctgcagccacagttccacaatggcgagtctgaggagagccacgagcagttcctgaaggcgctgcagaacgccgtcaccaccttcgtgaaccgcatgaagagtaaccacatgcggggccgcagcatcaccaatgactcggccgtgctctcactcttccagtccatcaacggcatgcacccgcagctgctggagctgctcaaccagctggacgagcgcaggcgtaggtgcccgcgccacggggcctcggctcaggggcagccaggtgttgtgagcgccatcctgggccagggcctcccctgagggtgctgagctcttgtgagtccttcattggggccgtggcttcctccagagagtgtcaacaggaggtggtctcagtgatgaccatgnnnnnnnnnnnnnnnnnnnnnnnnnnnnnnnnnnnnnnnnnnnnnnnnnnnnnnnnncccccagagcccagcaccttcagagccctctgcagaaggttgggcacagggcggcccatctgcgtgtccgttccacccaggagcttctcggcactgtgccggagtggtcagggttgctctgtcatctgcccacagtgtactatgaggggctgcaggacaagctggcacagatccgcgatgcccggggggcgctgagtgccctgcgcgaagagcaccgggagaagcttcgccgggcagccgaggaggcagagcgccagcgccagatccagctggcccagaagctggagataatgcggcagaagaagcaggagtacctggaggtgcagaggcagctggccatccagcgcctgcaggagcaggagaaggagcggcagatgcggctggagcagcagaagcagacggtccagatgcgcgcgcagatgcccgccttccccctgccctacgcccagctccaggccatgcccgcagnccggaggtgtgctctaccagccctcgggaccagccagcttccccagcaccttcagccctgccgngctcggtggagggctccccaatgcacggcgtgtacatgagccagccggccccctgccgctggcccctaccccagcatgcccagcactgcggctgatcccagccatgggtgaagtgcctactggtacccagcagggggccacttgggnnnnnnnnnnnnnnnnnnnnnnnnnnnnnnnnnnnnnnnnnnnnnnnnnnnnnnnnnnctttaactcatccctacccaggcctactttccccacaagcggggcttaccccagaaaacgttgggcccctcccaagggccccccaacagaagccccttccccgggcccattcttcttcaaggcccttcggccagtt

SEQ ID NO: 96957 - DNA, 993 bp, Homo Sapiens
  misc_feature (305)..(344): n is a, c, g, or t
tggtaccggtccggattttcccgggatatcgtcgaccacgcgtcgaagccattgtgtcctctacaattaacaaaacttatctctgatatacaaagggatataaatatatacacttaaatagagaaaaagaggttgattgaattgtgcctttgagtgaacccagtttttaaataccgctgtgtttgtttcgccatggcttcagggatgctacatggctcttgcaccttttactcctctgctttatgaagtttgagttgtatttgtgcatcttaaagtaggttgaggcttgaggctgggctttcggnnnnnnnnnnnnnnnnnnnnnnnnnnnnnnnnnnnnnnnncttgtacttaaacctgcttgcttcctaccacagattctttattttcccaaacactacaaaaaaacttttaaaactttgccatttcatctgtttacactctttgccactgattagcagtatttaaatcttgcaagaatattttgtgctttctttagaaacacaagagtatagatttttctcactgaaaagtgagagttacgcattgcagccatgaagggatgctaggatcaattatggcagtaccttttttcccctcctgttcttgagccagttgtctcttttgttttgggtcccacttaggattaaacggatgtaaggtattttcctgtgcctttatttcgtgtccattccttattgggaagcgagcgtgttaaccggcagaattagcatccgtgttggggcggtttttcctttcaaaacactggaaagtgatattggccaaccatgttaacctcaaatatgcaatcccagttgtgttggtttctcggcgactgggagtgttcatctcttccatggattggtgagccttgacaatgttttcagtctctatttggcgggttgcacaataccatacggatgcaaggggcaaatctcagtccggggaagacaattcgtccgacgcaacacggccgcggaacaacaaacccag

SEQ ID NO: 96958 - DNA, 956 bp, Homo Sapiens
ggctaggtagcgaggccgggtggggaatcggcacgagggcggagcggtgcggaggctctgctcggatcgaggtctgcagcgcagcttcgggagcatgagtgctgcagtgactgcagggaagctggcacgggcaccggccgaccctgggaaagccggggtccccggagttgcagctcccggagctccggcggcggctccaccggcgaaagagatcccggaggtcctagtggacccacgcagccggcggcgctatgtgcggggccgctttttgggcaagggcggctttgccaagtgcttcgagatctcggacgcggacaccaaggaggtgttcgcgggcaagattgtgcctaagtctctgctgctcaagccgcaccagagggagaagatgtccatggaaatatccattcaccgcagcctcgcccaccagcacgtcgtaggattccacggctttttcgaggacaacgacttcgtgttcgtggtgttggagctctgccgccggaggtctctcctggagctgcacaagaggaggaaagccctgactgagcctgaggcccgatactacctacggcaaattgtgcttggctgccagtacctgcaccgaaaccgagttattcatcgagacctcaagctgggcaaccttttcctgaatgaagatctggaggtgaaaataggggattttggactggcaaccaaagtcgaatatgacggggagaggaagaagaccctgtgtgggactcctaattacatagctcccgaggtgctgagcaagaaagggcacagttttcgaggtggatgtgtggtccattgggtgtatcatgtataccttgtttagtggggcaaaccaccttttgagacttcttgcctaaaagagacctactccggatcaagaagaatgattccgctattccaagcacataacccgggcgcttcctaatcagagatgttcgaaagatccg

SEQ ID NO: 96959 - DNA, 1052 bp, Homo Sapiens
  misc_feature (22)..(22): n is a, c, g, or t
  misc_feature (895)..(926): n is a, c, g, or t
  misc_feature (1018)..(1018): n is a, c, g, or t
aggctaggtacgaggcctgggntggtgaattcggcacgagggagcggtgcggaggctctgctcggatcgaggtctgcagcgcagcttcgggagcatgagtgctgcagtgactgcagggaagctggcacgggcaccggccgaccctgggaaagccggggtccccggagttgcagctcccggagctccggcggcggctccaccggcgaaagagatcccggaggtcctagtggacccacgcagccggcggcgctatgtgcggggccgctttttgggcaagggcggctttgccaagtgcttcgagatctcggacgcggacaccaaggaggtgttcgcgggcaagattgtgcctaagtctctgctgctcaagccgcaccagagggagaagatgtccatggaaatatccattcaccgcagcctcgcccaccagcacgtcgtaggattccacggctttttcgaggacaacgacttcgtgtacgtggtgttggagctctgccgccggaggtctctcctggagctgcacaagaggaggaaagccctgactgagcctgaggcccgatactacctacggcaaattgtgcttggctgccagtacctgcaccgaaaccgagttattcatcgagacctcaacgctgggcaaccttgtcctgaatgaagatctggaggtgaaaataggggatttggactggcaaccacagtcgaatatgacggggagaggaagaagaccctgtgtgggactccttaattacatagctccgaggtgctgagcaagaaagggcacagttcgaggtggctgtgtggtcatgggtgtctcatgtatactgttagtgggcgaaccactttgagactcttgcttaagaacctactcggtagagatgattcggatccagcacataannnnnnnnnnnnnnnnnnnnnnnnnnnnnnnntgccgccacctaagagtgtatgacagttcatggatacgccgccaacacggagacccaggtttgccgaggaccaagggaccactctaaggganctgccggaaacgtgaggggccacagaaaccaggg

SEQ ID NO: 96960 - DNA, 1069 bp, Homo Sapiens
actgtgccagtaactataacggtcctaaggtagcgaggcctgggtggcgaattcggcacgagggcgcagcttcgggagcatgagtgctgcagtgactgcagggaatgctggcacgggcaccggccgaccctgggaaagccggggtccccggagttgcagctcccggagctccggcggcggctccaccggcgaaagagatcccggaggtcctagtggacccacgcagccggcggcgctatgtgcggggccgctgttttgggcaagggcggctttgccaagtgcttcgagatctcggacgcggacaccaaggaggtgttcgcgggcaagattgtgcctaagtctctgctgctcaagccgcgaccagagggagaagatgtccatggaaatatccattcaccgcagcctcgacccaccagcacgtcgtaggattccacggcgtttttcgaggacaaacgacttcgggtacgatggtgtgggagctctgccgccggaggtctctcctggagctgcacaagaggaggaaagccctgactgagcctgaggcccgatactacctacggcaaattgtgcttggctgccagtacctgcaccgaaaccgagttattcatcgagacctcaagctgggcaaccttttcctgaactgacgatctggaggtgaacaatcggggatccgggactggcaacccaaagtcgacgtatgacggcgaacgaggcaagacgaccctgtgtggcgactcctaagtcctagctcccgacgtgctgaccacgacggggccacagtttcgcggctgcgatgtgtggaccattgaggtgtatccatgtataccctgctcacgctgggcaaaccaccttatgaggactacttgcctaacagagaacgacctcccggactcaagacgagcggagcacaaggagttccacaagacactgaacaccggcggcaggggtccgcggtccagacagacgctcagacgcaatcccactggcacgccaaccatgaccgcgagggtagcgcggaggtctaccccccggggatatcccagcgagcaccacacccgccggcacctcc

SEQ ID NO: 96961 - DNA, 849 bp, Homo Sapiens
aaaagcaggctggtacggtccggaatcccgggatatcgtcgacccacgcgtcgcaagagatgatatttatacattgcagatcaatcctgattctgcagttaatccggaacatttatcctatttccactttgttggacgaataatgggaatggctgtgtttcatggacattatattgatggtggcttcacattgcctttttataagcaattgcttgggaagtcaattaccttggatgacatggagttagtagatccggatcttcacaacagtttagtgtggatacttgagaatgatattacaggtgttttggaccataccttctgtgttgaacataatgcatatggtgaaattattcagcatgaacttaaaccaaatggcaaaagtatccctgttaatgaacaaaataaaaaagaatatgtcaggctctatgtgaactggagatttttacgaggcattgaggctcaattcttggctctgcagaaaggatttaatgaagtaattccacaacatctgctgaagacatttgatgagaaggagttagagctcattatttgtggacttggaaagatagatgttaatgactggaaggtaaacaccggttaaaacactgtacaccagacagcaacattgtcaaatggttctggaaagctgtggagtttttgtgatgaagagcgacgagcaagattgcttcagtttgtgacaggatcctctcgagtgcctctgagggcttcaaagcattgcaaggtgctgaggcccgagaatctttacataaaccagattgatgctgataaaaacctggcgaaagccacattgttcaatcgaatggattgcacctatgaagtatgaac

SEQ ID NO: 96962 - DNA, 930 bp, Homo Sapiens
ttacggctaggtacgaggcctgggtggtgaatcggcacgagggggaagtggccgtggtggttggccgcggtggagctagcaggcgggcgggcgggagcgggcgccggagtggagaaaggagccagcggtgggcagcgctgctgggatggcgcgggccgggccggcgtggctgctgctggcaatctgggtggtcctgccatcatggctgtcctctgcaaaggtctcctcgctcattgagagaatctctgaccccaaggacttgaaaaaactgctcagaacccggaataatgtactggtgctttactccaaatctgaggtggcagctgaaaatcatctcaggttactgtccacagtggcccaggcggtgaaaggacaagggaccatctgctgggtggactgtggtgatgcagagagtagaaaattgtgcaagaagatgaaagttgacctgagcccgaaggacaaaaaggttgaattattccattaccaggatggtgcatttcatactgaatataaccgagctgtgacatttaagtccatagtggcctttttgaaggatccaaaagggcccccactgtgggaggaagatcctggagccaaagatgttgtccaccttgacagtgaaaaggacttcagacggctcctgaagaaggaagagaagccgctcctgatcatgttttatgccccctggtgcagcatgtgcaagaggatgatgccgcatttccagaaggctgcgactcagctgcgaggccacgccgtgctggccgggatgaatgtctactcctctgaatttgaaaacatcaaggaggagtacagcgtgcgcggcttccccaccatctgctattttgagaaaggacggttcttgttccagtatgacaactatgggtccacagctgaggacattgtggagtggctgaagaatccgcagccgcc

SEQ ID NO: 96963 - DNA, 671 bp, Homo Sapiens
  misc_feature (339)..(351): n is a, c, g, or t
aattggtgaatatagaccaagctggtaaaaaaagcaggctggtacggtcggaattcccgggatatcgtcgacccacgcgtcgccggggatgagataagagtctggagacgggcatgggttcttggagagtggcatgagctggctctgccctgggagcccggtctgagggggacgttgttggagcccctagtgttgggggtggttatgggagggggtggggtgagggaaacgggagaatgaaggagaaaactgagccctagtttcaccgtgttcatttggaaggacgagccgggtcctcagggggaggttccaggactctgcccttggcgttgagggttnnnnnnnnnnnnncctcctcccttcctctcagcccccttccccaggggctgtgcttccatgctcctagcctcccaccttcgctcaggacatgttataacttaggctaaactgtgaaaattccggtggggatggcctgggccgagctctccaggcaggcggccctgcccccagccctgtccatccatttcaggggggagctgggcccttctccggctgtgtctggccacccagggcagtggctggggccagtggccttccagctttggcccctgcacctcttctcaatgcactttaataatgtaacatattactaataaacaagctattaattt

SEQ ID NO: 96964 - DNA, 681 bp, Homo Sapiens
gccaagtgaatgaagaccttgccagctacgtggaacaagccgatggtaagagcaacacgtttacgcataaccaacattatcaggaataagatcactgtgaacactgtagctgaaatggcataaatgaggagggcccgaagattgtcttcagctatctgaagctgctcaggagtaacagtttctttgggagaccttctttgctttgcatacagccaccatagtacacctgtgcctccaagtgaaccgagtatgaccagaatcgttaagatccacacaagtactcttgatatatacctgattatcaccatcaaaatcatggatagaactagtgataacaagcaaagtcccaatataatttctttgctggtcattactccactaatcagcctgtgtaagacactattgtcactgacaaaggtgatcagggcctctgcaaacttggcatagcaggaaatgttcacaggagcacagcgatggaagaatggaataggtgcactcgctggaactggtagtttagggcagagaacagaagattttggagatgtagtgtattcagaaggctttaggttgtagctacatagggctgaaccatttatctctgcaaacttctgaacatcactcagagttttcagttcttgccttggacacgctgctacacacagtagcgaacgggtaccgagc

SEQ ID NO: 96965 - DNA, 1665 bp, Homo Sapiens
  misc_feature (1004)..(1004): n is a, c, g, or t
agtagtccaacctgacagacatgcggtgtcggactaccttctacacagcacttgggcgtctcctcatggtggatttaggagaggatgaagatcagtatgagcagttcatgctgccactcacagcagcatttgaggctgtggcccagatgtttagcaccaatagtttcaacgagcaggaggcaaagcgaactctagttggcctagtaagagacctgagagggatcgctttcgctttcaatgccaagaccagcttcatgatgctctttgaatggatatatccatcctatatgccaattctccaacgggcaattgagctctggtaccatgatccagcctgtactacacctgtactcaagttgatggctgaattggttcataataggtcccagcgactccagtttgatgtctcttcccccaatggcatcttactcttccgagaaaccagcaagatgataacaatgtatggcaatcgcatcctgacactaggagaggtcccaaaggatcaggtctatgctctgaagctcaagggcatctccatctgcttctccatgctgaaggctgctctcagtgggagttacgtcaatttcggagtctttcgtctctatggagacgatgccctggacaatgctctgcagaccttcatcaagctgctcctctctattcctcacagtgatctcttggattaccccaagctcagccagtcttattattcactactggaagtcctgacccaggaccatatgaactttattgcaagcctggaacctcacgtcatcatgtatattctctcttccatttctgaaggacttactgcacttgacaccatggtatgcacaggctgctgctcctgcctggaccacattgtgacatacctcttcaagcagctgtcacgtagcaccaagaagaggaccacacccctgaaccaggagagcgaccgctttctgcacatcatgcagcagcatccagagatgatccagcagatgctgtccacggtgctgaacatncatcatctttgaagactgtaggaaccagtgggtctatgtcccgaccactacttggcttgatattgcttaatgaaaagtatttttctgacctaagaaacagtattgtgaacagccagccaccggagaagcagcaggccatgcacctgtgttttgagaacctgatggaaggcatcgagcgaaatcttcttacgaaaaacagagacaggttcacccagaacctgtcagcattccgtcgagaagtcaacgactcaatgaagaattccacttatggcgtgaatagcaatgacatgatgagctgacacctccttggactctacctgtacagagcagcgtccttcggttctggcccagaggggcgaacaattgcaaggagagggcctggctgatcctggctcttttctccagggtgtggggacaatgggcaaggtcaactagctgcttccccaggcaataggggtgtgagtccactcataaggtgccggcgctgctggtccgggggactggctgggacgggggggcggaatacgagatccaatggattcagctttctctgggccccatggggaaccattctttgcaacgcttttaattcatttttcacatgaacggcttgccatttacacaggggacatccatccactggcgtcaaaaattctgcaca

SEQ ID NO: 96966 - DNA, 677 bp, Homo Sapiens
  misc_feature (147)..(398): n is a, c, g, or t
  misc_feature (537)..(579): n is a, c, g, or t
tcagttccagccacagacacgtggctggaggacggaaatatctccaagggggcacagtatcagaggagcaggatggaaggggcttttctgcctgctacgggatcctttttaaagaaatgggtgtgaagccgggcacggtggctcatnnnnnnnnnnnnnnnnnnnnnnnnnnnnnnnnnnnnnnnnnnnnnnnnnnnnnnnnnnnnnnnnnnnnnnnnnnnnnnnnnnnnnnnnnnnnnnnnnnnnnnnnnnnnnnnnnnnnnnnnnnnnnnnnnnnnnnnnnnnnnnnnnnnnnnnnnnnnnnnnnnnnnnnnnnnnnnnnnnnnnnnnnnnnnnnnnnnnnnnnnnnnnnnnnnnnnnnnnnnnnnnnnnnnnnnnnnnnnnnnnnnnnnnnnnnnttctatcaaaaaagaaagaaagaaaggacaggacaggaaagggaaggggtgtggacagaactgggggcaaaaacaataaaagaaggaaggaaggaaagaaagaaatgggtatgggcagaattgggggcaaaaacaaatnnnnnnnnnnnnnnnnnnnnnnnnnnnnnnnnnnnnnnnnnnntaaatgggtgtgggcagaattgggggctttccccgagcaagggaaggggctgcggaggggcccatctgaggaagcagtaggtgtgtctcccctctgag

SEQ ID NO: 96967 - DNA, 986 bp, Homo Sapiens
  misc_feature (69)..(320): n is a, c, g, or t
  misc_feature (902)..(922): n is a, c, g, or t
gcccccagttctgtccacaccccttccctttcctgtcctgtcctttctttctttcttttttgataaaannnnnnnnnnnnnnnnnnnnnnnnnnnnnnnnnnnnnnnnnnnnnnnnnnnnnnnnnnnnnnnnnnnnnnnnnnnnnnnnnnnnnnnnnnnnnnnnnnnnnnnnnnnnnnnnnnnnnnnnnnnnnnnnnnnnnnnnnnnnnnnnnnnnnnnnnnnnnnnnnnnnnnnnnnnnnnnnnnnnnnnnnnnnnnnnnnnnnnnnnnnnnnnnnnnnnnnnnnnnnnnnnnnnnnnnnnnnnnnnnnnnnnnnnnnnatgagccaccgtgcccggcttcacacccatttctttaaaaaggatcccgtagcaggcagaaaagccccttccatcctgctcctctgatactgtgcccccttggagatatttccgtcctccacccacgtgtctgtggctggaactgcccagcctgctcctggccccctggaagcctccccacagctggtaatctggacttaaggattgctgggccaccgcctctctgcctaccaccattccatatttaagtggagcccctacgtagaaaggccccggggctttattttagtctccttttcagggatgtcgtgggcgggggagggggttcttggtgctacagccctctccccacccctaaagggacgccgacgctgtttgctgccttcaccacatattagtgcttgaccctggcaggggaccccatggaaaagatggggaagagcaaaatacatggagacgacgcaccctccaggatgctcgctgggattcccacgcccaccactgtcccccaccccatggctgggaggggcctctgaacggaacagtgtccccacagagcgaataaagccaaggttcttcccnnnnnnnnnnnnnnnnnnnnngaccgcgtatgcggccgcaagcttattccctttagtgagggtaattttagcttggcactgcccg

SEQ ID NO: 96968 - DNA, 880 bp, Homo Sapiens
ggccagtactattacggtcctaaggtagcgaggcctgggtggcgaattcggcacgaggacgaaatgtaacgaagagaagtacagtagtaagagtaacactgtagccgccaccggcaaggggtgcgcgctggggagcggacgctgcatcccctttctgctgcaggaacctctcatcagaccgcctgagggaagcggcgcccggagacccgccccggcccggtccacattctccccaggaagccggactctatggggcgggaccctgggggagcctgagccgagcccggagccagccccgaacccctgaacctccagccaggggcgccccgggagcagccagcccgtgggcgagccgcccgcccgccgagcagccatgagcgagacggtcatctgttccagccgggccactgtgatgctttatgatgatggcaacaagcgatggctccctgctggcacgggtccccaggccttcagccgcgtccagatctaccacaaccccacggccaattcctttcgcgtcgtgggccggaagatgcagcccgaccagcaggtggtcatcaactgtgccatcgtccggggtgtcaagtataaccaggccacccccaacttccatcagtggcgcgacgctcgccaggtctggggcctcaacttcggcagcaaggaggatgcggcccagtttgccgccggcatggccagtgccctagaggcgttggaaggagggggggccccctccaccccagcacttcccacctggtcggtcccgaacggccctccccggaggaggtggagcagcagaaaaggcagcagcccggcccgtcggagcacatagagcgccgggtctccaatgcaggaggccagctgctccccccgatgggggtca

SEQ ID NO: 96969 - DNA, 1173 bp, Homo Sapiens
  misc_feature (57)..(155): n is a, c, g, or t
ttcaccaggcaaagactagaggtgcaggccaccacaccagtctaatttatgtaattnnnnnnnnnnnnnnnnnnnnnnnnnnnnnnnnnnnnnnnnnnnnnnnnnnnnnnnnnnnnnnnnnnnnnnnnnnnnnnnnnnnnnnnnnnnnnnnnnnngtataaaccacaatgcccccgtttttactctttactgcatccttcccatcagtattaattcctcagaaatttagtacattcctccaccatttcaaaatgctcccagaactcacactagttggtacttaactacaaccttcaacctcaccatttaattttgatgtatgtttttggatttaccaacagtactttctttcatgactactttgatttagttaagaatgctcactgtacactgaatgttaattactcagctaattcacactgatttcctgtttaaaaatatgatcccctccaggccattcatgtgaagtcagggtacagctgatgccagctacagaatcactatgtttcaatatggaatatgaaaagtcctaacacataattgcaaatcattttctactatggtatacaaattttatcattacaaaatagtatcagcttttttcacttaaggaaaataatacatcttcattcaaatattcagtgcataaataattgccttaaattgagtctttgctgtggaatttgagagttttggaaatcaaaggcccttgtgaaacatttcctgttgccatttatttatagatagcaatagcttcaaatgagtgggaaagtctacttaggtgaagtggtaaatagtcactaagattgtataaatagcgcattgatgagttgcctaattgttttctccaacaataaccactggtccattggttcactacttactcaagaaagacatatactgagatggcttgaaatgtttaatgcatgtgaacgttatttttaccgtgttttggaaaaagatcttgatgttattgtcttcctttattttccacaattaagtgcatctaactgtgaattgtatatggaattacattattcagcatatacatatatttacctgctttgttcattctctgtattcaaaattaacagatcatgctgaaaaccactcaaacgattatattttttacattataagaagtaaaatatattattctgaataatgaaaaaa

SEQ ID NO: 96970 - DNA, 870 bp, Homo Sapiens
atgacagtttgtacaaaaagcaggctggtacggtccggaattccgggatatcgtcgacccacgcgtccgacaagatatttctgaattataaacattagatataataggtgtataaggagaagtcatcttacatactaattctataatcatttaagctatagtcaaagcgaaattatacaaatgcagaagctctctttctctacccaactcaccaaatcttggattcagaggcaaaagagaaaaggaaagcacaaaaagaattgcgaaagaggaaaagcagaatgggcaaagacagtgtaaggaaaatggaggtgtgggaaatgtggagcttcactgttgcaaagcatgctacacataaagtatgaatggctgcctgaggagccactgctctagaaggctggctattactgttatgagaacaagcaccgtaccccatccaccttgtgtgtttggtacgtttctttcttccctgtacttggagttgctgggatgctgctgatgacctctccacctgccacgttaagtccttccgacaaatcaactaaactggaaatgttttaggccgagttcatactccaggatggctaaccctctcttctaccatcttgtactagaccagaagaatctttccaaatattcagaaaacactactctgcatggttacaactctcatcttgggcatttataatgcctaatagaactgggccccaaacactgcatcctgtcactgtgtgcaaacctctttggttactccaacttgagtccataaaataaatacttcatgttctgtaaaatgaatagagtgactgcctttatcaattttatggaattaaaattgtagaacagaataaagcctgttgtattagaaaa

SEQ ID NO: 96971 - DNA, 505 bp, Homo Sapiens
ctgggagaacaagagccctgaggaagaagcagtaagaccaggcatgagaaaacccagaaagccagctcagttcccaagaaggctggcacatggggcctgagaattcttaaatggccattgtcactggtacttgctcagcctttccaggcccctctgatgagctctctaatcagcaggaccaaggtgtgaagtgggaatgaacatggatccatcccattggatggagaagaaaggtggacagcctgttcgtctctcatgtcagcctagggctgggaacagtttgtgaggacctatctgttgtacctgccaaaagttaattagtaactcaccgtagagagtgaataatcaggacaaacgtaatccaacatgccagtgtgggtaggacacagttccctaatcagcccttggcccccagatgcaggctcatcccctcccctctgagacctctctgggaatagcagacaagagaatgtcagggcagaaacctgctggactaggtttcgcg

SEQ ID NO: 96972 - DNA, 906 bp, Homo Sapiens
  misc_feature (650)..(651): n is a, c, g, or t
  misc_feature (654)..(655): n is a, c, g, or t
  misc_feature (657)..(657): n is a, c, g, or t
  misc_feature (660)..(660): n is a, c, g, or t
  misc_feature (668)..(669): n is a, c, g, or t
  misc_feature (674)..(674): n is a, c, g, or t
  misc_feature (694)..(702): n is a, c, g, or t
ggcttgtgacactataggacagtggggttaaaaaaagcaggctggtacggtccggatttcccgggatatcgtcgacccacgcgtcggtttaggttcctaagtaatagtgaccctttcacggcctggagcccgagtggaccaatcggaagcctaagtgacgatgaccctcgcatgtcctaggtccctgggtggacccatcaggaccccaagtgatagtgacccagtggtcttttagatcctcagtagaacagtccagaagcctgagagacagtggccccttgataatctgggtctcacgggaccagctaggggtccaggtttcagtcagtaaataagagtggtccacgtcctaaagacacctctcctttacaaagacttgtgatgctctggggcttctgtggccaagccccaccctttcctggtcatggtacccgtacagcgttgatggccacagctcgaaggggggctttcgtgtccccctgtgcggtcagtgttttcagtaccacctctctcccgtgcccacttggctatttacttatttatttattgtgtgccagtgatggtgggtgggggctgggccttccccgccacctccacccctgttgtgacctgtccttccgtacttaataaagtgcgcgtgggagtgttcnnccnncnccnaccccccnnccctnattgcaccctatccaacatnnnnnnnnntagtcatgactattttttcaccgtcccacccctgcaaacaaataacctctttgccggccgccttggcccccccgaaaagttttcttaaacctttcccttttgccggccggggccccaccaagggaaagggaaacttgggcccaaacttgttttcccatggggaaaccctcggcctaggacccaagggctgtgaatctccccccc

SEQ ID NO: 96973 - DNA, 1097 bp, Homo Sapiens
cggctaaggtacgaggcctgggtggtgaattcggcacgaggatgtggagagcatcgcagacttgacagaggggttggaggactgagcccactgcacctgcaggccacaggcccacccctccccactccctgatcccgtaggtggaggcgatgggtcacgagccatgttaagcacaaccggctccttggtccagttctgcaccggggtggggctgggacccggggaaggtttgagggcccttgcaaccccctcccagcagtggctgggcactctttgctgccccagaagctggtcccctatggattcatcttggcctgacccagccaggtggccttatttcttccctgtcacctcccctccttgaaatctgggccctggtgcctgctgaagattccctctatccctgagtacttagtcttctcccccttccctggggcttctagagctctctctgcccctcaggtcctggcccttgggtccttgtcaaccagaggtctagggaaccacaacccttattgtcctgggtggaccaatccaaaggctaagtgatagtgactcatcaatgttgggtcctgtggggtaccagtgttaggttcctaagtaatagtgaccctttcacgtcctggagcccgagtggaccaatcggaagcctaagtgacgatgaccctcgcatgtcctaggtccctgggtggacccatcaggaccccaagtgatagctgacccagtggtcttttagatcctcagtagaacagtccagaagcctgagagacagtggccccttgataatctgggtctcacgggaccagctaggggtccaggtttcagtcagtaaataagagtggtccagcgtcactaaagacaccgtctcctttagcagaagacttgtgatgctctggggcttctgtggccaagccccaccctttcctggtcatggtacccgtacagcgttgatggcgcacagctcgaaggggggctttcgtgtccccctgtgcggtcagtgttttcagtaccacctctctcccgtgcccacttggctatttacttatttatttattgtgtgccagtgatggtgggtgggggctggtacctccccgcac

SEQ ID NO: 96974 - DNA, 1287 bp, Homo Sapiens
gcatgtggacctaatagaacagtggtacaaaaagcggctggtacggtccggaattcccgggatatcgtcgacccacgcgtcgcccacgcgtcggtacaaacaaaagctatcattggtctaggatttgcctttattcagcatccaagtctaatgttcgagcaagaagtgaagaatctatataataatattttatctgataagaactcctcagtcaatttaaaaatacaagtgttaaaaaacctccagacctacctacaagaagaagatacacgtatgcagcaggcagatagagactggaagaaagttgcaaaacaggaagacttaaaagaaatgggtgatgtttcctcagggatgagtagttccatcatgcagctttatctcaaacaggtgcttgaggcattttttcacacccagtcaagtgtacgccactttgccctaaatgtcattgcattgactctaaatcaaggtcttattcatccagttcagtgtgtgccatatttaattgctatgggcacagacccagaacctgctatgcggaacaaggctgatcagcaacttgtggaaatagacaaaaaatatgctggattcattcatatgaaagcagtggctggtatgaagatgtcttaccaggtacaacaggcaatcaacacatgcctaaaagatcctgtaaggggtttcagacaagacgagtcctctagcgctttgtgttcacacctttactccatgatccgtggaaaccgccaaaaaagacgagcctttcttatttctttactcaacctctttgatgacacagcaaaaacagacgtgactatgctcttgtatatagcagacaatctagcctgttttccataccagacacaggaagagccgttgtttataatgcatcatatagacattacactctcagtttctggtagtaacctactgcagtcattcaaggagtctatggtaaaggacaaaaggaaagagagaaaatcatcacctagtaaggaaaatgagtcaagcgacagtgaagaagaagtttccaggcctcggaagtcacggaaacgtgtagattcagattcagattcagattcagaagacgatataaattcagtgatgaaatgtttgccagaaaattcagctcctttaatcgaatttgcaaatgtgtcccaggggtattttattacttctcatgttaaaacaacatttgaagaatctttgtggattttctgatagtaaaattcagaagtactctccatctgaatctgcaaaagtatatgataaaagcgataaaccggaaaaaaa

SEQ ID NO: 96975 - DNA, 1194 bp, Homo Sapiens
ccgggatgagcctgggggccctggcgagcctcccggtggcggagaccccggtgggggtagcgggggggtcccgggaggccgagggaagcaagacatcggggacattctgcagcagataatgaccatcaccgaccagagcctggacgaggcccaggccaagaaacacgccctaaactgccaccgaatgaagcctgctctctttagcgtcctgtgtgaaatcaaggagaaaactggcctcagcattcggagctcccaggaggaggagccggtggacccacagctgatgcgcttggacaacatgcttctggcagagggtgtggctgggcccgagaaagggggcggctcagcagcagcagctgcagccgctgcagcctctggtggtggtgtgtcccctgacaactccatcgaacactcggactatcgcagcaaacttgcccagatccgtcacatataccactcggagctggagaagtatgagcaggcatgtaatgagttcacgacccatgtcatgaacctgctgagggagcagagccgcaccaggcccgtggcccccaaagagatggaacgcatggtgagcatcatccatcgaaagttcagcgccatccagatgcagctgaagcagagcacctgcgaggctgtgatgatcctgcgctcccgtttcctggatgccagacgaaagcgccgtaacttcagcaaacaggccactgaggtcctaaatgagtatttctactcccacctgagtaacccatatcctaggtgaggaggccaaagaggagccttgccaagaagctgtggcatcaacgtggtctcaaggtctccaactgggttggcaacaagaggattcgctataagaaaaacatcggaaaggtcaacaacgaggccaacatctatggggcaagaaggacgggtaagaaccacaggggggccaagccggcacgagcgcccgaaaaagcgcgatcagtgggagggcacgacgggactcaaccccacgcaccggagacagtgtacctgtgcaggcagggacaaggagcacaccaacaagcccaagggactccaactcaagtgcacgggcagagatcactcgggagcacagcacagaacgaagcaggagaagagaacaccagagacaagacagagaagatacaacagcacacggcgggcaaccaacgacacagccctcaccgctatggaagg

SEQ ID NO: 96976 - DNA, 965 bp, Homo Sapiens
aataggacatatagaacaagttggttccaaaaagcaggctggtacggtccggaatcccgggatatcgtcgacccacgcgtcggcatagtttcctttctgcttctggtgcttcaatgttatatattggtctatatatttatgataaatcttttccattgtacaaaataaaattccatttcattgtgacctactcctttcataaatgccaatctgtgagaacttttgaatttgcatagcaacattgcatttggatgccatttgattgtaataaaactgtggcaccttaattttgaatggcagcatgatcatgtaatatctgtgctctaataacgatgtatatatgtatagtgaacatattgcttagtaacaaatgaaggacaagcatactacataatataatccatacaattctcttcagttagtgtaaactgcaaatactacagataattctgataataaaatgatatgcacgctgaatcctgctatggtcaccattctaatgtatgtagtatttcaaatttccttccttgtaactttcaaagaaagccatcttattcttgtaaaattttagatggtattatcacagatttaaaaaggttgtattacatattgtttaaactttgtaagtagaaatatatctgttataattatacaggctctgtggagaaattaaagttcaaaatatattaatttcgtaatcaacactataagaaggggggggcaggccttaaaagatcctcggggggcccaagcttaacgcgtacccaggtttctcgtgcaagtggtccctatgagtggggcggatttaaagcagggcctggcgcggttaaaacgtccgaactgggaaactgctactctggactttcgtcgaaggacctacttctgggcgggcactatggcacctcctcggaattaacgctcggactaaattagggttaggtgacacgcttgttcgtgaattgccg

SEQ ID NO: 96977 - DNA, 1136 bp, Homo Sapiens
  misc_feature (115)..(115): n is a, c, g, or t
tttagggcgccctcaacggggcgcgcatgcctaatggggatgtccgatgctcgctgtggaacggcccgcattttttgcttgggttattcccaaaagggcgctcaatagggggggngggttcttcccccttttttgcccctgaaccgtgtgaggaaggcaaagccggaatcctgggttgatgggtggggttcccctggtttttgctggtattgggaaggaaggtgcttcgaaaggggggattgtaaaggccagccatcccaagctttttttcccaggaggaggaaagcttttcctgctgggggttctgttccacctttgtgtggggaaacccgaggaatggaggggacagcaaaaggggtggccccagatctgggcttggcccccttgaggaagtcttaggggaactagatggtgctggggctggagaagtcagggacattgcctgccgggggaggtagagctggtgcctactgcagggagaggaggctggcagtgctggcctgggctggacccactgccataacagttgcctacttggggtccctgggtaggatggagtgggtggggtgccaggggctttggtgctttctggtgattgggaccctgatgccaagtgcccactttgcaaagaagaaaaagttaatgaccctgctcccttggctcctgtccatgcttgcctggcctcctagagttggaggaacaagccctctcctggcagaggcaggagagcaagtgctctcctatgatccaatacatcaggcgggagtggtgagtccgtcaggacaccactcctcgcagcatcaaggtccagtggggttgggtcagggcagtgagaaggggtggcaagaggtaccaagaagctctcaaccaggcaggggcacaaatgcactcaacacctccaaactaagagaccccaaagtctcaactccaggctcagggctgcccccgcacagacactaactctaaaatcccaccctgcctctctgcccaccccccaagggtgctcaggtgagcagctccctctgggctaaggccaaacaacaggagggttgaagtccaggacttccgacgcgtgggtcgacgatatcccgggattccgaccgtaccagctgcttttttcacactgttctatattc

SEQ ID NO: 96978 - DNA, 962 bp, Homo Sapiens
  misc_feature (74)..(187): n is a, c, g, or t
  misc_feature (217)..(328): n is a, c, g, or t
tgtaatatgaccagtggtaaaaaaagcaggctgtacggtccggatttcccgggatatcgtcgaaccacgcgtcnnnnnnnnnnnnnnnnnnnnnnnnnnnnnnnnnnnnnnnnnnnnnnnnnnnnnnnnnnnnnnnnnnnnnnnnnnnnnnnnnnnnnnnnnnnnnnnnnnnnnnnnnnnnnnnnnncactggcacaaaccaccatgcccagctaannnnnnnnnnnnnnnnnnnnnnnnnnnnnnnnnnnnnnnnnnnnnnnnnnnnnnnnnnnnnnnnnnnnnnnnnnnnnnnnnnnnnnnnnnnnnnnnnnnnnnnnnnnnnnnntgagccaccgcatccagccccacaccctcatttataccaattacctgcccagtaactgtggacttttgcttcctcacccctgctctgatctggaaggagagggattatgttatagcttgtcagcacagtcccaagttcaatatttctgcggcaaaaacttccttcaaaaaataaatgtacttcattgtattcaatgaattcaccttggaaatgcaccgcctcaacttgttcacatggcataaatgaaaggaattttatagtctcctaaatggcgtgtactgcaagacctcttgaacactttccagaggataggatatttaaagtcatgcccttggcgttgcctatggcacctttcccttctgaaagtctggttcctgcccagtgaaccttggctttgtgagccgagatgctgacctgtcttagggccaaggagggctgcaggtttcctcccctccatgaagagcccttatttgatcactgtttgagccctagcttcaatttgaaattcccaagctccagcccttcaaacaggacaggaggctggattcaccagtggattggcctctggtggtattgcacaaccaaatactgtgcctgcagaacccgagccttctaggaggacaacggaaattgt

SEQ ID NO: 96979 - DNA, 819 bp, Homo Sapiens
  misc_feature (727)..(727): n is a, c, g, or t
  misc_feature (754)..(754): n is a, c, g, or t
  misc_feature (778)..(778): n is a, c, g, or t
cctagggtttgggatgcagaccctcccccaacctcaggtgcatacctatatttcaaagcccatcttcagtcagagctcgccctgtagcctctctgtctgtgccctcccctcccttgctctctcccactagtcccttccctcttgggaatgtcaaagtgcaagatgcagaaacctgggcgaactacacagcctaaagaccggctctgctggcggcccaggaggttctcccaccccactccactccggggagtcaaaggccaggtcaggagaaggtcagggctgaggggctccctcagtcgactggtgaggccagctcagtgcaggaggctggggagaggctggagagtggaggacggacggatgctggctcatggatggacgggggcaggctgttcagcaggcaggtacagtgttcacagtgcaatggcttccttcatgaggggagcctctgcttggcctcctggagaagctctggcaggtgctggaaggaggaggggcagagtccagtgcttgatccccctcttggcatcacatggcaggtcaggcaggtcctgagggcagggctggcctcccctctgcgcctggcaaccagcacagggcacttaggtgagccgagggtgtagacccttcaggctgtcagtgcagaccagcaggtccagaggcctcctcttcccgtctctcaggctgcacacctttacgggaaatcaggccgacgctgtcccgcccnacgaacttcaggctcctctctctgganacaggtccatgcctgtccaggctnagataccttggcaccaggcaggccctctgggtgcagggttc

SEQ ID NO: 96980 - DNA, 1031 bp, Homo Sapiens
  misc_feature (579)..(684): n is a, c, g, or t
gtcgggatctcggtgtagctgtccgccgcgttcgtgtatgaacctcttgtctgctgtttggcttcctccagggtgcctgttgttcttagcttcggtttaggttcagtaggtgctgctgcccgcattttgggtgctgtctgcctcatgcccctttgtgctgtacgtgggtgcactgtggcctagtcgtaggtttcctgtttccgaccggtgtcagggaagttctctccgttatgttttcctggcctacgctttattgggtattgcctcgatggagtccgtacggacacctggtgcttcctatggaccatcccgtccggcgggagccgggggccattgttggaatactctggtgttgcttctgctggcgaggttcatgtgaggatggtgcctttgcttcaaggtttcagttaggttagttccttggtgacattcacgcatggtcggcgccgatatgtttgagtggtgttattgtgtggtggagctaatctcacgcgtgactctccatgtctgtctctcgtgtgtcatccattgcgcagattggaattaggtctccatgcttcgtgcactttctgtgttgcnnnnnnnnnnnnnnnnnnnnnnnnnnnnnnnnnnnnnnnnnnnnnnnnnnnnnnnnnnnnnnnnnnnnnnnnnnnnnnnnnnnnnnnnnnnnnnnnnnnnnnnnnngcaaacacagcttcttcaattgacattaaaacaactaacctttaccttatgactgagcactaaaaatcaaaagtattacatatgaaagtgagaataactacataaaatgtctattttcatcaaataagtctaatttagactccaatacagtattaacagctcaaactttgacggtgaacatccttttccaccctaatgcagtgtaggaagaatagcacacattaaagtttgttacgaaaatagagtttattaaaaacatccctacgacgcgtgggtcgacgatatcccgggaattccggaccgtaccagcctgctttttttaaacaagcttgttcatattccatgct

SEQ ID NO: 96981 - DNA, 1339 bp, Homo Sapiens
  misc_feature (627)..(640): n is a, c, g, or t
  misc_feature (797)..(846): n is a, c, g, or t
  misc_feature (880)..(888): n is a, c, g, or t
  misc_feature (949)..(1006): n is a, c, g, or t
  misc_feature (1242)..(1242): n is a, c, g, or t
tggtacggtccggtattcccgggatatcgtcgacccacgcgtcgggagtgcctccgactctgggggatcccagaccaggctcgtgtggctccttcttcctccgaccctaaatcgaagttctttgagctaatccaggcactgagattgacatcttcagctacaagcccacactgctcacctctaaaaccctggagaagatccgccctgtgtttgactaccgctgcatggtatctggcagtgagcagaagttcctcatcggcctggggaaatcccagatctacacatgggatggccgccagtcagaccgctggatcaagctagacctgaagacagagctgccccgggacactctgctatctgtggaaattgtgcatgagctgaaaggggaggggaaggcccagaggaagatcagtgccatccacatcctcgatgtccttgtgctgaatggcaccgacgttcgggagcagcactttaaccagcgaattcagcttgccgagaaatttgtgaaagccgtttccaagcctagtcggcccgacatgaatcccatcagggtgaaggaggtgtacagactggaagagatggacgaagatttttgccaggccggagacaaacatcacctagagcctnnnnnnnnnnnnnntaacctcacctacaaccgcccccatctccgcgactctgaccccctgggaccgcacatcgtccggaccggccaagagctccccaccatgaccactgccacccgctgccggaccgtaattcccttacccccctcacacaagagcgcgctcctctctacnnnnnnnnnnnnnnnnnnnnnnnnnnnnnnnnnnnnnnnnnnnnnnnnnnggtactctgataaccaacccctgacgcatcgctnnnnnnnnntgccgcccatcctcctcccaacacatctaaagcagcactacaccatccactacactgactnnnnnnnnnnnnnnnnnnnnnnnnnnnnnnnnnnnnnnnnnnnnnnnnnnnnnnnnnnagctcctcacactcgctcccctccgccgcccctcctccaatatccctaccctacgatgatgtggcatttgctctcctacctaccccccaccctctcactaccacccttcacctcctactatgaggcttaactcggggcatcactcgcggtggccccgccaccgccccaccccgtcaaccccacgccagccatccgcccgcacgctctgatcggtgtcgctcaccaggcgtgggagntgacgtgttggactcccgccgactccgcccccctctcgccccaaccacccctacattccgcagcactgacatcttgagtattctatgacttgttagc

SEQ ID NO: 96982 - DNA, 984 bp, Homo Sapiens
  misc_feature (165)..(211): n is a, c, g, or t
gcaatgtgaactatagaacaagttgttacaaaaagcaaggctggtacggtcggaatcccgggatatcgtcgacccacgcgtcgcaagagaatatcaaacaaagatttctggaagtatttgccaaccttctggttgagctgcaagaaaatatttatggtgagaacnnnnnnnnnnnnnnnnnnnnnnnnnnnnnnnnnnnnnnnnnnnnnnnactatgcttggtctgtaaaaatatgcaactgaactacattcagaaggaaatatgtctacatagaatattatatgaagttggtacataattctgatgaggaaaaaaaatcttgcaattctttaagccatattgtgtttttctgtgtgttttccctggatgaaaatatcagtattaagtagacagcatattattcaagtgtttagacttattaatatgttcttgtcctgtatttatacatatgtgtattttggaaagtattgccttttttaagggaagctataattcgatacatagtgaaaaagggaatggtgacccctttgtgcctcttccactgaggataacaaacagcattgtaatccattctcttgcaccttcttcttcttatcttgttattacggttttattaattttgtagagggacagggagtgggcaaggggaagaagcagcttatttgactaaccagccctctgtggtccaccagcgtcttggttgggggagggctctcaatcagcaggcccagagggaagaagaaggggggaaagctggctcgcgttcgggagtttgcatctgaacaagcctcctccagcatgtcttgactggaatgttacggagcctaacaagctcagattataaaatgaatatcctaagatattatcaccctaatgggcagccagataccgaggggggcgccccgaaggaaagccgcgggggaggggaacatggcaagcgggcccccaggggccctgttgggttaaaacagcggggggggccg

SEQ ID NO: 96983 - DNA, 969 bp, Homo Sapiens
gcatgtgaatatagaacagtatgtaaaaaagcaggtggtacggtcggaatcccgggatatcgtcgaccacgcgtcggctgaggtggctgtcgccggctccgagctgcggcttcccgggccgaccccccgatggaggccgaggccgcggacgctcccccgggcggggttgagtcggcgctcagctgcttctctttcaaccaggactgcacatccctagcaattggaactaaagccgggtataagctgttttctctgagttctgtggagcagctggatcaagtccacggaagcaatgaaatcccggacgtctacatcgtggagcgcctcttctccagcagcctggtggtggtagtcagtcacacaaaaccacggcagatgaacgtgtatcacttcaagaaaggcacagagatctgtaattacagctactccagcaacatcttgtccataaggctgaaccggcaaaggctgctggtttgcctagaagagtccatttatattcacaacattaaagacatgaagctgttgaagaccctcctggatattcctgcaaacccaacaggtctatgtgctctctctatcaaccattccaattcttacctggcctatcctggaagcctgacttcaggggagattgtgctttatgatggaaactccctgaaaacagtctgcactattgctgcccatgagggaacactagctgccatcaccttcaatgcctcaggctccaaactagcaagtgcgtctgaaaaaggcacagtcatccgggtgttctctgtccctgatgggcaaaagctctatgagttccggagagggatgaaaaggtatgtgacaatcagctctctagtgttcagtatggattcacaatttcctctgcgcctccagtaaccaccgagacggtacacatcttcaagctggaacaggtcaccaacagtcgaccagaagagccttcgacctggagtggctacatgg

SEQ ID NO: 96984 - DNA, 1047 bp, Homo Sapiens
ccgcgttggtgaatatagacagtggtaaaaaaagcaggctggtaccggtccggaattcccgggatatcgtcgaccacgcgtcggtccccgccgtgcgcccttcgccgctgagctcgcagcctccggcgcccacctccacctccagtgtcccgcctcgggccgtcgccctccagcggctcgcgagcgtgggagacgtacctgggcaggcactgtccagcccaggcccaggcacagccgtgaggggcgaggcacggggacatcctggcggccaccatggtggccacgtgcctgcaggtggtgggcttcgtcacgagcttcgtgggctggatcggggtcatcgtgaccacctccaccaatgactgggtggtgacctgcggctacaccatccccacctgccgcaagctggatgagctgggctccaaggggctgtgggccgactgcgtcatggccacggggctgtaccactgcaagcccctggtggacatcctcatcctgccgggctacgtgcaggcctgccgcgccctgatgattgctgcctcggtcctgggtctgccggccattttactgctgctgactgttcttccctgcatccggatgggccaggagcccggtgtggctaagtacaggcgggcccagctggctggtgtttgctcattctgctggctctctgcgcccttgttgccaccatctggttccctgtgtgcgcccaccgtgagaccaccatcgtgagctttggctactccctgtatgcaggctggattggtgctgtgctgtgcctcgtgggtggctgtgtcatcctctgctgcgctggagatgcccaggccttgctgaaaaccgtttctactacactgcgggctctagctccccgactcatgcaaagagtgcccacgtataagagggctggccggctgcccacagaggtgctgtaagattctgggcccaaggcctaggttggtcgtcaccagtgtggggagcccattcttcggcagggtcaaaggcaaaggtctaaaaggatctgtttggctttggagtttatttcccattcca

SEQ ID NO: 96985 - DNA, 647 bp, Homo Sapiens
gggtagtgtctatacacatgggaggggtcatgcctcctctcactcgtcaaacgtacccatgtccagggtcagcgacagtttcctctgagatcatggacggatgcagttgggtggtagcagcaagagaatcactgtcttggtaacaaacaagagaaattgtgagtttctaatttattccctcttgagcctattttcagaaaaatgaaatcaaatgggcttcatggctttttcttgacttctttaccttcttttgacatggctggtcatgggacttcacacccgcaagactgtttctccccctctttctttctcatagccattttaatttaagtgatgatatgtatgttcacatttgtctggggacagtcctagtttttgctcattgtcccggagggattatatgtaagtttccctttcactttccaaactgactcagtttggatcataaattatctaggcacaccctgttactagtgacgtttggcactcaagaatggggcagtcctcagtgaagaaaaaggcacatggctcagggaactgcaattagactcccagccatcatatcttgcccgacgcgtggtcgacgatatcccgggaattccgaccgtaccagcctgctttttgacactgtttatagtcctaattca

SEQ ID NO: 96986 - DNA, 927 bp, Homo Sapiens
ggtgacactatagaacacgtgtgtaaaaaaagcaggctggtacggtccggaatcccgggatatcgtcgacccacgcagtcggggtcaaaggagacccggtctccgaggctcatggcgatgctggtcctagtacccggacgagttatgcggcctctgggtggccaactttggcgcttcttgcctcgcggactcgagttttggggcccagccgaggggactgcgagagtcttgctgaggcagttctgcgcgcggcaagcggaggcgtggcgtgcctcggggcgccctggctattgcctgggaacccggcccctcagcactgcgaggccgccacccccgtggtcgcagaagggccccggagactccacgcgcccctcgaagcccgggcctgtttcctggaagtctttagcaatcacatttgctattggaggagctttactggctggaatgaagcacgtcaagaaagaaaaggcagagaagttagagaaggaacggcagcgacacatcggcaagcctttacttgggggaccgttttccctcacaactcatactggggagcgtaaaactgacaaggactacttgggtcagtggttattgatttattttggcttcactcattgccctgatgtctgtccagaagaactagaaaagatgattcaagtcgtggatgaaatagatagcattacaactctgccagatctaactccacttttcatcagcattgacccagagagggacacaaaagaagccatcgcaaattatgtgacaagaattttctcccaaactggttggcttgactggcacgagagaagagggtcgatcaagtggccagaagcatacagagtggtattaccagccctgtgcccaaggacgaagattgaagactacataagtgggtcacacaataataatgtacttgaatgggagcaa

SEQ ID NO: 96987 - DNA, 1033 bp, Homo Sapiens
aaaaagcaggctggtacgcgtcggaattcccgggatatcgtcgacccacgcgtcgctcgcccggctcgcccgctttcgcacccagttcacgcgccacagctatgtgtccccgagccgcgcgggcgcccgcgacgctactcctcgccctgggcgcggtgctgtggcctgcggctggcgcctgggagcttacgattttgcacaccaacgacgtgcacagccggctggagcagaccagcgaggactccagcaagtgcgtcaacgccagccgctgcatgggtggcgtggctcggctcttcaccaaggttcagcagatccgccgcgccgaacccaacgtgctgctgctggacgccggcgaccagtaccagggcactatctggttcaccgtgtacaagggcgccgaggtggcgcacttcatgaacgccctgcgctacgatgccatggcactgggaaatcatgaatttgataatggtgtggaaggactgatcgagccactcctcaaagaggccaaatttccaattctgagtgcaaacattaaagcaaaggggccactagcatctcaaatatcaggactttatttgccatataaagttcttcctgttggtgatgaagttgtgggaatcgttggatacacttccaaagaaaccccttttctctcaaatccagggacaaatttagtgtttgaagatgaaatcactgcattacaacctgaagtagataagttaaaaactctaaatgtgaacaaaattattgcactgggacattcgggttttgaaatggataaactcatcgctcagaaagtgagggggtgtggacgtccttggtgggaggacactccaacacatttctttacacaggcaatccacccttcaaaagaggtgcctgcctgggaagtacccaattcatagtcactttcctgatgatggggcggaaaggtttcctgttagtccaggccctaatgctttttgggcaaataacctaggcctatcctggaaggatccgaggtttggatggaaagaagggagaaccgtcattc

SEQ ID NO: 96988 - DNA, 1028 bp, Homo Sapiens
ccaaggtagcgaggcctgggtggcgaattcggcacgaggaaacttcccagcctccagtgccccaaggggaggcagaagaagacagtcaaggaaaagagggcccaagtggatcaggggactctcagctgagtgcttcctctagatcagaaagtggacggatgaaaaaaagtgataataaaatgggcataaccccgcttagaaattatcaccccattgtagttcccggactggggcgttctctaggatttctgcccaaaatgcctcgcctgcgggtggtccacatgtttctgtggtacctcatctacgggcaccctgccagcaacaccgtggagaagccaagcttcatcagtgaacggagaacgataaagcaggagtcaggcagggcaggcgtccggccgtcctcctctggaagtgcctgggaggcctgctctgaagccccatctaaaggcagccaagatggtgtcacctgggaggctgaagtggagcttgccacggagacagtgtatgtcgacgatgcctcgtggatgcgctacatccccccaatcccagtccacagggacttcggctttggctgggctctcgtcagcgacatcctcctctgccttcccctctccatcttcatccagattgtgcaagtcagctacaaggtggacaacctggaggaatttctgaacgacccgctgaagaagcacacgctgatccgctttctccccaggcccattcggcagcagcttctgtacaagaggcgttacattttttcggtggtggagaaccttcagaggctgtgctacatgggggctgctacagtttggtcccacggaaaaagtttcaagataaagatcaggtctttatcttcttgaaagaaaaatgcagtcatttggtgacactaccatctgcgaacccacattacaaccctggccccgcagcaacccggcccttcgagaaaccgccttctatgtcctgaaacttcaatgcagggatgtgggaaaaactaactgggtttggacctggccaggggcgtccttgcc

SEQ ID NO: 96989 - DNA, 524 bp, Homo Sapiens
tataatggactatggggacttgcaaggggaagcttgagagtggggtgagggataaaagactacatattgggtacagtgtacactgctccagtgatgggtgcactaaaatctcaaaattcaccactaaagaatgtatccatgtaaccaaaaaccacctgtacccccaaaactattgaaatcttaaaatagtaataattaacaaagtaaaacaagatcacaccctggaacaattggaggattgcttgctgccctgcatcttaaggcgtattctagcagcaaagcttgtgatgcactgacttggggcaagtaaaactgatgctgaggacaaagggagaagatgttcctcgcccagggaaatgaaaacttttcttattcaccttgcttgtgcttaaacacttatgttcatctagtgtagaatacatggctacttgtttgtaatttttttattggtggaattaaagtaatttttccttatctttgaacttttatttagagaacttaaataaagctcttctgtctccttt

SEQ ID NO: 96990 - DNA, 566 bp, Homo Sapiens
tggcggcaaaacctctcgagtgagcccctgcccgagtgccgcgggggagaggccgcgagcgggaccgagaagtgggctgggagcagaggtcgcggaggtggcgagcgaggccggggcccaggcggggacctgctggtgtccgtggagtggcttgcactccagggtcagggtgccggtgtattgagggggcccggtgttgccttattccagcacggctactttcctcttcactctgatgaggggagctttatctgctttcaaaatggagcacgtcgcactggagtttcgtgccctctcgttaacctgtcaggagccacagggctccataaaacggaatcagtgtctcaatatacatgacctatgttcatagcaatgttcagccatttgggtttgaatatattctcattttagcctagacccgtttggagctatctgccttgttcttttctgtgtggaaggttctgtctcttctgctgatttccagtttctccccatgttccctgtgtttttttatcctggcttttcctagttttttctttcttacctgctccaattgtttgctttgg

SEQ ID NO: 96991 - DNA, 889 bp, Homo Sapiens
ttaggtgaatataaacagttgttcaaaaagcaggctggtccggtcggatattccgggatatcgtcgaccacgcgtcggcggcgctcctgaggagactgctgcagcgcgagaggccttcggcggctctggccgccccgtaggacggcgcgaggccaacctgggcactgatgccggggttgcggtgcgagtgcggttcgctcccagccccacaggcttcttgcacctgggtggcctccgcactgccttgtacaactacatctttgctaagaagtaccaggggagcttcatcctgaggctagaggacacagatcagactcgcgttgtgcctggggcagcagagaatattgaggacatgctggagtgggcaggcatcccgcctgatgagagcccccgccggggcggtcctgctgggccctaccagcaatctcagcggttggagctgtatgcccaggccacagaagcgctgctgaagaccggagctgcttacccctgtttctgctcaccccagcggctggagctcctgaagaaggaggccttgcggaaccaccagacgccccggtatgacaatcggtgcaggaacatgagccaggagcaggtggcccagaagctggccaaggaccccaagcctgcgatccgcttccgcctggagcaggtggtgccagcttccaggacctggtgtatggctggaataggcatgaagtggccagcgtggagggagacccagtcatcatcaagagcgacgggttccccacataccacctggctgcgtgtggacgacacacatgggcatcagcacgtgctggaggctctgagtggtcgtctccactgccaagacctgtcctctacacaggccctgggtgcagcaacccattcgccactgccctgtcta

SEQ ID NO: 96992 - DNA, 655 bp, Homo Sapiens
  misc_feature (355)..(358): n is a, c, g, or t
  misc_feature (562)..(573): n is a, c, g, or t
catgtacctatgaaccagcttgtacaaaaagcaggctggtaccggtccggaatcccgggatatcgtcgacccacgcgtcggctagattcttacaaatcttttaagagggctgtaacagttgctgctagtattagggttccacatcattctaatgtatagtttcaagtcttaatagacaatctgaattccactacatttcttttggctccaacattccttttagcttgaccagtctaatttaaaatgtgtttgttggaggtcattaacgttacttgtacaatgctgtcactgtgtgacatccatatgaattttggtatatatcaatcaatcaatcaatcacattgcattcaatcannnnatcagctgtgattgattgattatgcttagaaatactatagtaactagatgcagtgtgaattttttccattaacaaacaaacaagtcagtggcttaaatgtgattatggtcctgcaaggtgattcttgctaaaatatctaaacttttgttttgttttaactgaatcattttttaacttaaaaagctggaaaatatcaaatgctgnnnnnnnnnnnncatggtcaacagtggtgtgtcattttatgtatgttcctaatgcttatggaactcctccaaaataaagttactcaaagagagc

SEQ ID NO: 96993 - DNA, 976 bp, Homo Sapiens
tagtgatatgaacaagtgttgttacaaaaagcaggctggtacggccggaatcccgggatatcgtcgacccacgcgtcgctctgccagcacggagccatactactgcctctcagacttcatcgctcccttgcattctggcatccgtgactacctgggcctgtttgccgttgcctgctttggggtagaagagctgagcaaggcctatgaggatgatggtgacgactacagcagcatcatggtcaaggcgctgggggaccggctggcagaggcctttgcagaagagctccatgaaagagttcgccgagaactgtgggcctactgtggcagtgagcagctggacgtcgcagacctgcgaaggctgcggtacaagggcatccgcccggctcctggctaccccagccagcccgaccacaccgagaagctcaccatgtggagacttgcagacatcgagcagtctacaggcattaggttaacagaatcattagcaatggcacctgcttcagcagtctcaggcctctacttctccaatttgaagtccaaatattttgctgtggggaagatttccaaggatcaggttgaggattatgcattgaggaagaacatatctgtggctgaggttgagaaatggcttggacccattttgggatatgatacagactaacttttctcccccggccctcctcatcctggaggacctcaggaaataacctagggtgctttcaaaataccacacacaaaccgtggggacttggcctgacatcccagactagcctcccgaccaacacgggcccctcctaacagccggtcccccacggccgtcacaaccccagccatcgcccccccgaccagcagcacccctccgggcccggccccgtcagggcacccacacaccgcccctccctcccaccgcaccctcccgcgtcccggcagcagccaaccaccccacaacagcccgcaacaccccgccaaccgagca

SEQ ID NO: 96994 - DNA, 804 bp, Homo Sapiens
cgatgtaggtaactatgaccaggtgttacaaaaagcggctggtacggtcggatttcccgggatatcgtcgacccacgcgtcgggggtgaagcggcccaggtgaggctcgccatggccaaacagctgcaggcccgaaagctagacgggatcgactacaacccctgggtggagtttgggaaactggccagtgagcatgacgtcgtgaacttgggccagggcttcccggatttcccaccaccaaactttgccggggaagcctttcagcacgctgtcagtggagacttcatgcttaaccagtacaccaagacatttggttacccaccactgacgaagatcctggcaagtttcttggggagctgctgggtcaggagatagacccgctcaggaatgtgctggtgactgttggtggctatggggccctgttcacagccttccaggccctggtggacgaaggagacgaggtcatcatcatcgaacccttttttgactgctacgagcccatgacaatgatggcagggggtcgtcctgtgtttgtgtccctgaagccgggtcccatccagaatggagaactgggttccagcagcaactggcagctggaccccatggagctggccggcaaattcacatcacgcaccaaagccctggtcctcaaacccccaaaaccccctgggcaaaggtgttctccagggaagagctggagctggtggccagctttgccagcagcatgacgtggtgtgtatcactgatgaagtctaccagtggatggtctaccgacgggcaccagcacatcagattggcagctcc

SEQ ID NO: 96995 - DNA, 1161 bp, Homo Sapiens
acacaaccacggcatgtgaatatagacccgtgttttaaaaaagcaggctggtaccgctccggattcccgggatatcgtcgacccacgcgtccgatggcgtctcccacagacgggacagatcgtggaagcatctttgctaagttttgaaaaacttgaccgtgcctcaccagatctttggccagaacaattaccaggtgttgctgaatttgcagcttccttcaaaagtcctattactagttctccacccaaatggatggctgagatagaacgtgatgacatcgacatgttgaaagaactggggagtctcaccacggctaatttgatggacgaaggttcgaggcctacagaacctagcctatcagctggggctggatgagtccagagagatgacacgggggaacattcctcaatattctagagaagcccaagcaagtagcagctgcttgcggacaggatgtcctggggtccgaacaccaagctcccttcccggtgcacctctaacaatgcacacctcactgcttgcttgcggagcaggccagcagggctgtacctccaggactgccctactcccctgctcctggccactctacacgtctgaggacattcagcagcaacgagcaacgcaatctgctctacccaaggatcattgcagtcactcaatcaactttcagacttgaaccttcttagcctcggatatcggccactagctgcaggcctatcaaaccttacaaggatcgcaactcctgcatctctccatctctgcgaacgtgattcaggagaccccaagatccttaccgcacgcattcgactcagccatggcaatcactcgcgacccgacgacggatacatcccacagcattggcctggaactccatagcaaacggccaccatgttcaggaaacccgaaaccagattgcattcggaaccctatccctgcgaccgtacatggtgaacacctccggatgctaatcaggttcccgcgatccccctgtacgcaacccgaacatgtcgcgcaagagcatatcggtgtcaaagattcatacccacagagcgccacagagacactatgagatgcagccacaccaatcagacactcgacaagcaccagcaccggggaaaccactacacgccactcgggtacaagaagaacgaacgcttcca

SEQ ID NO: 96996 - DNA, 1519 bp, Homo Sapiens
ggctgcggtgccgcgggactgtgcagacgtgtgaaccgtgtgagaatccctaaggcggggaagcgcgatcgtcacgtgacagtgcgagaaccccggcgcggccttgtacctttgcattgcagactgtaattaaagaatgccatctcgtcatactgtcgctgaagagccaaaccttagatgcagaaacagatgtgttatgtgcagtcctttacagcaatcacaacagaatgggccgccacaaaccccatttggccctcatgacagggttgagcaagtgtttaaagcgttctgcaaaaataccatgaattctgcgagggctcaacttcaagacctgttacgaggtcgtcatatctgcccaactgaagaatcatgcgccttaaactaccaagagtcatgtgtatgtccccgagtcgagccaggtgggtgcgcagttgggtgtcgtagtgaagcgtttattgcgagacgcctgacaagttctgttgactccgccttgttgtgactgcttgctcgcaaaacctttatctatcttgacgtgtcgacaacatctagaggattgcaacgagttgcacttattttaaaccttgtgatggttgggctggtgagcaggttatgggttctctataaaggtgtcttaaaaaggttgattttgttatatgagcctttgtttggattgcttcaagaggtcgctaggattcaaccaatgccttacttcaaagattttacctttccttctgatatcactgaatttttaggacagccatattttgaagcctttaagaaaaaaatgcctatagcttttgcagctaaaggaataaataaattgctaaataaactgtttttaataaatgagcagtcaccaagagccagtgaagaaaccttgcttggaatttcaaaaaaagctaaacaaatgaagatcaatgtacagaataatgtggatcttggacagccagtaaagaataagagagtcttcaaagaagagtcatcagaatttgatgtgagggctttctgcaaccagctgaaacacaaagctactcaggagaccagttttgattttaaatgttctcaatccagactaaagacaaccaagtattcttctcagaaagtgataggaactcctcatgccaaaagtattgtgcaaagattccgagaggctgagtccttcacacaactttctgaagaaatccagattgcagttgtatggtgcaggagcaaaaactcagtccagcatttttctgggtaacagatttcttaaaagcacggttaacatctgagctcagtacagttggcaagaatagagtgctaaacgtttatttgcaccccttcttcgggtccgttccaattcaagctctctggaagaggaaattccgctaactttcgggcaccaggagccggaagtgggcgatctagggaaaacgtccagaggaaaggtcgacaggagggcacggggggaagaccaaaagtaggggagggcaaaaaaacaacgaaatggggaaacaactgtttgtgcgtactcattcca

SEQ ID NO: 96997 - DNA, 1001 bp, Homo Sapiens
caccacccaccccccagcatagtacactatagacccgctgtttacaaacaagcacgctggtaccggtccggtactcccgggcatatcgtcgacccacgcgctcggcttgacgggagaagagaccagcgacatggtcgtgggggagcattcaggatggcgacttcagctgggggtcatgctgagcaccaacaggaactattccagtgaagagcaagtgctgcccgacccaggaccctgtgccaggctagcagccctccagctccctccagagaggaaacctctgtctggctgagggtgggactagctgggatgtctcactccagttgctcaggttcacccagtgaagctcctccgtggagtggccagcctgattctagccctgtcctctctggcagcacatgccacacctgcctgggccttctgcaccctgatgcttgatgagcccctgcctcctcaatgtttctcaaagacagacccccctgaggccagcttgaatgtgaagactgctgaagttagctggcttcacttgagctgcagaaaaggtggctgggatggcccaggtgcacccagaggccccagccctttggctgcctttgggttgtgacttgggttgtctctgaggccctgccagagctgggcctgcgggtggtgggcggtccgaactcgggcagtcagtgctccgcagcctcagcactgcatcccagacccagtgtcctcagagggaagagccagctccctgcctcatggaaccaggagtcccaaaaagtcaggagctggaggctctgaaaggagcagggattccatagtgcgtgaagcctgaataagagccctctggcggagaccacaggcacaacggtttccatacccgcttccagtaattgaccgggtccaggctccagcgccagcggcagactggttgacagactcattggacacgccagcttgaccagggcagccatgatcggtgaccatgcaatagccgcaccacgcctttcacatcc

SEQ ID NO: 96998 - DNA, 1192 bp, Homo Sapiens
ggtctgcttgttccggctgggtagcaccctgcatgcgtttgctgtgcacgcgcaggctccgtggacttgcgcacacgttttcgttatatccaggggcacgtgtgtacgccgggcacacgccttgtcgcccgaacgggttgccaatgcattcaggtttgggccgcctctcctctctgggagcctttccccggtgcacacccctggtcccctgcgggacccagttctgctggcttggtgcacgggcctgtgtaccgcctcctgtctccggaccccgttttgtgagctccagttcatccgcaagcctttgctgttctgagtcccgctccgaggacagaggcttgtaggaacatggctaccctcctgcagactgctgacactggccttggtctgcgctagggagagtgccaagtcctgggccttctccctccactcaatctgcctggcttctgtctgtctcagggctgcctgtagccgctccagctcccgctgcagcctgggctactctgatgaaggccccttatctcctcctcttctctctcttgccccagattctgcttctcttggatcatattctcttggaccctctgggccagagacttctccagcagctgctcccgttcctgctgatgtctcagctcttcatccctctgggcaagtgcctgctgcagctgctgcacatcctcctggtatcggagatcctggtcctggatctcaccttcttgtatcctcagagcctcctccagctgccgactgtgtagcctggcaggcatccagggaggcattgcagggttgcagtgctggcctccagactgcggctcaattctgcctgcttcgaggagatgctgctctttcccctgcagggcagcatgagccttgccaagggcctcctagcagagccctacagcacctgggacccagggcatgcctcctcctgatgtccgggaggactgactttctgcccgcagagtcttccagctcctggtcccgttccttgagcactgcctgggcctgcagccagtctgtcactgtcagggcctggtttccacctcatgctcctgtgcctgctcagcacactgtctgctggagggccaacagagctctctcctagttcctcgagactcagcccataggtatccccctcgtgccgaattcgccacccaggcctcgctaccttaaaccgtaggagtactgc

SEQ ID NO: 96999 - DNA, 994 bp, Homo Sapiens
  misc_feature (254)..(293): n is a, c, g, or t
ccagttaactttaacggtccttaaggtagcgaggcctgggtggcgaattccggcacgagggtcgcgcgctccccccaggtgccatggcctcccggctcctgcaccggctgcggcacgccttggccggcgacggccccggggaggcggcggccagtccagaggccgagcagtttccggagagctcagagctggaggacgacgacgccgagggcctgtcctcccgactcagcggcaccctcagcttcaccagcgcnnnnnnnnnnnnnnnnnnnnnnnnnnnnnnnnnnnnnnnngctggccctgaccagctgcccctcggggatgggacgtcaggagaagacgcagaacggagccccccacctgatgggcagtggggcagtcagctcctggcgcggcagctgcaggatttctggaagaagtcccggaacaccttggcaccccagcggctgctcttcgaagtgaccagcgctaacgttgtcaaggacccgccctccaactctacaccctcaccgtgatcggcccaggaccgcagattgccagccagcccagatctctcgccgttactcggactttgagcggtgcaccgaaactgcagcggcaattccggggcccaatggctgcatctccttccccccgtaagcggtgcgcggaatttactgcagagacattgcccgccgttacggggcctttgagcagtttttgggtcacctgcagggcagtgcctgagcttgcgccatgcccggacctgcaggacttcttcgtgttgcggagtgctgggtgacagagcttcactgtactggctctatcgtgaggtctggcatctgggccattgctggaggtgaagccaggtggaccctcttggcagaccggccctgtgacctggtgggtggctgttgcccaggagtgagactcgagaggccggttttgagaagctcttttggggaagcccttgggggctttgggcatgggttgggggcgcaaacagaggcactgg

SEQ ID NO: 97000 - DNA, 970 bp, Homo Sapiens
ggcttgtacattgacaggtgtacaaaaagcaggcggtacggtcggaatcccgggatatcgtcgacccacgcgtcgccacgcgtcgcgataatggtggtgtgaaaatcaatcatcccagcttttctgacatatctaaattttgaataattaatttccacttccaaaaaattcaaatgttttctcaaagcagtcactacttatttgcattattcctgcatattcagtgaatgtgaggtcatatttggtatgtattagaagtagtgttggtcactggtcttgcctctttgaacattatttttatttgtaaaatgagggagttggtttgttatgatgggaaatgagtcagttttcagggtcctgagaaaattgcttcattcatggctgtgtttgagataactaaagtaaattttttttcaggtatttggtgtcatgttttggagttaatatttagtgcttatataattttaagttattacataatttttattggtatatatttgataggtactaggtattggattctcacacaaaccagtagaatggtattctctcttaatatgtgattgcctgtaatggccaggtagatataccttaaagtaatatgaaaggttttatatgtatattaaaatgtttgtacttttaaatctgtaaaggttatctggaatctttactgtgttaacttcagaattatatgggcattatgactttttcattgtacaaaaaattattcataacatgttagaaaacagatgttccttgacttacaatagggttatgttccagtagacccattgtaaattgaaaataccgtaagttgaaaatacatttaatacgcctaacctactgaacatcccagcttagcctagcctatcttaaatgtgttctgaacacttaacgttggcctttagctgggcaaatcatctaatacaaacctattttataatgaagtgtttaatatctcaaataagag

SEQ ID NO: 97001 - DNA, 1333 bp, Homo Sapiens
gctggacggtcggaatcccgggatatcgtcgaccacgcgtcggagtgaggcccggggccaggtgtctgggccttgggggcactgtcatctggagggcctggcactcagctccctgaggggcagcaagggcccccagccggatgcccagggcggctgccagaactcaagggaaatatccgtgtgctgtgtcggctgaggccagggacatcttctagccttgtgagtgtggagcctggcccagggggcaccgtcaccacctgctaccgggggcgccatcgtcgattccgcctagactgggtcttccctccagacgccagccaggaggaggtcttcagagagctggaacctgcggtgctgtcctgcctccgaggctacagcgtctgcatcttcacctatggccagacaggcaccgggaagacctacagcatggagggccctcctgaggaccccggcatagttcctagggcgctgcagtcgctgttccgggagatgggggccggccggcagcaccgggtgacactcagcatggtggagatctacaatgaggctgtcagggacctccttgctccagggcctcccgagcgcctggccgtgaggcagggcccagaaggccagggcgggatccaggtggctggcctcacccactgggacgtgcccaacctggagacattgcaccagatgctgaaactggggaggagcaaccgggccaccgccgccaccgccatgaaccagcgcagctcccgctcgcatgccctggtcacgctgacgctgcgcgcggcgtctccaccgcgcgctccaggcaccgcaggcacgctgcacctggtggacctggcgggatccgaacgcgcacggaaggcaggggcggccggcccgccgcggggagacccagacggcgcccggcgcctgcgggaggcccagaccataaaccgctcgctgctggcgctaggaggcgtgatggccgcactgcgggcccaccggccgcacgtgcccttccgcgactcgcagctcacgcgactgctgcagccggcgctgggcccaggcaccaccgcggtgctgctgctgcagatctccacgcggccggaggatctcggggagacagtctgctccctcaagttcgccgaccgagtgggtcaagtggagctggggccagcccggcgccgcagggtcccgcgctcctccgggacgccttcttccctcagcaccgacactccgctcaccgggaccccctgcacccctacgccgtccactggcagtcctccatgccccagtcccgacaacggctcgggctcggctctcgcgcccgcagagggcctgcccctctagtcctgggtcg

SEQ ID NO: 97002 - DNA, 488 bp, Homo Sapiens
tacaatgtccaaaaagaaagaccaagatctttgcttaaaaatagaaatgcatactgcagtggctcaaaaacttaggcctgcatcaaaattacatgaagcgcttgttaaaacagattgagccccatctgcaaagtttgtgactcaagtgttgggtggggccaaataatttgtatttctaacaggtttctaagtgaagtcaatgctactggtgtcagaaacacactttaagaaccactggcaaaacatttaataagacaattccatgataaaagtatatcataacataaaaccacaaaactttggactcaaagactagctttgtgatacaatgtcaccttaccaatctgtacactccacaagtttttaaaaattaaacaatatataaagcacctaacacagcctggcacatacggctactgaattactaatgaatgttattatgctatcataagttatggttaaagttatgctcaaattgtcctcgtgcc

SEQ ID NO: 97003 - DNA, 1361 bp, Homo Sapiens
  misc_feature (327)..(336): n is a, c, g, or t
  misc_feature (362)..(587): n is a, c, g, or t
  misc_feature (825)..(825): n is a, c, g, or t
  misc_feature (829)..(863): n is a, c, g, or t
  misc_feature (868)..(926): n is a, c, g, or t
  misc_feature (928)..(930): n is a, c, g, or t
  misc_feature (932)..(932): n is a, c, g, or t
  misc_feature (1138)..(1147): n is a, c, g, or t
  misc_feature (1293)..(1306): n is a, c, g, or t
gctatgtactatagaacagtgtgtataaaaagcaggctggtaccggtccggaatcccgggatatcgtcgaccacgcgtcggaatgggtaggtacaatcacttaagttctgcctctcgaagataaaactttaattttgtggacacttagagaaagtaaggggtgggggagcttgaggtgagtaggaatttgcatagcccttttcttcctggacttaagaatgatggagaaaaaactcagtgaaagagataaggaagcaaatgtgtggaaatgtgtgataaggaaggaaatgtgtcaaggtggttacaatatggaagggaagcataggnnnnnnnnnnctttgttgagatggagtttcactctnnnnnnnnnnnnnnnnnnnnnnnnnnnnnnnnnnnnnnnnnnnnnnnnnnnnnnnnnnnnnnnnnnnnnnnnnnnnnnnnnnnnnnnnnnnnnnnnnnnnnnnnnnnnnnnnnnnnnnnnnnnnnnnnnnnnnnnnnnnnnnnnnnnnnnnnnnnnnnnnnnnnnnnnnnnnnnnnnnnnnnnnnnnnnnnnnnnnnnnnnnnnnnnnnnnnnnnnnnnnnnnnnnatgagccaccgtgcccgaccagaaagcatggtttttgaaggaccatattttatcgtaaaaaaatgtcttggttcagatagatgtgtgctgatgggagtaattcacatctatcagtgaccaccaccaagatatttataaaccttatcaaatacagtaggaagagcaaccagcacaattttggataaatgtatatgtttcagtgaacaaagaagatagtttaaaataaaagatgaccacngaannnnnnnnnnnnnnnnnnnnnnnnnnnnnnnnnnnaacannnnnnnnnnnnnnnnnnnnnnnnnnnnnnnnnnnnnnnnnnnnnnnnnnnnnnnnnnnannncnccccttgggtggccgcccttgggcccctcaaaaaaagcttttctaaaacactttttccttttggggcccgcggggcccccataaggggaaaaggggacactgggggccattagctgggttcccccaaagggaagaaccctgggggacatggaacaaaagggcgcttggggaatttcccccaccaccaaataaaaacaaaccccgcnnnnnnnnnnaaaaccgcaaaggggttttccgagaacaaaaactccccgatagtgggagagtttcttgggggggtccttttacgcgggggttctcttctcaacacggggggagtctcacaagggcgggacctcccaaatattacaaaatattatannnnnnnnnnnnnntgtggcgcacttttctttcgcagaaaacaaggggggggctaaattctcctctctc

SEQ ID NO: 97004 - DNA, 1256 bp, Homo Sapiens
ggcttgtacatttaaaccaggtgtacaaaaagcaggcggtacggtccggaatcccgggatatcgtcgaaccacgcgtcggaaaaagatctgtatttacactccttcacctagggatgtgttgttgccctcctacccaattgtcatgattgtccttagtaccctaggcctagattctgagatcttcccattctagggctacaagcactacttgctgtagctgagacttgtcgtagagtcctttgttttgcacttttgacccaccccttcctggatcactcctttggcactccactcccctcgttctgtcactttgaacgaagtctgagtgaggctagtgactccttgggtgtcctcaacagtgaattcactgtctgcgtgcagttattacatgcatttgtgcatttctactacaatggcatctttatgtctctgtaacattggccttttcatggctccacactgggtggaaccatattctcttagatcacatttagtagcataactgtagggactattagagatggcatctcatcgatgagagagaatcacaatcagaatggaagcaccttgagtatctgaagagtgagagcattcatgtttgacaggtcctgcttcccactatccttttcctgttattattcaaattttacacaaggactaatcctgggtgtctctgagaaccatctcctgcctagacatccacctccagagcaacactggccccacagtaaaagaggaagtcttgtacctcaggcaggcccatctagagctattgctccttcccacagcaaaggtattgtggatgacccttagaatccattctctggtcttctgaaataccaagggcagatgtcacctccttcctcagcaggactgactctgggctctacaaaccagctccttcacataaagggtttagagacttccccccgttggctcccagtcaccatatccagtcttgtgtaaagagactgcccaacaggaccaaccaagcaccttacctctcccatacaagatgaccctctgagctatctcactttattcaagctcatgtggtacagccattttattaaaataaattaatctatatgtggtcgacaagacaagccacgcaaccacctgactgtcaaacactgccgtgatgccagttcgggttcctcctggttttcttttgtatacaaccacccttgcctgtttacattaattgcaaggagcatcaacgtacaggactgtatgtacagtcttgtgggcgtga

SEQ ID NO: 97005 - DNA, 1334 bp, Homo Sapiens
  misc_feature (1226)..(1226): n is a, c, g, or t
tggtaccggtccggaatatcccgggatatcgtcgacccacgcgtcggcagatggagcaggcgatccgtgctgagctgtggaagagtgttggatgtcagtgacctggagagtgtcacttccaaagagatccgccaggctctggagctgcgcctggggctccccctccagcagtaccgtgacttcatcgacaaccagatgctgctgctggtggcacagcgggaccgagcctcccgcatcttcccccacctctacctgggctcagagtggaacgcagcaaacctggaggagctgcagaggaacagggtcacccacatcttgaacatggcccgggagattgacaacttctaccctgagcgcttcacctaccacaatgtgcgcctctgggatgaggagtcggcccagctgctgccgcactggaaggagacgcaccgcttcattgaggctgcaagagcacagggcacccacgtgctggtccactgcaagatgggcgtcagccgctcagcggccacagtgctggcctatgccatgaagcagtacgaatgcagcctggagcaggccctgcgccacgtgcaggagctccggcccatcgcccgccccaaccctggcttcctgcgccagctgcagatctaccagggcatcctgacggccagccgccagagccatgtctgggagcagaaagtgggtggggtctccccagaggagcacccagcccctgaagtctctacaccattcccacctcttccgccagaacctgagggtggtggggaggagaaggttgtaggcatggaagagagccaggcagccccgaaagaagagcctgggccacggccacgtataaacctccgaggggtcatgaggtccatcagtcttctggagccctccttggagctggagagcacctcagagaccagggacatgccagaagtcttctcttcccacaagtcttcacattgaagagcctctgcagccccttcccacagctttgcaaggaccaagggaggccagcaggtggacagggggcctcagcctgccctgaagtcccgccagtcagtggttaccctccaggcagtgccgtggtggccaaccggacccaggccttccaggagcaggagcaggtgcaggggcaggggcagggagagccctgcatttcctctacgcccaggttccggaaggtggtgagacaggccagcgtgcatgacagtggagaggagggcgaggcctgagcnctcacacatgcccacgctcccctgacactgaagaggatccacaactccttggagaaacaccctcacgtctgttgccgcacacattcctctcagctccgaccccatacc

SEQ ID NO: 97006 - DNA, 382 bp, Homo Sapiens
atcccagccctcccatgtaagactggtcattttttagaatcctcagccatatcaaggatacagaaggggtctaggatagagaccaatgaagaaatttctttggagaattgttaagtgctcaattcagccttcttggacaaaggagttactaccttctactttgaaacccagtgaaaggaacttcaaggaagcccttcagagagctttgaaatgtgtttcgtacaaccatttagctggggagcccagagagggctgctgccatgcgatctccctgaaattgtttttttcaggccagggatgtgagaatgtttcctgaggaccagatgtgtgacactcaggagagagccggcataaaatagcccccagaggtaaagaaaacctc

SEQ ID NO: 97007 - DNA, 1013 bp, Homo Sapiens
  misc_feature (980)..(980): n is a, c, g, or t
gctatagaatatagaccagtggttaaaaaaaccaggtggtacggccggattcccgggatatgtcgaccacgcgtcgctaaactccacagttcccaaagctgccaccttcttggagtgtgaaccctgtcctcccctaacgctccgccgatccttcagtcatcttatttgcgcccgaggcaatgaacagtagctcagcttgcatctctactggacatggcacacatttctttaaggcacattcacttattttatttgaggtttgctgcagtgacctaagatgcacccactgggcagatgagaacaccaatcccaagaggtgaacggacttgtgcccagggcctgggccggtggtggccggcaggcgaggttctctttttcaaagccaaaagcactcctggccctcctgcatcttcactatcctgcaagctgggaacacgggagaaatgctacttctgtctcattaaactccatgccccgtcccattctctggcacagcctcctcccgtagggtcagcctcagactgcaggccacatcctgggcctcctatagggtcagcccgacctgccctgccaacacctgccttccctcctctaaactccaaaagcatttcccttcatcagatcactgaggcacaaagtccagcaaggctggagctgctaaccacctgctgggtgtgcgtcagctcctccccgcgcggcgagccatgggaaggccacagcctcttctctggaccgcccagggctctgaggcatctgaagcccccgtcccagcccaggccagtacaatctcaatctaaggagccagtcttccgtagtctaagcaccggggctggaagggaggccatgcgtagggtaagcggtgccaccccaggctcaggagctgagcgccagctcccgccaacagggaattgcaccgcctggcccagggctggcactctggctgcaaactcagtttctgggaactcagtcccctcccgggnggcctgaattccattacccggccctcctttccc

SEQ ID NO: 97008 - DNA, 1131 bp, Homo Sapiens
  misc_feature (172)..(172): n is a, c, g, or t
  misc_feature (182)..(197): n is a, c, g, or t
  misc_feature (291)..(301): n is a, c, g, or t
  misc_feature (769)..(769): n is a, c, g, or t
atgggggggatcccaccccctattttcggccccggggtttcttttgggaccaaatttggccccatgtttccctttccccggggggccccggccccaaaggaaagtgttgaaaaagttttttgggggcccgagggggggccccccaaaggcttctctcttcgggcgcgcgggnccaacgcccnnnnnnnnnnnnnnnncttcgcggcctgctcgcgcctctcctctgtcgggcgcggggccgggtcttttccctctcgccctctccttttttggaggaagtttattaaattnnnnnnnnnnnctacaaatgagtaattataaaatataatttcactcttttcattatttaccacaaaaatttaaaaataccaatatacagacgagcacaagtgaactggaaaacgagctaaaaattgtataaaagacaaatctaaactcaagaatatatgagaagtgacatacaccatacactctcaagtgagttcagaaagcatgttccgtgctgggcaggttttctttccaggtcagtttttattggcactacacctggaaagctctctaagccaaagttcttatgtgtcaggatcttcctagacctcccttggaaagcatttctcataaaacaactcacaccagacaggctgacttattgtaggcacaaaaatcataaatgcctctcataggccccatggagcttggaaaaaaaagatctgctaatgaaagcattacaaaaacagaaaagtggcacctagtggccacttagcagctnttctttatggcttctagctaatcatagatgtcggcctgtctgcccgtaacattgtgctgggcaagtatgagtctccaattccagggctcagtgatgacccacctgagggggagatacctcttggcagcatgatctgaaactggacactactaaacatggtctgggaactaaatattggctatttcttgtacctgtgccccagattttacggagatccctcaaagactatgacaacaaagacatccttttctgtcgtgacactgtaaataaacactttcctttaaattccatttatttactaaaagtctctattctgtactttcctgtttgtctttgtttccaatagatttctaaatttagcc

SEQ ID NO: 97009 - DNA, 1398 bp, Homo Sapiens
gtcccccagtgtctctcctgtctcccccacccgtaaaaaccgcatcctgtaaccccaccctggatacacgcatgtgtccactaacacccctcatcttacaaccatccacaaatatcacatatcaacactcacactatcaacagtactcctgtcgagagtacggttgcgaaatcggttggggttataccactctttgaaaattggcaagaaaaccagtcaccttagagcagaagtgtgtcagccaagaagtgggtgtagcactggaaggctgaaatgaactgatggccatggcgtaagattggaaagagagagaaagatagaaaagagagcttagtgtggggaaaaaaaggaaatgattaacatcacgagaaggcaccggagttgaaaataaggccacgattgaaagagggaaacttcctctgaaagagtcgctgtttgcttaggagagatgaacctttctggttgtgaccagctacttgtttacgagagtggatgcacacagtttgcatcttgctccctgatatcctctctgcccccattttactctagcgtctcccattcattcttgaatatgttgcggaggcctagaggcattcatcctcgggggtccacccctgggtgtcggtgctgcccaccagaaaggttcaacatctcagagcgtacaaacatctcagatttctgacaggcacgccctgtctcgccacagtaattcaaaccagtctccttatggctgtacacgacagtcagagattccgactcgggcttcatggaacactccacaaagcatctcagcctatcctgagctgaagataatcacaataacatggccgttcacatcatgacctcaaaaatttactttctatactcaaacaaaaggaatcaagggttcctcccaccatgctgaacattaaaatcccagcaaaaattggagaaaacacaatgcaagtcatcggactgagaacagtgccaacaaggacagaggcgccagttcccacagagttggccacggccatgcatctgtttttcccaaggatttcagggaagtgtttgtagaaatgcacctccttcttcccgcaccatagaaactgtcatctcaaagctctcaaaggttctgactcatcacccacacccaggcacacctcttagttaatccagaggcatctctagtgataactccacagagctatcttgggcccagcaactccagatacactgcgcaccgtagatggcctttctctggcggccccttgattgttcagccagaccctgcagctgtgtatgtctaggcagcgtggagtagggagagctgaggactcttctagatacccagagtaagaacacaggtggacctgcatgctcatttttacccttactcatgcatattccctcgtccgagta

SEQ ID NO: 97010 - DNA, 857 bp, Homo Sapiens
gattagtgaactatagaaccaggtttacaaaaagcaggctggtacggtccggaatcccgggatatcgtcgaccacgcgtcgcactatggtcagggcatgaaacaccctgttgatcccttcccaggctcggcactgtctgctcactggagccggactcccaggttgtaattctaatgttgcctcatgagaacagaatggcagaaagtttagtcctgacagattcccccatagggagtaatgaggacagcatgaaacttggataggttttacccttagtccctataaggtggattttactaaggttttttaaatgatactgtcatcctcttggggtttatcagccaggttagaggagcccagtgtcctaacctctctcagatcatggcagagaaggagctgcctccagcccctttcttgctgagtctcatttgagcagttccatgtgtagacattccaagtcactgcttggtagttgctgtgggagcctgtcattggctatggccagttagttctcagctgagcttcctagggccagtgcaacagggccagaggctgctatagtgtaaattgaaataagaatagatcattgttttgtacacacacacaataaaatgtaatgatggtgctaatttcacggtataaataagcactgccaagggttgagggactggcagctcaagaaacccgggttccctgtttgggaggagatcctatcgtagaaaagtttgaggcttgttacaagtggggcagaaaggcagatcctcagttgaagcctgacccaacctgggagtggccagtgcaatccagagtgggagagatctatatccacgtgaaggggccttgagttctcacgagcg

SEQ ID NO: 97011 - DNA, 1196 bp, Homo Sapiens
cagccctgctggtaagtagagcacgccttcctcagaagcgagtgtgccagctcactgcttggagctggactaaattggggaagggagaccaatgtgcataggccccaaagtgtaagagtcttaggaagagtgacacacatagtgaagcggcttaggagaggaatgggaggcaattcagggcatcccaagaggctttgctggtgtctgagcccaaaattcagtctcaccacaagaagggggaggctgtggccctgccccttcggtctcccccaggattcaggttccctcttccaggtatttactggaggagaaggggaggggatcatagggtacccatttgctccccagcaacctagaaagaaagagaggcctgtgggagaaaatgaaaagaggccccctgaaggccctgaacctggataggaacaatttgcagattgagacagtgggagtcctggactccaactcaggactgctggctagccatactgagcagggtgtgaaatacaaggccagaggcaaggtgaagactgagctgtcagccttgggatggcttcaccccatggtgtgtcctccagcatcactgctctgcacgctgacctagggtgtgtgccctttccctgcatagaagccctgtggcctgcatgtctcctaagctagttctagcaccttgggcttgtgaacagacggccaggatggtagggccttgcccagcttctactcgggtgacgtgttgggggtagagtggcaaggtactaactaagcccttcagatttcagggcctgcagaagggtggattatagaaaagggaagtgggggcagactccaggcttcagcctgggagcagggtttgccctctctgagcaagcacagtgcacactcccttggtgccctgctccctgcagcttctcaacgtgtctgtcctgtccgcatctccaataggctgcctcgttccctagattccctccatcttctccctctaactcacgtctcacagtcctcttctacatactgtacctttccaggcctaagcagctccacagagtaccgcccccaaggcagaaggaaggggagactaaaagcaaaaccctgagcccttactggagggcaatgacagcagcccaggctgcacaggctctacctggtcagagctgggctcagggtccccaccatttggtaggattactggatgaagataa

SEQ ID NO: 97012 - DNA, 2560 bp, Homo Sapiens
caaggtagcgaggcctgggtggcgaattccgcacgaggggaccgcgagcacaggccgctccgcgggcgcttcggatcctcgcgggaccccaccctctcccagcctgcccagcccgctgcagccgccagcgcgccccgtcggcagctctccatctgcacgtctctccgtgaaccccgtgagcggtgtgcagccaccatgttcagctggctgaagcggggcggggcacggggccagcagcccgaggccatccgcacggtgacctcggccctcaaggagctgtaccgcacgaagctgctgccgctggaggagcactaccgctttggggccttccactcgctggccctggaggacgcagacttcgacggcaagcccatggtgctggtggccggccagtacagcacgggcaagaccagcttcatccagtacctgctggagcaggaggtgcccggctcccgcgtggggcctgagcccaccaccgactgctttgtggccgtcatgcacggggacactgagggcaccgtgcccggcaacgccctcgtcgtggacccggacaagcccttccgcaaactcaaccctttcggaaacaccttcctcaacaggttcatgtgtgcccagctccctaatcaggtcctggagagcatcagcatcatcgacaccccgggtatcctgtcgggtgccaagcagagagtgagccgcggctacgacttcccggccgtgctgcgctggttcgcggagcgcgtggacctcatcatcctgctctttgatgcgcacaagctggagatctcggacgagttctcagaggccatcggcgcgttgcggggccatgaggacaagatccgcgtgggtgctcaacaaggccgacatggtggagacgcagcagctgatgcgcgtctacggcgcgctcatgtgggcgctgggcaaggtggtgggcacgcccgaggtgctgcgcgtctacatcggctccttctggtcccagcccctcctcgtgcccgacaaccggcgcctcttcgagctggaggagcaggacctcttccgcgacatccagggcctgccccggcacgcagccttgcgcaagctcaacgacctggtgaagagggcccggctggtgcgagttcacgcttacatcatcagctacctgaagaaggagatgccctctgtgtttgggaaggagaacaagaagaagcagctgatcctcaaactgcccgtcatctttgcgaagattcagctggaacatcacatctcccctggggactttcctgattgccagaaaatgcaggagctgctgatggcgcacgacttcaccaagtttcactcgctgaagccgaagctgctggaggcactggacgagatgctgacgcacgacatcgccaagctcatgcccctgctgcggcaggaggagctggagagcaccgaggtgggcgtgcaggggggcgcttttgagggcacccacatgggcccgttgtggagcggggacctgacgaggccatggaggacggcgaggagggctcggacgacgaggccgagtgggtggtgaccaaggacaagtccaaatacgacgagatcttctacaacctggcgcctgccgacggcaagctgagcggctccaaggccaagacctggatggtggggaccaagctccccaactcagtgctggggcgcatctggaagctcagcgatgtggaccgcgacggcatgctggatgatgaggagttcgcgctggccagccacctcatcgaggccaagctggaaggccacgggctgcccgccaacctgccccgtcgcctggtgccaccctccaagcgacgccacaagggctccgccgagtgagccgggcccccctcccatggccctgctgtggctccccagctccagtcggctgcacgcacacccctgctccggctcacacacgccctgcctgccctccctgcccagctgtaaggaccgggggtctccctcctcactaccgccagacaccccggtggaagcatttagaggggaccacgggagggacaaggcttctctgtccgcccttcacacctccagcctcacgttcacttaggcacatcacacacacactggcacacgcaggcatccatccatccgtcattcattcaaatatttattgagcacctactatgtgcccagccctgttctaggcactgggcattaccatagagaacaaaatagacaaatacatctgccctcatggaaggtgacgttcccaggagagggcacctacacagtcacgcaaacacacactaattcctggcagggcccccagcccctcccctggctgagcagccctgtggctgaaatgactagcagataaacagaccccccttctgctccgcttcctcctgcccaggcaggcaacaccctcaaccggctccatcacatcctcaggtctcgggaccatggggggctcagaggggagacacaccctactgccttcctcagatgggcccccttccgcaggcccccttccctttggctccggggaaaagccccccaaatttctgccccacacacccattttaatttccctttccttttccctttc

SEQ ID NO: 97013 - DNA, 1380 bp, Homo Sapiens
  misc_feature (1202)..(1202): n is a, c, g, or t
  misc_feature (1253)..(1253): n is a, c, g, or t
tggtaccgctccggaattcccgggatatcgtcgacccacgcgtacgcgcatgcctgcccgcccgccagcctgcgggtacggcttttccgccggggcttccaggtcaaagaattcgcctttgccgctaccgctttcttaccctccgcacccgttaagttctccggtcgggcggcagtctctgaacacttagccgctgccatccggggtcacaccgcctggaaggaggtgacgggggcggcgcggggcgcggacactccccgcctgagagtccgcctgccatggactcggaatattacagcggcgaccagtcagatgatggtggtgctaccccagtacaggatgaacgggattcagggtcagacggtgaggatgatgtaaatgagcaacactccggatcagacactggaagtgtagaacgtcattcagagaatgaaactagtgatcgagaagatggcctccccaaaggacatcatgtgacagactctgagaacgatgagcccttaaatcttaatgctagtgactctgaaagtgaggagcttcactaggcagaaaggacagcgactctgaatctgaggaacgtgcagagcctcctgcaagcgattctgaaaatgaggatgtcaatcaggcatgggagcgactctgagagtgaagagaccaggaaattacctggtagtgactctgaaaatgaggaacttcttaatgggcatgcaagtgactcagaaaacgaagatgttgggaagcatcccgccagtgattctgagattgaggagctccagaagagtcctgctagtgactctgaaacagaagatgctctaaaacctcaaatcagtgactctgagagtgaggaacccccaaggcaccaagccagtgactccgaaaatgaggagcctcccaaacctcgaatgagtgattctgaaagtgaggagcttcctaaacctcaggtcagtgattcagaaagtgaggaacccccaaggcaccaggccagtgactctgaaaatgaggagcttcccaaacctcgtatcagtgactcagaaagtgaggaccctccgaggcaccaggccagtgactcagaaaaatgaagagcttcccaaaccccgaatcagtgattcggaaagtgaggatcccccaaggaaccaggccagtgattcggaaaatgaggagctaccccaaaccccgagtcagtgactctgagagtgaggggncctcagaggggggcctggcagtgactcagaaacggaggatgcgtccggacncaaaccggaagcccgaagtcagatgatgacagcgaacagggaagaataagggagaggataccggaaatgcagaatgaacttccttcccattcagacaggccatattggaccgaaaaaaagttttccc

SEQ ID NO: 97014 - DNA, 1046 bp, Homo Sapiens
gccgcatctaggtaatatagaccagtgggtaaaaaagcaggctggtacggtccggaattcccgggatattcgtcgaccacgccgtcggtgtgttttaacatctgtgaaccaggctattagtccttgctaaagcgccaatcctgctgtcagagctcacccccttcctaagacaggtagaaaaatgtaatgtagctttttccacaagccagttccctgtcccttcagtcttcaggaggccctaggagagtctaagctggggcatccccctggcccagaggactccccgtggtgggcacagttctaagtggatcaggctgtcttgggtgcactggacttggagcactaccttgagaagtcaggttgagaaagtagttgatctagaaggcaacaagtgggcatgtgttccccagcacattacccaggccagcagagccaaacctaggagagggcagtgggtagattctctgccccaggcagccatgacatacacataaataccccaatcactcagacttacggcaacaagtgttgtctcactatggtgatctctaagatccacatcactggatgcgtagtcatcccagtcatggtaccctgtggaggaatgctggaagaacattaaagagcagttcagaaagtcacccaataccaggaccactgcatttaccagcctgatactgcaagattatctgatgctctctcaggagctaggagaggagtgctccttctccttaccgtactctcccaagcctgtgtgcaggtagagaggtgcagcacatagagaaagcatgtccaaacctggattttaactgagagtgtgacttgggttgatcctcaaccctaatgggtccacccccctggaaggcatggggccacgttgacagggtgtactgaagctggaattttcaatggtgcggcatcttcacctggcgaaacgttgaaacgttttactacaccacaggcatggtcttgggggtccacaaggactatggctacctcgcatggaagccattcacggaccacagggcacagaaagcgcaaggaaa

SEQ ID NO: 97015 - DNA, 1275 bp, Homo Sapiens
  misc_feature (575)..(575): n is a, c, g, or t
  misc_feature (577)..(577): n is a, c, g, or t
  misc_feature (588)..(608): n is a, c, g, or t
aagaccctcatcaatagatggagacatacagaaatagtcaaaccacatctacaaaagtgccagtatcagggcggggctttcgaagccaaaggtgagtgttgggagtgtaaaggtgaaatattagtgtgggggatgaagcagaataggtgaggaaagtgtgagccaataagtgacggtgaagctccggtggaagccgtgtggtggcttacaaaaaatgtgttgtgacccgataaagtgccggtcggaaatgtgggtgaagggaagacctcgaagttacctctgtgaggctgtggtaggaggggtaaaattaggagaacccagtgtaaacattgggtaaataacgccaggtggctgtgaattatatgtggggcttctgcgggtgtggtttccctatatatagaaccatatgtgggtgaagccctcgagggtgattgtgatataccttccgtggagtgcgcgacagttaatagcgcggagtgtgtgtttttgagaggagtgtggggacacttctgaggggggaaattatagcgcggggtgtggagtgcccgtgtgtgtgggggggcccagtgtggccncnctccataaatnnnnnnnnnnnnnnnnnnnnnccatagaggcgtgggaagtgtgggtctaaagagccgctccagcacaaaaagtccgtggcgaaaagaaacaaaaaaatcttcgtggaggggtacatacacactgaggaaatataatccccggatatcgcaaagggcccttttcgtggggacacgcgtcgtggttgcgtgcttgcggtggggccccttgtggggtacactggtggccattaccctcgcggtgtttaacatcttcgggggggccccaactccacttgcggcggcacctacatgcgcgcacaacgggggcgtggctgcgggggactacggataggggcccttaagttcactagaacggagacaagggcgttgacattggcgaacagtggcgaacacgccttggaacaacttccacaattgggggctaaagggccccggggacggggtccaacattcaacgagcagcggcgctgaagaaaagcggggcccccctggttctaaagagggggccgcaagaggggcagcggcaggtcttacacccatacaattgcagaaggggcacttcgcgacaccgcccttggaggcccgaaggaaacattccccggagaaaaatccggggaacgggcaacccgaccccgcgcttcttcgggtccaacacgctggttccccacaacaggggccccctaaaagt

SEQ ID NO: 97016 - DNA, 1285 bp, Homo Sapiens
  misc_feature (671)..(671): n is a, c, g, or t
  misc_feature (944)..(974): n is a, c, g, or t
  misc_feature (1154)..(1166): n is a, c, g, or t
aaagaggaaaacccggtaatgattgtcggggttgagggataggaggaaaatgggggatagggggtatgaacattgaggggtgttttcctcggtggtgaagtgaggggtttaatggtgtggtaagtggtgggtgggtgagttgagccccatgtgtgtgtggggtggtaacatatgtaaaagggagttatagggcgggtgacatagatatgtgtgtgtgagttccgtggtaagttaggagaagtgtgaatatttgtgaatcaggaaaaacggtgggttacatagacacagaagaagtttcctcccagataggtgtataaataggtggggggataaggggaggttataggcgagggtctgtggctagaagagttcattacaaaaaagtctattaaggtgggagttaaaagttttgggagagtttcctgtgagaagaaggcatttagtgagtggcgaaaagtggtgaagagtggcgtttgcgagatagatttgggatgttggcgtaaagcgcgagaaatataatgtatatgggaggattgtaaaatgtccggggaggggcggaaatctttatggagaaaatgggactttgggcgccgggttggaagacgcttctccaaaggggcgaggttataggggtatggaagaaaatggggggtgggtgtacacattcacanagaagggggggcctatatttgtggggcgttgtcgaatcttgggacacggagtgttatttcgccgatattgggaaaggcgaggaatatttcaaaacgcgtctaccgggcggtgtatatggggtgccagataaaaggcggcaaagacgttgtgtgaacggtcgttgagttgttaataaaaattcttaataggggctaacaaaataaaggggcggaattcaacgttcaccccacgggggcacacagggcgggcggtagcaagaggacccaaaagannnnnnnnnnnnnnnnnnnnnnnnnnnnnnnagagtaccaggcaacgaaccaactaggaaccggcaggcgcagcaggcggccgggatatataaccataccccaaactagagcgccgtcgccaacagcgatcttccaaccagaacgtactaaccctgcggcgggcgagcgaaagggaccacactatgtggggagcccccccagccggcggannnnnnnnnnnnnacctatcggacacacaggtggggcggcacttataagaggacggacgggcacacacaacacgctgggcagcgccgggaaaacgcgaagacgcgacatacatcgctaccgacaatacaaac

SEQ ID NO: 97017 - DNA, 959 bp, Homo Sapiens
ggcagtaactataacggtcctaaggtagcgaggcctgggtggcgaattcggcacgaggggagggagcagtcggtcgctgcgccccggcgggccactttcccgggaccccgctcgtcttccttgggccgagattttccactgcgcccctcccagtacccgggttccaaacccctagccacgacatggaagaatttttgcaacgcgccaaatctaaactgaatcgaagcaaacgcttggagaaggtccatgtggttattgggcctaaatcgtgtgacttggattctctcatttctaccttcacatatacttactttctagacaaggtcagtccaccaggggttctgtgtttaccagtgctgaacataccaagaactgaattcaactacttcaccgagacgaggtttattttagaagagctaaatatttcccaatcattccacatattccgggatgaaattaacctgcatcagctaaatgatgaagggaagttatcgataacacttgttggcagcagtgtgctggcaagtgaagacaaaactttagaatcagcagttgtcaaagtcattaatccggttgagcagagcgatgccaacgttgagttccgagagtcttcctcttctctcgtgctaaaggagattctccaagaggctcctgagctcatcaccgagcaactggctcatcgcctcagaggtagcattcttttcaaagtggatgaccatggaatcagagaagatctcagagaagcaggaggaaattctttctatcctggaagaaaaattttcctaatttgccttccaagagaggaccatcatcaacgtccctaccaggagacccagttccagtgctcagggttcaagtattgaaccagaccatgttgaccagatctaaaggagttgtcagatgcggacaattacaaggggcattagtaccgggagcttgaacttggaggtcacggggcg

SEQ ID NO: 97018 - DNA, 932 bp, Homo Sapiens
caccaccgcccaccagaaacatcggggataactgagatagtcgcgactcagcttcttccgcctcggcaaagtaccactgcactagaaaacaggatgacccccgattgaagaggaaaaagatgaggcagccctagctctcgtcattactagctttgaggttctggcccaggatctggaggcccttagagtggcgggagagcttgaaagattctaaaaacccttaccaagcggatgagcctgaggatggccagggaggtggcctgctcgcccttctggtttccttccgtgctcagctatctcggtgcccagcgtgatgaaataaggaatgatggccacaatgtctatgaagttcatgatgtttttgaagaagtccgtcttgctggggcaggcgaagaagcgcaccaccagctcgaaggagaaccagatgatacacagcgtttccacgatgaagaaggggtctgtgaagatgttggaattgtagatgaccgtgctgttgtcgatgcggtggacggtgcccgtgaagtccttgtcatccttcagctcggggagcgtctccaggcaaaagatgacgatggagatgaggatgaccatgacggagacgatggcgatgaccctggcgggccccgagctctcggggtactcgaagagcagccacacctggcgctggtactccttctcgggcagagggcgctcctcctccttgatgaagccctcgtcctcccggaacttctccatggcctcctcgcccaactcgtaaaacttgatctcctcggagaacatgtccaggggcacgttgaccggcctccgcaggcggccgccggactggtagtagtagaggatggcgtcgaagctgggccggttgcggtcgaagaagtcctcgtgccgaattcgccacccaggcctcgctaccttaaaccgttgtagttactgcc

SEQ ID NO: 97019 - DNA, 922 bp, Homo Sapiens
cggtccttcctgcaggtgaccgtcactgcaggcctctgcgcccctttcagattcccccgtgaactgtcccgatccattggtcaaacttgacttggctctggggtgcctcacagagatttaggtgtgaagatatccacgccttgcggaagggcacaggatctgccggcgcagcacgggaagtatttgccggttggagcagttgaccacggatccagttgcaagtcatagagcttggctcacctcgaagtccttggtgaatgcagggtaggcatccgagtcatcattgctcatctgcaggaacctttcgggcctcctgacgagtgctctgggcccatgccttccatgccatggggcagcagcagcacaatgccattatgccgcacccacttggcctggccggtgctgatgaactggtcgatgatgcactgggccgtgttgtggaagtccccaaactgggcctcccagaggaccagggcattggggctggccatggcatagcccagctcaaagcccaggactccggtactccgagagggagctgttgcacacggtgtacggggcctggtcaggccagagatgattcataggcacacacgtcctgcggtcaacctcctggtcatggagaacatggtgccggtgactgaatgtgcccctctccacatcctgcccgctgagccgcacgtggatgccttccttcagcagggagccaaaggccatgtactctgccaacgcccagtccaccatccggttcttggtcatgtccgcacggccccgcagaatgcgagagaggccagtgtggatcttaaagtcctccaggggcacagagctggccacactgccgatgtgggtgagcatgtcctcagggatccccgtggatgggcatgtcatgccctcgtgccgaataaacccggcctctctaccg

SEQ ID NO: 97020 - DNA, 1121 bp, Homo Sapiens
taaacttacggctaggtacgaggctgggtttagaattcggcacgaggcgggaaactcgagttggctcgagcttgccctgaagacgcgccacgccccctcccctatctgagccggacagggagccggggtggaaactgcgcccgcatcccagcgccaagcagacgtgaactctgcgcccgttccccgggaccttcagcgttaaggagaactccgaggagagcagggggagtggaggggaacggcggcgacaaagcggatttgaaactaggagtcaaggaggacgtggggagctggcgccacaggagctaccgaggcggcggccgggggagcctcgcggcctgcgggagagcccggcggtcatgggcgagccggcggtggggcgcccgggagctggctgagcgccggggcccttatttcccgggggtgtgggcgagactccgccgacgcccggtgccgtgggcctgggggctgcccccgggggcccggccatggctggccggggtttcagctggggcccgggccacctgaacgaggacaacgcgcgctttctgctgctggccgcgctcatcgtgctctacctgctgggcggcgccgccgtcttctccgcgctggagctggcgcacgagcgccaggccaagcagcgctgggaggagcgcctggccaacttcagccgcggccacaacctgagccgcgacgagctgcgcggattcctccggcactacgaggaggccactcgggccggcatccggtggacaacgtccgcacggctgggacttcaccggcgccttctacttcggtgggcaccggcgtttccccataagcgttgcgattacaactccgcgggacagtcaggagggaaaatttttcgaacttttacaggggccatgttgggggtgttcccagaaccaacttgggtcctttaaacgtctttctgtagaagacgctgataaccacaaagtgcgcatacacaagtaaagtcgtgcacccaaagggagctccgacaacaaagagggcctgcccagaggagccttaagagagcgcacataaccgtacgaatcacactcacgcatgagaacaccgcaagtttatagcatgccaatacagagacacacacatgcagg

SEQ ID NO: 97021 - DNA, 1288 bp, Homo Sapiens
atcatcggttaggtacgaggctgggtgtcgaattcggcacgagggcaagatggacaggaaggcgctcacccgcaccgacttccaccacaagcagcttgagctgcgccggaaaatcagggacgttcgcaaggccaccgacgagtgcaccaaaaccgtcctggaactggaagaaacacaaagaaatgtgagcagctccctcctagagaagcaggaaaagctgtcggtgattcaggcagacttcgacacactcgaggccgacctcacccggcttggggccctcaaacgacagaacctttcagagatcgtggccctgcagacgcgccttaagcacctgcaggctgtgaaggaggggcgctacgtgttcctgttccgctccaagcagtccctagtgctggagcgccagcgcctggacaagcgactggctctcatcgccaccatcctggaccgcgtgcgggacgagtacccccagttccaggaggccctgcacaaggtcagccagatgatcgccaacaagctcgagtcaccggggccctcctagggagcagcctggaccccgccttgcaaggcctccaggaagagatccggaattgtgtttgtcatgagggacttggaatcttgtgtgttcctaaaaaccacatgtaccctcagaagggcatcgtctaagagaaataagccagccccacccacaggaatctttttagccactcagcaatttaataaacccggtaaaatcctagcgtttcccatggcatcccatcgcaaagacagagcctgtgactggcagacccaaaaaccagatcccacactggggcttactcgtccagggtacactttggttgcagcatcccaaatctggccgtgctctcacaaacaagtgccacaggtccccagtcggtggggctgagcaaggtgggaaaattacggcacgccaggcaactggccgtgagtgtgtcccccagaattccccctaaaggggtgtcggtaacccaaaagacccttctttcaagcggtttgtcagcacacacgcagtataaactatggggggccgtctggtgggcaccagatccacgcatgagagtagtaacaaccacaccggtcggggaaaagtgggcccacacacatggtggggcgataaaacaagctgggtcacgcgagacaccagagcacaaactaacgaccacggtagcagacggggtgtgaggcaggcaaccacaaaaagagaagagacgtgatgcgtgccaatgctagagaggagatcagcagaacaccaaccaagagcagaagacga

SEQ ID NO: 97022 - DNA, 887 bp, Homo Sapiens
ctaggtgcgaggctgggtgttgaatcggcacgaggggaaggggacaggattgtctgctgcctccaagtcatgggagaagaggggtataggacaaggggtggaagggcaggagctcacaccgcaccgggctggcctgacacaatggtagctctgaagggaggggaagagagaggcctgggtgtgacctgacacctgccgctgcttgagtggacagcagctggactgggtgggccccacagtggtcagcgattcctgccaagtagggtttagccgggccccatggtcacagacccctgggggaggcttccagctcagtcccacagccccttgcttctaagggatccagagacctgctccagatcctctttccccactgaagaattctgcaccctctggacttccctcttcttccttcctttctcaggctcaaggtgtggggggcaaggctgagtattaggggagcttctgagttctgaatctttgggtgacctgcttggagtctcaggtccaaatacttgaaatctgtgagaagtccaagttcatgggcttttggaactggaagaactttgtacagccatggattccaacataagccatgttgcagatgaagaaactgacccacacggtgagacaagcacaggtgggtctgactcttcctccctgccctgagatccatctgtcgagtgccctgttttttccccactttgaactgactggttactctaaggaagtgaactgaggatgttagctttaagccaaaccagctcttgtccacagcagagctgaggtgaacagttggaacctggtaaatcgggtggtccagcttgtctggtcagggtcatcttctggtggatcttctcttccttcaacaacctgagagcttgaga

SEQ ID NO: 97023 - DNA, 852 bp, Homo Sapiens
cggcagtaactataacggtcctaaggtagcgaggcctgggtggcgaattcggcacgaggccaggagtgacttcctgctggatccaagcaggagttatagttaccctagacaaaagacgccaggcacaccaaagagaaactgcccagcaccttttgattttgatggctgtgagctcctggccagccccactagcccagtcactgcagaattcagtagcagcgtctctggttgtcccaagtcagccagctactctctggagagcacagatgtgaaatctcttgcagctggtgtgacaaagcagagtacgtcatgccctgccttaccccccagggctccaaaactagtggaagagaaggtcgcctccgaaacatctcctttgcctctgaaaattgatggtgctgaggaagaccccaagtctgggtcaccagatctctcggaggaccaagtattttgttaaaaagggcatgcaggacatcttctctgcctcctaccctttctcatctccgctccatctccagctggcccccagatcctgtggcgacggttccccatggcagccacctgctgacctatcaggactctctatagaggaagtgtccaagtcactacggttcattggtttgtccgaagatgtcatatcattctttgttactgaaaagattgatgggaacctgcttgttcagctaacggaagaaatcctctcagaggattcaaattgagcaaattgcaggtgaagaagataatgcaattcattaatggctggaggcccaaaatataggccaattaacccccgggcaagcatgggaacaaaacttgatcaatgccgtgtgcttagaacgggtggccttgcga

SEQ ID NO: 97024 - DNA, 1050 bp, Homo Sapiens
  misc_feature (922)..(934): n is a, c, g, or t
aaagcgctagtacgaggcctggtggtgaattcggcccgagggtggctggtgaggactgaggggcagctacagtggggcgctaagcctcatccctttgatacaggggattagagctggaagaggagaccgccttccagggagccctgacctcccggcaactgccatctggatgcccagaagctgaggagccagccaacctggagagcttcggaggcgaagaccccagacccgagctacaagccacagctgacctgctgagcagcctggaggacctggagctcagcaaccgacgtctggttggggagaatgccaaattgcagcggagcatggagacagctgaggaggggtcagcacgccttggggaggagatcttggctctgcgtaagcagcttcacagcacccagcaggccctgcagtttgccaaggccatggatgaggagctggaggacctgaagactctggccaggagcctggaggaacagaatcgcagccttctggcccaagcccggcaggcggaaaaggagcagcagcatctggtggctgagatggagactctgcaggaggagaacgggaagctgcttgccgagcgggatggagtgaaaaagagaagtcaggagctggccatggagaaggacactttgaagcggcagctctttgagtgtgaacacctcatttgccaaagagacaccatcctctctgagcgcactcgcgatgtggagagcctggccagaccctggaagaatacagagtgacgacgcaggaactgaggctggagatttcacgctggaggagcaggtgagtcagacctatgaggggccgatgagctactgaaggggcagtgaaagatgggtggacgagctgtaccccatgtggcttgagattcaggctcgacgaaccgatgcactgtgtttttccacctgtnnnnnnnnnnnnnagccccacacgggaacgggtctcgtgcccgggggaatccggggacgcgaagggagcatggcccgacaacaaaggggacggaaaaagggcccccccaggggatcaacactctttggt

SEQ ID NO: 97025 - DNA, 943 bp, Homo Sapiens
ccgggttgttatcggcacgagggaaatcgcttccagtatggcatcaccgacctccggggcatgctgaagcggctgaaaaaggctaaggtcgaggtcaagaagagtgcagcattcacaaagaagctggatccagcctaccaagtggacagaggcaacaagatcaagttgatggtagagatcagcgacccagacctgaccctcaagtggttcaagaacggccaggagatcaaaccaagcagcaagtacgtgtttgagaacgttggtaagaagcgaattcttaccatcaacaagtgcacgctggcggatgacgctgcctatgaagtagctgtcaaggatgagaagtgtttcaccgagctcttcgtcaaagaacctccagtcctaattgtcacacctcttgaggaccagcaggtgtttgtgggtgaccgggtggaaatggcagtggaggtgtcagaagagggtgcccagtgtgatgtggatgaaagatggtgtggaactgactcgggaggattccttcaaggcccggtaccgcttcaagaaggacgggaagcgccacatcctcatcttctcagacgtggtccaggaggacaggggtcgctatcaggtcataaccaatggcggcagtgtgaggccgagctgattgtggaagagaaacagctggaggtcctgcaggacatcgcggatcttgacggtgaaaggctcagaacaagctgtgttcaagttgcgaggtgtcttgatgacgaaagtgacgggcaagtggtataagaatggggtcgaggggcggcccaggaagaggatcacattcccatgtcgcaggttcccaagccggtgaccatgacgtcggcccgaggatgaggaactccgttgtgctgacgtaccctgtcgtctcgcactcattcggatccagtggtactccagaagccaaaccctttgcgggacccaaggc

SEQ ID NO: 97026 - DNA, 1001 bp, Homo Sapiens
tcgaggccggtggtaatcggacgaggcaacacgacatcaagtacaactgctgcgaggagatctaccccgacatcacatactcgctgtacatccggcgcctgcccttgttctacaccatcaacctcatcatcccctgcctgctcatctccttcctcactgtgctcgtcttctacctgccctccgactgcggtgagaaggtgaccctgtgcatttctgtcctcctctccctgacggtgtttttcctggtgatcactgagaccatcccttccacctcgctggtcatccccctgattggagagtacctcctgttcaccatgatttttgtaaccttgtccatcgtcatcaccgtcttcgtgctcaacgtgcactacagaaccccgacgacacacacaatgccctcatgggtgaagactgtattcttgaacctgctccccagggtcatgttcatgaccaggccaacaagcaacgagggcaacgctcagaagccgaggcccctctacggtgccgagctctcaaatctgaattgcttcagccgcgcagagtccaaaggctgcaaggagggctacccctgccaggacgggatgtgtggttactgccaccaccgcaggataaaaatctccaatttcagtgctaacctcacgagaagctctagttctgaatctgttgatgctgtgctgtcctctctgctttgtcaccagaaatcaaagaagccatccaaagtgtcaagtatatgctgaaaaatatgaaagcacaaaatgaagccaagagattcagatgatggcacgtatgttggcatggggattgaccgaatttcctgggggtttccccctggtgtgcttctcgggacggcggattgttctgctcgccggtggccgggaagatgcctagcctaactggtgcgctggagactctcttggtacggcagaggagggctccaaaaaagcctcggtcaccaccctgtggctcgggctttcccttggcctgcaatggttctgaaaacc

SEQ ID NO: 97027 - DNA, 615 bp, Homo Sapiens
ggctagtacgaggccccgcgtgaatcggcacgaggcctcgtgccgatttggcacgaggccgggcacgctggctctggtccaccttctccaatccctgcctgctgggagaggacgatctcttgagaaaggaaagacttctgtgctcccgagaacttcctatcaggtcctggctgcagggaaacaagctgggctttttataattaaggttggaagaagtcaccacaggcagcagaactccatcttgagatgaaataacatctacctggacctctggcagaatttcaaggcacacactgggctgactctggcgccatgatgttgccttatccttcagcactgggagatcaatactgggaagagattttgcttccaaagaatggggaaaatgtagagactatgaagaaattgacccaaaatcataaagcgaaaggcttgccttctaatgatactgactgcccccagaaaaaggagggaaaggcccaaatagtggtaccagttacattcagggatgtgactgtgatcttcacagaagcagaatggaagagactgagtccagagcagaggaatctatacaaagaagtgatgctggagaattacaggaatcttctctcattg

SEQ ID NO: 97028 - DNA, 764 bp, Homo Sapiens
cagaaaggcagccaggttggccgtgtaggaagagatgatgatgagcgtgaagaaccaccagatgccaccaatgatgcgtgtggacagggcgtttgggcatcagctcagacccttgctgcatcagggatcccattccgaaccagaagctgttaagcagagtgaagttattttccaccacctcggagccagggttgcaggggtgagcatcgtaccactcataagggctgaacctggcgatgacgaagaggacacagctgacccccaggtaggcgaggagaacatacatccagatgtctggggacaggggattgaggaaggagaagacgctggggttggtgccattgggctttcgatacaggatgctcacaccaagtgtcatgaagggcttggagaagtcgatggccttctctcgaacatgggtgatggtcaggggggccacggccagatctgccttgtggtcgatgagctccttgaccatgccgttccactggcccttgtcatcctgtgccccgtacttgccgtcctccaccagccggatctcataggagaaaccaaggatgtgggccagctcctttagcaggtcgatgcagtagccctcgaaccggtcattcccgtatagcgtcctgtctgatttccgaaacatgacgaagggctcctccagcactgtggtgacaatgagtgatctgtttgtcagagagtcggtgaccctcgtgccgaattcgccacccaggcctcgctaccttaaaaccgttagagttactgcc

SEQ ID NO: 97029 - DNA, 752 bp, Homo Sapiens
  misc_feature (451)..(614): n is a, c, g, or t
ttacgtctaggtacgaggctggcgttgagaattcggcacgaggtttggatcctttgggattcccccacgggagtagtcaactgggcagcaggacacagtctagagtctagtaaactggagctgatctaagcaccagaacctgagctgatggcacaactgcccagtgcccagatgccggctccccgaacacagcccgacctcatcctggttcatccagtgctggccctgtctggacgagccccaagcatcctctgctcggtgccctgggacgcctgtgaactcctggccacggctatgtggtggaagacacggattctgtggggggttttccttatctctaggactcgcccacctgctcccatgcaaatcctcattttaactctggatcccagtgaaggagaggtgtgttgtaagaagaggaaacctggacagacaggaagaaaccgagtgnnnnnnnnnnnnnnnnnnnnnnnnnnnnnnnnnnnnnnnnnnnnnnnnnnnnnnnnnnnnnnnnnnnnnnnnnnnnnnnnnnnnnnnnnnnnnnnnnnnnnnnnnnnnnnnnnnnnnnnnnnnnnnnnnnnnnnnnnnnnnnnnnnnnnnnnnnnnnnnnnnnntggctccatggcctcccctgtcctggcccctcagtctctacgaactgggcacttgcaagcacaagaagggacctcagttcgggtgccacacccttgcttctccttgagttcggtcccaggggcaaggggaaggtccag

SEQ ID NO: 97030 - DNA, 956 bp, Homo Sapiens
ctagtagaggcctgggtttgaatcggccgaggggtgttgggcggtacttggacagcggttcttgagctctcgcggttgccggtagattgttgccagttgccagttgccagtcgtttttcggaaagctggcagcggctttttcaccgggttctgcttgaggccgagccaaagagtggctgtgactcgggagacggagtggaacacccggctgggcaggcccggacagctcccgcgacccagcaccgcaggatcagaccgtgcctctgcggggagaggctggagaggaagagtccggcctgggagccgtcagagcagccctgcagaacggggtgggggctgctgtagatagacccttacgcccagagaactgctgggaggctgtggcgcgaggcgggactcaaatgctggaggaaggagtactgccttccccaggccctgcccttccccaagaggaaaacacaggagaggaaggaatggctgctggtctcctcatagctgggccccggggatccacattcttcagcagtgtgacggtagcttttgcacaggaagggtggaggtgcctcgtgtctactccacgggacaggttcaaggaggggataccaggaaagtccaggagccttgtcctactaggacttccagtttcccagcctgcatgaactcccagttggaacaaagggaaggcgcatggatgctggagggcgaagacctgcgaagtccctctccaggctggaagattatatctgggatcaccaccagagcaaagcctttctgaagcttcattcccagaaccatgtgttagatgcccctggggattcgaccgggacgtgacctgagagaggttcatctgggaccagcctctccggaaaggtgccggaacgagactcgaattggaacccgggagttgaatggagacctgacccgagaacctttgtggggggcgtccaggtctctcg

SEQ ID NO: 97031 - DNA, 903 bp, Homo Sapiens
tccacagcacaaaccaaccctacggctagtacgaggctccgtgtttaatcggcacgaggggatggccgggcggcgatggtccgggcagtggcggcagcggcgccggcagctcgggctccagcccgagcagcgcggcctcggcttttctgggcaactacccctggtaccaccagacctcgggatccgcctcacacctgcaggccacggcgccgctgctgcaccccactcagaccccgcagccgcatcaccaccaccaccatcacggcggcgggggcgccccggtgagcgcggggacgattttctaaccccagggagaactcgccagagactgagagcagagaccacttatcctcattgcttaccccgagccggggttccctcctcccggcccgctgccgccacccacctctcctgcaggctgcgacctgcagtggcccgtctcaggccctgctcactcccggggccaccaaacgggcccctctctcgggggaaccggacagcagcttggcaaaggcctccctaaaaggccgcatttctgacctgagccccgggtctcggctgtttcgagccccgcctcggacttgccttccctcccctccgggtgagcctgtctggcgccttcctcgccccgggctgagagctgggtcccgggagatggaagcctcccaggcgcgcgaggcttcccgggcgctctgaggcttctttctcctcgcccgctcccctgggctcagctcggacgactgccaagttattgaaccttccgcgggttcccggccagggacggccccataccccaataataaacacattaaccacgacagaaccccgacagattcacacaaaaactgacaacccacagcccaataaaaacacaaaccacgaaatacaccaccatacaacaac

SEQ ID NO: 97032 - DNA, 514 bp, Homo Sapiens
gcgggcacgctcaccaccaaccgtatgaccgtggtccagtcctacctaggggacacccactacaaagagattccggcccccagcgccctgacccctaagatcctcgacctcctggtccatgccatctccatcaacagtgcctataccaccaaaatactacctcctgagaaggaaggcgccctcccacgccaggtgggcaataagacggagtgcgccctgctgggcttcgtcttggacctgaagcgggacttccagcccgtgcgcgagcagatcccggaagacaagctttacaaagtgtacaccttcaactcggtccgcaagtccatgagcacagtcatccgcatgcccgacggtggcttccgcctcttcagcaagggggcctcagagatcctcttgaaaaagtgcaccaacatcttgaacagcaatggcgaactccggggctttcggcctcgggaccgggacgacatggtgaggaagatcatcgagccgatggcttgcgatggcctccgcacca

SEQ ID NO: 97033 - DNA, 512 bp, Homo Sapiens
  misc_feature (47)..(91): n is a, c, g, or t
acatcgagcacgtgctgctccggcgcccgtgactgcccttcccggtnnnnnnnnnnnnnnnnnnnnnnnnnnnnnnnnnnnnnnnnnnnnntccgtgttgcccgctccccctcggtgtttgcatgcgccccggccatgccccttggccctgcccctgtccccgggctgcgtcgggacctgccagacccccctcccgggtcctgagcccgaactcccagagctcacccgcgggtgaccgggggccagcccaggagggcgggtggtttgtgcgagttcccttgccacgcggggccccggccccatcaagtccctctggggacgtccccgtcggaaaccggaaaaagcagttccagttaattgtgtgaagtgtgtctgtctccagcccttcgggcctcccacgagcccctccagcctctccaagtcgctgtgaattgaccccttctttcctttctctgttgtaaatacccctcacggaggaaatagttttgctaagaaataaaagtgactatttt

SEQ ID NO: 97034 - DNA, 310 bp, Homo Sapiens
aaaaaagcttatctacttggagagttcgcatagtagaaagaacaagtatggtattctgaaatttaggggctttagattgcaaaagaaaacctcttccagtctcgttagcaggtttagaaccagccaaatggctgttatttaattggatctcccattgtatcggcagtttttcttggttagcgcacattgtaattataacttatgtataaggtggtgctatatactataaggagttaacgaaattcagtttggaccctaacatacagttataagatgtatatagaaaatagccaggtgcggtggctcacgc

SEQ ID NO: 97035 - DNA, 961 bp, Homo Sapiens
tacggtaggtacgaggctgggtggcgaattcggcacgaggggccaaactcactcttttgaacttaacattttccccctgacattggagactctcctgctacctctctcctaagaaaaaagggcaggtggtggggggacaagccccttccaccttcccatctccaagggactttgcagtgtgggtgatggtgtggctgatcatcctctttctgcacctctgattctgcttgtgttgtccttattgtgtggggcaggagggttaggacttcagctaggggtgtgctggctctgcagtgactcaggcctgggtgttttttggtgaatttaaaaagatgaccatttctgggggaaagtgacacttttactttctccacaccttcaccatccattttcttactggacttcgctgcgttcctgcaaggaggacagggcagagagtagcaaccctccttgccgaggcccagaaagatagcgtggtgtgcccagggcacccatggtgggtgatggacatctccttttgggtgccaaggcttcctcaaggtgggaggaactggagggcaggggacggtggccagtgtcccgctctagccctctagggcacctttttctcccctctgaagttgttaggctgatctggagtctgctccaggcctgggcttcaccctggcctcatgccctgcccagcacctgtgtgcgagggacctgttcgtatccattcctctttgggggccaagctcagggcaaccgaaacagcagcctgggtggctgaactagtgggacagaaggaggcagggtatctggcagagtcacccagcaaggctgagcaagcagagagcaggcaagctgggtcaggacctgtgctggccctgtgttggcatgtggaggatcgggggtccagggagccgcaaaccggtcgaggcagccggccttccggggagtggcccgggatgggagcgccaca

SEQ ID NO: 97036 - DNA, 774 bp, Homo Sapiens
cggcagtaactaccacggtcttaaggtagcgaggcctgggtggcgaattcggcacgagggatgagcctcatccggaaaaagggcttctacaagcaggacgtcaacaagaccgcctgggagctgcccaagacctacgtgtccccgacgcacgtcggcagcggggcctatggctccgtgtgctcggccatcgacaagcggtcaggggagaaggtggccatcaagaagctgagccgaccctttcagtccgagatcttcgccaagcgcgcctaccgggagctgctgctgctgaagcacatgcagcatgagaacgtcattgggctcctggatgtcttcaccccagcctcctccctgcgcaacttctatgacttctacctggtgatgcccttcatgcagacggatctgcagaagatcatggggatggagttcagtgaggagaagatccagtacctggtgtatcagatgctcaaaggccttaagtacatccactctgctggggtcgtgcacagggacctgaagccaggcaagcctggcatgtgaatgaggactgggaactgaagattctggatttgggctggcgcgacatgcagacgccgagatgactggctacgtggtgacccgctggtaccgagcccccgaggtgatcctcagctggatgcactacaaccagacagtggacatctggtctgtgggctgtatcatggcagagatgctgacagggaaactctgttcaggggaagatcctggacagttgacagatctgaaatgacggggtgc

SEQ ID NO: 97037 - DNA, 1138 bp, Homo Sapiens
ggtaccggtccggaattcccgggatggcggcgcggggcgggcgcagcgggggtcggggcgctgggagcccgttgggccgcgaacgcagccgccacgccggggccgcgagatcgggtgcccgggatgagcctcatccggaaaaagggcttctacaagcaggacgtcaacaagaccgcctgggagctgcccaagacctacgtgtccccgacgcacgtcggcagcggggcctatggctccgtgtgctcggccatcgacaagcggtcaggggagaaggtggccatcaagaagctgagccgaccctttcagtccgagatcttcgccaagcgcgcctaccgggagctgctgctgctgaagcacatgcagcatgagaacgtcattgggctcctggatgtcttcaccccagcctcctccctgcgcaacttctatgacttctacctggtgatgcccttcatgcagacggatctgcagaagatcatggggatggagttcagtgaggagaagatccagtacctggtgtatcagatgctcaaaggccttaagtacatccactctgctggggtcgtgcacagggacctgaagccaggcaacctggctgtgaatgaggactgtgaactgaagattctggattttgggctggcgcgacatgcagacgccgagatgactggctacgtggtgacccgctggtaccgagcccccgaggtgatcctcagctggatgcactacaaccagacagtggacatctggtctgtgggctgtatcatggcagagatgctgacagggaaaactctgttcaaggggaaaagattacctggaccagctgacccagatcctgaaagtgaccggggtgcctggcacggagtttgtgccaaaagctgaacgacaaagcggccaaatcctaaattcaggtcctggcacaggaccccggaggtttcctcagctgttcccggcagccccaggtggactgtggggacatgctgacgctacgtgggaggctggagcgggaggcctccatccttttggctccggcttgggaagggggcccgcttgtctttaccgacccggggggccttggggtttcccgcgggggcggggtggttttccgcccgttcctccggctggggggagccgtccttccgtg

SEQ ID NO: 97038 - DNA, 1042 bp, Homo Sapiens
cggtccggaattcccgggatcctcacggctcttctcccggtccctgaaactcggctgccaggggagctggagccacctgcgaaggtgtcctcccatactggacccctacaggaagctccgtgtgcccagctggggcacagccccagctgatgccccagaggggccacccatcgcaagaggggctttgggctctgccctccctccccatggcgcatgggccaaagcctgagactgaaggactgttggacctcagcttcctgacagaggaggagcaggaggccattgctggcgtcctccaacgagatgcccgcctgcgccagctggaggaggggcgggtcagcaagctccgggcctcagtggcagaccctgggcagctgaagatcctgacaggggactggttccaggaagcacgctcccagcggcaccacaatgcccacttcggctctgaccttgtccgagcgtctatgcgcaggaagaagagcaccaggggagaccaggctccaggccacgacagggaggctgaggctgctgtgaaagagaaggaagaggggccagagcccaggctcaccattgatgaggcccctcaggagaggctcagggagactgagggacctgatttcccatcgccttctgtccccctaaaggcttcagatcctgaggaggcgtcccaggcccaggaagatcctggccaaggagaccaacaggtctgtgccgaggaggctgacccggagctggagcccgcgtcgggggggagagcaggagccgcggccccagcaagcccagaccaaggccgcgtcccagatcctggagaatgggggaggaggcccccggggcccgaacccctcttctcgaccgcatggctcagcagcaaggctccttcggtggccccagcctttaaactcctcccacgcctgaagccggcagcccagaaatggagccttgtccagggccaaaacccgcaaaagaggcgggggcccaaggggtcccccccgggcttcccgtgggcacttttctgcgcctggcaaaattaacgaagagcccg

SEQ ID NO: 97039 - DNA, 688 bp, Homo Sapiens
tacggctagtacgaggctgggtgtgaattcggcacgaggcactccctttcctctgctgccgctcggtcacgcttgtgcccgaaggaggaaacagtgacagacctggagactgcagttctctatccttcacacagctctttcaccatgcctggatcacttcctttgaatgcagaagcttgctggccaaaagatgtgggaattgttgcccttgagatctattttccttctcaatatgttgatcaagcagagttggaaaaatatgatggtgtagatgctggaaagtataccattggcttgggccaggccaagatgggcttctgcacagatagagaagatattaactctctttgcatgactgtggttcagaatcttatggagagaaataacctttcctatgattgcattgggcggctggaagttggaacagagacaatcatcgacaaatcaaagtctgtgaagactaatttgatgcagctgtttgaagagtctgggaatacagatatagaaggaatcgacacaactaatgcatgctatggaggcacagctgctgtcttcaatgctgttaactggattgagtccagctcttgggatggacggtatgccctggtagttgcaggagatattgctgtatatgccacaggaaatgctagacctacaggtggagttggagcagtagctctgctaattg

SEQ ID NO: 97040 - DNA, 917 bp, Homo Sapiens
ggggcggactgtcctttcgtggctcactccctttcctctgctgccgctcggtcacgcttgctctttcaccatgcctggatcacttcctttgaatgcagaagcttgctggccaaaagatgtgggaattgttgcccttgagatctattttccttctcaatatgttgatcaagcagagttggaaaaatatgatggtgtagatgctggaaagtataccattggcttgggccaggccaagatgggcttctgcacagatagagaagatattaactctctttgcatgactgtggttcagaatcttatggagagaaataacctttcctatgattgcattgggcggctggaagttggaacagagacaatcatcgacaaatcaaagtccgtgaagactaatttgatgcagctgtttgaagagtctgggaatacagatatagaaggaatcgacacaactaatgcatgctatggaggcacagctgctgtcttcaatgctgttaactggattgagtccagctcttgggatggacggtatgccctggtagttgcaggagatattgctgtatatgccacaggaaatgctagacctacaggtggagttggagcagtagctcctgctaattgggcacaatgctcctttaatttttgaacgagggcttcgtgggacacatatgcaacatgcctatgatttttacaagcctgatatgctattctgaatatcctataggaaaagggaaaactctccatacagtgctacctcagtgcattaaaccgctgctgctctgtctactgcaaaaagatcatgccccgtggcagaagaggggaatgataaagattttaccttgaatgattttggcttcatgatctttccccacccatattgtaaactggttccaaaatctctaacttcggatgttgctgaatga

SEQ ID NO: 97041 - DNA, 557 bp, Homo Sapiens
ccgcgcgcggccagggatgtttggctgcgtacttgcatgagctttccacccacttgagcccagtcctccgggccgttcctcgcccccacccctgtctggcgtgaccccagcctcagcctctttctaagggacttcctcagcacatttgtatttttatatccgactctttgtttactggctctgctcatggttcctgccctcccctcagtctcggccacgctcttctgcgcctggcagataggatgggtgttgaggctgggatgagacaagcccccgacacggttaccaaccacatggccagtctgcccaggcctgaccccaggaggctttctggcagaccccttctccccaaggtatcatcaccttccaagggcccagatccgattttaccttggacccctgcgtcttgcccctgggaacccaaatggggactgctctgaacctttggatgacatctgtggccccggagatgttctcaacccaggggtgcccttcgtaaatgttcctccatcctcactgtaccaggagtgtgtgaataaacacagaccccctctgtg

SEQ ID NO: 97042 - DNA, 1221 bp, Homo Sapiens
ggcacgaggggacgtaatcatcaagtgccagctgcccaagcgcttcacggcgcagggcctccccgacctcaaccactcccaggtttatgccgtgaagactgtgctgcaaagaccactgagcctgatccagggcccgccaggcacggggaagacggtgacgtcggccaccatcgtctaccacctggcccggcaaggcaacgggccggtgctggtgtgtgctccgagcaacatcgccgtggaccagctaacggagaagatccaccagacggggctaaaggtcgtgcgcctctgcgccaagagccgtgaggccatcgactccccggtgtcttttctggccctgcacaaccagatcaggaacatggacagcatgcctgagctgcagaagctgcagcagctgaaagacgagactggggagctgtcgtctgccgacgagaagcggtaccgggccttgaagcgcaccgcagagagagagctgctgatgaacgcagatgtcatctgctgcacatgtgtgggcgccggtgacccgaggctggccaagatgcagttccgctccattttaatcgacgaaagcacccaggccaccgagccggagtgcatggttcccgtggtcctcggggccaagcagctgatccttgtaggcgaccactgccagctgggcccagtggtgatgtgcaagaaggcggccaaggccgggctgtcacagtcgctcttcgagcgcctggtggtgctgggcatccggcccatccgcctgcaggtccagtaccggatgcaccctgcactcagcgccttcccatccaacatcttctacgagggctccctccagaatggtgtcactgcagcggatcgtgtgaagaagggatttgacttccagtggccccaacccgataaaccgatgttcttctacgtgacccagggccaaagaggagattgccagcttcgggcacctcctacctgaaacaggaccgaggctgcgaacgtgggagaagatcaccaccaaagtttgctgtaggggcaggcgcccaagcccggaccaagattgggcatccatcacgccccctaacgaaagggccaagcgccttccttacccttggtggcaagatacattgtccaattttcaaggggggtttccccctggcacaccccaaggttttctttacaccaagaggaggtgggggggaaaattccccccacaaggggtgtggaaaacccccctttttttta

SEQ ID NO: 97043 - DNA, 527 bp, Homo Sapiens
ggcacgaggagaatgtgaagaccaactatgttgtttgggggactggaaaggaaggccaacccagagagtactacacattggattccattttatttctacttaataacgtgcacctttctcatcctgtttatgtccgacgtgcagctactgaaaatattcctgtggttagaagacctgatcgaaaagatctacttggatatctcaatggtgaagcgtcaacatcggcaagtatagacagaagcgctcccttagaaataggtcttcagcgatctactcaagtcaaacgagctgcagatgaagttttagcagaagcaaagaaaccacgaattgaggatgaagagtgtgtgcgccttgataaagagagattggctgcccgtttggagggtcacaaagaagggattgtacagactgaacagattaggtctttgtctgaagctatgtcagtggaaaaaattgctgcaatcaaagccaaaattatggctaagaaaagatctactatcaagactgatctagatgatgacataact

SEQ ID NO: 97044 - DNA, 509 bp, Homo Sapiens
gaatgggcgaaatgaacgtgaaagcagtacatgttcttcctcaaactttcttggaagggtcagaaaacagaagattgaaaaatacccaatatctaacatcgggccattgagttcgtccaaaaaaagcagaagagtatttctgaaccaaagaaacagaatagaaagagaggatgagaatggagacctgctggccgtgcatcagctatttaaaggaagaaagggctggagcccagagttaaccaaagcttagccttagaccaaacagggcttcccagcacaggtttccaaggaaccctttctgctccagtcctctacagtgagaagagcccagaataacactgtccaatggagctgacatgagcttcagcaccagaaagggtgatatggtcaccaaatattcagtcagcctcacagctgctggctgggcaggttgagggctttgtaggagaagcccagccttgacaaatgagtaacaggcttgaggaactttgaaaagaaggcctcgtgcc

SEQ ID NO: 97045 - DNA, 447 bp, Homo Sapiens
accagcatgagacgatgatgaagcttgtcctggaagacccactgcttgtgtctctcaggctggaggggggcaccgtcctggcgcggctgaggagagaagagcttggcacagaagacagccgggacaccctggaggccgccacaagcctgtacgaccgagtggatgaggaggtgcacaggctggtcctcacctcgaacaatcgtctccagcagctggagcacctccgggagctggcgtcactcctggaagggaatgaccaggtcagagctgcaggaggaaggcggcccggtcagcatcccctccaggccaggctggccaaggcaaccctctcaccttcacactgtgtctttagggccttgatctgatttccatttggaatgaaattatgtcaggatagggcatgccttgctgcttgtgtaaaaagaaataaattttattttttacgtg

SEQ ID NO: 97046 - DNA, 440 bp, Homo Sapiens
cagtcctccactccacctcaaactcttaccttgaccttgctgctctcacagcattgcagactggctaggatctgactctcgatggcctggacccaggcatcccgctcctcaaaactggctgcctcaaagtgccacgtctgacccgtgctggacacgatcaggaactcaaagttttcctctgagtgggggatgggatggggtcattaagggacagagttcaagcaggggctgcctttcccaagaccgtcctccctgatgtccatcccgagcccctgggagtggggcagtgggggtagggaaagcagagggtggggggcagcaggaagcccgagcacatgcaggggaaggcgggggcacccccacccttctgcaccccagctgagcgcccctcccggctccccacttgttacctgctttataaatatttcttaaactaaaaa

SEQ ID NO: 97047 - DNA, 1224 bp, Homo Sapiens
  misc_feature (695)..(695): n is a, c, g, or t
ctgggagcctctgccggagccgccgcctccgtcgcacagtcgggaggctttgcagtgaacttcgaccacttccagatccttcgggccattgggaagggcagctttggcaaggtgtccccacgtgtccccaggcgtcctcaggcgtcctgccgaacagccctgtgccctccaggtgtgcattgtgcagaagcgggacacggagaagatgtacgccatgaagtacatgaacaagcagcagtgcatcgagcgcgacgaggtccgcaacgtcttccgggagctggagatcctgcaggagatcgagcacgtcttcctggtgaacctctggtactccttccaggacgaggaggacatgttcatggtcgtggacctgctactgggcggggacctgcgctaccacctgcagcagaacgtgcagttctccgaggacacggtgaggctgtacatctgcgagatggcactggctctggactacctgcgcggccagcacatcatccacagagatgtcaagcctgacaacattctcctggatgagagaggacatgcacacctgaccgacttcaacattgccaccatcatcaaggacggggagcgggcgacggcattagcaggcaccaagccgtacatgggctccggagatcttccactcttttgtcaacggcgggaccggctactccttcgaggtggactggtggtcngtggggggtgatggcctatgagctgctgcgaggatggaggccctatgacatccactccagcaacgccgtggagtccctggtgcagctgttcagcaccgtgagcgtccagtatgtcccccacgtggtcccaaggagatggtggccttgctgcggaagctcctcactgtgaaccccgagcaccggctctccagcctccaggacgtgcaggcagccccggcgctggccggcgtgctgtgggaccacctgagcgagaagagggtggagccgggcttcgtgcccaacaaaggccgtctgcactgcgaccccacctttgagctggaggagatgatcctggagtccaggcccctgcacaagaagaagaagcgcctggccaagaacaagtcccgggacaacagcagggacagctcccagtccgagaatgactatcttcaagactgcctcgatgccatccagcaagacttcgtgatttttaacagagaaaagctgaagaggagccaggacctcccgagggagcctctccccgcccctg

SEQ ID NO: 97048 - DNA, 2127 bp, Homo Sapiens
tggctaggtggaggccgggggtgaatcggcacgaggagcggcgccgatgcactcccgggagcatgaaggaccgaacccaggagctccgcacggccaaggacagcgatgatgatgatgatgtcgctgtcaccgtggaccgagaccgcttcatggatgagttctttgagcaggtggaggagattcgaggcttcattgacaagatcgcagagaacgtggaggaggtgaagcggaagcacagtgccatcctggcatcccccaaccccgacgagaagacgaaggaggagctggaagaactcatgtccgacataaagaagacagcaaacaaagttcgttccaagttaaagagcatcgagcagtccatcgagcaagaggaaggcctgaaccgctcctccgctgacctgaggatccggaagacacagcactccacgctgtccagaaagtttgtggaggtcatgtcggagtacaacgccacgcagtccgactaccgcgagcgctgcaaaggccgcatccagaggcagctggagatcaccggcaggaccacgaccagtgaggagctggaggacatgctggagagtgggaaccccgccatctttgcctctgggatcatcatggactccagcatctcgaagcaggctctgagcgagattgagacgcggcacagtgagatcatcaagctggagaacagcatccgtgagctacacgacatgttcatggacatggccatgctcgtggagagccagggagagatgattgacaggatcgagtacaatgtggaacacgcggtagactatgtggagagggccgtgtctgacaccaagaaggccgtcaagtaccagagcaaggcgcgccggaagaaaatcatgatcatcatctgctgtgtgatcctgggcatcgtcatcgcctccactgttgggggcatcttcgcctagaaaccacccaaactgccactccactccaggtgggccactccaaggaggccctggctgctgccacctggctgggctgccctcccaacccccgcctctggctcagagcaccctccctcccggcccccatgctcccttctctgccatgggccctccgtccccgccccgtgtcgtgtgcatgatctctgtgagtgtgcgtctgtacgggaagaggcagagggaggcagccagcggggcgtgatgcagtgtgcacagcgaggagcagacccaggcagggccgccagggtgacacaggccacgcttccttgccttcagtaactcggtgggcccaggttctgctcttccctggggaccctaacctcgcctccagctgacctgccctgtcctctccagctgtccccacaagcagagccctgaggggtggggaccagctggccacatggtgctgcttttcaggttaggggagaggtggccctgagggacagcccagctctgagtctcagtcgctgatcactgccagggaggctcaggctgccatggctccaggctccctcccctgcctaggggcaaagtccatcgggtcctgggcctcagcttcccttcccacattcctccggccccaggagcaaccccttgggctaggtctgaccccaggtgtccctctggaaggggctggctggtgccctatttccagccaccccagcagctagggaggcaaagcaggctgcagtcagtccctcaagccagcgttgcatgtttgggatggtggctcctgttgtcttgcgctctgggaagtcagatgtcatttcaggcctgcagtctcatcctgcccttgccatcctcccatcgatgtgccacgtgggtgtcacgtgtcccagatgcagtattcggcagccagccggggagggctacctcctcctcctcaccaccttggggcttctcatgggaaatgtgcccccgccccaggaccctctcccttgtggacaggcagggagatgcatgcgagtgcatgcagcaggggatggggccgtgtccgtgtgccccaccctccctcggctttactcctgcccagtgactgtgaccactgtccgtgttgccttcttgaacagcgattccccccaaccccttcaccaaaggtcttggtacaaccagctgcccattttgtgaaatttttatgtagaataaacatttgtatctgtaa

SEQ ID NO: 97049 - DNA, 685 bp, Homo Sapiens
ctaggctaggtacgaggctgggtggtgaatcggcacgaggctgtgtcgccgccgcccgcggcgtccccggtttggtgttgcggcgcccaccttcgggaggatcaggctgcttctgatgcttggaagatatcctctcagccacaaagatggtaataaatctttgcctcccacagttcagaccaagaattcactgcaacaagatatcagctgatggttacgaagtagaaaatctcatctctgaagatctcacaaagagaagtcatggtttcaggacagagtatttcattaagccaccagtctatgtgacagtttcatttccctttaatgtggaaatctgtaggatcaacatagacctcacagctgggggaggtcagaacgtcactggcctggaaatgtacacatctgcctcatctagcagagtgtcttggaatacgccccagtgccggaccctgggcccagctgagccatctgtcccagacaaggaggcgttcaccttggtaggcaaagtcttactgaaaaaccagagccaagtggtgtttagccacaggggcttcaaggccaggcccccttttggcgcgatggaagccacactcccctcccctgctgttgtggcccaggagctctggaataaaggggctctttcccttagccacgtggcccacttaaggatctgtatcacccatgt

SEQ ID NO: 97050 - DNA, 865 bp, Homo Sapiens
  misc_feature (278)..(311): n is a, c, g, or t
ggcacgagggcgcccagcatgagggtcgcggctctgatcagtggtgggaaggacagctgctataatatgatgcagtgcattgctgctgggcatcagatcgttgctttagcaaatctaagaccagctgaaaaccaagtggggtctgatgaactggatagctacatgtatcagacagtggggcaccatgccattgacttgtatgcagaagcaatggctcttcccctctatcgccgaaccataagaggaaggagcttggatacaagacaagtgtacaccannnnnnnnnnnnnnnnnnnnnnnnnnnnnnnnnngcttttgaaacttgttaaggaaaaagaagaagtagaggggatatcagtaggtgctatactttctgactatcagcgtattcgagtggaaaatgtgtgtaaaaggcttaatctccagcctttagcttatctttggcagagaaaccaggaagatttgctcagagagatgatatcatctaacattcaagcaatgatcatcaaagtagcagctttgggtttagatcctgataagcatcttgggaaaaccctggatcaaatggagccttatctcatagagctttctaagaagtatggagtacatgtttgtggagaaggtggagagtatgaaactttcactttggattgccctctatttaagaagaaaataattgtggattcatcagaagtagtcatacattcagctgatgcatttgcacctgtggcttatctacgctttttagaattgcacttggaggacaaggtgtcctcagtgcctgacaactacagaacatctaattatatatataatttttgaaaagtgttttggaacattgttcattaaaccaccatttctatac

SEQ ID NO: 97051 - DNA, 845 bp, Homo Sapiens
  misc_feature (692)..(703): n is a, c, g, or t
ggggtagtcatggccgccttccgcgacatagaggaggtgagccaggggctgctcagcctgctgggcgccaaccgcgcggaggcgcagcagcgacggctgctggggcgccacgagcaggtggtggagcggctgctggaaacgcaagacggtgccgagaagcagctgcgagagatcctcaccatggagaaggaagtggcccagagccttctcaatgcgaaggagcaggtgcaccagggaggcgtggagctgcagcagctggaagctgggcttcaggaggctggggaggaggacacccgtctgaaagccagcctccttcagctcaccagagagctggaagagctcaaggagattgaggcggatctggagcgacaggagaaggaggtcgacgaggacacgacagtcacaatcccctcggccgtgtacgtggctcaactttaccaccaagttagtaaaattgagtgggattatgagtgtgagccagggatggtcaaaggcatccatcatggccccagtgtggccccagcccatccacctggacagcaccccagctctccagggaattcatcagcgactaccctctggagtctggtggacacccgagtggtagccaggagcctcgtggctgcgtcttgcacccagcgggcatctgccgtggtcagatccatttccaatgaaagcgggggactagaacnnnnnnnnnnnnacgttttgggaaggggaacgccactttattttttcacaccacacctcgtgcatctatacacgattgccactcccgcgttccgacacatagcagtgagaccgcgtactgtattttataggcccccccacactgcccctcgctc

SEQ ID NO: 97052 - DNA, 691 bp, Homo Sapiens
aagtacggtaggtacgaggccgggtgtgtaattcggcacgaggcagcccacccgccgccacccataagctatgaggaggaggttacgaccacctggactactaccacctgcgtgacttcccggcctgcggggtccgcgcagcaaaggcttgacgctgctggagcaggcgctgcgcacctactggctggcgcctggtaggcacgagcgcagggtcgcccagaagctcctcaatggcctgagcaagtaccagccagcgccagctgcagccctggccgcgcactcgcctcagctgagcctggattgaaagattccagagcaagaagttgaaagcacaaggcggtgaggcaccctgcgcaccgagagcaacctccccagccggcggctgcatggcgcatcccggaagcgggcagaggggcctcaggctctctcccgccagggcggagggccccatcccctttcccagcgcctccggcgtggccggcggttcagtgacctagcttgagccacgcaccaaccaggagcgacagcagggacagcagcggtgatgaacaacccatgctggcatcaggactggcgcgccacgccgagcacacccacggccccgctgctcatccgccctcacgcaccacggtggcagtcgcctcctccacacatgcgcatgctgctccaacaccgccctcacccaacggtc

SEQ ID NO: 97053 - DNA, 1072 bp, Homo Sapiens
tcatatcaatacggctaggtactgaggcctgggtggttaatacggcacgagggccggctgagctgagtctcgctgctcggtgcgaggcggcggagagcgaggcctggtgagcaccgccgaggcgcgggccagctcttcgaggttgtgcgcgggagtggcacggcgggcgggcgagcgaggggctaacttcagcggtggcaccgggatcggttgccttgagcctgaaatcatgaccaccccaggaaaagagaactttcgcctgaaaagttacaagaacaaatctctgaatcccgatgagatgcgcaggaggagggaggaagaaggactgcagttacgaaagcagaaaagagaagagcagttattcaagcggagaaatgttgctacagcagaagaagaaacagaagaagaagttatgtcagatggaggctttcatgaggctcagattaataacatggagatggcaccaggtggtgtcatcacttctgacatgattgaaatgatattttccaaaagcccagagcaacagctttcagcaacacagaaattcaggaagctgctttcaaaagaacctaaccctcctattgatgaagttatcagcacaccaggagtagtggccaggttcgtggagttcctcaaacgaaaagagaatcgtacactgcagtttgaatcagcttgggtactgacaaatattgcttcaggaaattctcttccagaaccgaattgtgattcaggcaggagctgtggccatcttcatagagtgctcagctcagagttgaagatgtccaggaacaggcagtctgggctctgggcaacattgctggagaatagtaccattgtgcagggactatgtctaagactgcaatattcttcccctctttgcaggtaattgtcaaggaaaaccggctgacatgacccggaatgcaggaatggggttggcctaatctctgtagcagggaacggtcacactccagaaattggcaaggtttctccatgtcttgaatggcttacctagctgatgttggtcagtgaccgtgttacgggtgatcctgtgggccctcatttttcaaaggac

SEQ ID NO: 97054 - DNA, 1252 bp, Homo Sapiens
agctggcctacagctgcttcagccacctcatgaagaggatgagccagaacttccccaacgggggtgccatggacacccactttgccaacatgcgctccctcatccagatcctggactcagagctgtttgagctgatgcatcagaatggagactacacccacttctacttctgttatcgctggttcctgctggattttaagagagaactgctgtatgaggatgtgtttgctgtgtgggaggtgatctgggcagccaggcacatctcatcggagcactttgtcctgttcatcgccctcgccctggtggaggcctaccgagagatcatccgtgacaacaacatggacttcactgacatcatcaagtttttcaatgaacgtgctgagcatcacgatgcccaggagatcctgcggattgcccgggacctcgtccacaaggtgcagatgctcatagagaacaagtgagctggggccaggaggcagcagccgtgcagagcctgggctccggcagggagaggtgcaggggagtcaccgcccagacctccccagccaccaaccgaccccacctctgttcctaacaaagcggttgtgagcctggatccgactcccggcagtgctgaccctgcagggcaagtcaggggccaggatgccctcggatcagggccgggatgggaggggtcagcctcagggagcagctgccttgggggacacacctactctgctcccctctcacacatctgggagtagccccactgccacctgcagccgcagcctggactgctgcccacgagatgaacctggggccccaaccaggattaacaggggctatagcgggctgggccctactcagactggggtggcagagggcgagaggctctgtgctgttggcccttctgagggtccctttgcagtcccagtatatagtgcgtgcaccaagcccagctggagcaacaaaactgcttctggtaataggcaacacgtcacgggttgcgggagaccgggcacgggagaccgggccgcttccaggccagtccccgagatactgggggcacgcggacatatgatgcgcccctgggatggaaacagcccaaaatcagacaggcattgtcaattgacacattggcacaactgagggtgaacacccaggacttcacgggagccatagaacaggggtaccatcctgagtaaactgtaaaagcgcatcgttacttgcaaacccaaccatgcgtacgaaaataggtacttcactgaacaca

SEQ ID NO: 97055 - DNA, 850 bp, Homo Sapiens
tctaggtacgaggctgggtgtgtaattcggcacgagggcacccagaagctccagaggggcccagtgctgcagcctgccacacctcccaccactcagcaggctccagtgcctgggggccgctaggaggacaagctgtgtggtgaccccaaactgtgtcccagtagagggtccctggctgcaccaaagagtgaagactgttcttgcatcctcagcctgtgtcagcacagacggctggcagcctccattgccacaaccccagctgggccttcctgatgtgcctgcccggcagccacaccccgagcaagaagggtggccaccctggcacaggagacttccccagccaggtgcccaagcaggtgctggactgtcagtcaggagctgctgcagtcctggggtcgtcaccctcccagggacccgagacctgtcatggcagagcagtggtgcatggtccgcaccaggagcctgctctggaccagggaacactcgtcctgtgctgagctgacccgcctgctgctgtacttccatagcatccccaggaaagaggtccgggacctggggctggttgtcctggtggatgcacgcaggagtccagctgcccctgccgtctcccaggccctctcaggattgcagaacaagcacatctcctataattcatagtatcttgctgttgggtagataaagaaatctgcatttaggcctgacaaggatgcaataattcagtgtgaggtcgtgagctccctgaaggccgtgcacaaatttgttgacagctgccagctgaccgcagacctcgacggctcctttccctacagccatggtgactggatctgcttccgtcagaggctggaacact

SEQ ID NO: 97056 - DNA, 1062 bp, Homo Sapiens
gcacttaggctagtagaggcctgggttgtgaatcggccgaggcagcagctatcgcagcgtcggatgttcagagcagcagaagccggcgtcgtcggatgttgtgttgcccgccaccatgagctacacaggctttgtccaggatctgaaaccactttgcagtcgacatactcggataccagcgctcagccgacctgtgattatggatatggaacttggaactctgggacaaatagaggctacgagggctatggctatggctatggctatggccaggataacaccaccaactatgggtatggtatggccacttcacactcttgggaaatgcctagctctgacacaaatgcaaacactagtgcctcgggtagcgccagtgccgattccgttttatccagaattaaccagcgcttagatatggtgccgcatttggagacagacatgatgcaaggaggcgtgtacggctcaggtggagaaaggtatgactcttatgagtcctgcgactcgagggccgtcctgagtgagcgcgacctgtaccggtcaggctatgactacagcgagcttgaccctgagatggaaatggcctatgagggccaatacgatgcctaccgcgaccagttccgcatgcgtggcaacgacaccttcggtcccagggcacagggctgggcccgggatgcccggagcggcggccaatggcctcaggctatgggcgcatgtgggaagaccccatgggggcccggggccagtgcatgtctggtgcctctcggctgcctccctcttctcccagaacatcatccccgagtacggcatgttcccggcatgcgagtgggggcgcgttcccggggggtccgttggttcgggtggcaaggtgagccgatgaggcggcctgtagaccgggccagggttccgggccgaaaaaagaaacgggggctgtgagcaaaaaccgcgggcgtggcaaagtcaagtaggcgcggggcagacttagcgcggagcccccggcggggcggaaagaaagagaccacgaggcgtcaaaaacgacgttcttgcgcaaaacatcacgccgcc

SEQ ID NO: 97057 - DNA, 1319 bp, Homo Sapiens
tagcctagtagaggcgggtggtaatcggccgaggatgtcagagcagcagaagccggcgtcgtcggatgttgtgttgcccgccaccatgagctacacaggctttgtccaggatctgaaaccactttgcagtcgacatactcggataccagcgctcagcccacctgtgattatggatatggaacttggaactctgggacaaatagaggctacgagggctatggctatggctatggctatggccaggataacaccaccaactatggaattaaccagcgcttagatatggtgccgcatttggagacagacatgatgcaaggaggcgtgtacggctcaggtggagaaaggtatgactcttatgagtcctgcgactcgagggccgtcctgagtgagcgcgacctgtaccggtcaggctatgactacagcgagcttgaccctgagatggaaatggcctatgagggccaatacgatgcctaccgcgaccagttccgcatgcgtggcaacgacaccttcggtcccagggcacagggctgggcccgggatgcccggagcggccggccaatggcctcaggctatgggcgcatgtgggaagaccccatgggggcccggggccagtgcatgtctggtgcctctcggctgccctccctcttctcccagaacatcatccccgagtacggcatgttccagggcatgcgaggtgggggcgccttcccgggcggctcccgctttggtttcgggtttggcaatggcatgaagcagatgaggcggacctggaagacctggaccacagccgacttccgaaccaagaagaagaagagaaagcagggcggcagtcctgatgagccagatagcaaagccacccgcacggactgctcggacaacagcgactcagacaatgatgagggcaccgagggggaagccacagagggccttgaaggcaccgaggctgtggagaagggctccagagtggtaagtggctctggctgggcattttctgtctgcaggcagggcgagctggcctaaagagtggtgctctccctggggccagaggcaatgctgtgtcagctctgcgtgcatggtgaccagcatggggaggcagtgtggtctggcagaaagcacaggctgcctagctggaggcacagtttccttgttggaaaatgggatgagcccctgtgcaccaggtagtgggaggatgtgaggtttctggcacatagccgggccttgtcatttaaagccattgtaaataactgggctactctgggccaccctgcctataggatagccctgctctgtctatggagcaagcagctgttttactatat

SEQ ID NO: 97058 - DNA, 771 bp, Homo Sapiens
  misc_feature (727)..(727): n is a, c, g, or t
  misc_feature (738)..(738): n is a, c, g, or t
ggttagcagcagctatcgcagcgtcggatgttcagagcagcagaagccggcgtcgtcggatgttgtgttgcccgccaccatgagctacacaggctttgtccagggatctgaaaccactttgcagtcgacatactcggataccagcgctcagcccacctgtgattatggatatggaacttggaactctgggacaaatagaggctacgagggctatggctatggctatggctatggccaggataacaccaccaactatgggtatggtatggccacttcacactcttgggaaatgcctagctctgacacaaatgcaaacactagtgcctcgggtagcgccagtgccgattccgttttatccagaattaaccagcgcttagatatggtgccgcatttggagacagacatgatgcaaggaggcgtgtacggctcaggtggagaaaggtatgactcttatgagtcctgcgactcgagggccgtcctgagtgagcgcgacctgtaccggtcaggctatgactacagcgagcttgaccctgagatggaaatggcctatgagggccaatacgatgcctaccgcgaccagttccgcatgcgtggcaacgacaccttcggtcccagggcacagggctgggcccgggatgcccggagcggccggccaatggcctcaggctatgggcgcatgtgggaagacccatgggggcccggggccagtgcatgtctggcgccttcncgggcggctcncgctttggtttcgggtttggcaatggcatgaag

SEQ ID NO: 97059 - DNA, 688 bp, Homo Sapiens
aaacgatacgagctaggtagcgaggccgggtgtgtaatcggcacgagggaaaagtcagcgcagtaagtgatgtggcattatgtatgcccaagacatgaaatatgcattggaggagcatgagaaagaccacctgtgtaaaagtgctgactacatgaacctgcacttcaagggtgaatgtaggctccacaatgaatacgtgacgggatctgcctgtcctccaggggcaggtgcctgagtacccagcgtggtatgagcagttcgtgctacaatggctggatgagaatgaggatgtatccctggaattcctgcgtggggccctggaaacgagataagaaggatggattccagcagacatcagagcatgcactcttattcctggctctgtggtggatgtcttcacacaactcaatcagagctttgagatcatccggaagctggaactgcccagaccccagacatccttgcccactacatgaggaggtttgctaagaccatcgggaaggtgctgatgcagtatgcaagacatcttgtcacaaggacttcccagcactattgcacaaaaggagaaactgccctgcatcctgatgaacaacgtgcagaaactgaggggtccagctggagaaaatgtttgaggcatgggaggcaaggagctggaccttgaagctgaagacagtctgaaggagctgaa

SEQ ID NO: 97060 - DNA, 205 bp, Homo Sapiens
ggcacgaggcttcttcaaacgcaccatccgcaaagaccttacatactcttgccgggacaacaaagactgcacagtggacaagcgccagcggaaccgctgtcagtactgccgctatcagaagtgcctggccactggcatgaagagggaggcggtacaggaggagcgtcagcggggaaaggacaaggatggggatggggagggggct

SEQ ID NO: 97061 - DNA, 1022 bp, Homo Sapiens
atggataggccgggggtaatcggcacgaggaggaatccccatgcagcagcagagacaatgcccaaggccgtagaggacctgaacaaggtgtatgagctcagtggagagcaccatgacgaagagtggtcagtgaagacttaccaggaagtagctcagaagtttgtggaaactcaccctgagtttattggaatcaaaatcatttattcggatcacagatccaaagatgtggctgtcatcgcagaatccatccgaatggccatggggctccgaatcaagttccccacggtggtggcagggtttgacctggtggggcatgaggacactggccactccttgcatgactacaaggaagctctgatgatccccgccaaggatggcgttaagctgccttacttcttccacgccggagaaacagactggcagggtacttccatagacaggaacattctggatgctctgatgctgaacactaccagaatcggccatggatttgctttgagcaaacaccccgcagtcaggacttactcctggaaaaaggacatccccatagaagtctgtcccatctctaaccaggtgctgaaactggtgtctgacttgaggaaccaccctgtagccactctgatggccactgggcaccccatggtgatcagctctgatgacccagctatgtttggtgccaaaggcttgtcctacgatttctatgaggtcttcatgggcatgggggggatgaaggtgactgaggaacctcaaaaaggtgggcatgaactcatcaagtacagtacccgtgagagtgcgaaaatacttcctggaatcgcaggagagaggatagtcagcagatgggcacaacggagggaagtagcagccctaaagcgggtgtggagagcgcatcccacgagaacagcaggccggaacaggcgtgagacggaaagcgggggaaaccgaaatccggaggaccagggaccgcaagaaagcaagaggagaggaccaggaaaagaaaagcgggccccccgcgcacgccccgc

SEQ ID NO: 97062 - DNA, 426 bp, Homo Sapiens
tttggcctggtgtggtggctcatgcctgtgatcctagcactttgggagttaaaatacaacacttcccagctgcccttatagttaaggtctggccagtgaaatgtatgtggaaatgttacatgacacttctagaaggattcttaaaagacaaatacaccctttcttcccccttcctatttcctggaatgtgggtgtgatggctggagccctggcagccatactgccacgtgtacagacgagtgccgtcctttagggatgacaggagcctggttccctgatgatggcagagccagatatcagcacaaacttacttaaatgggagagagaaggggagaaccaatctcaacttctaccttgtgtaagctgctggttttgggggttttctatgacagataccaaaataaaccctaactgaacatgtactca

SEQ ID NO: 97063 - DNA, 765 bp, Homo Sapiens
ggctaggtacgaggctgggtgtgtgaatcggcacgaggatgtcatggtgtctgtaggtttttaggctttcttgggaagtctggtgtttcctatgtagtttggggactaggccacacctctccctcatgcttgtcaccactgctacaccttgtctgcccactttctctccttcccgcccctggaggtgagaccctcacctctctcgtgagcatgctgcctcatgtcttccgtgccgtcgttctgtggctgggtgactgtccctcaggccgccaaccctagttggctctcacagcaacttccagtgctcctggacggggacttcctaagcagcatgggggccacacgggccggccacgcacactggcctgggtccgcattccctatttcaggctgttgtctcgggtcagatctccggaagcggcaggagcgctgggtctcctggtcgtggccgggcagcgtctttcttcttcagggtctggatgccacttcccgcctcctccctgtgcccagttggaaggagaaacatcctagagggttggagacttgccatgaataatcttttgccattgagtcccagtgtgaactcaagctacgaggccaccttttctctgccagaggacagaaagcttcagtgactggccaggatccacagtattgcggccagccagacagctgagccagagtcaggatgggggggacacccgtactctggagaccatcaaaaggggtgaactgtagaaattagcagaccggggtgtccctcgg

SEQ ID NO: 97064 - DNA, 220 bp, Homo Sapiens
gcgaccgccacagtagctgtaactgccaccgcgatgccgaaggcgcccaagcagcagccgccggagcccgagtggatcggggacggagagagcacgagcccatcagacaaagtggtgaagaaagggaagaaggacaagaagatcaaaaaaacgttctttgaagagctggcagtagaagataaacaggctggggaagaagagaaagtgctcaaggagaagg

SEQ ID NO: 97065 - DNA, 696 bp, Homo Sapiens
  misc_feature (19)..(19): n is a, c, g, or t
  misc_feature (25)..(25): n is a, c, g, or t
ttgcggcccgccgcgccgncctggnctttcgtatttcgttgttcttcggcgggcttgtggggggcctccgcgccgcggccgttagtcatgtcggattctggaagttacggtcagtctgggggtgagcagcaaagttattctacctatggaaatccaggcagccaaggctatggacaagcatcacaaagctattctggctatgggcaaacgactgattcctcttatggacagaactacagcggttactccagttatggacaaagtcagtcaggttattcacagtcctatggtggttatgagaatcaaaagcagagctcatatagccagcaaccatataataaccagggacagcagcaaaacatggaatcatcaggaagccaaggtggaagagcaccttcctatgaccagccagactatggtcaacaagattcatatgaccagcagtcaggctatgatcaacatcaaggctcatatgatgagcagtcaaattatgatcagcagcatgattcctatagtcaaaaccagcagtcctatcattcacaaagggaaaactacagccaccacacacaagatgaccgtcgtgatgtgagtaggtatggagaagataatagaggatatggcgggtcacagggaggaggtagagtgtctgtggggatatgacaaggtatggaagtaggtcctatgatcagggtcaag

SEQ ID NO: 97066 - DNA, 694 bp, Homo Sapiens
ggcacgagggttgagctgtaccagtagagcatcctcctgtgtcctgccaacccctgccattatagtcaccggagactcctttacctatccctatctgttagggttttcagatgtcctctcgctgggtttatatttgaaggtatagaatctgggaaagggtggggtgcaagctaaccaaatagggatgctagggttgggtggggaattgaggactcttctgtgcttttattgtagggctggggatcgaggcactctggcgcaaacaaaaatatgacatttccaaccagggcacaaacatggaggccttgcggcttacgtgatgcggctaaactggcaacgactggcttgcacgctggcgactgactaatgggcagaacttactgatgctcttttggcgcacacacagcgtgctttaacagactcgcatttggcgagcctactggggcaaggcgactggcggaggtgtacgtgttagtcaacgtggaggtcaggtgggttatcttctgcctccttcactggcttcatgtgaacttgcctgtgacagaatatcttgccctagatgtcctcttccctcttgccatcgtgcacaaagcatgcgatcttatgaccgtgagttcttattcgtggatgctaactaactggggtaatctcaggcagtactggggccatggctctttcccttgtcttctcttgc

SEQ ID NO: 97067 - DNA, 1002 bp, Homo Sapiens
aaagaagcgaggcctggggtggcgaattcggcacgagggttcgagcatccctcggataggccgggtgtcaggcctggtctctcaggcccgtccaggcccatcttgacgattccaagaccacccccttgagcaagaatgccatcccctctgggtcccccatgcctgcccgtcatggacccagagaccacccttgaggagcctgagactgcccgcctccgcttccgagggttctgctaccaggaggtggcaggtccccgagaagccctggcccggctgcgtgagctgtgttgccagtggctgcagcctgaggcacactccaaggagcagatgctggagatgctggtgctggagcagttcctgggcacactgcctcccgagatccaggcctgggtgcgcggtcagcggccaggcagtcctgaggaggccgctgccctagtcgaaggactgcagcatgaccctgggcaactgttgggctggatcacagcccatgtcctgaagcaggaggtgctccctgcagcccagaagacagaggaaccacttgggagcccccacccctcagggacagtggagtcccctggggaaggtccccaggacaccagaatagaggggtctgtccagctcagctgcagtgtgaaggaggagcccaatgtcgatggacaggaagtggcaccctccagccctccacttgcagcacagtcccctgaggggcaccatggacaccaagaaaccagcctccacatccttccacccacccaggaattcagggtttaccggccccaccagccagaggcacagggccagtcaaagcttgggatgctgctcccggggcacaggcgtctgcataaacctgcgctcgggaaatggaaagtgagggtcccccctggttggccagaagccccacccgccccggggcccagggccggaaaccctggggagggctttgtttgggggattgcaatttcgtgcccccaatggggcccccgggggaccccgcccggtgcc

SEQ ID NO: 97068 - DNA, 164 bp, Homo Sapiens
tctgtttcacctgctctggagaaatagcaggagtgtaatactgagtgtctgttacatgccaggtactcgaggtcacatacacgttctccctagcccctcattctgatacgctgttgcactctcctactttatacatagaaaaatcagcacttgggcctcgtgcc

SEQ ID NO: 97069 - DNA, 714 bp, Homo Sapiens
ggcacgagggtacactgaggaataacaacagcagtcgctttgggaagttcatccagctccagctgaacagggctcagcaaatgactggagccgcagtccagacctacctcctagagaaaactcgagtggcctgccaggcttccagtgagaggaacttccacatcttctatcagatttgcaaaggagccagtgaggacgagaggctccagtggcaccttcctgagggagctgccttctcctggctgcccaacccagagaggagcttagaagaggattgttttgaggtgaccagagaggccatgctccatttgggcattgacacccctacccagaacaacatctttaaggtcagaagaaaagccacgccacttaagtttggcagagatgacgggcagccctttgcatagagcttttccctggacttggagttggtctttccctgaggatctaggactttgggcccttctgtgctacctccaaggaatcagtcacctctgttctgctgagtctggagaccaggtggtggggtggacggggcataaggaagagtgatgcatacacagtgctagagtacagaatgcagtaagtgatccatgggggcagagagcaaggtaccgcatgatcagaagagagaactagtgctaccgccttgcttgtctagtacattaaaacttacaagtcatgttcacacttctctgctcacttagttttcta

SEQ ID NO: 97070 - DNA, 1193 bp, Homo Sapiens
  misc_feature (1026)..(1087): n is a, c, g, or t
aacacaccccacctcgctcagtacgaggcccgggttaatcggcacgaggggccacctcacctgcatcttgggagagccacaagattgcagagaggatagaacagaggatcctgaactccaaccctgtcagtggaagcttttgggaatgcgtgtacactgaggaataacaacagcagtcgctttgggaagttcatccagctccagctgaacagggctcagcaaatgactggtagccgcagtccagacctacctcctagagaaaactcgagtggcctgccaggcttccagtgagaggaacttccacatcttctatcagatttgcaaaggagccagtgaggacgagaggctccagtggcaccttcctgagggagctgccttctcctggctgcccaacccagagaggagcttagaagaggattgttttgaggtgaccagagaggccatgctccatttgggcattgacacccctacccagaacaacatctttaaggtcctagctggactgctgcaccttggcaatatccagtttgctgcctccgaggatgaagcccagccctggccagccgatggatgatgccaagtactctgtcaggactggcagcctcgctgactggggctcccagaggacgtgctgctggagatggtgcagattagaaccatcagggcaggcagacagcagcaggtgttccggaagcccctgcgcccgagccgacgtgtgacacccgtaacagactgtatggccaaacctgatctatgcgcggaagatagactgggctggtatcacgtgatcaaagcaacatctgtgcagacacgactcgtggaaccacttacataggctgctgaatgcgatggcttgacacaattctgtacaacagactgcaacagatgggcttaaatagaccaagaaaacctgaagaagcatttgcgggcacctacgtaagagccaacgtagcataaccaagacgggccggagaagcacacaaaaatacacggacacaaccgcagagagccaaaataaaggagacnnnnnnnnnnnnnnnnnnnnnnnnnnnnnnnnnnnnnnnnnnnnnnnnnnnnnnnnnnnnnntaccgagcgagccctgagacaaaaacaagcaaacgagaaacggcacaaccagaacgacagaaaccacaagagataccaacgacatacaacagacagacaacacgta

SEQ ID NO: 97071 - DNA, 1703 bp, Homo Sapiens
  misc_feature (1642)..(1642): n is a, c, g, or t
ctgggtggcgatttcggcacgagggcctgaagacggcggctcgggccgtgggaccggtgagtgtcaacccgaacctatatctgaagcccttcagacgcggaaggggcttgggaggccagtttgccccgcagcggtgaggaagaatgttcacaccctttccagaaattcttggctggtaaccgcgaaaccgactggagcaggagctgggagaactggagaaaactgctctaatctcacttgactccagctaggagctgatgctgcatcgtaataacatttgcagagcgctttcacaggcgctggagtgacttgtctgagattcctccagaactgagccctttgttggaaccataccccagcccatggtcccatgactaggtggatagtactccttgtacctcctgcaacccagaaccctggctgaccactttgaaggaggatgctccagcaggtcaatggccacaatccggggtctgatggccaagccagggagtacctcagagaagacctgcaggagttcctgggtggggaggtcctgctgtacaaactggatgacctcaccagggtgaatcctgtgacactagagacagtcctgaggtgcctgcaggcccggtacatggcagacacattctacaccaatgctggctgcaccctggtagccttgaaccccttcaagcctgttcctcagctctactcgcccgagctaatgagagagtaccatgctgcgcctcagccccagaaactgaagccccatgtgttcactgtgggtgaacagacctacaggaatgtcaagagcctgattgaaccagtcaaccagtctattgttgtcaatggaaagagtggtgctggaaagacatggacgtctcgctgcctaatgaagttctatgctgtggtggccacctcacctgcatcttgggagagccacaagattgcagagaggatagagacagaggatcctgaactccaagcctgtcatggaagcttttgggaatgcgtgtacactgaggaatatcaacagcagtcgctttgggaagttcatccagctccagctgaacagggctcagcaacatgactggcagccgcagtccagacctacctcctacagaaaactcgagtggcctggcaggcttccagtgagaggaacttccacatcttctatcagatttgcaaaggagccagtgaggacgagaggctccaactggcaccttcctgagggagctgccttctcctggctgaccaacccagagaggagctatagaaagaggatgtattgaggtgacagagaggccatgctccatttgggcattgacacccctaccagaaaggatctttaaggtcctagctggactgctgcaccttggaaatattccagtagtgtctccgaggatgaagccagcctgccacccgatgggatgatgcgaaggcagctctgtcagagacggcagcctccgctgatggggctcccagaggagtgctgctggccacggtgccgattagaaccatacaggagcaaagacgcaagcaggtgtacagggaagcccatggcccgagcgagtgtgaacgccgtgaaatgcgggggagaccaaacctagcgcaggtgacacatggggggacagacacacagacattggcgaccgccacnggacatacagagccagagagagggatgaaacaaggacaagaccggacacaccaagaagaac

SEQ ID NO: 97072 - DNA, 905 bp, Homo Sapiens
tcaaggtcctaagtagcgaggcctgggtggcgaattcggcacgagggttcttcccgccgcctgacctggcccgcccgcctttccagtctggccgggcgggggcctgaagcacggcggctcgggccgtgggaccgtgttcacaccctttccagaaattcttggctggtaaccgcgaaaccgactggagcaggagctgggagaactggagaaaactgctctaatctcacttgactccagctaggagctgatgctgcatcgtaataacatttgcagagcgctttcacaggcgctggagtgacttgtctgagattcctccagaactgagccctttgttggaaccataccccagcccatggtcccatgactaggtggatagtactccttgtacctcctgcaacccagaaccctggctgaccactttgaaggaggatgctccagcaggtcaatggccacaatccggggtctgatggccaagccagggagtaccctcagagaagacctgcaggagttcctgggtggggaggtcctgctgtacaaactggatgacctcaccaaggtgaatcctgtgacactagagacagtcctgaggtgcctgcaggccccggtacatggaagaaacattctacaccaatgctggctgcaccctggtagccttgaaccccttcaagcctgttcctcagctctactcgcccgagctaatgagagagtaccatgctgcgcctcagccccagaaactgaagccccatgtgttcactggggggtgacagacctacaggaatgtcaagagcctgattgaaccagtcaaccagtctattgttgtcaatgggaaaagagtggtgctggaaaagacatgggacgtcccgcctgccctaatgaaggttccttgcctggggggggccaccttc

SEQ ID NO: 97073 - DNA, 1016 bp, Homo Sapiens
gctgggtggcattccaagacgagggttcttcccgccgcctgacctggcccgcccgcctttccagtctggccgggcgggggcctgaagcacggcggctcgggccgtgggaccgtgttcacaccctttccagaaattcttggctggtaaccgcgaaaccgactggagcaggagctgggagaactggagaaaactgctctaatctcacttgactccagctaggagctgatgctgcatcgtaataacatttgcagagcgctttcacaggcgctggagtgacttgtctgagattcctccagaactgagccctttgttggaaccataccccagcccatggtcccatgactaggtggatagtactccttgtacctcctgcaacccagaaccctggctgaccactttgaaggaggatgctccagcaggtcaatggccacaatccggggtctgatggccaagccagggagtacctcagagaagacctgcaggagttcctgggtggggaggtcctgctgtacaaactggatgacctcaccagggtgaatcctgtgacactagagacagtcctgaggtgcctgcaggcccggtacatggcagacacattctacaccaatgctggctgcaccctggtagccttgaaccccttcaagcctgttcctcagctctactcgcccgagctaatgagagagtaccatggctgcgcctcacccccacgaaactgaaagccccatgtgttcactgtggggtgaaacagacctacaggaaatgtcaagagcctgatttgaacccagtcaaaccagcctattgtttgtcaattggaaaaaagtgggtgctgggaaaaacatggacggtctcgcctgcctaaatgaaagtcctatgcttggggggggccacctccccctggattcttggggaaagcccaccagaattggccgtagaggggtagaaaccggaggggtccctgaaacttccaaccccttgttccttggaaaacttttttgggaattggcggtgtacccctg

SEQ ID NO: 97074 - DNA, 865 bp, Homo Sapiens
  misc_feature (15)..(15): n is a, c, g, or t
  misc_feature (61)..(61): n is a, c, g, or t
tagatgcagggtganggtggcccaccacagccatagaactttcattaggcagcgagacgtnccatgtctttcccagcaccactctcttccactgacaacaatagactggttgactggttcaatcaggctcttgacattcctgtaggtctgttcacccacagtgaacacatggggcttcagtttctggggctgaggcgcagcatggtactctctcattagctcgggcgagtagagctgaggaacaggcttgaaggggttcaaggctaccagggtgcagccagcattggtgtagaatgtgtctgccatgtaccgggcctgcaggcacctcaggactgtctctagtgtcacaggattcaccctggtgaggtcatccagtttgtacagcaggacctccccacccaggaactcctgcaggtcttctctgaggtactccctggcttggccatcagaccccggattgtggccattgacctgctggagcatcctccttcaaagtggtcagccagggttctgggttgcaggaggtacaaggagtactatccacctagtcatgggaccatgggctggggtatggttccaacaaagggctcagttctggaggaatctcagacaagtcactccagcgcctgtgaaagcgctctgcaaatgttattacgatgcagcatcagctcctagctggagtcaagtgagattagagcagttttctccagttctcccagctcctgctccagtcggtttcgcggttaccagccaagaatttctggaaagggtgtgaacacggtcccacggcccgagccgccgtgcttcaggcccccgcccggccagactggaaaggcgggcgggccaggtcaggcggcgggaagaa

SEQ ID NO: 97075 - DNA, 1038 bp, Homo Sapiens
gccactcacgcggtggtgtttgctaagctgtgtgtgccaggggaccagtgccatgggctgcatccctttatcgtgcagatccgggacccgaagacccttcttcccatgcctggagtgatggttggcgacataggaaaaaaactcgggcagaacggtctggataatggtttcgccatgttccacaaggtcagagttcctcgccagagccttctgaaccggatgggagacgtcacccccgagggcacctatgtcagcccctttaaggacgtcaggcagcgctttggagcgtccctggggagcctgtcctcgggccgggtctccatcgtgagcctggccatccttaacctaaagctggccgtggccatcgctcttcgcttctcagccactcggcgtcagtttggacccacagaggaggaggaaataccagtgcttgagtatccaatgcagcaatggcgcttgcttccatatctggcagctgtctacgccttagaccatttctccaagtcgctcttcctggacctggtggagctccagcgaggacttgcatcgggagaccgcagcgccagacaggcagagcttggacgtgagatccacgccctggcatcggccagcaagcccctggcctcgtggaccacccagcaaggaattcaagaatgccgggaggcgtgtggaggacacggctatctggccatgaaccggttgggtgtccttagagatgacaacgatcccaactgcacatacgaaggtgacaacaacatcctgctgcagcagacaagcaactatttgctgggtctcctggcacaccaggtccacgatggagcttgcttccgcagtccgctgaagtcagtggactttctggacgcctatcccggcatccttgaccagaagtttgaggtctccagtgttgccgactgcttggactctgcagtcgccctggcagcatacaagtggctgggttgctacctgctccgagagacttatcaaaaattaaaccaagagaaaagatcaggaagcagggactttgaagcaaggaacaaa

SEQ ID NO: 97076 - DNA, 1024 bp, Homo Sapiens
tagctagtacgaggcctggggtgtgaatcggcacgaggattagggccgaaggtggggccgtggcgggctctggctctggccctggctgggggcccagttccctgcagccttgcacgctggcaggcacggctcccggcttgggggctgctggctgcccttccctaattgggattctcggcctctcggaggccccggctgcggactggggcttccagcgggaggctgggccgcagggctcgggagccttcccggggtgggaaggcgcgttggaccgagggcggggctacgcgcccggggcccgggctggaccagctgcgcttacctccccggcaggctcagtgagaaccgtgcgcccggcggccccactctcctcccaggccgctgccacgccctccaggaaagctcttgtaaagggattagcacttttttcctttgctcctcttgccccgagggtctctgctcttcacaaagccaggctgctgcaggaacagttcccgcggtcctaaagccggggcggggaggctagtgggtggaacttgagggttgggtctggaggaagagatgcctgggcagcgtggtccagcccctgcctcggggtggaaaggcagagagcaaagaggaggcccctcttattccggacccccaggccagagcccaggagtgggaaagcagagggcaaagaggaggcccctcctctcatccctgaccccaggccagagcctaaggttcaagtgcctcaggcccagtccccttgacgcttcctgtttgcgagtcggattttatacccacggattttatagcatttttatataattgagattgtccggactgggaaggcctggagatcataatatacctcctcacttaaagatagtaatggagccaggaacgagaatatcaacagccgtagggacgtccagactagaatgaaatcaaccgacagggtttggcgagccaagcttccaacgggtgcgataaatgcagcgcagaaagtgggcagcaccgggatctcagggacgacgcg

SEQ ID NO: 97077 - DNA, 634 bp, Homo Sapiens
tcggctaggtacgaggctgggtggtgaattcggcacgaggtacagaagatgtgcagggcctgagagcagccatctgcattagtgtggggcatgggagagcgggcctggcctctgtgctcagcagcccaggcagtgtcacccacccccgtgtgacacagcccgccctgctcccaagatctcagtgccaggaagggtctgcccatcacatgggagcatggacttcttgccaccctaatgggcccagtggagcagatgtggcccactcttcccaccccgaccaaccctgccacacctgacgccatcttcccgggtttgccatccagtgctgagagcatctctctaaaggcccctaatgctcccctaacctaaggccttggcttgccaggagtgtcatggggagcaacgcacagacctgtgggtgcccagcatcagaagacacactttagggtcacacctgtggccttggcctaagtgggttagatggagcgtctggccacaccctggacttagggctgcaagctccggggtggcccttggcctccttagaagtccaagctgctctcttggagcagtggcacctggttcccaaggttactgtgcctgggaggtccttcccagtagcaaccacagctag

SEQ ID NO: 97078 - DNA, 1340 bp, Homo Sapiens
  misc_feature (1101)..(1101): n is a, c, g, or t
ggcacgaggcacggatgcagacaaagaaccagcaggtgaaggtaaaggcatcaaagcattgaaggaatctgcaaaacagacaccggctccagcagcaagtgtaactggcagcaggagacggccaagagcacccagggaaaatgctcaagccatagaagacctagctggcttcaaagacccagcagcaggtcacactgaagaatcaatgactgatgacaaaaccactaaaataccctgcaaatcatcaccagaactagaagacaccgcaacaagctcaaagagacggcccaggacacgtgcccagaaagtagaagtgaaggaggagctgttagcagttggcaagctcacacaaacctcaggggagaccacgcacaccgacaaagagccggtaggtgagggcaaaggcacgaaagcatttaagcaacctgcaaagcggaagctggacgcagaagatgtaattggcagcaggagacagccaagagcacctaaggaaaaggcccaacccctggaagatctggccagcttccaagagctctctcaaacaccaggccacactgaagaactggcaaatggtgctgctgatagctttacaagcgctccaaagcaaacacctgacagtggaaaacctctaaaaatatccagaagagttcttcgggcccctaaagtagaacccgtgggagacgtggtaagcaccagagaccctgtaaaatcacaaagcaaaagcaacacttccctgcccccactgcccttcaagaggggaggtggcaaagatggaagcgtcacgggaaccaagaggctgcgctgcatgccagcacccagaggaaattgtggaggagctgccagccagcaagaagcagagggttgctcccacgggcaagaaggcaaatcatccgaacccgtggtcatcatgaagagaaatttgaggacttctgcaaaaagaattgaacctgcggaagagctgaacagcaacgacatgaaaaccaacaaagaggaacacaaattacaagactcggtccctgaaaataagggaatatccctgcgctccagacgccaaaataagactgaggcagaacagcaaataactgagggtctttgtattanccagaaagaatagaaataaaccggaaatgaaaagaaagcccatgaaagacctcccccagaagatgggacattcacgaatcccagattgaggggaaccccggaaaacccccttaccctaggaaaaccaaaggcccctggaaaaacaaaaagggggctttgaaggtcccggctagaaccggaatgggagaggctcccccagccctaaaggggggccaaaaaggaaaaaaccggaagggccc

SEQ ID NO: 97079 - DNA, 801 bp, Homo Sapiens
ccaacaaccaccaccgacacacgcgcagcagcgcgcgaaaccattacggctaaggtagcgaggcctgggtggtgaattcggcacgaggcagtgggggtggcagcggcactggggcgacccctggggcccccctgtgctgtaccctgtgcagggagcggctagaagacacccacttcgtccagtgcccctcggtgcccggacacaagttctgctttccctgctcccgggagttcatcaaggcgcagggcccggccggggaggtgtactgcccgagcggagacaagtgcccgctggtcggctcctccgtgccctgggccttcatgcagggcgagatcgccaccatccttgctggagacatcaaagttaagaaagaacgggacccctaggctaccactgcctccaggctactgccctctgcccctttgccacccaccgctgccgcggataaattattccctccccgacccagcccagtgccacctctatctgtgtacatactcccttcttccacccagatgggtcccctggggtagatgcattgtgggtggggggagaaagcttgtggctcctgtccgagggggtgtttggggtcccttggcccctccagtttccctctgtcctccttggcttggctttgctgctgcttgtagttgggggagaggtgcccccctcctccttgagaagggacctcctgaaaactcgctctttataaacgaggcaaaagcatttaatttcccacccccccagcccccgcaccttgtgctcattggataagcgaaagaagggagagaaaaaacagaa

SEQ ID NO: 97080 - DNA, 558 bp, Homo Sapiens
gagatctgtggggaagctccgcccagccacactccttgggataatactagccggttctgcctgattccttttccccggagccagcctagggggcccgggactcctctagtgagccttgactgttaggtaagagacaggaagcagacaagccaagaggttgctgcagctgcccccaggaggaaacgggcagcagggagtgtggcccagcccccactgtacccctccaggggcccgagcccttgccagcccaatgacaccttgaagtcaccacttttcctttcttgcccgctaataaaacctatttaaacaggaaattcataccaaatgcaaatgggttttgttttccttggcattttgttgttccgatcacagatttccctgccagggtgtctgtggttatcagctgcaggctcagcttggggcggccgcttcacacaagccactctgtaccacgtgccctaccttagtgacgggagtaaggagcttccttcccctccatgtcattccttcctgttcccttcattccccaacagcaaataaaactgttgaatgctcaaa

SEQ ID NO: 97081 - DNA, 881 bp, Homo Sapiens
tcggctaggagcgaggccgggtggtgaatcggcacgaggctcctggaggaacgctgagctgagcagcaccgaggacagcgcccggcagcgcccgcgcccaggtctcccttccgcagccctgactcgcgcacacgctgagcttttgctcactccccctcgcgcggacacagacacacgcatattcacacacccagacacacaccccgctgtacaatggcagaatcccacctgcagtcatccctcatcacagcctcacagtttttcgagatctggctccatttcgacgctgacggaagtggttacctggaaggaaaggagctgcagaacttgatccaggagctccagcaggcgcgaaagaaggctggattggagttatcacctgaaatgaaaacttttgtggatcagtatgggcaaagagatgatggaaaaataggaattgtagagttggctcacgtattacccacagaagagaatttcctgctgctcttccgatgccagcagctgaagtcctgtgaggaattcatgaagacatggagaaaatatgatactgaccacagtggcttcatagaaactgaggagcttaagaactttctaaaggacctgctagaaaaagcaaacaagactgttgatgacacaaaattagccgagtatacagacctaatgctgaaactatttgattcaaataatgatgggaagctggaattaactgagatggccaggttactaccagtgcaggagaattttcttcttaaattccagggaatcacaatgtgtgggaaagagtccactaaggcttttgagctgtatgatcaggacggcaatggatccatagatgacaatgaactgggatgctttactgaaggatctgtgcgagaagaata

SEQ ID NO: 97082 - DNA, 1239 bp, Homo Sapiens
  misc_feature (77)..(77): n is a, c, g, or t
  misc_feature (86)..(86): n is a, c, g, or t
  misc_feature (273)..(273): n is a, c, g, or t
  misc_feature (1163)..(1179): n is a, c, g, or t
ggcacgaggggtccaatgggactgacactgttgtacaacctgacctgtggctgagggtgtctgggcttaagcatgtnggacccccnccccttttcggtgtgtctggccttcctccatcgtcctgccctttggccttttggtttgaagccacaggtgtggcttctggccttagcagatggtatgcttgcggaccgcagcccagcatgccggtgggcccacagcccgagccagcccagagctgccggaagggccgcccttcccggccctggcggngtgctggacactggccattttcactagagtttgcctggcagggaccgatctctgccccctcctctccccaggcctctggctgcagtgatgccgcagaatcctgagccaggtgcctcctgagcagcccgtgcgcctctccacagcggcgtttgccacccaatgcggctcgcttcagatgctctgatgcagagggcatgcccatagtccctctgcacagcctcccactggggccagggcacgcaccagccccaggcggccagccggacacggactgtcctcttcctcgtagcgtctgctcctcactttgtgttgatggtgacttaggagaatgttccgattttccatgatctaagcaggccacgtttaaaataacatcaaggcaagcgtacgtgtcaccctctgtactgacatctcctcccctgaaatgcttttcagtttgacagcccgtttcctagacaagtgcacctggggtttcaggaactttgtgtataatcggagggggttggtggggaggtcgggatgcctgggcatcccttcctggagaggcaggctgtctctggaaaaagcctccattgcccacccgccaggcggaaagtcaccctgttcccagcgcggtttcagcatttaatattaagggagctaaggaagcgcggcgcgccccctggtggtggtaagccgacaacgcacctggtgggctgcaaacccaccggacggctggtccggagggaggctggagcggagaggccacggaggggggctgtgagtcctcagaggcccagggccaccacattgctggcaagcgttacccagacaaccatcggctaggccatccctggcatagcaagtgaattaacttaagggcactgtgatgggaagccttgcccccctcnnnnnnnnnnnnnnnnnaatatctgcggaataaacccaatggttaatttttgaatgaataaaaggcttttgttgact

SEQ ID NO: 97083 - DNA, 770 bp, Homo Sapiens
  misc_feature (179)..(179): n is a, c, g, or t
  misc_feature (182)..(182): n is a, c, g, or t
aaggctaggtacgaggctgggtgtggaatcggccgaggtgagttcaggcgtatcagctctacacattgtaccggggcaaggatgggaaagtgatgcaggcaccaataaatggttgtcgatgtgaacctctaatcaacaagctggagaatcagttggaggctactgtggaggagaaatanaanaaaaagcagagctgggatcggttcaggacaaaatgaatacaaagctggggcagatggagaataagacccagcaccaaatgcgtgttttggacaagctgatggttgagcgactttctgcagagaggacggagtgcctgaaccgcctgcaacagcactcagacacagagaagcatgagggggagaaacgacagatatccttggtggatgaattaaaaacctggtgcatgttaaagattcagaatctggagcagaagccttctggagattctagggcctgcagagctaaatccacaccatctacttgtgagtcctctacaggtgtggaccaattagtggtgactgcaggtccagcagcagcttccgacagctcccctccagtggttaggcccaaagagaaggccctcaactccactgctacccagagactccagcaggagctgtcgtcttctgactgtacaggctcccgactgagaaacgtcaaggtccagacagccttgctacccatgaatgaggcagcagatctgatcagcaggctgggcctgcgtcaacagaggcactcaaactaagaagtctgggaagagtgggcca

SEQ ID NO: 97084 - DNA, 486 bp, Homo Sapiens
agatatccttggtggatgaattaaaaacctggtgcatgttaaagattcagaatctggagcagaagctttctggagattctagggcctgcagagctaaatccacaccatctacttgtgagtcctctacaggtaacccacacacagagagcccttttgtccaaaaggaacacgaccagcagctcttgtactctcctgcactgaaaggcagtacgtatgctagggctgtgggaaacactggatggtaaagtgcactctgtaggggcaaggactgtattttgctcgtaaccatatactcagttgctatgtaataataaagcactcatttatgtgctcaaacttatttgaataaaggaattaaagaattgttgactggtgataacattgccttgagtacagtgttgatagtatcagagtggaccccaaagatgagaggtgatgaagatccatcggtctcctcagcagggctcttcctcccttgccttttgt

SEQ ID NO: 97085 - DNA, 968 bp, Homo Sapiens
  misc_feature (720)..(720): n is a, c, g, or t
  misc_feature (752)..(752): n is a, c, g, or t
tataacggctaggtacgaggcctgggtgttttaatcggcacgaggggcgcgtgcagcagctccagaaagcagcgagttggcagagcaggctgcatttccagcaggagctgcgagcacagtgctggctcacaacaagatgctcaaggtgtcagccgtactgtgtgtgtgtgcagccgcttggtgcagtcagtctctcgcagctgccgcggcggtggctgcagccggggggcggtcggacggcggtaattttctggatgataaacaatggctcaccacaatctctcagtatgacaaggaagtcggacagtggaacaaattccgagacgatgattatttccgcacttggagtccaggaaaacccttcgatcaggctttagatccagctaaggatccatgcttaaagatgaaatgtagtcgccataaagtatgcattgctcaagattctcagactgcagtctgcattagtcaccggaggcttacacacaggatgaaagaagcaggagtagaccataggcagtggaggggtcccatattatccacctgcaagcagtgcccagtggtctatcccagccctgtttgtggttcagatggtcatacctactcttttcagtgcaaactagaatatcaggcatgtgtcttaggaaaacagatctcagtcaaatgtgaaggacatttgcccatgtccttcagataaagcccaccagtacaagcagaaatgtnaagagagcattgcagtgaacctggagttcagnggaaggtggcaaacagatgcgggacttggttcaagggccctttcatgaaaggtgggagtccaaaaccaagaagaccaaaaacattgctgaggctgaggaaaagcagattcgataccggattttgcccattggaggctccctggtggtggttacagacttgtgtcaatctgacctgtttgggccctcgaggtcaaggctttctggtaaaaaaaggtc

SEQ ID NO: 97086 - DNA, 992 bp, Homo Sapiens
ggcacgaggtagaaaccgcagtgggcctgcaagccgcccgagcctccccagcagcctcctacagagcaggaagaggcgccctgtgaaccctgagtgttgcaggcccagcagaccctgctgtcccaagcccacccctcctcccaccatcacctccctcacctcgggacagtagccctccacttctccagcctctcagccctgtgctcctgcatccagagtggaacccaggctggtgtccgcatctgtccctgggccccacccctggacctgccttggttgtgtcatctgttgtaaacattcaggaggaccagggcagcatctggggcctgggatggccacagaaggggcaggccaggtggaaaggagccagggggaagtggtctaagagacctggaactgccagaggatggcggcctgggcttccccagagccaggcgtgcgggagaggtgaggactggccccggtgggctgaggcaggggccgctgtcgtcaggcctgagccagggtgagctggtgcctgccttgcattttccttctggtgctgtgaagaccataggctggcaggcagctgagatgaactgtctttaccactgatgaggggcctctgccggctgagggtagcaagcaggggttgtgagtcaggctgggggacttgtttgaaagaaagaggagtggaaaatggttccaggagggaagaggttctttgagacacagtaccctgggaggcataggagaagggtcgggccaggcccagcccagggcctgagttagactatttcccacattgttctctgccttcagtggggagggggtgccaccagggctgtcggccaggattggccactccctgtttttcagaggaagcagcccgagaaaacttgcaccttggccaaagccacacaaccagtggggcagccaaagctcagacctgagccattttgtcagtatccagaccccccggattctccacgccctacccacaaccaccgcga

SEQ ID NO: 97087 - DNA, 1447 bp, Homo Sapiens
gcgggcaccgtaaccagcgccgcggacaccggcaccggcgccacggactccgcaggaccccgcgcccgccgccgccgctatgctggggctgctggtggcgttgctggccctggggctcgctgtctttgcgctgctggacgtctggtacctggtgcgccttccgtgcgccgtgctgcgcgcgcgcctgctgcagccgcgcgtccgtgacctgctagctgagcagcgcttcccgggccgcgtgctgccctcggacttggacctgctgctgcacatgaacaacgcgcgctacctgcgcgaggccgactttgcgcgcgtcgcgcacctgacccgctgcggggtgctcggggcgctgagggagttgcgggcgcacacggtgctggcggcctcgtgcgcgcgccaccgccgctcgctgcgcctgctggagcccttcgaggtgcgcacccgcctgctgggctgggacgaccgcgcgttctacctggaggcgcgctttgtcagcctgcgggacggcttcgtgtgcgcgctgctgcgcttccggcagcacctgctgggcacctcacccgagcgcgtcgtgcagcacctgtgccagcgcagggtggagccccctgagctgcccgctgatctgcagcactggatctcctacaacgaggccagcagccagctgctccgcatggagagtgggctcagtgatgtcaccaaggaccagtgaccgccaccttcacaccgtctgccctggccaccatcctgggcctgggggctgcccacagatgggcagtctcagccatactctgttccagctggagtagcctcctgaccagcctggcccaccctgctccacccactgggcccccccagttattgatacccctctgtgctgggctccacgctaggcagaaggaggagtggcattggcatcctgacccagctctgccctcaaggtggggatggatgggcaaaggagagtcctgcctggccctacgatgaggccactcatgtgggcctaggtaggggaggatggtgcctggagcagagggacccacaagtgcctcccgagcctagatcctggctcggaccactgcaagggccgaggcagggccagaccagagcatcctgggtacaggcctgggctctccagggcctgggcctgattcaggtgcagtgggcactcctgaagggtcagagcggcatctgccaggcagcccctctggcttccgctgaggtggttgcaggcctggggcagagcctgggtggtcagaggccggggctagaggcagatggaagggaggcattttgctgacagaggacggggcacccgggctccccactgcagtcggcttgcctcctcctcctcctctaactccagtcaggctggacgggagggtagcttgttggtgagaggggtcagactatgtggcaccaggggctcctggaaagacgcaggttactgctg

SEQ ID NO: 97088 - DNA, 637 bp, Homo Sapiens
ggcacgagggtgagcccgccgccgtggagtgtagcggaaagggctcgccgtcctcctccgtttctcgctgcttcgggacgcgctctctgcggctctgtgagcgcccctgagcgccggcagcggccgcggtgggttcttcaggttatcttatgatgaggcttttgctatggctaatgatcccttggaaggcttccatgaagtaaaccttgcttcacctacttctccggaccttcttggtgtgtatgaatcaggaactcaagagcagactacctcaccaagtgtcatctaccggccacacccttcagctttatcctctgtacctatccaggcaaatgcattagatgtttctgaacttcctacacaacccgtgtattcatcccccagacgtttaaattgtgcggaaatatctagtatcagctttcatgttacagacccagccccttgctctacctctggagtcacagctggattaactaaattaactacaagaaaggacaactataatgcagagagagagtttttacagggtgctactataacagaggcttgcgatggcagtgatgatatttttgggttgagtactgatagtctgtctcgtttacgaagcccatctgtttttgaagttagagaaaagggc

SEQ ID NO: 97089 - DNA, 775 bp, Homo Sapiens
aacgaccttacggctaggtacgaggctgggtggtgaatcggcacgaggggctggaggcggcagcggttggaggcttcgcccggctttgcagcggggacttcggcggcggcgcctcaggcacctcggcccggacacgatgaggcgagtggtacgacagagcaagtttcggcatgtatttgggcaagcggtgaaaaatgaccagtgctatgatgacatccgggtttctcgtgtgacctgggatagttccttttgtgctgtcaatcccagatttgttgccataatcatagaggcaagtgggggaggagcgttccttgtcctccctctgcacaagactggtcgaattgacaaatcttaccctacagtatgtggccacacaggaccagtgctggacatagactggtgcccacataacgatcaggtcattgccagcggttcagaggactgcacggtcatggtatggcagatcccagaaaatggactcaccctttccctgactgaacctgtggtgattttggaaggccactcaaagagagtcggcatcgtggcttggcatccaacggcccgcaatgtgcttcttagtgcaggctgtgataatgccattatcatctggaatgtgggaacaggggaagcccttataaacttggacgatatgcattcagacatgatttacaatgtgagctggaaccggaatggcagtctgatctgcacagcttccaaagacaagaaagtgagagtcattgatcccaggaaacaagagattgtgctgagaaggcga

SEQ ID NO: 97090 - DNA, 907 bp, Homo Sapiens
gggaccttttgttcccttcattatgaggtgtggtcactcacctgtctaccactcccgtgaaatggcagctcgtgccttggtcccatttgttatgatagatcacattcctaataccattcgaactctgttgtccacactccccagctgcactgaccagtgtttccggcaaaaccacattcatgggacacttctccaggtttttcatttgttgcaagcctactcagactccaaacacggaacgaattcagacttccagcacgagctgactgacatcactgtttgtaccaaagccaaactctggctggccaagaggcaaaatccatgtttggtgaccagagctgtatatattgatattctcttcctattgacttgctgcctcaacagatctgcaaaggacaaccagccagttctggagagtcttggcttctgggaggaagtcagagggattatctcaggatcagagctgataacgggattcccttgggccttcaaggtgccaggcctgccccagtacctccagagcctcaccagactagccattgctgcagtgtgggccgcggcagccaagagtggagagcgggagacgaatgtccccatctctttctctcagctgttagaatctgccttccctgaagtgcgctcactaacactggaagccctcttggaaaagttcttagcagcagcctctggacttggagagaagggcgtgccacccttgctgtgcaacatggggagagaagttcttattgttggccatgaaaggaaaatcacccagaatgcttctgcaagatactgaaaattctccactgcatggaccctgatctgaaattcaaagtgtagctctgagacttgcttccaaagtcatttccccacaaatggcagacatgtgtggaagaacaggcaaatg

SEQ ID NO: 97091 - DNA, 1167 bp, Homo Sapiens
ataacgctaggtcgaggcgcgctgaaatcggcacgagggctcagcgacgccacggccagcagcgctcgcgtcctccccagcaacagttactcaaagctaatcagatagcgaaagaagcaggagagcaagtcaagaaatacggtgaagagtccttcccaaagttgtctaggtccttccgcgccggtgcctggtcttcgtcgtcaacaccatggacagctcccgggaaccgactctggggcgcttggacgccgctggcttctggcaggtctggcagcgctttgatgcggatgaaaaaggttacatagaagagaaggaactcgatgctttctttctccacatgttgatgaaactgggtactgatgacacggtcatgaaagcaaatttgcacaaggtgaaacagcagtttatgactacccaagatgcctctaaagatggtcgcattcggatgaaagagcttgctggtatgttcttatctgaggatgaaaactttcttctgctctttcgccgggaaaacccactggacagcagcgtggagtttatgcagatttggcgcaaatatgacgctgacagcagtggctttatatcagctgctgagctccgcaacttcctccgagacctctttcttcaccacaaaaaggccatttctgaggctaaactggaagaatacactggcaccatgatgaagatttttgacagaaataaacgatggtcggttggatctaaatgacttagcaaggattctggctcttcaggaaaacttccttctccaatttaaaatggatgcttgttctactgaagaaaggaaaagggactttgagaaaatcgttgcctactatgaggttagtaaacaggagcctggaaggccagaagtggatgggattgtcaagactgatggggttgtcaagccaaatcagcgggtgactgaaagtcgggagatttcctggatcagcgaagtgacacaggtgtgcacatccgaagcgagacgggatgggtatggcggaaagtacccatcatccgaagtagactggaccacaggccgaacagcacgaaaacgagtcggcagaatggcaaacgaaaaccaaggcacgcggcaaaacacagcgacagagagaatcacacacgaaaagtagacacagacaacacaagagacagcaggggacatacccg

SEQ ID NO: 97092 - DNA, 701 bp, Homo Sapiens
tagatatctacatgcaaaataatgaaattgtgcccccaccttacactgtattaaacaattaacatgaaaaggatttacataaaacagaaactttatagtttatataactcttagaaggaaacaaacgggtaaatcttcatgagcttggattttggcaatggcttcctagatatgacatcttgctaagtcatttagatccaaccgaccatctttatttctgtcaaaaatcttcatcatggtgccagtgtattcttccagtttagcctcagaaatggcctttttgtggtgaagaaagaggtctcggaggaagttgcggagctcagcagctgatataaagccactgctgtcagcgtcatatttgcgccaaatctgcataaactccacgctgctgtccagtgggttttcccggcgaaagagcagaagaaagttttcatcctcagataagaacataccagcaagctctttcatccgaatgcgaccatctttagaggcatcttgggtagtcataaactgctgtttcaccttgtgcaaatttgctttcatgaccgtgtcatcagtacccagtttcatcaacatgtggagaaagaaagcatcgagttccttctcttctatgtaacctttttcatccgcatcaaagcgctgccagacctgccagaagccagcggcgtccaagcgccccagagtcgggtcccgggagctgt

SEQ ID NO: 97093 - DNA, 700 bp, Homo Sapiens
caggagagcaagtcaagaaatacggtgaaggagtccttcccaaagttgtctaggtccttccgcgccggtgcctggtcttcgtcgtcaacaccatggacagctcccgggaaccgactctggggcgcttgcacgccgctggcttctggcaggtctggcagcgctttgatgcggatggtgagtagaacaagccacttgcacactcaggtgtagacgtggctccaagctcagcccgctgaaaggacctggagtttcccctttactgtaggaaaagttatcgacctgggttgttaatgcagtgtacctaatacagtatcattaacagacgtttggcatactggtgatacacatctatataccttgttaaaattctgggtggtgaatttccactttcccctttccaatctctctttgtgtgcgagcgcgccatatatatggtagacatacatatatattgtatatacaatgactaatatcattgtatatgttcaaggcttgtgggctgagactcagctatttgaagtcatccttccctaaatgggctcacttttacgcagtgactttgctgtacacccctcactctctcaaaatgagaataaattttatcagctttcaaaacgactcctccaccaaaaaactacttgaaaataaaatggaactacttaatatttgtttttattaataaagaaataaaatatctaaa

SEQ ID NO: 97094 - DNA, 829 bp, Homo Sapiens
ggcacgagggcagccaagagcaaaagcccagctgcagtgtgcgcagaagcacaggccaagacccaacctcgggaccccacaagttttccctgagcggcagccaggctgagttcctaggccctgcatgaccagaccagggcatgagcaattcaaccgcatacacggagctcagcccctgcggcggacacgcgaccccggctcagcccctgcggcggacacgggaccccggctcagcccgtgcggtggacacgcgaccccggctcagcccctgcggcggacacgggaccccggctcagcccctaccgcgtgcttgacctccttgcttggcaacgtgggcttctccacggacaccacgcacaccctgctggccagctcaatgtggagctgcttctcaaagaggcaatgcagggtcttcaagggcaggtgcagcttcgggtaggacacacgcccatcctgcagggatgggggtagtgaggttgggggcttgccagagggcgacctgccctcccaggaccccgagacagcatgggtgcacgcgtttctgcgtctcctgcaagttgctggtggctatcgctgacgcggggaaaggcgggctgcgggtaaagtcagtgccagcagtgcaaaccaaaggccttgaccctcctggcctcgacccctttagaagggacactgggcaccgtgcagggggtggcaggggcggtgatgctgggagctggcagagcctggggagaccgttcactgcacccccagatgttggctgttttctcctcaaactcagaactgtatgaatgtgacccatccagaaatagatgaattaaaaataacacct

SEQ ID NO: 97095 - DNA, 933 bp, Homo Sapiens
gggagagagtatgaagtcgacggcgcgccgaattcggcacgagggccgctgggcaaagatactggagaaggataagcggacccagcagatgcgtatgcagcggttgaaggcgaagctgcagatgccattccagagcggggagttcaaggcgctgaccaggcgcctgcaggtggagccccggctcctgagcaagcagatggccgggtgcctggaggactgcacgcgccaggcccccgagagcccctgggaggagcagctggcccggctgctgcaggaggcccctgggaagctgagcctcgatgtggagcaggccccgtcggggcagcactcgcaggcccagctctcaggtcagcagcagaggctcctggccttcttcaagtgctgcctgctcactgaccagctgcccctcgcccaccacctgctggtcgtccaccacggccagcggcagaagcggaagctgctcacgctggacatgtacaacgccgtgatgcttggctgggcgcggcagggtgccttcaaggagctggtatatgtgttattcatggtgaaggatgccggcttgaccccggacctgctgtcctatgcggctgccctccagtgcatggggaggcaggaacaggacgccgggaccatcgaaaggtgtctggaacagatgagccaggaggggctgaagctgcaggcactcttcaccgccgttctgctgtctgaggaggatcgggccactgttctgaaggccgtgcacaaggtgaagcccaccttcagcctcccgccgcagctgccgcccccggtcaacacctccaagctgctcagggacgtgtatgccaaggatgggcgtgtgtcctacccgaagctgcacctgcccttgaagaccctgcagtgcctctttgagaagcagctccactggactgcacaggtgtggctgacctcagcggg

SEQ ID NO: 97096 - DNA, 699 bp, Homo Sapiens
ggagaggacgtacgctaggtgcgaggccggggtgttaatcggacgaggaggggttgaggctgcctgaccccagcctaatggggtaggtaggccttgggaagtggagcatgggggcaaaggatccaagcattgagccttcatcctctattccccatccagtggggtgccgaggctcaggcagcatgacgacggagacctttgtgaaggatatcaagcctgggctcaagaatctgaaccttatcttcattgtgctggagacaggccgagtgaccaagacaaaggacgggcatgaggttcggacctgcaaagtggcggacaaaacaggcagcatcaatatctctgtctgggacgatgttggcaatctgatccagcctggggacattatccggctcaccaaagggtacgcttcagttttcaaaggttgtctgacactatatactggccgtgggggtgatctgcagaagattggagaattctgtatggtttattctgaggttcctaacttcagtgagccaaacccagagtacagcacccagcaggcacccaacaaggcggtgcagaacgacagacaacccttcagcttcccagcctaccactggaccctctgctgcctctccagcctctgagaaccagaatgggaatggactgagtgccccacaaggtcccggtggtggccacatccctcaaaatacttaccag

SEQ ID NO: 97097 - DNA, 1086 bp, Homo Sapiens
taggctaggtacgaggctgggtgtggaatcggcacgaggcctcgtgccgcagttctgccaccgtcactgagaagctcagcggtagcttttgggaagcaggacgttctcaccaggagagcgtcctctcgagatttctgctccctccattcagggcgtttgggagccaccccttcattttttaaaaaaagtatttctctgtgaccgacggccggggccttctgacggtctgaggtcttgcttgggccagtcacctcctgtcacggtccgcggaggggggaaggataagagggcgaggagctcatcgctcgccacccccgtgggcttcttgggcgcaggtcggagctgggtgggccggctccccggcccctggcttgggcgaccatgtccgcatccgcccagcagctggcggaggagctgcagatcttcggcctagactgcgaggaggctctaattgagaaattggtagagctttgtgttcagtatggacagaatgaggagggaatggtaggcgagcttatagccttctgcaccagcacacataaagttggccttacctcagagatcctgaactcttttgagcatgagtttctgagcaaaagattatcgaaagccaggcatagtacctgcaaggacagtggccatgcaggagctagagacattgtttccattcaagagctaattgaagtggaagaagaagaggaaatcctcttgaactcttacaccaaaccgttcacaagggttctcagaagcgagctatctctacccccagaaaccccctaacaaaaggagtgtgtcaactcgtagccccatagttactctcaccgtcaagtaaactctccaggtctattccctcccagaaatacatttccgaataaccgagacaaagtggtacctccctcggcttagcaccgggcagcatcgggccaggcaaaacgacacacctgaaacatagccggaagccctggatatcccacgcccaacagcggactacatccgggatagaagccccgaatcgcactcgcccgcaaaaacatcgaggaaccccgaacccacacaccccataccacccaacgtcacagaccagcc

SEQ ID NO: 97098 - DNA, 779 bp, Homo Sapiens
tggacccgcccccttatttgctccggaatctctcctccctcgccctggccctgccttctctggtgttagtgtggtgtgctgatgctgtgcctggtgtggcaactgcactgctgcctcctgctgcccctccctatccctgtgtgtgggatgttgtgctgcaccccttttatccccggagcgctagtgtgccctgcccctccgctgggtgcccacccccttctgtgctgcagttgcttagagtgctatcttggtgtgatgtgatgtgtggtgcttggtcccatgctggatgcctgcactctatctgccctgctcctggtgcaaaagctggggtgtgctgagtgtagagctgatcctgtggaaatcctttgatcctgggagccctagtgtttcctctccagccaactggtggctgtcgctgccttaatggtgatgtgagcactcaggaagaggttgtgttttgggcctgaaactctcccaatgtggcatagccccttttcctggtatggtggtctcctacacccacgcagcaccacctctccggtcgctgttggctgcctctacagcctacctatactgtccctttttccccccaactgggaattgagaggtaaggtctttctctgagaaatccagcagtagagtgaagggaccacccaagaaaactaaaaaccaaggcaccttaccagtctgtctggggacatggatcccttgctgaacttccccaagccactactgggaagtgcccctcacctcagacaccgcaaactgtgatctcctat

SEQ ID NO: 97099 - DNA, 1279 bp, Homo Sapiens
  misc_feature (1104)..(1113): n is a, c, g, or t
gcctcggtttatcggccgaggggctgaggcggaggcctgggccacggcggaggcgctgggtacgtagcgcgccacgcgggccggtgagagccagccgggcgccggggagggggcgggccctggccgcggctgctacgcggggctgccaccgccccgggcgacccaatttcgcggcctagtggggcgtacgggcctcttttgaaagcctgagttacgatgtattgagcgcgtcgtatgcggccagcactaaggtccttctggcactcctctggtggaccgcccccatcggccacacttgccctgctctccagtgattctgtagctcctggctccgtagtctcgcggacagctctctttcctggaagatgtttctggtgggcctgacagggggcattgcctcaggcaagagctcagtgatccaggtgttccagcagctgggctgtgcggtgattgacgtggacgtgatggcccggcacgtcgtgcagccaggataccctgcccaccggcgcatcgtagaggtcttcggcactgaggtcttgctggacgaatggcgacataaatcgcaaggtcctgggggacctgatctttaaccagcctgacccggcggcagcctgctcaacgccatcacccaccccgagattcgcacaggaggatgatgaaggcagacgttcaagtacttcctccggggataccgctacgtgattctggatatccccctgctgtttgagaccaagaagttgctcaagtacattgaagcacaccgtggtagtatactgcgaaccggaacacacagctggcacggctgatgcggcggaacagcctgaaacggcaggacgcagaggcccgcatcaatgcccagctgcccctgacagacaaggcccgcatgccccgccatgtcctagacaactccggccgaatggaatgtcaccaaacgccaagtcatccctcctgcacactggagctgggaacgctcccctggaagtaactgtcccctttaaggttttgggggccctcacagggcctcgcttcccattggccaggcctcctctaaccgtgtccccccattacctttttgccttaaaggcctattggggggcacttcannnnnnnnnnaaccccccgggccctccgatttatcttcccttggagggttcaaacccggataaaaaccactctgttttccctccggaggaccccttccgagagatagggacatcgggctacccgccgctcacctatgatctgccctcgcggggatattctcttcgaaacctgggag

SEQ ID NO: 97100 - DNA, 1289 bp, Homo Sapiens
agagtatgaagtcgacggcgcgccgaattcggcacgaggggtgaacgagggcaagcacgccaagttccgctgctacgtgatgggcaagcccgagcccgagatcgaatggcactgggagggccgcccgctgctcccggaccgccgccgcctcatgtaccgcgaccgcgacggcggcttcgtgctcaaggtgctctactgccaggccaaggatcgtgggctctacgtctgcgccgcgcgcaactcggcgggccagacgctcagtgccgtgcagctgcacgtgaaagagccccgcctccggttcacacggcccctgcaggacgtggagggccgtgagcacgggatcgccgtgctggaatgtaaagtacccaactcccgcatccccacggcctggttccgtgaggaccagcggctgctgccctgccgcaagtacgagcagatcgaagagggcactgtccggcgcctcatcatccacaggctgaaggcagacgatgatggtatctacctgtgcgagatgcggggccgggtgcgcaccgtggccaacgtcacagtcaaagggcccatcctgaagcgcctgccccggaagctcgacgtcctggaaggagagaatgctgtgctgctagtggaaactctagaagccggggtcgagggacgctggacccgtgatggggaggagctgccggtcatctgccagagcagctcaggccacatgcatgccctggtccttccaggggtcacccgagaggatgctggcgaggtcacctttagcctgggcaactcccgtaccactacgcttctcagagtacaatgtgtcaagcacagtcccccaggaccccccatatgggcagagatgtgcaagggccacaagaacacggtcctgttgacctggaagcctcccgagccagctcccgagaccccattcatctaccggctggagcggcaggcacgtgcgctctgaagactggattcagtgcttcagcatcgagaaagccggagccgtggaggtgccgggcgactgtgtgccctccgagggtgactaccgcttccgcaatctgcacagtcagcggacatggccgtagtccccacgtggtgttccacggttctgctcaccttgtgcccacagctcgcctggtggcaggtctggaggatgtgcaggtatacgacggggaagatgccgtcttctccctcgatctctccaccatcatccagggtacctggttccttaatggggaagagctcaagagtaacgagccggagggccaggtggaacctggggccctgcggtaccgtat

SEQ ID NO: 97101 - DNA, 738 bp, Homo Sapiens
tcgagtaggtacgaggcctgggtggctgaattcggcacgaggactgcgcatcaacctggggggcaagctgcagctggtgtgtttcgacaagacgggcaccctcactgaggacggcttagacgtgatgggggtggtgcccctgaaggggcaggcattcctgcccctggtcccagagcctcgccgcctgcctgtggcggcccctgctccgagcactggccacctgccatgccctcagccggctccaggacacccccgtgggcgaccccatggacttgaagatggtggagtctactggctgggtcctggaggaagagccggctgcagactcagcatttgggacccaggtcttggcagtgatgagacctccactttgggagccccagctgcaggcaatggaggagcccccggtgccagtcagctgtcctccaccgcttccccttctcttcggctctgcagcgcatgagtgtggtggtggcgtggccaggggccactcagcccgaggcctacgtcaaaatggctccccgtgagctggtggcatgggctctgcaaccccgagacagttgcccaccgacttcgcccagatgctgcaagagctatacagctgctggctaccgtgtcgtggcctggccagcaagccactgcccactgtgccagcctgaggcagccagcaactgacgagggacactgtggaggagactgagctctggggtgtggcatgagaactactgagccgagaaa

SEQ ID NO: 97102 - DNA, 1058 bp, Homo Sapiens
cgccccgggagctgcaggggccccgggcggcggcgaggccggagaggggcgggcccgggacaccggcacccggcgccctcggagccaaaggcgcgcggcggacacggcggggccctcgcgcgcctggagacgatgccaaagctgcagggcttcgagttctggagccgcaccctgcgaggggcccgccacgtcgtggcccccatggtggaccagagcgagctggcctggaggctgctgagccggcgccacggggcacagctctgctacacgcccatgctgcatgcccaggtctttgtccgcgacgccaactaccggaaggagaacctgtactgcgaggtgtgccccgaggaccggcccctcatcgtgcagttctgtgccaatgacccggaggtgtttgttcaggcggctctcctggctcaggattactgtgacgccattgacctgaacttgggctgcccacagatgatagccaagagaggtcactatggcgcctttctgcaggacgagtgggacctgctccaaagaatgattttgctggcccacgagaaactctctgttcctgtcacgtgcaaaatccgtgtcttcccggagattgacaagaccgtgaggtacgcccagatgctggagaaggccggctgccagttgctgacggtgcacggacgcaccaaggagcagaaggggcccctgtcgggtgcagcgtcctgggagcatatcaaggctgtgcggaaggctgtggccatccctgtgtttgctaacgggaacatccagtgcctgcaggacgtggagcgctgcctccgggacacgggtgtgcagggcgtcatgagcgcagagggcaacctgcacaaccccgccctgttcgagggccggagccctgccgtgtgggagctggccgaggagtatctggacatcgtgcggggaacacccctgcccacctgtcctacgtccgggccaactcttcaagctgtggcaccacacgctgcaggtgcaccaaggagctgggagaggagctggcaaggtgaagaccctggaggggattcgtgtgtgagccaggagctgag

SEQ ID NO: 97103 - DNA, 689 bp, Homo Sapiens
ggggacttccctgggttcacagcaggggtggaactggattcttcctggatggggatccagatggaggtggagggttgatttgggaagcagagcacagcagcacaaatttgcttgtaatgtcggcgactacagtttctagcctgctggcctgccttcactgtcctgggggagacttggagagaccaggtggactggagtagactgttgagagacgctggtctggtgaagatgtccaggaaaccacgagcctccagcccattgtccaacaaccacccaccaacaccaaagaggcgaggaagtggaaggttcccaagacaacccggaagggaaaagggacccatcaaggaagttccaggaacaaaaggctctccctaaaagaccgccgcttcaaaaaaacctgaggaatggagtgggccaacactatccagccactctgaccagccgaacgaggaactcaatcaaaatgagccatagcgggaccacaagggcaaggagaccaccaccttctccagtctctcttcggacagccagtaattcccgggcaaggccagagacttcaagtctatctgaaaagtctccagaggtctaaccccagataaatagccaacagggtgtagagtacattttacaccccaaagagtgtgccccatggtgatgaaaataaagtgaacatgttgcaaaatgaaaaa

SEQ ID NO: 97104 - DNA, 1268 bp, Homo Sapiens
gaaagacacacacacgccacgaagaagtcgatagcacgaacgataacggtcctaaggtagcgaggcctgggtggcgaattcggcacgaggaaacagccggcgttgctgtagcgcgtctgggaattacaccgggggactggccggcccgcttcgtgcctgcgggaagtcgggccgggggactcttcggaaactccgagcctcagagaaatatggcgctcccgacgctgccgtcctactggtgcagccagcagcgcctgaatcagcagctagcacgacatgcgagagcatggaggcccggctttctggcagcagtgggagcagaacagccgttacttcaggatgtctgacatctgcagctccaaacaggcagaatggagctctaaaacctcctaccagcggcagcatgcatgcctaacaagcgggcagcaagatgaaggaggagaagaggaggagtctggaggccccgacgggcaaccgctccaggcagtccatgcaggcaggagcgaggacctgctggcccagcagcaactggcaggcagctgcaggctgcagccatgaacttgccaggacacgcacccatccgggcagcagcggagggcaagctgcacctctagccaccgcagagcagaggacaacgggacaggctgcacacacttaggcacgacaccactgggccccccggacaccacccggacacttcgagagccacaaggcccccggcgcacccaagagcacccacgggtacgaaccctgcccctgccagggcccgtaaccgcacgcggcctagcacaggcatgaaccgccggacgcacgaaacggatgacgctgcacggacacgctccccgcccgacgcgaacgccggcaaccagactgccggccccgcgacctcacacgcggggcggcgcaacccaccacaccacgggcccgcgaaacctctaacccactggtggaacctaacatcagtgcgcaccccaccacgccgacgcccgcaaccgctcatacagccgccgcgctttggcgaacgtctggtcccacggtggtgcacgacacactgccgcatcacggcatgtgacccctatgtcctcatgtcccttcggggatagcaagtagcgcatccggtaccagcgctgtgtagcaaacgcgctagacgtgatccctccccatcgatctcccggaactaccaaactcgttcacttaagttcagtccaatagcgatagcccagaacacctacacacgcattctttcgcatagccgccccaatctctag

SEQ ID NO: 97105 - DNA, 583 bp, Homo Sapiens
ggcacgagagtgacgtcgtgtggggcgggtccgaccgcgcacaatgggccatggagttcccgttcgatgtggacgcgctgttcccggagcggatcacggtgctggaacagcacctgaggcccctcagcccgccgacccggaaccacaacgccggcccgtgttgatctacagcagcaaattatgaccattatagatgaactgggcaaggcttctgccaaggcccagaatctttccgctcctatcactagtgcatcaaggatgcagagtaaccgccatgttgtttatattctcaaagacagttcagcccgaccggctggaaaaggagccattattggtttcatcaaagttggatacaagaagctctttgtactggatgatcgtgaggctcataatgaggtagaaccactttgcatcctggacttttacatccatgagtctgtgcaacgccatggccatgggcgagaactcttccagtatatgttgcagaaggagcgagtggaaccgcaccaactggcaattgaccgaccctcacagaagctgctgaaattcctgaataagcactacaatctggagaccacagtcc

SEQ ID NO: 97106 - DNA, 1215 bp, Homo Sapiens
cggctaagctgggaataaccattgaaccgtggagcgacccacccggggccatagcgaaaggcagcggttaatcttaggaaagggaaccctgagattcctcaggcctgacccgtgcctcaggactcacatcggatttgcccctgggcaaagaccagtaagtctccaccaggttgaagtacatccagcacaacaaagacccttgaatgcgcctccccagggttaccggcaaacttgtctcacaatcccgggtggggggcccccacgtggttctcagggtctcaacaacaattaataggtacaatcccaagcaatcaaagggcgtccaacagtggcttttagatctcctgagtgtatggacatcattcgcaatcatttttgtggcttcgtcaagatcaagtgcaaaagaaagcacattgggtgtgatgtcaaccagaatgtccctaatgcctccaattggtcagtgctggttgcagtcagcctgctggctgtgagttctgctgaccttgtgtatggtgttctccacgatgctggaggcgattcccagccgtgccagatgctattcccagccctaccccagctgcagtaatgctcaggctcagccctgctgtaaatggtgccaacacaacgccaatgacagacaggatgccagtggagccagacaccacattggcgatgacgcagcctctgtggaccttttcaatctcatttgcaatgacacgaagcctttctatggactcctgaatcttccatctgatttgaggaaactttcaaaaaccactccctaaactgctgttctttttgctgcatgtctttgtcctcaatagccacatatggtgtaagattcttcagagcttcatagagagcatctgcctcttccctgggcaattcagccacacgcacaaatctcttccaggcttcatcgctagtcagcaggattttcagatgcactgggctaactttcttctggaagtattcaatgacttcttcagtgaagcgtttcttttcttggaactgtccagccactgtccagcctggatggttttgctgcaccccgacgcttgtgatgagctgcacccaggatcccatcctccttggtcattgttggcctggctcagacgctgatctggggcctctgctgaatgttgaggcataggatactgactgttagcctcaactaggacacagtgcgtcccctctaggctaactcaccggttg

SEQ ID NO: 97107 - DNA, 762 bp, Homo Sapiens
ggctaggtacgaggctgggtgttgaatcggcacgaggctccctttccacacggggctgctaagagcagtggtcagaaatgtaggaggtcaatttgggaacagcatgaggaagggtctgatcctgatgggactccgcgatcatgggacggggtgtttgtgaccccagccttcctcctcatggcatgtgttcaggcaggcccagggtggtcatttgtccagcgatttggtaagggaattcccacactgacaggtcggttagacttgaaacctttgtcttttcaaactcttaagacacacttcatcctatccattaggaaggcatagaatttccaagtggaaagttacttctgaatgtagcttgctgcttagcaaagttaggagactttccctattcacaaagcaaggtgatgcagacccagcaccagagacagatgtggaatgaaaaccatgcagttccagtgttctcgacacccacagaagcaactgccaggattgccatcaatctctcttgcctcttaaaaattttttaaatggtagaatgcatcatacaaacaaaaaagtatgtgaaatatgtatggacacttaaaagtactggaaatctatgggcccactgcctatgttaagaaataattccttaacttagcagtcaggaagtccctctctgatcacagcctcctcatcttcgggaggtagcactgtcctgagtttgagttgtcatctgttgcctattagcaggttcggtgactctctataggggggata

SEQ ID NO: 97108 - DNA, 887 bp, Homo Sapiens
  misc_feature (738)..(831): n is a, c, g, or t
tccccctttggtccagtgcaacaagcgtacgagcgcacgaaagaagcagcaggtcaagaaacagtcccagtcaatgtggaggcatgcccatgtctccgataggccaccagtacagcagcattgttaagagagcatgcagtgactggagttcagggaaagtgcacacagatgcgggacttgttcaaggccctcatgaaagttgaagtctatacaagaagacaaaacaattgctgaggcctgagagaagcagattcgataccagcatcttgccaatttgcaaggactcacttggctggatgtgtaacagacttgatacaaactatgacctgctattggaccagtcagagctcagaagcatttaccttgataagaatgaacagtgtaccaaggcattcttcaattcttgtgacacatacaaggacagtttaatatctaataatgagtggtgctactgcttccagagacagcaagacccaccttgccagactgagctcagcaatattcagaagcggcaaggggtaaagaagctcctaggacagtatatccccctgtgtgatgaagatggttactacaagccaacacaatgtcatggcagtgttggacagtgctggtgtgttgacagatatggaaatgaagtcatgggatccagaataaatggtgttgcagattgtgctatagattttgagatctccggagattttgctagtggcgattttcatgaatggactgatgatgagnnnnnnnnnnnnnnnnnnnnnnnnnnnnnnnnnnnnnnnnnnnnnnnnnnnnnnnnnnnnnnnnnnnnnnnnnnnnnnnnnnnnnnnnnnnnnntatacatttgattgatgacagttgaaatcaataaattctacatttctaatatttac

SEQ ID NO: 97109 - DNA, 867 bp, Homo Sapiens
ggcacgaggagcgctgcgctcgcgcccggatccctcaggcggctgcaggcttcagcctgcgctggttggtgaaacagagatgtcagaaaaggagaacaacttcccgccactgcccaagttcatccctgtgaagccctgcttctaccagaacttctccgacgagatcccagtggagcaccaggtcctggtgaagaggatctaccggctgtggatgttttactgcgccaccctcggcgtcaacctcattgcctgcctggcctggtggatcggcggaggctcggggaccaacttcggcctggccttcgtgtggctgctcctgttcacgccttgcggctacgtgtgctggttccggcctgtctacaaggccttccgagccgacagctcctttaatttcatggcgtttttcttcatcttcggagcccagtttgtcctgaccgtcatccaggcgattggcttctccggctggggcgcgtgcggctggctgtcggcaattggattcttccagtacagcccgggcgctgccgtggtcatgctgcttccagccatcatgttctccgtgtcggctgccatgatggccatcgcgatcatgaaggtgcacaggatctaccgaggggctggcggaagctttccagaaagcacagaccggagtggaacacgggcactttgggggaaccccacccgtcgaggggaggcccagtaacaaacactttctcagggaaacagccctggcccgaatacccccactggtggcccaacctacccccgggcagggggcccagggggcccttaaaagggaaccttggccccttggcccccaacgggcccaacaaacctttccttccccttttaatttccggggcgggctaa

SEQ ID NO: 97110 - DNA, 2279 bp, Homo Sapiens
ggtatgaaagtcgacggcgcgccgaattcggcacgaggagcctcgggccgggccctgagcgcgcgggctccgcgccgccgccgcgccatggcggagaccaagattatctaccacatggacaggaggagacgccgtacctggtcaagctgcccgtggcccccgagcgcgtcacgctggccgacttcaagaacgtgctcagcaaccggcccgtgcacgcctacaaattcttctttaagtccatggaccaggacttcggggtggtgaaggaggagatctttgatgacaatgccaagcttccctgcttcaacggccgcgtggtctcctggctggtcctggctgagggtgctcactcggatgcggggtcccagggcacggacagccacacagacctgcccccgcctcttgagcggacaggcggcatcggggactcccggcccccctccttccacccgaatgtggccagcagccgtgacgggatggacaacgagacaggcacggagtccatggtcagtcaccggcgggagcgtgcccgacgccggaaccgcgaggaggccgcccggaccaatgggcacccaaggggagaccgacggcgggatgtggggctgcccccagacagcgcgtccaccgccctcagcagcgagcttgagtccagcagctttgtggactcggacgaggatggcagcacgagcaggctcagcagctccacggagcagagcacctcatccagactcatccggaagcacaaacgccggcggaggaagcagcgccttcggcaggcggaccgggcctcctccttcagcagcataaccgactccaccatgtccctcaacatcgtcactgtcacgctcaacatggaaagacatcactttctgggcatcagcatcgtggggcagagcaacgaccgtggagacggcggcatctacattggctccatcatgaagggcggggctgtggccgctgacggccgcatcgagcccggcgacatgttgctgcaggtgaatgacgtgaactttgagaacatgagcaatgacgatgccgtgcgggtgctgcgggagatcgtttcccagacggggcccatcagcctcactgtggccaagtgctgggacccaacgccccgaagctacttcaccgtcccacgggctgacccggtgcggcccatcgaccccgccgcctggctgtcccacacggcggcactgacaggagccctgccccgctacgagctggaagaggcgccgctgacggtgaagagtgacatgagcgccgtcgtccgggtcatgcagctgccagactcgggactggagatccgcgaccgcatgtggctcaagatcaccatcgccaatgccgtcatcggggcggacgtggtggactggctgtacacacacgtggagggcttcaaggagcggcgggaggcccggaagtacgccagcagcttgctgaagcacggcttcctgcggcacacggtcaacaagatcaccttctccgagcagtgctactacgtcttcggggatctctgcagcaatctcgccaccctgaacctcaacagtggctccagtgggacttcggatcaggacacgctggccccgctgccccacccggctgccccctggcctctgggtcagggctacccctaccagtacccgggacccccaccctgcttcccgcctgcctaccaggacccgggctttagctatggcagcggcagcaccgggagtcagcagagtgaagggagcaaaagcagtgggtccacccggagcagccgccgggccccgggcgtgagaaggagcgtcgggcggcgggagctggggggcagtggcagtgaatcggatcacacggaacgagatggggcgggggagcagctggcgagaccgtccggccggccagctcagccgtggcaggcagccagcagacaggctcggtacggcccagagggatcccacaggaccaagccgaggaacaagggacaatacagaggagggcggggcaacagggtaaccacagagcaggagatagaggcgacaccccggactggaggagcgcaggcgccagaagcgaacagaccacgacgggatacaagcgaccaggaccgggccagccaacaggcagaaggggcacgaacagaacaaaaaacgaaggaacaccaggggaagcgggcagagagagagaaacacagcgaaacgacgacacacaaaccgacgaaaagcgcaaacgcagagaccacaggggggacagagaagcacaccaagagagaaaagagaagccgacgacacacgcaagaaaac

SEQ ID NO: 97111 - DNA, 1229 bp, Homo Sapiens
taggtagcgaggcctgggtggcgaattcggcacgaggcggggcccctggggccacagccggaggacgtcccggtcgcggtcggggagccctggcagctcttcctatgagcactatgagagtaggaagaagaagaaaaggagatcagcgtccagacctcggggaagggagtgctcccccaccagcagcctggagaggctctgcaggcacaagcatcagcgggaacgcagccacgagcggccagacaggaaggagagtgtggcgtggccccgagaccggaggaagcggaggtcccggtccccaagctcggagcacagggcacgggagcacaggcgacctcggtcccgtgagaagtggccgcagacccggtcccattccccaaagaggaagggggctgtgagggaggcttccccagcgccccttgcacagggggagccagggcgggaagacctccccaccaggttgccagccttgggggaagcacatgtctcgccggaggtggctacggccgacaaggcccccctgcaggctccccctgtcctggaggtggcagctgagtgcgagccggacgacctggacctggattatggcgactccgtggaggccggacacgtctttgatgatttctcaagcgacgccgttttcatccagctcgatgacatgagctcgccaccttctcccgaaagcacagactcttccccggagcgagacttcccactgaagcctgcgttgcccccagccagcctggccgtggccgccatccagagggaggtgtcattgatgcacgatgaagacccttcgcagcccccacccctgccagagggcacccaggagccacatttgctcaggccggacgcggctgagaaggctgaggcacccagttccccggatgtggcgcctgcggggaaggaagacagcccctctgcgagtgggagggtacaggaggcagcccggcctgaggaggtggtttcgcagacccccctgctgcggtccagagccctggtgaagcgggtcacctggaacctgcaggagtcggagagcagcgcccccgccgaggacagagccccccgggcaccacttcacaggccacagaagccccgagcaaggagcctgggacatggaggatgtggcccccacaggggtcaggcaggcgttctccgagctgccctttcccagtcacgtgcttccggaacccgggtcccagacacagacccctctcaggttacagccg

SEQ ID NO: 97112 - DNA, 1026 bp, Homo Sapiens
accctaggctaggtacgaggctgggtggtgaatcggccgaggctagccgaagcggctgcatctggcgccgcgtctgccccgcgtgctcggagcggattctgcccgccgtccccggagccctcggcgccccgctgagcccgcgatcacttcctccctgtgaccaaccggcgctgcaggttagagcctggcaatgccgtttgggtgtgtgactctgggcgacaagaagaactataaccagccatcggaggtgactgacagatatgatttgggacaggtcatcaagactgaggagttttgtgaaatcttccgggccaaggacaagacgacaggcaagctgcacacctgcaagaagttccagaagcgggacggccgcaaggtgcggaaagctgccaagaacgagataggcatcctcaagatggtgaagcatcccaacatcctacagctggtggatgtgtttgtgacccgcaaggagtactttatcttcctggagctggccactggggagggaggtgtctgactggatcctggaccagggctactactcggagtcgagactacagagcaatcggtggctacggcaaggctcctggaggccgtggcctatttgcactcacctcaagatcgtgcacaggaatctcaaggctggagaacctggtttactacaaccggctgaagaactcgcaagcattgtcatcatttgacttccatctggctaagctacaagatggctcatcaaggagccctgtgggacctcccgaggatctggcccagaggttggtagagccggcagcggtatgggacgccctgtgagatggtgggccatggagtcatcattttccatctggtttagaggaatccactttctatgagggggggagacgctgatatgggaacgtgaaagaatccgtcgaagatctgctgggcacttacagttgcctcccatgggataaatcgcggcgcaaagcacggccacggcggtgttggcagacggtacgaaaagcctccaatgttctggccgttaaacaa

SEQ ID NO: 97113 - DNA, 1151 bp, Homo Sapiens
  misc_feature (952)..(952): n is a, c, g, or t
  misc_feature (995)..(995): n is a, c, g, or t
cttaggctaggtacgaggctgcgtgtataattcggcacgaggaagagccatacgaccttcggatgccggaaggtccttctgaatcccttccctgttccttaggttgcactagtcgggggttccatgctggggggcagaaggaatgctctctaccgtctgaaaccgttcatcaggaaggccttgatttgtgatgtgctaggagagcacaggatctgcaaatagaaggcacctgtctcccttctgcaggccgaggagaggccgccatggactgtgtgcttcttcatggcttgtttactcttctttcacagaccctacagcttggggcctgggctcctctgaccatcctcattgagaaaggaaagtgagtccagagaagttgatgcttcctacctgttggagcggcccagcagtgtaagcgtggttgttactgccccatccgccatgtccttcagtgccaccattctcttctcccctcccagtggcagcgaggccagatgctgctgctgcgcctgtaagagtgagactaatggaggcaacacaggctcccagggtgggaatcctcctcccagcacccccatcacagtgactggacatggcttggctgttcagagctcagagcagctcctgcatgttatctaccagcgggtcgataaggcagtgggtttggctgaagctgctctgggtcttgccagggccaacaatgagttgttaaaacgtctccaggaggaagtgggtgacctgaggcaagggaaagtgtccatccctgatgaagatggggaaagccgggcacatagttccccacctgaggagcctgggcctctcaaggaaagtcccggggaagcctttaaggctctgtctgccgtggaaaaggagtgtgacagcgtgggcagcggcgtgcaggtggtgattgaggagctgcggcagctgggagcagcctcagtggggcctgggnccttgggcttccagcaactcagagggacatgcggctcccaggntgcacgctggctggcaccgaggcggccccctgctcaatccttctggggggaggataccgggccctctgaggtggcgcataaaagggaagtcttggtccctgcttagggccaagaaattttacccggccccacaattggcaatccaacggggaaaca

SEQ ID NO: 97114 - DNA, 1426 bp, Homo Sapiens
  misc_feature (1088)..(1088): n is a, c, g, or t
  misc_feature (1232)..(1232): n is a, c, g, or t
  misc_feature (1300)..(1301): n is a, c, g, or t
  misc_feature (1332)..(1332): n is a, c, g, or t
  misc_feature (1377)..(1377): n is a, c, g, or t
cggctaggtacgaggcatgggtgtagaatcggcacgaggcacctgtagcctccgctctctcaagggctgatcgggagaaggccaaggtggaagaaaccaagcggaaggaatcagaactccgtcaagggtctccgagcagagctcaagaaggcccaggagagccagaaggagatgaaactgctgctggatatgtacaagtcagcgcccaaggagcagcgggataaggtgcagctcatggcagcggaacgcaaggctaaggccgaggttgatgagctgcggagccgcatccgggaattggaggagagggatcgaagggagagcaagaagatcgcggatgaggatgccctgcggcgcattcggcaggcagaggagcagatagaacacctgcagcgcaagctgggtgccaccaagcaggaggaggaggctctgctctcagagatggatgtgacaggtcaggcttttgaggacatgcaggaacagaacgggcggctgctacagcagttgcgggaacaaggatgatgccaactttaagctaatgtcagagcggatcaaggccaaccagattcacaagctgctgcgggaggagaaggatgagttgggcgagcaggtccttggcctcaagtcccaggtggatgcccagctgctgactgtgcagaagctggaggagaaggagcgagccttgcagggcagcctcgggggtgtggagaaggagctgacgctgcgcagccaagccctggagctcaacaagcggaaggctgtagaagccgcccagctggccgaggacctgaaggtgcagctggagcacgtgcagactcggctgcgggagatccagccctgcctggcagagagccgggctgctcgtgagaaagagagcttcaacctcaagagggctcaggaggacatctcacggctgcggcgcaagctggaaaagcagaggaaggtggaggtctacgcagatgccgacgaaatcctccaggaggagatcaaggagtacaaggcgcggttgacctgcccctgctgtaacacccgcaagaaggatgcagtccttaccaagtgcttccacgttttctgcttcgagtgcgtgcggngccgctatgaggcccgccagaggaagtgccccaagtgcaacgcggcctttggtgcccacgacttccatcgtatctacatcagctgaacctgaaactcaggggactctggaacaccatggacccctgggggctgtgcccccatcntcctccccaacccaggtctagtgggccccaccccccattccggacccccatgggcccaggcccctgcnnccatctaggtggggtttggggaacccctggntgcatggctagtggggccatggggaatccggcccaagccttcggnttcccatcctttttcccctaaaagggttccggagcctggcaagccctta

SEQ ID NO: 97115 - DNA, 1043 bp, Homo Sapiens
ggcacgagggcacagggcacagctggtctgttcagccagggcgggaaggggctccctgctgctcctgcccgaggggatccggtgccgcccaggagcaccagcggcggtgtctccgccaaggggctctcagtgagcaggagaaatgtttacgttcacaaagaccagagcccacgaggggctgagcctgctgccaaaagtgcttttggtcagctgcccagctgtgccacagcgggcaccgaggcaggaggcgccagaggaacctttcacatgggctgcgggagcccgagcttcctgacccccagcccgggagcggagagggacgctggagcccaggccgaccgcacaccgccctggagcgacttcgcccaccagagtcggctgcccagcccgtgggtgctgcgctccgaaggcagagatgcagtgtggagggggggcgtcgggagcgagagagacaaggggtccgagggccccgcccggggcctgcccagcctgccccttgcgggcttctcgccgctgctgtccacccagctcttccactttggaaagggtgtctcctgggggggcaggcaggctggcctcttcagcccccacctggggctgcctctgcagggcccctccttctcggccttcagggaggcccaggccggacccagccctgtctttggaagcccacacttgctggcaaagaaggacggcggcccctggccaaccaggaaggcacaggcagggctgagtttgcatgacaggaggagctcgggctcggaggaaagcattttagacctgaggtatcgacgaagggtcaacagggatgaccaggagcaggacgccttgggcagtgacgccagtgacttcagcgacacctccacggaggacagtggcggcagctcagtagtgaaagtctaagccctcgagctgtgggttcgcgtcctgggttgcgtgcatccggggaaagcggcgtaaccgtgcgtgtgtgtgatggttccgtgggctgcaaagaaagggaaacggtctattatacatagcccctggtatatatggtacac

SEQ ID NO: 97116 - DNA, 621 bp, Homo Sapiens
gtatttgcaggacgacccttcgaactcttcatagcagccacaaacattcgctactgctactacaacgagacccacaaggttctgcagttgtatttctttctcttttagtaataatttttcaccatgcatcggaaaaaggtggataaccgaatccggattctcattgagaatggagtagctgagcggcaaagatctctctttgttgtagttggggatcgaggaaaagatcaggtggtaatacttcatcacatgttatccaaagcaactgtgaaggctcggccttcagtgctgtggtgttataagaaagagctggggtttagcagtcaccggaagaaaagaatgcgacagctgcctatgaaaacaaagaatggaacactgaacataaagcaggacgacccctttgaactcttcatagcagccacaaacattcgctactgctactacaacgagacccacaagatcctgggcaataccttcggcatgtgtgtgctgcaggattttgaagccttaactccaaacttgctggccaggactgtagaaacagtggaaggtggtgggctagtggtcatcctcctacggaccatgaactcactcaagcaattgtacacaatgactatcgat

SEQ ID NO: 97117 - DNA, 1028 bp, Homo Sapiens
tagggcagtacgagctggtgggtaaatcggcacgagggtcatgatcaagcttctccagcatgatttccagagaggagtactggggaagcttgatccatgaacatgcaggagaaacttcgttgtgccattcactaccgtgaagaccccctcagtggctgatgggagggagccccagaattaggctgtcactgaggcacccactctgctggcttgggaagccaccactgcggcccgtccctccagggccctgtcgtgaggagttggcaacatttgcttttccaaactttcgtccacattccagggcctcctggaagacttaaccttttgtctttgtacgtatcgtgatgggtaggttcttttgctgcctgtttgtggtctatttgtaggatagtttagttcccagacagtttgtgtctaatttgatcttcttggacattgtccctcatggccaccagattctaatgccataaggccccagctggttccccatcacagaaccacccagcagtgaagccgggggtacaatgacctcggccacacagagcgctcgtgctttcagcagagcgcctccacagacaagcctgtggccagccctgccctccagcctcgagctggagttgctccagaggcagccccagcaggcctccctccacatagaggtggctggtgcaaattgcccaaacacgtgagacacacagggagcttgatgtgttcatcttcctgctttagaacttgctcccggtctggttgtctgagaaaagccacaggggttccctgcactccataactcctatctgccgtctgtctcttgggcctggtctgaacgtttcatctgaggcctctcgggacagagactaagggtcatcccgagttagtcaagactagtggtgctccacgcagggtgaaagaaccagactgggaaagcccagtgggggcccccaattcgtgaggaacttggttaccccccaaagggaaagcgaaagcccccgggggaggagggcccaaaggagtgctgggtcaccccagtg

SEQ ID NO: 97118 - DNA, 766 bp, Homo Sapiens
  misc_feature (628)..(659): n is a, c, g, or t
tacggctaggtagcgaggctgggtggtgaatcggcacgaggcacgctggttttccggggccgctccatcgcgccttcctcctgcgcctcgcttctccggtccagccgccatcttcctttccgcacaggggccgccgagcggggccatgcagccaacgctgcttctcagcctcctgggagccgtggggctggcggctgtcaattccatgccagtggataacaggaaccacaatgaaggaatggtgactcgctgcatcattgaggtcctctcaaatgccttgtcgaagtccagcgctccacccatcacccctgagtgccgccaagtcctgaagacgagtagaaaagacgtcaaagacaaagagacaactgaaaatgaaaacacaaagtttgaagtaagattgttaagagacccagctgatgccacggaagcccacgagtcctccagcaggggagaggcaggagccccaggggaggaggacatccaaggcccaacaaaggcagacacagagaaatgggcagagggaggcgggcacagccgagagcgagcggatgagccccagtggagcctctatccctccgacagccaagtctctgaagaagtgaagacacgccattcttagaagagccannnnnnnnnnnnnnnnnnnnnnnnnnnnnnnnactatcaaaaaggggagcaaggggaagatagcagtgaagagaaacaccttgaagagccaggagagacacaaaacgcttttctcaatgaaagaaagcaggcttcagct

SEQ ID NO: 97119 - DNA, 1195 bp, Homo Sapiens
  misc_feature (855)..(855): n is a, c, g, or t
  misc_feature (890)..(890): n is a, c, g, or t
  misc_feature (1140)..(1149): n is a, c, g, or t
ggggaggcagaggaacagggaagatggcggctgtggtggagaatgtagtgaagctccttggggagcagtactacaaagatgccatggagcagtgccacaattacaatgctcgcctctgtgctgagcgcagcgtgcgcctgcctttcttggactcacagaccggagtagcccagagcaattgttacatctggatggaaaagcgacaccggggtccaggattggcctccggacagctgtactcctaccctgcccggcgctggcggaaaaagcggcgagcccatccccctgaggatccacgactttccttcccatctattaagccagacacagaccagaccctgaagaaggaggggctgatctctcaggatggcagtagtttagaggctctgttgcgcactgaccccctggagaagcgaggtgccccggatccccgagttgatgatgacagcctgggcgagtttcctgtgaccaacagtcgagcgcgaaagcggatcctagaaccagatgacttcctggatgacctcgatgatgaagactatgaagaagatactcccaagcgtcggggaaaggggaaatccaagggtaagggtgtgggcagtgcccgtaagaagctggatgcttccatcctggaggaccgggataagccctatgcctgtgacatttgtggaaaacgttacaagaaccgaccaggcctcagttaccactatgcccactcccacttggctgaggaggagggcgaggacaaggaagactctcaaacacccactcctgtttcccagaggtctgaggagcagaaatccaaaaaagggtcctgaatggattgggcttgccccaacaactactgtgacttctgcnctgggggactcaaagattaaccagaagacgggacnacccgaggagctggtgtcctgttctgactggtggccgctcagggcatccaatcttgccctccattttacccccgcgggatgattggcgggaattgaaagaatttaccccgctggcaagtggcattccagtgggcaattggttgcaataatttttgcgggcaacctccggaaaaaggaccgaaccaagttgggccctttctgggggaggaacttggcaatcgcgggcctacccccaggttaaatgggtttnnnnnnnnnngccagggttctaaaaccccccttaaagggaaaatttggaaaacctt

SEQ ID NO: 97120 - DNA, 859 bp, Homo Sapiens
gggagtgcggctgcgccggccggtagctgcagctggagcagtggcgtttggaggagactcggatataccttctcagaagctgcacaggaggaaagcagtgacaaagaaagaagttgtcattctttgcacgaaactggatggcttctacagggagccaggcctctgatatagacgagatttttggattcttcaacgatggcgaacctcccaccaaaaagcccaggaagctgcttccaagcttaaaaactaagaagcctcgagaacttgtgctagtgattggaacaggcattagtgctgcagttgcgccccaagttccagccctcaaatcctggaaggggttaattcaggccttactggatgctgccattgattttgatcttttagaagatgaggagagcaaaaagtttcagaaatgtctccatgaagacaagaacctggtccatgttgcccatgaccttatccagaaactctctcctcgtaccagtaatgttcgatccacatttttcaaggactgtttatatgaagtatttgatgacttggagtcaaagatggaagattctggaaaacagctacttcagtcagttctccacctgatggaaaatggagccctcgtattaactacaaattttgataatctcttggaactgtatgcagcagatcaggggaaacagcttgaatcccttgaccttactgatgagaaaaaggtcctcgagtgggctcacgagaaacgtaagctgagcgtgctgcatattcacggagtctacacaaacccgtagtgggcattgtccttcatccggctgggatatcagaacgtgctcaggaacaactgaagttcctgagagaaattcagaaaatctaa

SEQ ID NO: 97121 - DNA, 351 bp, Homo Sapiens
gcggccgctgctgcctgtgcctctcaaacttgtcacccacggatgctgggaaaaatgcacataaaatgactggatggagatgacccaggaaggggccctgttgcccaggaaatgggcttgtcctgaaccacagcttgaaggagagccaccgactgatcaggaatacccaactggactttattccagcaacatacaaagcattactgtgctgggccatggtatattattgggtttcttttattagaacacttggcattaccttcactaatatacactcatcatagtagacattttcactagttatagatgatatgcactattttcccttctgaaacagaaatttgcagcagc

SEQ ID NO: 97122 - DNA, 908 bp, Homo Sapiens
  misc_feature (802)..(802): n is a, c, g, or t
gggggagccgggtgccgctggcacctctatgatcactggagtctcgcgggtccctcgggctgcacagggacaagtaaaggctacatccagatgccgggaatgcactgacgcccattcctggaaactgggctcccactcagcccctgggagcagcagccgccagcccctcgggacctccatctccaccctgctgagccacccgggttgggccaggatcccggcaggctgatcccgtcctccactgagacctgaaaaatggcttcggggcaaggcccaggtcctcccaggcaggagtgcggagagcctgccctgccctctgcttctgaggagcaggtagcccaggacacagaggaggttttccgcagctacgttttttaccgccatcagcaggaacaggaggctgaaggggtggctgcccctgccgacccagagatggtcaccttacctctgcaacctagcagcaccatggggcaggtgggacggcagctcgccatcatcggggacgacatcaaccgacgctatgactcagagttccagaccatgttgcagcacctgcagcccacggcagagaatgcctatgagtacttcaccaagattgccaccagcctgtttgagagtggcatcaattggggccgtgtggtggctcttctgggcttcggctaccgtctggccctacacgtctaccagcatggcctgactggcttcctaggccaggtgaccccgcttcgtggtcgacttcatgctgcatcactgcattgcccggtggattgcacagagggggtggctgggtggcagcccctgnaactttgggcaatggtcccatcctgaacgtgctggtggtttctgggtgtggttctgttgggccagttttgtggtacgaagattctttcaatcatgaactcccaggg

SEQ ID NO: 97123 - DNA, 907 bp, Homo Sapiens
ccttgggattcatgattggaagaatcttcggtaccacggacctgcgccaacagtaccacacccagaccaccagcacgttcaggatgggaccattgcccaagttcaggctgccacccagccacccctctgtgcaatccaccgggcaatgcagtgatgcagcatgaactcgaccacggaagcgggtcacctggcctaggaagccagtcaggcccatgctggtagacgtgtagggccagacggtagcgcgaagcccagaagagccaccacacggccccaattgatgccactctcaaacagggctgtgggtgttgctgctggcctggtggcaatcttggtgaagtactcataggcattctctgccgtgggctgcaggtgctgcaacatggtctggaactctgagtcatagcgtcggttgatgtcgtccccgatgatggcgagctgccgtcccacctgccccatggtgctgctaggttgcagaggtaaggtgaccatctctgggtcggcaggggcagccaccccttcagcctcctgttcctgctgatggcggtaaaaaacgtagctgcggaaaacctcctctgtgtcctgggctacctgctcctcagaagcagagggcagggcaggctctccgcactcctgcctgggaggacctgggccttgccccgaagccatttttcaggtctcagtggaggacgggatcagcctgccgggatcctggcccaacccgggtggctcagcagggtggagatggaggtcccgaggggctggcggctgctgctcccaggggctgagtgggagcccagtttccaggaatgggcgtcagtgcattcccggcatctggatgtagcctttacattgtcccatgtgcagcccgagggacccgcgatcccggaaattccggaccggtccc

SEQ ID NO: 97124 - DNA, 1564 bp, Homo Sapiens
taaaacatacggctaggtacgaggctgggtgtttaattcggcacgaggccgagggaccagcgcgggtctagctgctgccgccatccccaccatccctgaccgcgcctgcccgggctccgcgccaggaggagcggccaggcccagccccggcaccgcgcgctcggggaccccgacggcgcccagcccggcgaggggcctcagggggaggacgaggaggaaaggcggcctcgccggggacccggccatggcgctggacttcttggctggatgcgcggggggtgtggcaggcgtgcttgtgggacacccgtttgacacggtcaaggtacggcttcaggtccagagcgtggagaagcctcagtaccgcgggacgttgcactgcttcaagtccatcatcaagcaagagagcgtgctgggcctgtacaagggcctgggctcgccgctcatggggctcaccttcatcaacgcgctggtgttcggggtgcagggcaacaccctccgggccctgggccacgactcgcccctcaaccagttcctggcaggtgcggcggcgggcgccatccagtgcgtcatctgctgccccatggagctggccaagacgcggctgcagctgcaggacgcgggcccagcgcgcacctacaagggctcgctggactgcctcgcgcagatctacgggcacgagggtctgcgtggcgtcaaccggggcatggtgtccacgttgctgcgtgagacgcccagcttcggcgtctacttcctcacctatgacgctctcacgcgggcgctgggctgcgagccgggcgaccgcctgctggtgcccaagctgctgttggcgggcggtacgtcaggcatcgtgtcctggctctctacctatcctgtggacgtggtcaagtcgcggctgcaggcggacggactgcggggcgccccgcgctaccgcggcatcctggactgcgtgcaccagagctaccgcgccgagggctggcgcgtcttcacacgggggctggcgtccacgctgctgcgcgccttccccgtcaacgctgccaccttcgccaccgtcacggtggtgctcacctacgcgcgcggcgaggaggccgggcccgagggcgaggctgtgcccgccgcccctgcggggcctgccctggcgcagccctccagcctgtgacgctcacccggcctcttcccaggctccttctcagaaactgggacatacattggcctgagtcgattgcctgcttctgcgggatgctgcgagcttggagtctatagacgtggctgaatttggtgatacgctgggtagtttggccgaaaacggcctgctcaggtcccatctctcacttagacctcatgccactgtaagtccagccgcattttccagaagagctgactgcctgatgcagcctgcacgttcctgaactgaggagacacaaccttttgaactggcacacagtgactaccacaacagccaggatattatgaacagcccaggacataccaatccgcaggtgtaccatgtgtagaagaatacacagaaagtatacaaataagaccacagcaatcgctgatagcatag

SEQ ID NO: 97125 - DNA, 730 bp, Homo Sapiens
agcctaggtacgaggctgggggtgaatcggcacgagggccggaggaggaaggcggcggcgacgacgaggaagacgccgaggcctgggccaggaacggcggacgtgggggcggcagccagctcgcaggaagttcatgatcaagtgtagcccacaccaaatgcttcatccagagtcatagtacatgtggatctggattgcttttatgcacaagtagaaatgatctcaaatccagagctaaaagacaaacctttaggggttcaacagaaatatttggtggttacctgcaactatgaagctaggaaacttggagttaagaaacttatgaatgtcagagatgcaaaagaaaagtgtccacagttggtattagttaatggagaagacctgacccgctacagagaaatgtcttataaggttacagaattactggaagaatttagtccagttgttgagagacttggatttgatgaaaattatgtggatctaacagaaatggttgagaagagactacagcagctgcaaagtgatgaactttctgcggtgactgtgtcgggtcatgtatacaataatcagtctataaacctgcttgacgtcttgcacatcagactacttgttggatctcagattgcagcagagatgcgggaagccatgattatgtggaagaggttcgaaatgatgacggacaaggtaattcggttccattgtaaattatgccgagtggcagttgatgatc

SEQ ID NO: 97126 - DNA, 1605 bp, Homo Sapiens
  misc_feature (1342)..(1342): n is a, c, g, or t
aacaattacggtcagtacgaggctgggtggtgaatcggcacgaggtcagctccatgccccgttacgccgacgcgtcgggacgcaacacgcttagcggcttctcctcagcccacatgggcagtcacggtaagtggggcagtgtccggaccagtggacgcagcagtggccttggcaccgatgtgggctcccggctagctggcagagacgcactggccccaccccaggccaacgggggccctcccgacccgggcttcctgcgtccgcagcgagcagccctctatatccttggggacaaagcccagctcaagggtgtgcggtcagaccccctgcagcagtgggagctggtgcccattgaggtattcgaggcacggcaggtgaaggctagcttcaagaagctgctgaaagcatgtgtcccaggctgccccgctgctgagcccagcccagcctccttcctgcgctcactggaggactcagagtggctgatccagatccacaagctgctgcaggtgtctgtgctggtggtggagctcctggattcaggctcctccgtgctggtgggcctggaggatggctgggacatcaccacccaggtggtatccttggtgcagctgctctcagaccccttctaccgcacgctggagggctttcgcctgctggtggagaaggagtggctgtccttcggccatcgcttcagccaccgtggagctcacaccctggccgggcagagcagcggcttcacacccgtcttcctgcagttcctggactgcgtacaccacgtccacctgcagttccccatggagtttgagttcagccagttctacctcaagatcctcggctaccaccatgtgtcccgccgtttccggaccttcctgctcgactctgactatgagcgcattgagctggggctgctgtatgaggagaaggcggaacgcaggggccaggtgccgtgcaggtctgtgtgggagtatgtggaccggctgagcaagaggacgcctgtgttccacaattacatgtatgcgcccgaggacgcagagcaacgtgtccaacctgaaggtgtgggacttctacactgaggagacgctggccgagggccctccctatgactgggaactggcccaggggccccctgaacccccagaggaagaacggtctgatggaggcgctccccagagcaggcgccgcgtggtgtggccctgttacgacagctgcccgcgggcccagcctgacgccatctcacgcctgctggaggagctgcagaggctggagacagagttgggccaacccgctgagcgctggaaggacacctggggaccgggtgaaagctgcacagcgcctcgagggncggccagacggccgtggcacccctagctccctctttgtgtccaccgaaccccaccaacgtcgctcggctgggtgggtcctggcaggaaggggcccggtgggctccaccctgagccctcagccgggacagcggacccaaattatggggtcaaccacattccggttcccgtcaaggctggcccggcccaaacaccgaaaacccgggaaagcccgttccagaacggcaaaaaaggggaacaagggccctacaaggggcctccttgt

SEQ ID NO: 97127 - DNA, 1172 bp, Homo Sapiens
  misc_feature (257)..(320): n is a, c, g, or t
ggcacgaggccacctgcccaagaaacttgttggttgttgccctcaggtcgctcccgggcgcggacacggaacccggccatggaagatccgtcgggggctcgcgagccccgggcccggccgagagagcgggacccgggacggcgcccccacccagaccaaggccgcacccacgatcgaccgcgggaccgacccggggacccgcgcaggaagcgaagcagcgacgggaaccggcgaagggacggggaccgggacccgannnnnnnnnnnnnnnnnnnnnnnnnnnnnnnnnnnnnnnnnnnnnnnnnnnnnnnnnnnnnnnnggaaagagacccggaccgaggcccccgccgggacacacacagggacgcgggccctcgcgcaggtgaacacggagtttgggaaaaaccgcgccaaagccggacgcgggacggagcccggggactgacctgggacgcagccgcgcctcctgggcccgcgccctgggaagccccggagccgccgcagccgcagaggaagggagaccccgggcgccgcagacccgaaagtgaacccccttcggagagatatctgccctcgacccccaggcctggacgagaggaggtggaatattaccagtcagaggcggaagggactcctggaatgccacaaatgcaaatacttgtgcactgggagaagcctgctgccaaatgctgcaggttctcctgaacttggcttgatcctggcctgaagctctgtgtcttacagttccaacagggggctacacgggcatcaacagctggaggggcatttactacttatcagttccggaggggcttacagtggctttgatggtgctgacgggggaaaaggccagaagtggatgtcaggtctaccagtaaagttgccatggtcactgtggcatggctgtatgggagccttaagaccctggtgctcttcggggccaggggtgtcacgcgggccccgggatgtcccacggtgtgtgaaccaaagctgttggacagccacacgcgggggaaaccggcggaattaatacagaactatgagcaatgcccgcgagataaaaacgagcgggcacagacagagagccgcggacgaacagcgaaaagagagagaaccgcagaggagctaagacgggacaacgctagagaagaacacactgattagctcacaag

SEQ ID NO: 97128 - DNA, 306 bp, Homo Sapiens
ggcacgaggcagaggacagggagggtgaagaggagtaagacctgagagtgagaactgaggttccaaggctctggggccagaccagggagaccgaggtgtcgactccccacctcagcaggtggggttggggctttctgcctgcacctgcttccctgggattccccaggttggctctgcccttccgaaagcgggggtgggagcggccgtatctcctacctcatgggcaccagagtcacttctcaggaggcgggcttgccactgctgccaaggagccagctaacctcttgttatattagaactaggatt

SEQ ID NO: 97129 - DNA, 711 bp, Homo Sapiens
acccaccctagctaggtcgaggctggggtctaattcggcacgaggctggtgttccgtgttcctgctgtgccgcgagtcgctgcgtggggacgagctggcgtcggccgccgagctgcaggccgccttcctcacctgcctctacctcgcctactcctacatgggcaacgagatctcctacccactcaagcccttcctcgtggagcccgacaaggagcgcttctggcagcgctgcctgcgcctcatccaccggctcaacccgcagatgctgcggctcaacgccgacccccacttcttcacgcacgactttcaagacctcaagaacgagggcgaggccgccgccagcggcgggggcccaccgagcgggggcgcgcccgccgcctcctcggccgccagggacagctgcgcggccggaaccaagcactggactatgaacctggaccgctagggatacccaggggccgcgcccatcccccgccccagcccctgacacacacatcggaccccccgggaccacaaagccaccgccgctgttaccgacgctcagcgccccggctggcgcggagggaggagacgcccatgaccctcaggcgaaagtggagacccgggacaccagaggccgcggaggtcggatacagctgggcgtggagtggggacggaagatgagcgcgggaaaggcactccaacctcactcttccgtctgtctgcgcccca

SEQ ID NO: 97130 - DNA, 983 bp, Homo Sapiens
aagcgaggcctgggtggcgaattcggcacgaggaccgcatcgaactgctcatcgatgccgcccgccagctcaagcgcagccacgtgctccccgagggccgctcgcccgggcccccggcccttaagcacccggccaccaaggacctggcggcggcagccgcacaggggccccagctgccgcccccgcaggcccagccccagccgtcagggaccggcggcggcgtgtcgggccaggaccgctatgacagggccacatcatcaggccgcctccccctgccctcgcccgccctggagtacactctggggtcccgcctggccaatgggctgggccgagaggaggccgtggctgagggggcgcgaagggccttgcttggctccatgcctggcttgatgccccctgggctgctggcagctgcagtgtctggcctgggaagccgaggcctgacgctggcacccggcttgagtcctgcccgtcccctcttcggctccgatttcgagaaagagaagcagcagaggaatgcggactgtctggcaaaactgaacgaggccatgcgaggccgggcagaggaatggcacgggcgccccaaagcagtgcgggaacagctactggcgctgtccgcctgcgccccgttcaatgtgcgcttcaagaaagatcacgggctggtggggcgagtggtcaccttcaatgctactgcccgtgcctccaggatacgagttcgagctgaaactcttcaccgaaatacccctgaggtttcgggcaaaggtgtaacgccggccgtccctggaaagtggggtccccgcagaaggttccaacgaaggcctctggcggggaagcccgggcaaagggcacctgggccttcctttcgggggcttcacagacaccctccggacatattggaaaccgcccggcacatgggaaatcatggaagaaaaatgggccggcgataaacctgggggcgcaaacccttgcccttatcccggaga

SEQ ID NO: 97131 - DNA, 1689 bp, Homo Sapiens
  misc_feature (1638)..(1638): n is a, c, g, or t
cgcgggcacgagacaccctctccgcgatgactgccagctcagtggagcagctgcggaaggagggcaatgagctgtacaaatgtggagactacgggggcgccctggctggcctacactcaggccctgggtctggacgcgacgccccaggaccaggccgttctgcaccggaaccgggccgcctgccacctcaagctggaagattacgacaaagcagaaacagaggcatccaaagccattgaaaaggatggtggggatgtcaaagcactctaccggcggagccaagccctagagaagctgggccgcctggaccaggctgtccttgacctgcagagatgtgtgagcttggagcccaagaacaaagttttccaggaggccttgcggaacatcgggggccagattcaggagaaggtgcgatacatgtcctcgacggatgccaaagtggaacagatgtttcagatactgttggacccagaagagaagggcactgagaaaaagcaaaaggcttctcagaacctggtggtgctggccagggaggatgctggagcggagaagatcttccggagtaatggggttcagctcttgcaacgtttactggacatgggagagactgacctcatgctggcggctctgcgtacgctggttggcatttgctctgagcatcagtcacggacagtggcaaccctgagcatactgggaactcggcgagtagtctccatcctgggcgtggaaagccaggctgtgtccctggctgcctgccacctgctgcaggttatgtttgatgccctcaaggaaggtgtcaaaaaaggcttccgaggcaaagaaggtgccatcattgtggatcctgcccgggagctgaaggtcctcatcagtaacctcttagatctgctgacagaggtgggggtctctggccaaggccgagacaatgccctgaccctcctgattaaagcggtgccccggaagtctctcaaggaccccaacaacagcctcaccctctgggtcatcgaccaaggtctgaaaaagattttggaagtggggggctctctacaggaccctcctggggagctcgcagtgaccgcaaacagccgcatgagcgcctctattctcctcagcaagctctttgatgacctcaagtgtgatgcggagagggagaatttccacagactttgtgaaaactacatcaagagctggtttgagggccaagggctggccgggaagctacgggccatccagacggtgtcctgcctcctgcagggcccatgtgacgctggcaaccgggccttggagctgagcggtgtcatggagagtgtgattgctctgtgtgcctctgagcaggaggaggagcagctggtggccgtggaggctctgatccatgcagccggcaaggctaagcgggcctcattcatcactgccaatggtgtctcgctgctgaaggacctatataagtgcagcgagaaggacagcatccgcatccgggcgctagtgggactctgtaagctcggttcggctggagggactgacttcagcatgaagcagtttgctgaaggctcactctcaactggctagcagtgtcgaagtgctgtgcatgacagatcgacgcagactcgcgctggcagtgagggctggctactgacttgatcnactgaagagatttgtgagatcgcgcctgaactcgtcactcacagtgagaag

SEQ ID NO: 97132 - DNA, 754 bp, Homo Sapiens
agagtatgaagtgacggcgcgccgaattcggcacgaggtgcgcgggcacgagacaacctctccgcgatgactgccagctcagtggagcagctgcggaaggagggcaatgagctgttcaaatgtggagactacgggggcgccctggcggcctacactcaggccctgggtctggacgcgacgccccaggaccaggccgttctgcaccggaaccgggccgcctgccacctcaagctggaagattacgacaaagcagaaacagaggcatccaaagccattgaaaaggatggtggggatgtcaaagcactctaccggcggagccaagccctagagaagctgggccgcctggaccaggctgtccttgacctgcagagatgtgtgagcttggagcccaagaacaaagttttccaggaggccttgcggaacatcgggggccagattcaggagaaggtgcgatacatgtcctcgacggatgccaaagtggaacagatgtttcagatactgttggacccagaagagaagggcactgagaaaaagcaaaaggcttctcagaacctggtggtgctggccagggaggatgctggagcggagaagatcttccggagtaaaggggtcagctcttgcacgtttactggaatgggagaactgacctcatgctggggctctgctacgctggttgcattgctctgacatcatcacgacgtggcacctgacatatggaactcgcagtatctcatctggcgtgagccagttggtc

SEQ ID NO: 97133 - DNA, 911 bp, Homo Sapiens
ttaagggggagagagtatgaagtcgacggcgcgccgaattcggcacgaggcgggcacgagacaacctctccgcgatgactgccagctcagtggagcagctgcggaaggagggcaatgagctgttcaaatgtggagactacgggggcgccctggcggcctacactcaggccctgggtctggacgcgacgccccaggaccaggccgttctgcaccggaaccgggccgcctgccacctcaagctggaagattacgacaaagcagaaacagaggcatccaaagccattgaaaaggatggtggggatgtcaaagcactctaccggcggagccaagccctagagaagctgggccgcctggaccaggctgtccttgacctgcagagatgtgtgagcttggagcccaagaacaaagttttccaggaggccttgcggaacatcgggggccagattcaggagaaggtgcgatacatgtcctcgacggatgccaaagtggaacagatgtttcagatactgttggacccagaagagaagggcactgagaaaaagcaaaaggcttctcagaacctggtggtgctggccagggaggatgctggagcggagaagatcttccggagtaatggggttcagctcttgcaacgtttactggacatgggagagactgacctcatgctggcggctctgcgtacgctggttggcatttgctctgagcatcagtcacggacagtggcaccctgagctactgggactcgcgagtatctcatcctggcgtgaaagcagctggtcctgctgctgcactgcgcagtatgttgatgctcagagtgcaaaagctcgagcagaaggctctgtgatcgcggactgagcctctacctaatgtacagtggctgcagcaaagctaccttagtgcgatccgcaaac

SEQ ID NO: 97134 - DNA, 781 bp, Homo Sapiens
  misc_feature (651)..(651): n is a, c, g, or t
tatgggggagagagtatgaagtcgacggcgcgccgaattcggcacgaggcgcgggcacgagacaacctctccgcgatgactgtgagtggtccagggacccccgagccccggccggccacccccggggccagctcagtggagcagctgcggaaggagggcaatgagctgttcaaatgtggagactacgggggcgccctggcggcctacactcaggccctgggtctggacgcgacgccccaggaccaggccgttctgcaccggaaccgggccgcctgccacctcaagctggaagattacgacaaagcagaaacagaggcatccaaagccattgaaaaggatggtggggatgtcaaagcactctaccggcggagccaagccctaaagaagctgggccgcctggaccaggctgtccttgacctgcagagatgtgtgagcttggagcccaagaacaaagttttccaggaggccttgcggaacatcgggggccagattcaggagaaggtgcgatacatgtcctcgacggatgccaaagtggaacagatgtttcagatactgttggacccagaagagaagggcactgagaaaaagcaaaaggcttctcagaacctggtggtgctgggccaggagatgctggagcggagagatcttccngagtatggggttcagctctgcacgttactggactggagagatgactcatgctggcgtctggtacctggttgcattgctcgacatcatcacgacgtggcacctgacatctggactcgcagtatccatctgg

SEQ ID NO: 97135 - DNA, 775 bp, Homo Sapiens
  misc_feature (221)..(231): n is a, c, g, or t
aaggctaggtagcgaggctgggtgtttgaatcggcacgaggcggggctaaggagagcgggcaggcaaggagattccgggccaggtcgcggcggcagtcggcaaccgttcaattctctggcgttggatcgcgagcggagtctgcttgtcccgccgagggctcccaggacagggcagggatctagggggtttgcgcacctgctttttaatgccccgccccccnnnnnnnnnnnaaagatggagggggggaaagtgagggacgagaatggacagaatactgacgtggaacggtaattcgagcatttcatatgcgaagagcgcaataacagttccgaattcttctttcagtttctccattagattagcttcattttcgaagggctccgtttggcatgcttaattttggaaactagcccggtggttgggcagaattggactgaattcaggggtgagagttgatccagtccaaggtgtataggaattggagcacgcagttcaaccagggtttacaagggaatttctgaagactgtgtgtacttagaagaaatgcatgcactgggcggttgcttctggagaagcaaagttgtccaaaagccttcagttagaaggattagtactacctctcctaggagcactgtcatgcctgcttgggtgtaagataaatatgggaagcatgaagtgcttcgattcccttcagaacatgatgatgctatcatacattatccaaatggaagtcttggcaaagtcacgctgccagtgtaatcctaaagaaggtaa

SEQ ID NO: 97136 - DNA, 811 bp, Homo Sapiens
tcggtcctggtcctggcgttaatggaagcttttcaggggagccgtagggtgtacgcctgtgtgtgctttaggggtccgccgccctttcatcctggctgccgccagctggtgagctgagcgcccccttcccccgcagcgagtcagggggcgacggaaagtttggtggtgatctggcccccccgcagaaaggtctcggagaacggcctggagcaggtgggagcccccttacccgtgtgcctctagcgcttgtcggtccccccacccctccggtgccaggacgcttggtggggaaaagtgcatcctcctggagggccactctggtcagaactcagtctgggacgcatccccggggtgaagaggagacggtggtcttgaggcccaaaccgccaccccgagcctggatgcagtgcgcaggtccctgaggccggccttccttctggtcctctgtccccaggaggagcgcaaaccttgaggtttgaaaaggctgggacccccggccggaagtaacgtacgcgtcagaggaacagggcggggggcgtctagcattaggcctggagaagggtcggctctctgcattggggaagatgaaatcgacttgcctttgtgaaattgaccagccccctctataaaacttacagtcccccattgggaaactgaccaccacccacaactccgccagtgaaactggcccagcccttctctgcctaattgcaaactgaactaccctctcccttgactgttaagagggccggagttaccgcctcgattgccccactccccccacccccaataaagcctcttctttcagggc

SEQ ID NO: 97137 - DNA, 549 bp, Homo Sapiens
tacgatcggctaggtacgaggctgggtggtgaattcggcacgaggcctcggcgggggcgggggacggcgcgggcccgcagaggctgccagagcctgggggacggccgcgctcggccgtgcagggcgggtgccgggtgctgggcagcgccccgccgcctttcactccgtcactgctggagcaggaggtgcgcgccgtgcgcgagcgcgagcaggaactgcagcgccagcggcgcagcgtctatggcaccgcggagttcaaggagcctacgccgagcctcaccggtaagccgcgggcgtagcaacgccgggacccccagggttccagccgcccccaccgattgcccaacttcagtggcccctcctgtggccctccgattctcggggtctctccctccaatgctcccagaccccctctcaattttgtctcttgcctaccccttctggagctccattactcgctgtgatccacccctccaccgggagtgatggactctctgatccacaccacccaggctgcgcgggggtgggggcattccagatgtcttccgt

SEQ ID NO: 97138 - DNA, 471 bp, Homo Sapiens
ggcacgagggacagctggaaggtgccaggtgcacttggggttggggttggtgtgttgggtgttgaagaggaatcgtttcatcccagccatggaggccaccagcaggagtgttcatggggatgtgggcgaggtggggcactttgaaggaatggcggtctgctggtgccctcgaaggggcatccttcctggtcttcgctgacccagaggcgctgtgcctgcatatcatccaccaccaccctagcccagccttcccactgccccaggaaaagctcttctcctggccacctctgccccccagcacctcaaacttgcatggctgggctgtggcctctgcggccaggaagcctgacactaggcaccccccaggcgagagctagtggggtgcagagggccccatgccagacagcccttggggctcgttgcactttaagaaataggatctgtggtgtattccagggggcctgatggaca

SEQ ID NO: 97139 - DNA, 293 bp, Homo Sapiens
cacgagggaagaaggtgccttacttccctttcgccttcccccatgattgtaagctttctaaagcctccccagccatgctgaactgagtccttttgctcctgctgagtagttcctgcctgcatctttaatcctatggaggtgacagcctttgttccattcagcgtaagatgaagggcctctagtattgtgctcctgacctcgtaatgagaattaccagcaggactggatggattcctaaagaatgtgagcctgctctcttgtaaatgtttttaataataaatgataagaaaggc

SEQ ID NO: 97140 - DNA, 906 bp, Homo Sapiens
atatgcttaggtacgaggcctgggtgttaattcggcacgagggcccgccctcggctcctccgccgtgatgctgtcccgatcccgctgtgtgtctcgggcgttcagccgctcgctctccgccttccagaaggggaactgccctctagggagacgttccctgcctggggtctccttatgccagggaccaggttaccctaacagcaggaaggttgtcattaacaacagtgtcttcagtgttcgctttttcagaactacagctgtatgcaaggatgacttggttacagtcaaaaccccagcgtttgcagaatctgtcacagagggagatgtcaggtgggagaaagctgttggagacacagttgcagaagatgaagtggtttgtgagattgaaactgacaagacatctgtgcaggttccatcaccagcaaatggcgtgattgaagctcttttggtacctgatgggggaaaagtcgaaggaggcactccacttttcacactcaggaaaactggtgctgctcctgctaaggccaagccggctgaagctcctgctgctgcagccccaaaagcagaacctacagcagcggcagttcctccccctgcaacaaccatacccactcagaagccaccggtgcctcgcctcacaactccttctggcaaacctgtgtctgcagtaaaacccacttgttgccccacaatagctgagccaggagctggcaaaggtcttggttccagacatcgggagaaaatgaacaggatgcggcagcgcattgctcaggtctgaaggaggcccagaatacatgtgcaaatgcctgaaactttttaatgagattgacctgagtaaatcaaggagatgagggttcgggcacaaaggaggctttagcaggaacataactcaattagggttatgtg

SEQ ID NO: 97141 - DNA, 712 bp, Homo Sapiens
cggctcctccgcgtgatgctgttccgatcccgctgtgtgtctcgggcgttcagccagctcgctctccgccttccagaaggggaactgccctctagggagacgttccctgcctggggtctccttatgccagggaccaggttaccctaacagcaggaaggttgtcattaacaacagtgtcttcagtgttcgctttttcagaactacagctgtatgcaaggatgacttggttacagtcaaaaccccagcgtttgcagaatctgtcacagagggagatgtcaggtgggagaaagctgttggagacacagttgcagaagatgaagtggttcgtgagattgaaactgacaagacatctgtgcaggttccatcaccagcaaatggcgtgattgaagctcttttggtacctgatgggggaaaagtcgaaggaggcactccacttttcacactcaggaaaactggtgctgctccgtgctaaggccaagccggctgaagctcctgctgctgcaggccccaaaagcagaagcctacagcagcggcagttcctccccctgcagcacccatacccactcagatgccaccggtgccctcgccctcaaagcctcctttctggcaaacctgtgtctgcagtaaaacccaactgttgccccaccactagctgagccaggagctggcaaaggtctgcgttcagaacatcgggagaacaatgagcagggat

SEQ ID NO: 97142 - DNA, 863 bp, Homo Sapiens
gcccgttaggctaggtacgaggcctgggtgttagaattcggcacgagggaaagacgcttctgtgggttaggtcctaacggttaggaaggattcacaggcgggtcatgaggaaggagcagacccctcgggcagaagcccgcgaggagcactgggtgtggtgggggcaggggtgcctcctctgtcaagtggagatcggcgcctcgctcgtgcctgcgagtgcgcgccgcgtcgaatacagccgtacagaacgcactacaggaaagtgaagccgggagagagactgggaggcggcgcggggactgggggccgtagacgcctttgctcccgggcacttgttagaagagcgagtggatcgcgcttcctgtgcgtcactgaatcctcatgacggccactgaaacggacacgcaggatctttgcttttcaagagggaactgagtccaggccagactgggttgctcccctttctctcggcccctccacctttgcaagtgctgctccttctgcctggagtggctcctccagtcttttcccggctcacttcccaccgtccggtgtcagcaaaaacagcacttcctcacagcccgttgcagcccagcagtcgccttttgcttcttttgaagcacagccctgtgaccgcctcgtgtccttttcgtataaccttgtcccccttcccctctggaacataagctccacaaaggcagggacctgggatcccgttccctgcttcctcacaacgcctaacaaccatggccaggactgaaatcctttcattcgcttcccttactcctcggtctgtgactcgggctcctgttgttgtaggcgtgggctatcttctgtgacttgccaaatcggtcagtaggctt

SEQ ID NO: 97143 - DNA, 801 bp, Homo Sapiens
  misc_feature (486)..(532): n is a, c, g, or t
cctctctcgcaaccatacggctaggtacgaggcctgggtggtgaatcggcacgagggctgcggcggctggagcaggcgagcggcggcggccgatagcgagtgtcagggccggccggggcggcgcttctcggcctgtcgctggtcggcctcctactgtacctcgtgcctgctgcggctgcgctggcctggctggccgtggggactaccgcggcctggtggggactgagcccgcgagccccgaggttcgcgccccttgtcctccttcgttcatgaaggcgcgacatcggcgaacactgttcgcttcgcctccggccaagtcgacagccaacggaaacctcctagagccgcggaccctgctcgaaggacctgaccctgccgaactgctcctcatgggcagttacctgggcaagcccgggccgccgcagcccgcccccgctccggagggccaggacctgcggaataggcctggccgccgccagccgacgnnnnnnnnnnnnnnnnnnnnnnnnnnnnnnnnnnnnnnnnnnnnnnnttcagcgcagcaatgaggccctctcgtgcgcacacgcacagctctccacccgaaccgccaccgggaacgcggccccacgcccactccgaacgacgaacagaccgaacaacaaggactgccgacacgacaccacggaagccacgaaacacgggatcggcgcgccacacgcaccacccacacatcctccgctactccccgtcttaccccatcataccctcaccccatttctccccttccaccctcgctcattgtctaactcatcaccatct

SEQ ID NO: 97144 - DNA, 458 bp, Homo Sapiens
  misc_feature (312)..(312): n is a, c, g, or t
gagattggctgacaccaccatttcccccagatccagattctctgagggagtttgtttcttgagagtagatccagagtgtcaaggatctgttagatcctggaatcccttcttgcatccatccctccctggtagctaggtcccgatatactcctgtcttgtgagattgtcgagatgagatggggaccactcttccttctgtccttcctctctcctttcctccatagcaaggacgaccttccctgctccatgcccagagtatagctagatcccttcccctccctaccctctgaatgtgtgctagatcaggtgccnccactgtgtttcctgaaaaccttgggagccggatctccccatctcccctactcactcttcccttttcttctctcagtgttgtctgaataaagtgtgaaatcttttgtgttttctaaattgacattttcaatgaaaaaaggattccc

SEQ ID NO: 97145 - DNA, 552 bp, Homo Sapiens
caaggttatagctgccctggactgctcactctctggtctcaatgtaaaatgatccatggccacagggctcctgcccaggggcttgtcaccttcccctcctccttcctgagtcactccttcagtagaaggccctgctccctatcctgccccacagccctgcctggatttgtatccttggcttcgtgccagttcctccaagtctatggcacctccctccctctcaaccacttgagcaaactccaagacaccttctaccccaacaccagcaattatgccaagggccattaggctctcaacatgactatagagaccccgtgtcatcacggagacctttgttcctgtgggaaaatatccctcccacctgcaacagctgcccctgctgactgcacctgtcttctccctctgaccccagagaaaggggctgtggtcagctgggatcttctgccaccatcagggacaaacgggggcaggaggaaagtcactgatgcccagatgtttgcatcctgcacagctacaggtccttaaataaaagtgtgctgttggttaaaaaaa

SEQ ID NO: 97146 - DNA, 600 bp, Homo Sapiens
gaaaacgtgttctaatcttaggcgcttcaggcggagttggtacttttgctatacaggtaatgaaagcatgggatgctcatgtgacagcagtttgctcccaagatgccagtgaacttgtaaggaagcttggtgcagacgatgtaattgattacaaatctggaagtgtggaagagcagttgaaatccttaaaaccatttgattttatccttgataatgttggcggatccactgaaacatgggctccagattttctcaagaaatggtcaggagccacctatgtgactttggtgactcctttcctcctgaacatggaccgattgggcatagcagatggcatgttgcagacaggagtcactgtaggttcaaaggcattaaagcatttctggaaaggagtccattatcgctgggcatttttcatggccagtggcccatgtttagatgacattgcagaactggtggatgcgggaaagatccggccagttattgaacaaacctttcctttttctaaagttccagaagccttcctgaaggtggaaagaggacacgcacgaggaaagactgtaattaactttgtttaaataaaaatgcagtttagtgaaa

SEQ ID NO: 97147 - DNA, 311 bp, Homo Sapiens
  misc_feature (189)..(202): n is a, c, g, or t
ttattggagaatgaaaaaagtcagcattcacctgtttagtgtacaaaaaggacactagatcttttaagaaaatatcaggaaactgaagacgcagatgcctttcaattgtaacattttggcaaaagtggaaagttcttgtaaacaccaaccccatggctcaaaatagtttttctccacagtacaacattnnnnnnnnnnnnnntagtatcaataagttagaccatatttaatcagctagaactttgtccaccaacccccaaaacacaaaacttttcttagcttcataattccttaaaaggagaacaaataaa

SEQ ID NO: 97148 - DNA, 523 bp, Homo Sapiens
  misc_feature (410)..(410): n is a, c, g, or t
aacagtgcagtgatttattgaccagactttgcagcaagaacacagcgaaggtggggcccgtacaatccagcctggcagagggtctggcccccttagagcagaatctggggaccccagtatatttccctcacagccccccaaagtccagcctcaccctgctccaggcccctcctgaagtgaggggcagcagggggaccgggtcctggaggggctggaaggcaggtggtgcccagagcggggctggcaccgggtgcatgcctgccccggtagccagcaggaggtgaattcgtgcgggggcagtgggggcgtgcaggcgggcagcaaggctcaccacacggaacacttgtgggcaggggttcatgggtgagtccttgggacagtggaaagcccggccaaactcctcaaactgngacacactgcccagcaccctgtagtgctcaggggcatgcttgtcagtcagcaactgcaggtagatggactgcgaccgcgcttgatgcacagttttgggaaaaggcattaaaag

SEQ ID NO: 97149 - DNA, 877 bp, Homo Sapiens
gcctgggtggcgaattcggcacgagggggggtgcctgaatagggtttgagggtctgtttgagttgggtgaagaaggcgggaagttaatcctcttccaatcagctccccatctcgccctctggcggctccggaccacaggccgagttactctgattaccgccatgctccaagacccgcactgacagtccccacgtgagggaccgcggtgggagtcctaaatgggggaggaggggacgggcggcactgtgcatctgctgtgcctcgcggcctccagcggggtccccctattctgcaggagcagtcgcggcggcgcccccgcccgtcagcagctcccgttctctgtcatcggttccctcaatggagtccacatgtttgggcagaatctggaggtgcagctgagctctgcgaggaccgagaacacgactgtggtgtggaaaagcttccatgacagcatcaccctcattgttctgtcatctgaggtgggcatctctgagctgaggctggagagactactccaaatggtgtttggagccatggtccttcttgtgggacttgaagaactgaccaatatccgcaacgtggagagactgaagaaggacttgagggccagttattgcctcatcgacagcttcctgggggactcggagctcatcggggacctgacccagtgtgtggactgcgtgattcctccagaggggtccctcttgcaggaagccctctccgggttcgctgaggccgcgggcacgaccttcgtcagtctggtggtgtccggccgggtggtggcagcacagagggttggtggcggctggggacgcccgaggccgtgctgctcccctggctggtggggtccctgccgcgagaacgttcgcgataccca

SEQ ID NO: 97150 - DNA, 858 bp, Homo Sapiens
ggcacgaggtgaggagttgcccctgtgtgtgagtgagagcaatggcctggagctcccaccctcagcagcatctgatgagccacttcaggagccactggaggctgacaggacctcggaagagctgacagaggccaagaccccaacctccagcccagagaagccacaggaactcgttacagctgaggttgcagctccatccacctcatcttcagccacttcctcgcctgagggtccttcacctgcccgacctcctcggcgtcgcaccagtgctgatgtggaaattaggggtcaagggactggtcggccaggacaaccaccaggccccaaagtgcttcgaaagctgccaggacggctggtaactgtggtagaggaaaaggaactggtgcggcggcggcggcagcagcggggagctgccagcaccctagtgcctggggtctctgagactagtgccagcccgggaagcccgtctgtccgcagcatgtcagggccagaatcctcccctcccattggtgggccctgtgaagctgctccttcatcctcactgcccactccaccccagcagcccttcattgctcgccgtcacattgagctgggggtgactggtggtggcagccccgagaatggagacggagcactgctcgccatcaccccacctgctgtgaaacgtcggagggggaggccccccaagaagaacaggtctccagcagatgctgggagaggtgtggatgaggcaccctcatccaccttgaagggaaaaaccaatggggctgacccagtccctgggcctgagaccctaattgttgcagatcctgtcctggaaccacagcttattcctgggccccagcctcttggaccccg

SEQ ID NO: 97151 - DNA, 766 bp, Homo Sapiens
taggctaggtagcgaggctgggtggtgaatcggcacgagggcggaaagaaaggcggcacgtcagggcaaaagcagcttctgagggcgtctccaagcccagccctgcctccttggcagtgaggtatgcccgcaacctccactttgctcttagtactggggccaaagtatcctgggtgtaaaatggggatgatcctttccatgccacggggtcctgaggatcatacacaacagtgcccctaaagcgcctggcacagcacctgaccggagcacacgggcaacacacaggcaacaaacaggagctggaagagtttcctgtggctgccagaacaaacaccacaaaccagatgtggcggtggggggtcatgcacccgacatttattttctcaccgttctggaggccagaagtctgagatccaggtgccggcagggccacaccccctctgagggctcggagtaagaagcgtcctggcctcttccagctccctgtggctccaggatcctgggcttgtggctgcgtcgctcctgcctctgcctctgtcttcacgtggcctgtccccatgtatcttttcctctcctcctcaggacattgtgtcatgtggatttaggggccacccagaatccaggaggggctcatcttcagatccttaatgacatctacaagaccttatctaataggtcgattccggtccgggggttagaccggcctacgttttggggccttcaccggagggggctccattccatttctcctagtctccggccgccg

SEQ ID NO: 97152 - DNA, 895 bp, Homo Sapiens
gccggcgatgaaatcggcgaggcgcggcggagcccgaaccccgcagcctgagccacctccgtcatctgggcccggggcctcaccgcgcaggagctgccaaggccatgtctgttccatcatcactgagccagtcggccattaatgccaacagccacggaggccccgcactgagcctacccctgcctctgcacgctgcccacaaccagctgctcaacgccaagctgcaggccacagctgtgggacccaaggacctgcgcagcgccatgggggagggtggtgggcctgagccaggccctgccaatgccaagtggctaaaagagggccagaaccagctccggcgggccgccacggcccaccgtgaccagaatcgcaatgtgaccttgaccttggcggaggaggccagccatgagcctgagatggcacccttgggccccaaaggcctgatacacctgtactctgagctggagctctcagctcacaacgcagccaaccgaggcctacgaggacctggcctgatcatcagcactcaagagcaggggccagatgagggagaggagaaggcggccggggaggccgacgaggaggaggacggatgatgatgactgacgaggaggaggagcaccttatcttctcccccaggctgctgaccccctggagagtgtggaggccctcccaggcccaagcccttacagatggcccccgggatcaacagcaagagtgccagctcctgttggcatgcggaccagtgcagccagtgatgaggactcagctgggctaccttatccaggcagcctctaggtcccacacgaccttttcctctgaaccaagcttcagacgatcgactgccgctgatgatgaggtcagaccccacgactactacggcctcccacggacc

SEQ ID NO: 97153 - DNA, 2198 bp, Homo Sapiens
  misc_feature (1769)..(1803): n is a, c, g, or t
tgggacttcagcgtctggccgtggaacatgagcagtttgtggattccaggagtggctagattccatgtggcgtagacacttcgataggaggaagctgggagctccaagcactttctccacatacagttcaggaagggaggagtggaccactgcaatggtcgcccctgggcaccgcctccagggcctcctgcaccagtttgctctcgttgagccggagggccatgaggatggccctggtcgaagtcctgcttggcgcagtgcctcgcgcaccctcccggggtgtatcgctggtgtccagctcaaagcgggtcaaagagcacgcgggtgtccagggagtagatgaggagtccctccgtgctggtgcacgcccagcagcgcccagtgggagagaagcggagtgaggtcaccctgatctcaggtttgaagtgccgagaactcatgtcacctttcctgacgcctggcagtggtatcgcgactccatcctcctgcccagcatcctgatcaattagtgccaggttgccaaactctgtcatttttcttcggttcaaaaattcctccatggcgtccagagacaggttgcaagagatctcgaacctcttcatgagaatctgctcacggacgtggtagatgcacacgaacttggacatgcctcccgccaggatgctgtggccgtctgcagagtagcacagggcggtgaaggccttccccttggccgcgtgcttggctgtaatcttgtccagctccttcctgccagtcttgaggtcatgcctgccctcaatggagcccgtctgcaccgcgttctcagggtcccagaaggtgatctgtgagttcagtgtggccacagccagctccgcaccatcagggcgaaaagtcacagccagagcatcagaggtcagggccagcgtctccttggtcctccagctgtcaaacatgtcccataggcgcaccgtcttgtcccaggaggcactggccaggacggacttcattgggttaaaacacagaccactgatgggcccttcgtgtccagacaaaacatcaaggagcctgcctgtctgcatggaccacacgaaaatctcaaaggagtcctgcgcccctgcagagacgatctcaccgctcgcatccaccgccacacaggagaactgggtggggcgtggagaggtgaaggtgcggaagtttcggtacctgtgaaggtcaaaggctcgcacggtcccgtccatggatgaggtcaccacaacgtagccggtggcagtaaaggtcacaccggtcaccccgctggagtgctccgtaaaagtgacgaagcagaagccgctgagggtgttccacaccttgaccttgccgtcgtccccgccagtcacgatgtactgtccgtcgggcgagtaggccagggccaccatgctgttgaagtggccctgctgcttgagcacgtaggactcactctgccactcccacaccagcagctggcccaggcctgaacagccaaaagcaatccagtcccccgagctattgatggccactgaggcgatgctctgatctgagatgctcagggagtggatgaggttaaactctggcagctcatgaagatggaagattccagaagcaaagccagtgaccaagaggtgagacttcttatgaaatgctgcagctgtcaggttgttaaaatccccttctttattgaagaagtacttggccagccgtgagtacttcacttttcctgtcttctcctcctcggccggagtggcttttccccggatggtggtctctctgtcgcnnnnnnnnnnnnnnnnnnnnnnnnnnnnnnnnnnncgctgcaacaggtctgctttccagcccgcagggggcttcagccgcaagccctcggggggcgtgtcacactgccacatgcacagcactccgtcctggctgagtgagtacaggtccaggctgttggattcaaagaagcaggccacgatggcatccttatgtccccccagtgcatagtagatgaggttgtcccagcgctcggctccgaacacccaggtggacatgtctttgctcccaaccacaaagcacctggagtcatccgtccagtcgatgcaggtggtctcatcgtagggcccaaaataggtcttgtccagaacgaaggcgttgaactcccgcttcttcccaggggccctcgtgccgaattcggcgcgcctcgacttcatactctctcgccctta

SEQ ID NO: 97154 - DNA, 1058 bp, Homo Sapiens
aagagtatgaagtcgacggcgcgccgaattcggcacgaggaaaaacaacaaatctgacacgctgcccctggccactcggtacaacgtcaagtgcgtggggctgtccccggatggccgcctcgctatcatcgtcgatgaagggggcgatgcgctgctggtcagcctggtctgcaggtctgtgctgcaccacttccacttcaagggctctgtgcacagtgtgtccttctcccctgatggcaggaagtttgttgtcacaaagggtaacattgcccagatgtatcatgcccctgggaagaagcgggagttcaacgccttcgttctggacaagacctattttgggccctacgatgagaccacctgcatcgactggacggatgactccaggtgctttgtggttgggagcaaagacatgtccacctgggtgttcggagccgagcgctgggacaacctcatctactatgcactggggggacataaggatgccatcgtggcctgcttctttgaatccaacagcctggacctgtactcactcagccaggacggagtgctgtgcatgtggcagtgtgacacgccccccgagggcttgcggctgaagccccctgcgggctggaaagcagacctgttgcaacgggaggaggaacaagaggaggaggaggaccacgagggcgacagaaagaccaccatccggggaaaagccactcccggccgaggaggagaaaaacaggaaaagtgaagtacttccggctggcccaagtacttcttccaataaagaaaggggattttaaccaacctggacggcctgcacgtattccaagaacaagccctccacctcttggggaactgggtttgtgcttctgggaaatccttccagcctgccctgagcctggccacaaggattaaaccttccgtccactcccctggaagaatctcgcgaatgcaaaggatcgccctccgaagggcccaaccacaaacctcccggggcggacccggatccgttctttgggggtcgatcacagagccgggcggcagagatgggcgtggggggtggaggaagtccg

SEQ ID NO: 97155 - DNA, 967 bp, Homo Sapiens
  misc_feature (13)..(13): n is a, c, g, or t
  misc_feature (834)..(835): n is a, c, g, or t
ggagcgagcctgngtggcgattcggcacgagggcgcggacccccgggaagtgtctctgtgggcggccgccgggttgagctgcggcacacgtgcgacagccgtgatgaagttcgcttaccggttttcaatttgctgggtacggtgtaccggcgtgggaacctaaattttacctgcaatggaaattcagttatcagtcccgtgggcaatagagtcactgtatttgaccttaaaaacaacaaatctgacacgctgcccctggccactcggtacaacgtcaagtgcgtggggctgtccccggatggccgcctcgctatcatcgtcgatgaagggggcgatgcgctgctggtcagcctggtctgcaggtctgtgctgcaccacttccacttcaagggctctgtgcacagtgtgtccttctcccctgatggcaggaagtttgttgtcacaaagggtaacattgcccagatgtatcatgcccctgggaagaagcgggagttcaacgccttcgttctggacaagacctattttgggccctacgatgagaccacctgcatcgactggacggatgactccaggtgctttgtggttgggagcaaagacatgtccacctgggtgttcggagccgagcgctgggacaacctcatctactatgcactggggggacataaggatgccatcgtggcctgcttctttgaatccaacagcctggacctgtactcactcagccaggacggagtgctgtgcatgtggcagtgtgacacgccccccgagggcttgcggctgaagccccctgcgggctggaaagcagacctgttgcagcggggaggagaaaaaggnnaggagaggaaggaccaggagggcgaacagagagaccaccatccgggggaaaagccactccggcccgaggagggagaagacagggaaaagtgaaagtactcaccggctgggccaggtacttcctttcataaag

SEQ ID NO: 97156 - DNA, 990 bp, Homo Sapiens
taggctaggtacgaggctgggtgttgaattcggcacgagggaaaaaaaatctcatcacttgaagccaccgggagcctgcggcccgggccagcccgggctttctccggagcagagcagcgctgctggcctggcagccaggacttctccgtgtacgtgcatccccagtccccgccggggcgggcgggccgccagagcagctttttacaagtccagagacagaaaacaaaatctagatgcaacagcgaaacaaagaacccatttccttcctggcacccgtttctgtcccctcctttcctgctccgcctgcccggcatcatcagcccttctggggcgtgtacctctcactgcctgccccaggaccagaggcctgtctcccccttccctccccaccggcccgggggagacctcttcacacccaaagatgcttagtcaagatggctgcgctgtccctttgagttcctgcttcttgtatattgctctggggactctcgccggggaagatggggctgatttcccacctagagaggttgatggcagaaggaaaatggggaggcactggggttgtggagggcatgggtatggctgaggagggtgctgggaacggcaaggcggactgggggatggggaggggcaaaggtgagagatcaccttccctatcctccaccttcccgcagggaagacgaagccaggtgccagggctgggggtcgggacacccatgttctgggcggcttgaccccaaatcccagaccccggaagctccaggctcgggatgtgtcctgagaacctgtcccggccccctcctctccagcctgtcaggccagcctccccagccccctttcctcaactctaggggcagcatagccccaagccaccctagcccagcccctgcattgccgtttccccagaggtggcccctccacctctgctctgacctctccccatctctctgcccctccttttttcacaagtgccatgagttttcaaacatc

SEQ ID NO: 97157 - DNA, 812 bp, Homo Sapiens
gggggcccagaggctgtgttgaggctaatggcggtgcccacggaactggatggagggagtgttaaggagaccgcagcggaagaggaatcgcgagttctggcacctggcgccgccccgttcggaaattttcctcattattctcgcttccaccctccggagcaacggctccgcctcctgcccccggagctgcttcgacagctctttcctgagagtcccgagaacgggccgattctggggctcgacgtggggtgtaactccggggatctgagtgtggctctatacaaacacttcctctccctacctgacggggaaacctgctcagatgcctcaagagaattccgtctcctctgctgcgacatagatccagtcctggtgaagcgagccgaaaaagaatgtccttttcctgatgccttgacttttatcaccctggacttcatgaatcaaaggacccggaaggttctcttgagctctttcttaagccaatttggacgttcagtttttgacattgggcttctgcatgtcaataaccatgtggattcatctgaatcatggagaccatggcctatgggagttcctggcccatctttcctccctctgccactacctccttgtggagccccaaccctggaagtgttaccgggcagctgcaaagcgtctccgaaagctgggactccatgattttgacccacttcactccccttgcatcccgaggtgaaatgccccaatcagatttgtgccagatcctttgacccaggaatccatgggaatgggaaatttaatatggctgcctctttgggcaaaaaaccacgcta

SEQ ID NO: 97158 - DNA, 639 bp, Homo Sapiens
aaatatacgctaggtacgaggcctgggttagaatcggcacgaggggtatccgggctgccgtgagcagggtgaaggacagaggacagaaggccttggttctcgacattggcactggcacgggactcttgtcaatgatggcggtcacagcaggtgccgacttctgctatgccatcgaggttttcaagcctatggctgatgctgctgtgaagattgtggagaaaaatggctttagtgataagattaaggttatcaacaagcattccaccgaggtgactgtaggtccagagggtgacatgccatgccgtgccaacatcctggtcacagagttgtttgacacagagctgatcggggagggggcgctgccctcctatgagcacgcacacaggcatctcgtggaggaaaattgtgaggccgtgccccacagagccaccgtctatgcacagctggtggagtccgggaggatgtggtcgtggaacaagctatttcccatccacgtgcagaccagcctcggagagcaggtcatcgtccctcccgttgacgtggagagctgccctggcgcaccctctgtctgtgacattcagctgaaccaggtgtcaccagccgactttacagtcctcagcgatgtgctgccatgttcag

SEQ ID NO: 97159 - DNA, 786 bp, Homo Sapiens
tcggctaggacgaggcgggtggtgaatcggcacgagctttgcgatgtcctcgtgtttcccatttgttgctgctgctgctcattccacactgttgagaccttgtggtctcgatgctgctggcctccctccgtccctctgtccacttgtgggtcctggggtcgtcttagcagagccaccgccaaggtttgcactcagggaggggctgatggagggctgggcgccatggggtcagggaggccccagggacccatgggcagagctggggagccaggaggatgggtctgcctgctctgggggtgcaggctctgcagacaccccaattgctgctctgttgctgtgcctagtctagtgtcccccaaagcatcggggggccacgcaagtgtgggtgtgtgagtgtgcgtatgtggggaccccccagggcatggtggggtctgaggcgtgtgttcccatttagggctgaatgaagccatgacttggaaaggtggcggggggtggatggcggctgtgactcagggcccagggatcacatgggggtcactgctgccatcagcagtcaggcagggagaacagaaatgcaaaaatacagatgttgtctattttctaaactggggggtggaggggtgcctccctgacagcttccaaagagctgactgtgggatgggcccacagtgtatcccacccctgccgagagtctctctcctttgtgacccgggttccagagctcgaggaactgtcttctgtcatagtgggtgttccttgggcggcggccgggaagccgagtccggc

SEQ ID NO: 97160 - DNA, 926 bp, Homo Sapiens
ggcacgagggctgctgcagcggctgctgctgctactgcggctcctgctgccgccgccgccgccgctcggcctcaggcagctgcatcctcggccgggccgggtccccgccccgcgccgcgcccggccccgccatggtgtcctggatcatctctcgcctggtggtgctcatctttggcaccctgtacccagcctattcttcctacaaggccgtgaagacaaaaaacgtgaaggaatatgtgaaatggatgatgtactggatcgtctttgccttcttcaccacggccgagacgctcacggatatagtgctctcctggttccccttctactttgaactgaagatcgccttcgtgatatggctgctgtccccttacaccaagggctccagcgtgctctaccgcaagttcgtgcacccaacgctgtccaacaaggagaaggagatcgacgagtacatcacgcaggcccgagacaagagctatgagaccatgatgagggtgggcaagaggggcctgaaccttgccgccaatgctgcagtcacagctgccgccaagggccaggggtgctgtcagagaagctccgcagcttcagcatgcaggacctgaccctgatccgggacgaggacgcactgcccctgcagaggcctgacggccgctccgacccagccctggcagactcctggacaccatcgaggacttaggagatgaccctgaccctgagtctaaggtccagcacaaacccgggaagattcccgggacacaaggctcctgaaggatgacatggggaagaacaaaggctcacccaagaaggggccaacacccatcaaaaaagcgcccaaacgctgaacccaagtgtgttccaaagacaacggaggacccaggcccaagacgaagaacattggagaaggaaaccaaatgaagccctcaacccag

SEQ ID NO: 97161 - DNA, 986 bp, Homo Sapiens
aaccctcggctaggtacgaggcctgggtggtgaattcggcacgaggggcaggtgtggattccgccggtgaaggctgaaggcagctaccttaaagatgccgggatccgcagcgaagggctcggagttgtcagagaggatcgagagcttcgtggagaccctgaagcggggtggtgggccgcgcagctccgaggaaatggctcgggagaccctagggttgctgcgccagatcatcacggaccaccgctggagcaacgcgggggagctgatggagctgatccgcagagagggcaggaggatgacggccgctcagccctccgagaccaccgtgggcaacatggtgcggagagtgctcaagattatccgggaggagtatggcagactccatggacgcagcgacgagagtgatcagcaggagtccctgcacaaactgttgacatccggaggcctaaacgaggatttcagcttccattatgcccaactccagtccaacatcattgaggcgattaatgagctgctagtggagctggaagggacaatggagaacattgcagcccaggctctggagcacattcactccaatgaggtgatcatgaccattggcttctcccgaacagtagaggccttcctcaaagaggctgcccgaaagaggaaattccatgtcattgtagcagagtgtgctcctttctgccagggtcatgaaatggctgtgaatttgtccaaagcaggtattgagacaactgtcatgactgatgctgccatttttgccgttatgtcaagagtcaaccaggtgatcattggcacgaagaccatcctggccaatggggccctgagagctgtgacaggaactcacactctggcactggcagcaaaacaccattccaccccactcatcgtctgtgcccctatgttcaaaactttctcccacagttccccaatgaagaagactcattttcctaaggttgtgggctcctgaaggaagccctgcc

SEQ ID NO: 97162 - DNA, 689 bp, Homo Sapiens
cttacggctaggtacgaggcctgggctgttgaattcggcacgaggcctctctgtgacatgatgaaattgaaatcaatccacaggccatgaaaatgggacacctccacccaaattaagttagggcataacattaacttggaaaatggccatgtcatcacccctgcggctgtcctatagctgagatgcgtgggtcgcaggggaggtgatttctaggcatattgctgtcccttttgtgtatctgtcatccggatgcttcggaccccacgcctctgcaagtgggagagacccgagcatcctccccacccccatagctccagtgcacgccacccccgtcttgcctgggtcggggcctgcggccagcaccatttcacacacactccttgtagatgggagccagaggaaacctgaacgtgggtggagcgttccactgagtctacttcaggagacagaaggcccatgctgatgggggaggaggagggacgtgggcattttggacaccagggcaaatggaaatgctgctttcaaaacttagtttcctttccatttcttcctagtctggcctttgacacaaatctggtagaaagaagcctgataaattgagggcacttgtaccctccctgttgcccccagaaggttcttggagagaagtgcagaatttgtgaacacggcggtggagggcgggtggatgg

SEQ ID NO: 97163 - DNA, 914 bp, Homo Sapiens
taggctaggtacgaggctgggtgttgaattcggcacgaggtgggagaagagctgtaagagacctggagccgacagacgggtgaaggccatgccgcctcctgggaaagttccccgaaaggagaatctgtggctacagtgtgagtgggggtcctgctcctttgtgtgctcaaccatggaaaagttctttgagcatgtcactcagcacctgcagcagcacctgcatggctctggggaggaggaggaagaggaagaggaggatgacccacttgaggaagaattctcctgcttgtggcaggaatgtggcttttgttctctggacagttctgctgacctcatccgccatgtctacttccactgctaccacaccaagctgaaacagtgggggctgcaggccttgcaaagccaggctgaccttgtgcccctgcatcctggacttccagagccggaacgtcatccctgatatccctgaccacttcctgtgtctgtgggagcactgtgagaattccttcgacaatcctgagtggttttatcggcatgtggaagcacacagtctgtgctgtgaatacgaagcagtcggcaaggacaacccggtggttgctgtgtggctggaaaggctgtacctgcaccttcaaggaccgcagtaaaacttcgagagcacctccgcagccatacccaggagaaagtggtagcctgccccacctgtggggggcatgtttgccaaacaataccaagttcttagatcacatccgtcgccagacctcattggatcagcagcacttccagtgttctcactgttccaagagatttgccacaggagcggctattgcgggaccacatgcgcaaccatgtgaatcactataaggtgccctctggtgtgacatgaactggccggtgccttcctcccttccgaacaa

SEQ ID NO: 97164 - DNA, 932 bp, Homo Sapiens
cggtccggaattcccgggatcagctctgagaacacacgcatgcattccaggcggtgctgctggggctcggcggggccgtgtctggtctgcaaggcgcgcgggctcgtggggggttggctggggagcccacgctgcctggcgactcgggccaccgaatgtgagaccgagtccctttatgtcaccagcgcacacgctgatttgaaccctgcttcgacgtgtgtgtcatggcttaaaaatagctgctaatctgtcaacctgtcttgggcagaaacagcggcggcgacagcagcaggagcgtcatggccgtggcgctgtctgcgccggcgatccgcctttcggactgaggcccagcgcagcgcttgcaaagagcagcagctacctggcaactgaacccatcatcaccacagccactcctgcagctgccacggtttctgccacctctaagatgtgccctggtaactggctttgggcttctatgacttttatggcccgcttctcccggagtagctcaaggtctcctgttcgaactcgagggaccctggaggagatgccaaccgttcaacatcctttcctcaatgtcttcgagttggagcggctcctctacacaggcaagacagcctgtaaccatgccgacgaggtctggccaggcctctatctcggagaccaggacatggctaacaaccgccgggagcttcgccgcctgggcatcacgcacgtcctcaatgcctcacacagccggtggcgaggcacgcccgaggcctatgaggggctgggcatccgctacctgggtgttgaggcccacgactcgccagcctttgacatgagcatccacttccagacggctgccgacttcatccaccgggcgctgagccagccaggagggcaaaatcctggtgcacttgtgctcgtgggccgtaagccgatccgcaacc

SEQ ID NO: 97165 - DNA, 677 bp, Homo Sapiens
tcctccgcgccgcgctcgtcggccatggcccgggagaacggcgagagcagctcctcctggaaaaagcaagctgaagacatcaagaagatcttcgagttcaaagagaccctcggaaccggggccttttccgaagtggttttagctgaagagaaggcaactggcaagctctttgctgtgaagtgtatccctaagaaggcgctgaagggcaaggaaagcagcatagagaatgagatagccgtcctgagaaagattaagcatgaaaatattgttgccctggaagacatttatgaaagcccaaatcacctgtacttggtcatgcagctggtgtccggtggagagctgtttgaccggatagtggagaaggggttttatacagagaaggatgccagcactctgatccgccaagtcttggacgccgtgtactatctccacagaatgggcatcgtccacagagacctcaagcccgaaaatctcttgtactacagtcaagatgaggagtccaaaataatgatcagtgactttggattgtcaaaaatggagggcaaaggagatgtgatgtccactgcctgtggaactccaggctatgtcgctcctgaagtcctcgcccagaaaccttacagcaaagccgttgactgctggtccatcggagtgattgcctacatcttgctctgcggata

SEQ ID NO: 97166 - DNA, 1082 bp, Homo Sapiens
aaatagctaggtaagaggccgggtgttaatcggcacgaggggcagagtccggagcagccgccgcccgaccgcgccgagctcagttcgctgtccgcgccggctcccaccccggcccgaccccgacccggcccggtcaggccccatactcagtagccacgatggaggtgatgaacctgatggagcagcctatcaaggtgactgagtggcagcagacatacacctacgactcgggtatccactcgggcgccaacacctgcgtgccctccgtcagcagcaagggcatcatggaggaggatgaggcctgcgggcgccagtacacgctcaagaaaaccaccacttacacccagggggtgccccccagccaaggtgacctggagtaccagatgtccacaacagccagggccaaacgggtgcgggaggccatgtgccctggtgtgtcaggcgaggacagctcgcttctgctggccacccaggtggaggggcaggccaccaacctgcagcgactggccgagccgtcccagctgctcaagtcggccattgtgcatctcatcaactaccaggacgatgccgagctggccactcgcgccctgcccgagctcaccaaactgctcaacgacgaggacccggtggtggtgaccaaggcggccatgattgtgaaccagctgtcgaagaaggaggcgtcgcggcgggccctgatgggctcgccccagctggtggccgctgtcgtgcgtaccatgcagaataccagcgacctggacacagcccgctgcaccaccagcatcctgcacaacctctcccaccaccgggaggggctgctcgccatcttcaagtcgggtggcatccctgctctggtccgcatgctcagctcccctgtggagtcggtcctgttctatgccatcaccacgctgccacaacctgctcctgtaaccaggagggcgcccaagatggccgtgcgcctggccgacgggctgcaaaagatggtgcccctgctcaacaagaacaaccccaagttcctggccatcaccaccgactgcctgcagctcctggcctacggcaaccaggagagcaagctgatcatcctg

SEQ ID NO: 97167 - DNA, 1244 bp, Homo Sapiens
tcggcctaggtcgaggccgggtgtagaatcggcacgagggacacatcttcccgaagcttctttgatcccacctctcagcatagagactggtgcccttgggtgaatatcacacttggcaaagaaagcagggagaatggtggaactgaaccagatgccagcgccccagcagagccaggctggaaagcagtgctgaccatcctcttggcgcacaaacagtctagccagccagctgaaacggactccatgagtctctctgagaaatcaaggaaagtattccgaatatttcggcagtgggaatctctgtgctcatgctgaagatactccagcgccttcctggagatagctggaatgagagtgactttttgaaaaattaaggctgagttcctttcggtcagctgacactaagtttttcctgttctgggttaatcataaggagccccctgccatagcaaaggcagtgagtgtcaactatctgcatctggctgagagagacccgtttcctttcagggatgtggacagggtaagggcagcaagcatggttctgttaaaggagtgtggggttaacagactagaaggaagactaaggacctgaccacccatttcagcatcttcaatgtggagcagtgttctgaggactcttctatcctaggactatgacagtgtgtattaataaaatatttgctaagtaaaaaactaacccacaactacaattaatgggccgtgtcgggccgccctcgggcccttcgaaaaagtttttcctagaccaattccgatttgggcgcccccggccccccggtagggtaaaggggaaacctggggcccaatagcccggttttcccctaggggagaaatcccttgggcccacttgaacctaaagggcctttgggggaattccctaccaccaatttacaaaaacaaccgcccccgggagggggcaaacccccggaggcgggtttcctggaaaccaaaacatcccagggaaggtgggagctctcctggaagagggccattttaacggggggagtccttacccggcgccaggggaagtgccacaagcggagagcttccgaaataattcaacaattagggcccccgccgccaacgtgcccagttgctattcggaagggaacccgggcaccgcaagattgtcaatggaaaagaccaattctggggcgcgaaacagtggggaagaccctcttcccaaataagcgggggattgggtccacaactcctggaagcccccc

SEQ ID NO: 97168 - DNA, 642 bp, Homo Sapiens
gacagtcttaacgagccaggtgtgtgggtggcccgccctccccgtttccgggcccagcgcctcacagagctctgctaccacctggatgctaactctaagcatggcaccaaagccaaccgtgtgtatgggcctccctcagacagactgccttctgctgaagcccagctccttccaccagaactttacaatcctaatttccaagaagaggaagatgagggaggggatgagaatgcacctggctccccatcttttgaccaaccccacaaaacctgctgtcctgacttgaactcattcattgaaatcaaggtggaaaaggatgaataaaatctacaaccaagaataaactctgccttcccccatcccccatgtctcagaaataggtggccatggggcttcacaaaataatgagatgctctgtccagtctgagaaagcaaatttgcctcttttcttaacacagtctctactggggaagcagaacactggtgggataaaaacttatctagaaggggagaaactccctccactgtgaacagtaagccagaatatgcttattcctcagcataaacagtatctcggagaagcctgggatgagaaaatgaggaggatgggtccaagaaacatgaggccttcttgacataaaa

SEQ ID NO: 97169 - DNA, 247 bp, Homo Sapiens
ccctgggctgactgagatgcaaggtctgaccccacaaggccaggccgacgtttctgagtgatcactaagaaccagcttctcaaccaccatcaggacccaggatcctcctgggccgctgcctgttctatctgtggcccaagtgtgaccaggaaggtctccttccttcctgttgtctctatccgtagtgacgttcctcatcccagtgacgttcacagccagtgacgttcctcatcccagtgacgttcct

SEQ ID NO: 97170 - DNA, 794 bp, Homo Sapiens
  misc_feature (66)..(343): n is a, c, g, or t
  misc_feature (374)..(435): n is a, c, g, or t
cgctaggtacgaggctgggttgtgaattcggcacgagggagaaagcaacataaagaaatactcttnnnnnnnnnnnnnnnnnnnnnnnnnnnnnnnnnnnnnnnnnnnnnnnnnnnnnnnnnnnnnnnnnnnnnnnnnnnnnnnnnnnnnnnnnnnnnnnnnnnnnnnnnnnnnnnnnnnnnnnnnnnnnnnnnnnnnnnnnnnnnnnnnnnnnnnnnnnnnnnnnnnnnnnnnnnnnnnnnnnnnnnnnnnnnnnnnnnnnnnnnnnnnnnnnnnnnnnnnnnnnnnnnnnnnnnnnnnnnnnnnnnnnnnnnnnnnnnnnnnnnnnnnnnnnnnnnnnnnnaagattatttctttttttgagatggagtctnnnnnnnnnnnnnnnnnnnnnnnnnnnnnnnnnnnnnnnnnnnnnnnnnnnnnnnnnnnnnntgggttcaagtgatgctgatccctgtcaaatacagataaagtttaagttcctcagtggggcatgcaagatccataagtgggctctatgtaactatccagcttcatctcttggccattatgtgcttccctcttcttgctctagaaatactgacctgtttacagttttccagacataacatgttattttcatgtttatgtacttttgtgcatgcaggctgcttctgcctagaaatttgatcacccaccaactgtcagtttttcagataaattcttattcatccctcaaggttacacctttccagatactctcaaattcaaagtgaaaaaaaattgaccttaataaatgtttactgaattgg

SEQ ID NO: 97171 - DNA, 252 bp, Homo Sapiens
gggactgggttcgctctcagctttgcagctgtctgcggtggggggaaggttggggggtgtctggaggcatgttcccctcaccaccccccgtgggtctcagggaggccgggtgtgacctcatctttctcatggtgctatcctggtgctattggggtggggagctccctcccctcccccacaccagaaaggggtatgttgggggattggaagcacttgaactttttattttattaaaaccttgttataagcagc

SEQ ID NO: 97172 - DNA, 495 bp, Homo Sapiens
tcagtgagccaagaaattcaccatgaaaaaacaagaataacaaatagaagggaagagataggatgggaaagctaacaaattaaagttttggcaaaaaggaatatatgtaaatagctaattatttacttttgtgcttactttatttagattatttctatcagttacaatctttttctagttaagtgtacctaatttatggaatgggtgctatcctgtttatgtgtgtcttggtttttcttggctacagaaaaactgttgcagggcaacactagtttgatatttgatttactctccaatgagactcaatggctgggccgtggtagactcatagttcctcttgttctttattaaattcatcctgctaattagatttctagtgacttgtaacatgtagtttacactgaattgcaattacagatgcatacaactactatactagaaaaaattgtcatttctgatgtgccaataaatgatttttatgagagaataagaaaa

SEQ ID NO: 97173 - DNA, 849 bp, Homo Sapiens
cggccgccttctcctcgtactgctgggtgaggttctcgatctccttctggaacctcttcttcccctcttccagagcttccacggtgctggcaaagtcctgcagcttcttcttcgagtcggagagctacaaggacagcgtccagggtagggtgagagggggaccatgagtggcccctgtccctggccccacagactctgagaagcgaagaccatgtctcctcgttggagaaacccaatagcaggggaagctggggggtcaagcaccatttcaccaacactccaccgggatctgcctgcgggggatctcagcgcagagaagttgagaggacccatgaaggaagcaaggacacggggcatgcacctggatgttgagagtggagatgtggcgctccaggttctgcttggcctccatctcctcgtccagctggtcttgcaggctgttccgctcctcctccagctggcgcagcttcgtagacacgttgagcttctgccgggtttcttcttgaagcaactcctgcaaaagggatgcaaagaggtcccagggacctgccccgaggaaggccaccccccaggtcccttggatgatgtggcaggacactcacctgggtgtcctggagctgggaactgagggacgccacgtccttggccagcttaatggccttcccctcggcctcgttaagcatccctgtgacgctctcaacttcattctaagggtgccaagagactggttagtcaaagcctctagaaggggatcctcgttgaaaggagccctttttactcaaaacacatgggctagtacttgaggtgttcactgattgagaaaatacccgtgaggtatgggactctgtt

SEQ ID NO: 97174 - DNA, 140 bp, Homo Sapiens
gcctactactactatacggctgcgagaagacgacagaaggggatcctcgttgaaaggagccctttttactcaaaacacatgggctagtacttgaggtgttcactgattgagaaaatacccgtgaggtatgggactctgat

SEQ ID NO: 97175 - DNA, 868 bp, Homo Sapiens
acctggccaaggttttgagacatgaattagggttattgggaggagaaatgtttggggaccctggaggtcctcaccctagttgggtcgggaaatccctggggtaccggcagggcccggcagggattctgcgcaataacgagttcctgtggggattccaaggcccacgctgaaaccagctatgagaaggtcataaaattatttggttcaatgcttcaatgcaagagagcccatctgctacccatcccttgtatgaagaggttttgggagaggagcaagagggagtctgagcaccagccgcagccggggccaaagatttgtggggtcagggccccatccagcagctgccctgccccatgtgacatgaggcccattcttcgctctgtgtttgaagagagcaatcagtgttctcagtggcagtgggtggaagtgagcacactgtatgtcatctctgggttccttgtctattgggtgatttggagatttatccttgctcccttttggaattgttcaaatgttcttttaatggtcagtttaatgaacttcaccatcgaagttaatgaatgacagtagtcacacatattgctgtttatgttatttaggacgtaagattcttgcttttgagtcacatggggaaatccctgttattttgtgaattgggacaagataacatagcagaggaattaataatttttttgaaacttgaacttagcagcaaaatagagctcataaagaaatagtgaaactgaaaatgtagttaattcttgccttatacctctttctctctcctgtaaaattaaaacatatacatgtataccttgatttgcttggcttctttgggccttttaggggaattaaaattggaaggatt

SEQ ID NO: 97176 - DNA, 832 bp, Homo Sapiens
tgtgtgctctggtccttgcgcagtgggggccccaggtttgtcagtccggggtcaggtaccgtccccacctctcggtgtcttccctgctgtcttggttttgccagtcctgtccgccatccggcaattcgtggagatgcggatgtagatccgagaggtggcctcgagactggctgcgcgtgggctccgtgctggacaagctcgctattcccacatttacctgctggcggtgctggcctacagcatcaccctggttattgctctggtccatctggcagtacgctagagtgggtacagcccagtggaggagggggtacagtcctggttaggtggggacagaggatttctgcttaggcccctcaggacccagggaatgccagggacattttcaagacacagacaaagtcccgtgccctgtttccaatgccaattcatctcagcaatcacaagccaaggtctgaacccttccaccaaaaactgggtgttcaaggcccttacacccttgtcccacccccagcagctcaccatggctttaaaacatgctctcttagatcaggagaaactcgggcactccctaagtccactctagcttgtggacttttccccattgaccctcacctgaataagggactttggaattctgcttctctttcacaactttgcttttaggttgaaggcaaaaccaactctctactacacaggcctgataactctgtacgaggcttctctaacccctagtgtcttttttttcttcacctcacttgtggcagcttccctgaacactcatcccccatcagatgatgggagtgggaagaataaaatgcagtgaaaccct

SEQ ID NO: 97177 - DNA, 480 bp, Homo Sapiens
acccaaccagagatccccttccttgctgagagggttggggcaggaggagatttggcagtgcctgcaggttgcctggccaggtggagagggggaaagaggaagggcaccgtgggtgtaagatgcctttctcctccacccatcgaaaccagccaccccttccctgtgccaccaagacagccttttccagtggccatcctaaggggaactcccaaatgggtgttgctggtggacacagatcctccccccaatggaacccccaagctctgaggtatgcgggtagaggctttggataggttttcttctgctcccctcttttataaatctaggctgcttggctgcctgtctttctaggcagtccccctagaggaaaaatgtaggaatttattttttctttaactgctgtgaactcactttgagggggtaggaggagggagaaacagcctgtgttttttatgcaataaagtcatcaactacatcaaa

SEQ ID NO: 97178 - DNA, 835 bp, Homo Sapiens
taggcagtacgaggctgggttattcggcacgaggctgctgcaggagtatgggctgctgcagaggcggctggagaacatggagaacctgctgaaaaacagaaatttctggatcctgcggcttgccccccggcagcaatggagaagttcccaaggtccctgtcacatttgatgatgttgctgtgcacttctcggagcaggagtggggaaacctgtctgagtggcagaaggagctctacaagaacgtgatgaggggcaactacgagtccctggtttccatggactatgcaatttccaaaccagacctcatgtcacagatggagcgcggggagcggcccaccatgcaggagcaggaagactctgaggagggcgaaacgccgacagatcccagtgctgcgcacgatgggatcgtgattaagatcgaggtacagaccaacgacgagggctcagaaagtttggagacacctgagcccctgatgggacaggtggaagagcacggcttccaggactcagagctgggtgacccctgtggggaacagccagacctggacatgcaggagccagagaacacgctggaggagtccacggaaggctccagcgagttcagcgaactgaagcagatgctggtgcagcagaagaactgcacggaggggattcgtgatcaagacagaggaacaagacgaggaggaagaagaggaggaggaggatgagctgccgcaacacttgcaatcccttgggcagctgtccgggagatatgaggccagtatgtacccagaccccgctgccggggaagatgtccccgagggcgaggagagccccccgccctgagtaggaaacc

SEQ ID NO: 97179 - DNA, 787 bp, Homo Sapiens
gctatgtacgaggcctgggtttataatcggcacgaggggctgctgttgcttctccagaggctgtggctacggctgtggtgggctgtagctccagctgcgggggttgtggctctggctgcgggggctgaggctccggccgtgcgtggctgtggctctggctgtgggggctgcagctccagctgtgggggatgtggctccagatgttatgtgcctgtctgctgctgcaagcccgtgtgctcctggatgccagcctgttcctgcaccagctgtggctactgtggcggctccaaggggggctgtggctcctgagggggttccaaggggggctgtggttcttgtggctgctcccagtccagctgttgaaagccctgtttgctgctcctcagtgcttgtggatcatcctgctgccaggtccaggctgctgcaaggccctgctgctgccagtccagctgctgtgtccccgtgtgctgccagtccagctgctgcaagccctgttgctgccagtccaactgtaagtgtcccatgtgtgctgccaggttgtaagatcttgaggctctggacccagaccttcaggtttctcctgtttggtgaaagcaatttcttattgttccctgagtcaggatcggcccacacatccttccttgaggcacctaggacttagtctagctcaccatccatgcacacaactccttccatggctcagtactcctctggcctgccttaagctcttcatcagaaagtttgtttcctatcgggaggtgctcccttggacagaggggcaacgagg

SEQ ID NO: 97180 - DNA, 672 bp, Homo Sapiens
ataaagtagagagctacagcagacaggcccatacactgtacatagttccaggacaggtctagggttatccaagggaggggcccaggctacatccttggtttccccactgtggtgggggctagggactctgaggggctgtccagtctgccagaatgctaattgcacttaggcctcatggttctagtaaacggcagctgtgggccctttagcctcttcccctgttcttggactcacatctccagctgagctgccggtcttggcttcctggtcgcctctgtcccagagatggtcccagggagccatcctagggcaggtagcactgaggctcctgtggaaacaggagccacctgctcaggagacccctttcctgaggaagtccttacctctccccttgagatgtaaaaatggtccagcagagacaagctcccgtggaaaacagacaggagcatgggggcagctgtcatggctgtggcgggcacttttcctcagagtttctgccttgcgctggtccaggagccattttgcaccaaggacttggtaggcagaggcagccccactgtaaagaagggtcagattaaaacaaaaaactgccaaaagcatcccctctgccccccatgtggcactggcatcattctctgcttccctgggaggaattttttcaccatgttattg

SEQ ID NO: 97181 - DNA, 540 bp, Homo Sapiens
ggcacgaggctaaccctggttattccggttcattggtcccaaggcttgctgaggtggtgcccagggctggagcacatctgcccgcctgtctgtctctggaggcaggcagagaagggctttgtctgaggacgctgttgttccagcttggagatgtcaccggcctggaggtggggtgtggccaggccgtgccttcgcaagcctatgggggtcactctgagagccgtccttagggatggggccagctctggggccaccaccacatggcgcatggggtgggcgctgcccatggttacatgggggttggtggcagcatagacgcatggcagcagcggccaccacatgcagaaccccccacggtgtccagggccttcctgagctgcttagtgaatcctgtaccagcctgagaggagcacagtgccctgtcatttgcagaggtgggaatgggcttggtgcaaccaacttgcttgacatccgactcagtctgaccccacagtatgcacctgctctctgcccccattcacttcttgatcccaaggccct

SEQ ID NO: 97182 - DNA, 797 bp, Homo Sapiens
  misc_feature (609)..(611): n is a, c, g, or t
  misc_feature (613)..(620): n is a, c, g, or t
  misc_feature (622)..(628): n is a, c, g, or t
  misc_feature (630)..(632): n is a, c, g, or t
  misc_feature (634)..(638): n is a, c, g, or t
ggggccgccgaaggaggggcaaagctcaagatggcggacaaaacgccaggcggatctcagaaggccagttcaaagacgagatcatcagatgttcattcatctggatcttcagatgcacatatggatgcatctggaccctcagatagtgatatgccaagtcggacacgacctaagagcccaagaaaacataattataggaatgaaagtgcccgtgaaagcctttgtgattctcctcatcagaatctctcaagacctcttctggaaaacaaacttaaagcattcagtattggaaaaatgagtacagctaagcgaactttaagtaaaaaggaacaggaagaattaaagaaaaaggaggatgaaaaggcagctgctgagatttatgaggagtttcttgctgcttttgaaggaagtgatggtaataaagtgaaaacatttgtgcgagggggtgttgttaatgcagctaaagaagaacatgaaacagatgaaaaaagaggtaaaatctataagccatcttcaagatttgcagatcaaaaaaatcctccaaatcagtcttccaatgaaagaccaccatctcttcttgtgatagaaaccaaaaaacctccaccatannnannnnnnnnannnnnnnannnannnnncttgtcgggccgcctcggcccctcagaaaagcttttctaagaccatttcgttttggcgccgcggggccccagtagggtaagtgaaacatgggtcataacctggtttccctaagaaagatccctgggtcatggacctaagtgccttgaaattccctcacc

SEQ ID NO: 97183 - DNA, 1449 bp, Homo Sapiens
ggcacgaggcgaggacgccgtccccgccgccaacgcccggggcaagagcaaggccaaggccaaggcccccgcgccggcgccggctgagtccggcgagtccctggcctactggcccgaccgttccgacaccgaggtgcctcctctggacctgggctggacggacactggtttctaccgcggcgtgagccgggtcacgctcttcacccacccgcccaaggacgagaaggcgccgcacctcaagcaggtggtcaggcagatgatccaacaggcccagaaggtcattgctgtggtcatggacctcttcactgatggtgatatctttcaagacattgtggatgctgcctgtaagcgccgggtcccagtgtacatcatcctggacgaggcaggagtgaagtatttcctggagatgtgtcaggacctgcagctcactgacttccggattcggaacatccgtgtccgctctgtgacaggcgtcggcttctacatgcccatggggaggatcaaggggaccctgtcatcaaggttcctgatggtggacggtgacaaagtggccactggatcttacaggttcacctggagttcctcccatgtggacagaaacctcctcctgctcctgacaggacagaacgtagagccctttgacacggagttccgggagctgtacgccatctccgaggaggtggacttgtaccggcagctgagcctggcgggcagggttggcctccattactcctccactgtggctcgaaagcttatcaaccccaagtacgccttggtgtcaggctgccgccacccgcctggggagatgatgcgctgggctgcccggcaacagcgggaggcgggcggcaacccggaggggcaggaggagggcgccagcggtggcgagtcggcctggcgcctggagagcttcctgaaagacctggttacggtggagcaggtgctgccccccgtggagcccatccccttgggagagctgagccagaaggatggcaggatggtctctcacatgcacagagacctgaagcccaaatcccgagaggcacccagccgaaatggcatgggagaagcggccggggggaggccgcccccgccgggcgcttcagcagcaggctcttcagtcgccgagccaagaggcctgcgaggcccaatggccatggcccagctctgtctccaccgagacctctgaagtggagtttctgacgggggaagagggccaacgagaattccagtgctgacatctcaaggtaaaacaagtcccagttctaggcaaggcctagcaactggtggtaattacctgagctgcgggattggtggtgggccaggaagtgtggattgcttggctgccttgccctgtgctgtggagagcgcatgttcgacactggaccggttggacatcagaggcgactggcttttgcctgaacatggtcctggcctaggacgctggatcca

SEQ ID NO: 97184 - DNA, 687 bp, Homo Sapiens
gctaggtacgaggctgggtgtgaatcggcacgagggaagcaagcggaggcgcgggggcgcgtctacgaagccggacctgtagcagtttctttggctgcctgggccccttgagtccagccatcatgcctatccgtgctctgtgcactatctgctccgacttcttcgatcactcccgcgacgtggccgccatccactgcggccacaccttccacttgcagtgcctaattcagtggtttgagacagcaccaagtcggacctgcccacagtgccgaatccaggttggcaaaagaaccattatcaataagctcttctttgatcttgcccaggaggaggagaatgccttggatgcagaattcttaaagaatgaactggacaatgccagagcccagctttcccagaaagacaaggagaaacgagacagccaggtcatcatcgacactctgcgggatacgctggaagaacgcaatgctactgtggtatctctgcagcaggccttgggcaaggccgagatgctgtgctccacactgaaaaagcagatgaagtacttagagcagcagcaggatgagaccaaacaagcacaagaggaggcccgccggctcaggagcaagatgaagaccatggagcagattgagcttctactccagagccagcgccctgaggtggaggagatgatccgagactgggtgt

SEQ ID NO: 97185 - DNA, 857 bp, Homo Sapiens
catggcttctgacgtagcgtgggagtggagtcagcaccaagccaggctccccgcgcctgccttgccctcaaaggctactggtacgaggccagaggcagaatcggcacgaaggcaggcaccatggggcccgacagagtgacagcacgagaactgtgcgagaacgacgacctggccaccagcctcgtcctggacccctacctcggtttccgcacccataagatgaacgtcaggtctatcgctacctccgtgccttcctgccggaaagtggctttaccatcctgccctgcacgcgctactccatggagaccaacggggccaagatcgtgtccactcgtgcttggaaaaagaatgagaagctggagctgctggtgggctgcattgcagagctgcgggaggcagatgaggggctgctgagggccggtgagaatgacttcagcatcatgtactcaacccgcaagcggagtgctcagctgtggctgggcccagccgccttcatcaaccatgactgcaaacccaactgcaagtttgtgcctgcagatgggaacgcagcctgcgtgaaggtgctccgggacattgagcctggggacgaggtgacatgcttctacggcgagggcttcttcggcgagaagaatgagcactgtgaatgccacacctgtgagaggaacaggtgaaggagctttcccgaaccaggcctaggagccgcgttgcccacggcctggccagtccagctgcgttggacccagggggtgcgcaggctggcgtggcgcgagggctggtggcctcctggctgggtgccctcccgtgggcggggccttggcgctgcacctgctggcctggggcgcgactcctctgtctgg

SEQ ID NO: 97186 - DNA, 1467 bp, Homo Sapiens
cggctagtacgaggccgggtggtgaatcggcacgagggcagtggccacgagaggcaggctggctgggacatgaggttggcagagggcaggcaagctggcccttggtgggcctcgtcctgagcactcggaggcactcctatgcttggaaagctcgctatgctgctgtgggtccagcaggcgctgctcgccttgctcctccccacactcctggcacagggagaagccaggaggagccgaaacaccaccaggcccgctctgctgaggctgtcggattaccttttgaccaactacaggaagggtgtgcgccccgtgagggactggaggaagccaaccaccgtatccattgacgtcattgtctatgccatcctcaacgtggatgagaagaatcaggtgctgaccacctacatctggtaccggcagtactggactgatgagtttctccagtggaaccctgaggactttgacaacatcaccaagttgtccatccccacggacagcatctgggtcccggacattctcatcaatgagttcgtggatgtggggaagtctccaaatatcccgtacgtgtatattcggcatcaaggcgaagttcagaactacaagccccttcaggtggtgactgcctgtagcctcgacatctacaacttccccttcgatgtccagaactgctcgctgaccttcaccagttggctgcacaccatccaggacatcaacatctctttgtggcgcttgccagaaaaggtgaaatccgacaggagtgtcttcatgaaccagggagagtgggagttgctggggggtgctgccctactttcgggagttccagcatggaaagcagtaactactatgcagaaatgaagttctatgtggtcatccgccggcggcccctcttctatgtggtcagcctgctactgcccagcatcttcctcatggtcatggacatcgtgggcttctacctgccccccaacagtggcgagagggtctctttcaagattacactcctcctgggctactcggtcttcctgatcatcgtttctgacacgctgccggccactgccatcggcactcctctcattggtgtctactttgtggtgtgcatggctctgctggtgataagtttggccgagaccatcttcattgtgcggctggtgcacaagcaagacctgcagcagcccgtgcctgcttggctgcgtcacctggttctggagagaatcgcctggctactttgcctgagggagcagtcaacttcccagaggcccccagccacctcccaagccaccaagactgatgactgctcagacatgggaaaccactggcagccacatgggaggaccccaggacttcgagaagagcccgagggacagatgtagccctccccaaccacctcgggaggcctcgctggcggtgtgtgggctgctgacaggagctggcctccatcgggaagtcctggaaaagcgggagagatccgaa

SEQ ID NO: 97187 - DNA, 1121 bp, Homo Sapiens
ccacgctggcaaccccctcgaccccacagacgagggcatcttcatctccaaggtgagccccacgggggcagccgggcgcgacggtcggctgcgtgtgggtttgcggctgttggaggtgaaccagcagagcctgctgggcctgacgcacggcgaggcggtgcagctgctccgcagtgtgggcgacaccctcaccgtgctggtctgtgacggcttcgaggccagcaccgacgcagccctggaggtgtccccaggtgtcattgccaacccctttgcggcaggcatcggccaccggaacagcctggagagcatctcttccatcgaccgggagctgagccctgagggcccaggcaaggagaaggagctgcctggacagaccctgcactgggggcccgaggccacagaagccgcaggtcggggtctgcagcccctgaagctggactaccgcgccctggccgccgtgcccagcgctggcagcgtgcagagggtaccgtctggagcagctggagggaagatggctgaatctccctgctcccctagtggccagcagccgccctccccgccttctccggatgagctgcccgccaatgtgaagcaggcctacagggccttcgcggccgtgcccacttctcacccgcctgaggatgcccctgcccagccccccacgcctgggcctgcagcctccccggagcagctgtccttccgggagcggcagaagtactttgagctggaggtgcgcgtgccccaggccgagggcccccctaagcgcgtgtccctggtgggtgctgacgacctgcggaagatgcaggaggaggaagccagaaaactacagcagaagagagcgcagatgctgcgggaggcggcagaggctggggccgaagcgaggctcgccctggacggggagacgctgggcgaggaggaacaggaggatgagcagccaccctgggccagcccgagccccacctcaaggcagagcccggcgtcccccccgcccctgggaagtggcgccccggtgcggacggccaaagctgaacggcgccaccaggagcgggtgcgcgtgcagagtccggagccacccgcacccgagcgtgccctggcccctgccgagctccgggccctggagg

SEQ ID NO: 97188 - DNA, 1241 bp, Homo Sapiens
  misc_feature (199)..(230): n is a, c, g, or t
gggggaggtggtgagagtcgcacgcgcagcggggaaggtgtgagtcgtgaacggcccgggtctccgccatggcctctctactcgccaaggacgcctacctgcagagcctggccaagaagatctgctcccattcggccccggaacagcaggcgcgcacgcgggctggcaaaactcaaggctcagaaactgcagggccccnnnnnnnnnnnnnnnnnnnnnnnnnnnnnnnnttccggaagcgagaagagaaggctgctgagcacaaggccaagtccttgggggagaaatctccagcagcctctggggccaggaggcctgaggcagccaaagaggaagcagcttgggcttccagctcagcagggaaccctgcagatggcctggccactgagcctgagtctgtctttgctctggatgttctgcgacagcgactgcatgagaagatccaggaggcccggggccagggcagtgccaaggagctgtcccctgccgccttggagaaaaggcggcggagaaagcaggaacgggaccggaagaagaggaagcgaaaggagctgcgggcgaaagagaaggccaggaaggctgaggaggccacggaggcccaggaggtggtggaggcaaccccagagggggcctgcacggagccgcgggagccgcccgggctgatcttcaataaggtggaggtgagcgaagacgagccggccagcaaggcgcagcgcagaaaagagaagaggcagagggtgaaggggaacctcacgccgctgaccgggaggaactaccggcagctgctggagcgcctgcaggcacggcagagccggctggacgagctgcgcggccaggatgaggggaaggcgcaggagctggaggcgaaaatgaagtggaccaacctcctctacaaggcggagggccgtgaaaatccgtgacgacaaacgcctgctgcaggaggccctgaagcgcaaggagaagcgcagggcgcagcggcagcgccggtgggagaaccgcacggccggcgtggtggagaaaaagcagcagcgccaggaaccggcgggcggcagaaccctgcccaggaaaaaggcggcccgcgccgagcgccgactgctcagagcccgcaagaagggccgcatcctgccgcaggacctggagcgcgcaggcctggtctgagtctttcccacctggggccgccgtcttccgtcctaggagactccaggacgacctctgagtccttgacgctggctctgtcccaa

SEQ ID NO: 97189 - DNA, 1225 bp, Homo Sapiens
  misc_feature (65)..(140): n is a, c, g, or t
  misc_feature (1089)..(1105): n is a, c, g, or t
gctaggtgcgaggctgggtggttaatcggcacgaggcagagaccgagtgagccggggctgagccnnnnnnnnnnnnnnnnnnnnnnnnnnnnnnnnnnnnnnnnnnnnnnnnnnnnnnnnnnnnnnnnnnnnnnnnnnnncgggcgagctggagccggcaggcagcggggagcccgagagagccgcgtcgggagtgcggtctccatggcagtgctgggcgcagccggagagagcctgtccagggggctgagccccacccccaaatccctggggcatccagaagattcctgactggtcaagaaccagaggcaaaagagacctggaagtcccagcatggggaccagaaccccccagccagcctcatagttgggaaagtagccagcttgcctgccccatcaattgcagggatgcttaaggaaggccccgcccagtatgaaagctgaggattgcctctgctgaccctcagtctcctcccctgccctctacatctgccctcagctgggtccatcatgcaatgctgagcactggggtgagcctgggggcagcctgcctgctgacagggcgaggattgtggggatcatgggagtgtttgtgagtggggctcctgggtgagacctagcccccacccccacagagctcaagggggtggggggctgaggataggatggctcggggcggggcgggggcagaggaggcctccctgcgctccaacgcattgtcctggctggcctgtgggctcctggcgctgctggccaatgcctggatcatcctcagcatctcggccaagcagcagaagcacaagccactggagctgctgctctgcttcctagcgggcacacacatactcatggcagctgtgcccctcaccacctttgccgtggtgcagctgcgtcgtcaggcttcctccgaatatgactggaacgagagtatctgcaaggccttcctggtcactaataccccttgcggttggcccctggctttcagggtgccttcctttcttaccattgcaggtggaatgggggcgcttggcccgttaactaacggcgctcaacaaccgccaaaaagcccgggacttgcaatgccccaatnnnnnnnnnnnnnnnnntcccctattactctcttccaccagggcccctaattggggtggtacaaaccaaccgcgagggccttcaatattccccccgtcgcgttcacgtaatataattccctcagtactagggccaca

SEQ ID NO: 97190 - DNA, 896 bp, Homo Sapiens
ccccactcacaccaacccaccacacatccccacccaccctaactccagctggtaccggtccggaattctttccgatgcgggcgcaggatgagggcggccattgctggggctccgcttcggggaggaggacgctgaggaggcgccgagccgcgcagcgctgcgggggaggcgcccgcgccgacgcggggcccatggccaggaccaccagccagctgtatgacgccgtgcccatccagtccagcgtggtgttatgttcctgcccatccccatcaatggtgaggacccagactgagtccagcacgccccctggcattcctggtggcagcaggcagggccccgccatggacggcactgcagccgagcctcggcccggcgccggctccctgcagcatgcccagcctccgccgcagcctcggaagaagcggcctgaggacttcaagtttgggaaaatccttggggaaggctctttttccacggttgtcctggctcgagaactggcaacctccagagaatatgcgattaaaattctggagaagcgacatatcataaaagagaacaaggtcccctatgtaaccagagagcgggatgtcatgtcgcgcctggatcaccccttctttgttaagctttacttcacatttcaggacgacgagaagctgtatttcggccttagttatgccaaaaatggagaactacttaaatatattcgcaaaaacggttcattcgatgagacctgtacccgattttacacggctgagaatgtgtctggtttagagtacttgcacggcaagggcattaattacagggaacttaaaaccgaaaaacatttgttaaatgaagatatgcacatccagaacacagattttgggacagcaaaagtcttatccccagaagccaac

SEQ ID NO: 97191 - DNA, 553 bp, Homo Sapiens
ggaccccactcggcagggagcgggggctgcttgtgggaacacacagggtctgattccaagtgagaggggtgactggtgtggcttcagacggcaccaaccacgcaaaggatacacagcttctcgtcgtcctgaaatgtgaagtaaagcttaacaaagaaggggtgatccaggcgcgacatgacatcccgctctctggttacataggggaccttgttctcttttatgatatgtcgcttctccagaattttaacttcaggtgagagagaagtgagttactatcagaaacaacaaaaaacactaaagacatgactcacaaaggtaactggtacaaattaaagtctttcaaacattgtacacaacagcctggtggtctctaaagccaacagtgtcctgtaccctgaaatcagcacagaaacaccggccctgccaccccagccgccctgcacggagccgcttgccctgctcccggacgcacagctccctgcagcccatactcactcgcatattctctggaggttgccagttctcgagccaggacaacctggttgggaaa

SEQ ID NO: 97192 - DNA, 920 bp, Homo Sapiens
gatccgtgatccgaggcaagcgttggttctgtgcgcctcaggagtataatgtctcaggaaggcgattatgggaggtggaccatatctagtagtgatgaaagtgaggaagaaaagccaaaaccagacaagccatctacctcttctcttctctgtgccaggcaaggagcagcaaatgagcccaggtacacctgttccgaggcccagaaagctgcacacaagaggaaaatatcacctgtgaaattcagcaatacagattcagttttacctcccaaaaggcagaaaagcggttcccaggaggacctcggctggtgtctgtccagcagtgatgatgagctgcaaccagaaatgccgcagaagcaggctgagaaagtggtgatcaaaaaggagaaagacatctctgctcccaatgacggcactgcccaaagaactgaaaatcatggcgctcccgcctgccacaggctcaaagaggaggaagacgagtatgagacatcaggggagggccaggacatttgggacatgctggataaagggaaccccttccagttttacctcactagagtctctggagttaagccaaagtataactctggagccctccacatcaaggatattttatctcctttatctgggacgcttgtttcttcagctcagtttaactaccgctttgacgtggactggctcgtaaaaccagtatccaacagagttcaggaagaagccaatcctgctggtgcatggtgaataaggcgaagaaggctcaagggctcaacccttccaatggcccagggccaagcccttgaccaagcaacacttatacatcaccatggccagggccaaacgttgggaaacaatagcagtatgaggaaacacgaacccacacggaacacactggagacgacggagggcccacaatgaagcacagc

SEQ ID NO: 97193 - DNA, 586 bp, Homo Sapiens
ggcacgagggtgagcgaaggcgctgaatcctgagggtcagatctccaagaaggagggaggctggtcctagttcccgaggtcctagactaggtctagatcactgggtaaaagaaggggagcggcagcacgtatggggactaatctgtcacggcggcgccctacctcttcttccggaccggctcgtcatggcggcgccctgagtagccacttccgccctcttctggctaaattgcttcatccctatttccggcttgccatggtcaacgctcggggtttaacggaagtaagcaatggaaagtatggtggtgcctcgggtccaaagagaatgcgccgctgagttgcgcggcacctgacgggattgagcctcagacacaagcgctccaaatctccgactgtagctggtgggaagcgcctgctgttgctgcagcgtctcaacatgttgttcccattttcgttgggtgctgtagcggtaggctgttgggctcagggatagggggcctgattcctaacgccgcgctgccaccatcggccttgcgcagacgctgataatccccctggcacccaggttcatgcgagcgcttggaac

SEQ ID NO: 97194 - DNA, 932 bp, Homo Sapiens
ggctaggtagcgaggctgggtggcgaattcggcacgagggagaagggagaggcctcttctgaggggcggcttgataccggtggaggagctccaggaagcaggcaggccttggtctgagacagtgtcctcaggtcgcagagcagaggagacccaggcagtgtcagcagtgaaggttctcgggacaggctaaccaggaggacaggagccccaagaggccccagagcagcactgacgaagacctgcctgtgggtctccatcgcccagctcctgcccacgctcctgactgctgccctgaccagagtcatcatgtctctcgagcagaggagtccgcactgcaagcctgatgaagaccttgaagcccaaggagaggacttgggcctgatgggtgcacaggaacccacaggcgaggaggaggagactacctcctcctctgacagcaaggaggaggaggtgtctgctgctgggtcatcaagtcctccccagagtcctcagggaggcgcttcctcctccatttccgtctactacactttatggagccaattcgatgagggctccagcagtcaagaagaggaagagccaagctcctcggtcgacccagctcagctggagttcatgttccaagaagcactgaacattgaaggtggctgagttggttcatttcctgctccacaaatatcgagtcaaggagccggtcacaaaggcagaaatgctggagagcgtcatcaaaaattacaagcgctactttcctgtgatcttcggcaaagcctccgagttcatgcaggtgatctttggcactgatgtgaaggaggtggaccccgcggcatcctaaatcttgtcactgtcttggctctcgtgcgatagcatgctggtgatgtcataacttgacaaggcgcctctgatattgtctgggtgtgatctaacaaagatatggc

SEQ ID NO: 97195 - DNA, 789 bp, Homo Sapiens
taaggctaggtacgaggctgggtgttaaatcggcacgagggcgcagtggagcggccagtgggcaggatgacgagccagacccctctgccccagtccccccggcccagtgcggccgacgatgtctactgttgtggagctgaacgtcgggggtgagttccacaccaccaccctgggtaccctgaggaagtttccgggctcaaagctggcagagatgttctctagcttagccaaggcctccacggacgcggagggccgcttcttcatcgaccgccccagtcacctatttcagacccatcctggactacctgcgcactgggcaagtgcccacacagcacatccctgaagtgtaccgtgaggctcagttctacgaaatcaagcctttggtcaagctgctggaggacatgccacagatctttggtgagcaggtgtctcggaagcagtttttgctgcaagtgccgggctacagcgagaacctggagctcatggtgcgcctggcacgtgcagaagccataacagcacggaagtccagcgtgcttgtgtgcctggtggaaactgaggagcaggatgcatattattcagcaggtcctgtgttatcctgcaggataagaagatgtccaagtctgtcgtcaaagtttggggccctggacaggcggtcctagacaacagcgacctcatgcacatgctgaaagatggacattaaggcccagggtacaaggaatctccagtctacctgagatacccacaaagaacgattcattacatttatcatcacttcctgtgtgactcggc

SEQ ID NO: 97196 - DNA, 834 bp, Homo Sapiens
aacatagtctaagtacgaggctgggtgttaattcggcgaggccggatggggcgagaccccgctgtccctgtacataaagagaccgatgggtgggagggggtcggctgctccccgagatccccctggcagagtcattcttccagccccaaccctgagttcctaaagggacacctccctcctgtccagcccttcaacagatcttctgttagatgacaaccgtgccgtgggccccgccttgggccttgtctgaagggagaggccctggcatgcggatgggagatttagaggctgtggagaagggaacttggggctttccttccttcgtggcctcactcccctggggcctctctctatggagggggcaatggtttggtgaccagcaggctggattccaactagctaatgcattcagcaggtctgaggctggggccaggtgtcagccctaggcctccatccaacaccgtggaaatgttgctgccctcttcttggcgctgaccccaagattggggtttcctttctgccgctccctccactgttgtttatctaactgggcccccactccaggtccagagggactgtgctcactgcacagacatcactcaccttccgctccccagtcctgcagagctgttgccagggtgcagtggggaggggagtgaaatgtggaggactgtgtacctcagtcctctctctaaactcctcagcctcccaacaggggcctcctcacctgggttctgagtgtgtaccccttttagagagtgagatgccacccgggcagcactcgttaaagctggcagcacgagtgactaggggaaaagcttgactagacttggt

SEQ ID NO: 97197 - DNA, 857 bp, Homo Sapiens
  misc_feature (750)..(750): n is a, c, g, or t
gcggcgaattcagcacgaggtggagctgggccttggccgcgagaggccggcgaaagctatcttcctgcaccggcggccgggtgagggcggtgggagggagcggtgcctgcgctgtggccatgtctgtgtacgcagggggccggggccccgcgaagctgtgccctcaggccggccccggccggacacccttacccctccatgggtccggcagagggcagtgaccggcaccttctgtgcgtcctggactcctctgagaaacaggagagctcaaaggatggctactgacatgcagaggaagagaagcagcgaatgccttgatggcacattgactccttctgatggacagagtatggagagagctgagagccccacaccaggaatggcccagggaatggagccaggtgcgggccaggagggtgccatgttcgtccatgcccgttcctacgaggacctgactgagtcagaggatggggcagcttctggggacagccacaaggagggtaccagggtcccccgccgctgcctacagacatgcgccagatcagccaggactttagcgagctaagcacccagctgacgggtgtggcccgggacctgcaggaggagatgctgccaggaagctctgaggattggctggaacccccagggggcagttgggcgaccagccacagagccccccagggagggcacaacgaggggatgaggaggatgccacggaggcatggcgcctgcaacagaaagcatgtcttngtgctgagtgaggcaggggaagcctgtgtactcccgtatgggtctgaggagggaactttccagcactatgggtgttatgggtgggcccgggttcttcctggagggcg

SEQ ID NO: 97198 - DNA, 877 bp, Homo Sapiens
cgtaaggctaggtacgaggcctgggtgtctgaattcggcacgaggggtgggagggagcggtgcctgcgctgtggacatgtctgtgtacgcagggggcctggggccccgcgaagctgtgccctcaggccggccccggccggacacccttacccctccatgggtccggcagagggcagtgaccggcaccttctgtgcgtcctggactcctctgagaaacaggagagctcaaaggatggctactgacatgcagaggaagagaagcagcgaatgccttgatggcacattgactccttctgatggacagagtatggagagagctgagagccccacaccaggaatggccaaggaatggagccaggtgccgggccaggagggtgccatgttcgtccatgcccgttcctacgaggacctgactgagtcagaggatgggggcagcttctggggacagccacaaggagggtaccaggggtcccccgccgctgcctacagacatgcgccagatcagccaggactttagcgagctaagcacccagctgacgggtgtggcccgggacctgcaggaggagatgctgccaggaagctctgaggattggtggaacccccaggtgcaggttgggcgaccagtcacagaggcccccagggagggggcacaccggagggggatacgacggatccacggaggcatgggcctgacaaaagcatgctatgtgctgaatgagagggaaacctggttactccggcataggtttaagaggcactccacgccttgggtgtctggtggcctgggagtctacagagggcaaaaaagccaaacgcccacagaatggaaaagaaaaacgagcgaacaaagagtaagagcgagcacacagaggtaaaa

SEQ ID NO: 97199 - DNA, 545 bp, Homo Sapiens
gacacgaggcctctgcggcgtcactgggagcccgacggaaaactgcgctaaaggcttgtctttcccctgcccgaccgaaggagccgaccttgcctgcgctacagcttccttattttcgtcgcctgttctcctgatcctgcgtgttctaaaaaccccttaggctttccatgggttcccagaccatggcggtggcgctgcccagggacttgcggcaggacgccaacctggcaaagaggaggcacgcggagctgtgcaggcagaagcgggtcttcaacgccagaaacaggataattgggggagacactgaagcctgggatgttcaagttcatgaccagaagataaaagaagctactgaaaaagctagacatgaaacctttgctgctgaaatgaggcaaaatgacaaaatcatgtgcatattggaaaaccggaaaaagagggataggaaaaatctctgtagggctatcaatgacttccaacagagctttcagaagccagaaactcgccgtgaatttgatctgtccgaccccctaacccttaagaaagat

SEQ ID NO: 97200 - DNA, 998 bp, Homo Sapiens
ctagagagccggtgtgaatcgggcacgaggtggggctgggggagccccgcaggagatgcctgtggacaggatcctggaggcagagcttgctgtggaacagaagagtgaccaggcgttgagggtcctgggggaaccgggggtagcggcagcagcccaaatgaccctgtgactaacatctgtcaggcagctgacaaacagctattcacgcttgttgagtgggcgaagaggatcccacacttttcctccttgcctctggatgatcaggtcatattgctgcgggcaggctggaatgaactcctcattgcctccttttcacaccgatccattgatgttcgagatggcatcctccttgccacaggtcttcacgtgcaccgcaactcagcccattcagcaggagtaggagccatctttgatcgggtgctgacagagctagtgtccaaaatgcgtgacatgaggatggacaagacagagcttggctgcctgagggcaatcattctgtttaatccagatgccaagggcctctccaaccctagtgaggtggaggtcctgcgggagaaagtgtatgcatcactgtagacctactgcaaacagaagtaccctgagcagcagggacggtttgccaagctgctgctacgtcttcctgccctccggtccattggccttaagtgtctagagcatctgtttttcttcaagctcatgggtgacacccccatcgacaccttcctcatggagatgcttgaggctccccatcaactggcctgagctcagacccagacgtggtgcttctcacactggaggagcacacatccaagagggactccaagcctgggcaggtgggggccatgtcccagacctgatgggtgagaagtacagggcagaaccagaacataacctcaagggtctggtgaatccaagtggagggccaaaaccggagaaggggccctcggggcgatccgatgcgggccccatggggaaccccgcccacaaaaggcggccga

SEQ ID NO: 97201 - DNA, 587 bp, Homo Sapiens
cggcagcagcgtgagtgttggggtcaatccactctccttcgtgatgggggttgggggaggcagtctaggtctgttctacatcccctccccctcctttcccctcataaccttcctaacactacttgggactggaggtgctgccaaacaaggtctttcaaacatctgaggtggatgtgatagctccttctgtctccactccccaaacaacccactggcagaaccataggcatgtcccaaataaataattgtttgcactaatgccagaagagaagactcacttacagggattggtttggatggggctcacaggaagactatatgtaaggagggggtgtcaaaagcctcttacaagggggctcccagcatatctcaaaatcttccataactcttacccccgtcccctgcagccaaatgaccctgtgactaacatctgtcaggcagctgacaaacagctattcacgcttgttgagtgggcgaagaggatcccacacttttcctccttgcctctggatgatcaggtcatattgctgcgggcaggtcagtgaccttggatccctttgacttcttgacatttgacccctctttga

SEQ ID NO: 97202 - DNA, 836 bp, Homo Sapiens
taggtagagcctggtgtgaatcggcacgagggggacccgtacgcggctggctggcggggacaggctagaggagacagcaagtcccagtccccggagcagagagaagtggggccggcccggggcgctggtggtggctgtctggacacgtccttagcgcctgggaaccaggacataaaagcgcctccggagccgccctgcggcggggtccctttcatcccacttaaagtgcttctgcccctagggtttccggagggagagccgagatgggatgggggagcctgggggtcccccttggcaggggtgtctctttctggtttggagggttgttgctgtaaaaataactcctttgatgagcttccttattaaacctttcagacccagtctgttggagccatgaaggaagagggaaagagggctgccattcctgacagcctcccagccagggctggcgataaaggaccgagatagatggagggggcgagtagggaagtcctcttctaaaatgagagatagggatttggtggggtactggaaggaactaaccccttccctctccacctctgattcagcccttaattcttggtctatgataaataaagttcagtagtctcacattccccatctattaccctaggtgtgttttcaaggcagccagcggtagaatccatgtagttcccaccagttgccttcccctcagggatggaaggaagagggtttcttgggctggttgagggcagatgggggtgtctcatcagaagggacctccactgggttccactccagagtggaggcctgagcttactggacatcttcttaagctgtcaccgaaaaataac

SEQ ID NO: 97203 - DNA, 697 bp, Homo Sapiens
aaactacggctaggtacgaggctgggtggttaatcggccgaggaggccggcggcggcgatggcctcggcagctgtggagagcttcgtgaccaagcaactggacctgctggagctcgagagagacgcggaggtggaggagcgcaggtcctggcaggagaacatctctctgaaagagctccagagccgaggcgtgtgtttgctgaagctgcaggtatccagccagcgcactgggctgtacggacggctgctggtcacctttgagcccaggcgatacgggtccgcggcagctcttcccagtaacagctttacttctggtgatatcgtgggcctgtacgatgctgctaatgagggcagtcagctggccactgggatcttgacccgggtcacccagaagtcggtcacggtggcctttgatgagtcccacgatttccagttgagcttggaccgagagaattcctacagactgttaaaacttgccaatgatgtcacttacaggcgactgaaaaaagccctgattgctctaaagaagtatcattctggcccagcctcctcactcatagaagtgctctttggcagatctgctcccagtcctgccagtgaaatacacccgctgacattcttcaacacctgcctggacacctcccagaaagaagcggtttcatttgcgctgtctcagaaagaattgccatcatcctgg

SEQ ID NO: 97204 - DNA, 1280 bp, Homo Sapiens
  misc_feature (1180)..(1214): n is a, c, g, or t
accttaggctagtagagctggttgaatcggcacgagggtggtcggtacgctactcgctggcctccagtcttcccagcaaccggtgacactgcccgcgccagaactgaccactagccgacgcgggcgagagggacaggagcgtgacctccccatcccgaggggccggacgctcgggcgcctccccgctccccccactcggaggccggcgcgccgttagccccttcctcgctcccccgccccagtcccgcagtccgggaggcgggggtcggcagccggctgagatgggaaccgcgcggtgtctgaggaggcagtcggcgaccggtttccacttcaagcgtgacccttttgcctgtgggatgagctccagcatggggtgaggtacagaagagagacttgaagagcgtgccttgggactcaagcgccaaacctgtaccctagcgagtgtcctactccgcatccgtaatggaaggaaatgcacatcttactccagaggcacaagaggaggacatcccatgcggctactcctgcccagcgtggtggggcagcagaagctccagagcccagacttgcaggctcacggtgcagggtgaacctggccacagctcaccctggaacagccacaatgtctgccccttagagaagaaccctgaaatcagaccagattttgcgggctccccctttcctctctgttacagtgccctttccaggccttaagagaagtaaaacttagctgcagcgtcaggaggtggaccccagagtgtgagtggcacgcttccctgtgaacccgtcctcaccatgtttgccacatctgggggcagtgggcagcggggaagccttactcgtgcagcgaatgtggcaagagcttctgctacagctcagtgctgctgcgacatgaacgagctcacggcggtgacggccgcttccgttgcctagaatgcggtgagcgctgtgcacgggctgctgacctccgagcgcacaggcgcacgcatgctggccagaccctctacatctgcagtgagtgcggacaaagcttccgccacagcggccgtcttgacctacacttgggcgcacacccgcagcgatgccgcacttgccccctgccgccacatgcggccggcgcttcccgcacctccccggcgctgctgctacaccgggcgccgccagcatctgcccgaagcgnnnnnnnnnnnnnnnnnnnnnnnnnnnnnnnnnnnttccggtaaaagggcgactttcaaaccaccaaggtgccgggcaccaccctgggtcgaaactcggat

SEQ ID NO: 97205 - DNA, 1558 bp, Homo Sapiens
  misc_feature (1394)..(1394): n is a, c, g, or t
ggtacatacttgacctctcttttctattccccatcacttttgtgctaaagctaatcatatttatgtctgtctttctctacttttccctaattccctctcctcctgactcctgtagacattcccaatgatacccaccgtcatacatttaggcttttcttgcctttccctgaagccctgtatttattaatgcatatatttcccctgcttgttgtacaagtaagttactcttttcctttaatctgtaagattcatgaaattcggggccagggaaacagtttagccttagggaagggaaaacactaagtgaaactgtttacaataacctcatacaaccttctgtcccatctcctggttcagcctaggtgtttcactggtcctctatgaatcccagcacttataatcccagtcttttatcactcaggtgctaggaaaaaaaacatagactcaagacccaagattcaatggaccaggagaaaggggggcggtgatcaggtcaccagtgaccccaacctatggtctcggtctttcctggaggctgccaacccagccctcatcctcccttgctcacaaagttacagggtaggcacctgtcaggacagaacagcagcagcgctacagcccagaggttatacatttcaacagaacagggatccttggctactgtagaagcagtcctgtatggagaccttggaccagcaggggaagatctatgggcatgggaggtgggcgttggaaaggctgagtaggaatggtgcctggcacccctgaaccatgatctgagcctccctggagaaggtattttatatgtctgctgccagctgctggtctccacaccctcaaccgttctcaacccccctgcagggagaaggcctcctgggcactgtccttccacctgtgccagccaccccctgccccactgctgaatgaaggccatttcaagcgctgcttctcactccattcctctcagctgttattgctgcagggccaagccctttttagtgctgtgctcgtccagctcaccaccacagcccctctcagccctcagtaggtgggaggggccagctgcctctttaggccagttgcatcctccatttatccaaaacactcctctcctcccagtggagtggggttctgccagtacagccctactgcatcatctgcgtcaaccggtcctagcccatctgcagggtgaaagaactcatcaagaagctccttctgcccttgtaagcccatcccagctacttgtaaccatctctaagggcaatggcattgctccctaaccattcatctgcatgagctactcttggcttccttaaagggtcaagaaagcattttttctgcttactagaatcattgagatcaactgtggtgaaccccaaaagtgggacaagggnggccctccttcatacactaaagaaaattcttgagggggggttcactaagaatggtgggggaacaagggctaagaatccctttttaaaaaaattcccacctgggggcttgtccccagaggggggttggaaaatccttcccccccctataaagcgacccccctgag

SEQ ID NO: 97206 - DNA, 978 bp, Homo Sapiens
  misc_feature (405)..(678): n is a, c, g, or t
cggcagtactactacggtcttaggtagcgaggcctgggtggcgaattcggcacgaggcgggccttgaccagaggacccagtgtcagcactgatgtaccaggtgagcttagggcaagacccagcgacatcactggatgacagtggattctgactatgtggctgttgtgatcactacttggaaataaacacaagacagtgaagcaggcctcaatcccacatagttttgaaggttccttgtcattttctgggagcccctgatgtgtcctattcctcagagagcttactcttccccactcttctctgccctaccaggccaaagggtctttctcttcctttatccctccaccccatttccttccaccaccacttcagtcaaggagtttttgtatcagaaagttatcacannnnnnnnnnnnnnnnnnnnnnnnnnnnnnnnnnnnnnnnnnnnnnnnnnnnnnnnnnnnnnnnnnnnnnnnnnnnnnnnnnnnnnnnnnnnnnnnnnnnnnnnnnnnnnnnnnnnnnnnnnnnnnnnnnnnnnnnnnnnnnnnnnnnnnnnnnnnnnnnnnnnnnnnnnnnnnnnnnnnnnnnnnnnnnnnnnnnnnnnnnnnnnnnnnnnnnnnnnnnnnnnnnnnnnnnnnnnnnnnnnnnnnnnnnnnnnnnnnnnnnnnnnnnnnnnnncttgttcatgccccgggacattgctggtgctgtttcttctggtaggcataccctttctgaggactggccaacttggctctgagccaagggtagaaggagatgtggccttatgcattctccagactttcccctacctcagagctcttaggcaggggtatggaccttggaagctgcagaggtcggggcacattgagtgactaagcatagcaagtaccggtggacggggcgaatgcaaggtggacgggctcggcttagtctctattggggtataccacaggtgaccttgggattagcaaccgt

SEQ ID NO: 97207 - DNA, 760 bp, Homo Sapiens
ggcacgaggcggaaccgagcccaggagccggggacggtgcgccagtgccccctccgcggagccccaaccagtagacggttccctgtctcccgcgccccaatttcgattttcaaacgcaactcctacaggattctgagaccccgtcccatctcccatatcccatttccagctgcaaattactgcagaatctgaacccaggaaagaaacccatttgccgaccccctcttccctctccagacaggtggagagcgggtgagggtctcgctcggctttccccctgcacctttcccaccctcccgcccgtccctgggggtcctccgtcaccgcggccatggcccagaagccgaaggtggacccccacgtcgggcggctgggatacctgcaggcgctggtcacggaattccaggagacccaaagccaagacgccaaggagcaagtcctcgacaacctcgccaacttcgcttatgaccccagcaactacgagtatctgcggcagctgcaggtcctggataaataactgcgattcgcctgacggaggagaatgagaccctggtggagtaagctatcggaggcctgtgcaaacctgtgcccaggacagggccaacaaggagcacatcctgcacgcaggaggtgtcccacatcatcatcaactgcctatccagcccaatgaggagacggtgctgtctgacgatcagccacgctcatgcaacctgagcccgccgggccgcagacttatctcccagaagtgaaccgcaagccc

SEQ ID NO: 97208 - DNA, 627 bp, Homo Sapiens
ggcacttacggctaggtacgaggccgggtggtttaattcggcacgaggaggcactggaagagcttgtcagccggattgatgagcaggtacataatcacttcaggaggtacgaggtagaatacctgcagtttgccttccgctggatgaacaacctgcttatgcgggagcttcctcttcgctgcaccatccgcctgtgggacacatatcagtctgaaccagaagggttctcccactttcatctctacgtgtgtgcagccttcttgatcaagtggaggaaagagatcttggatgaggaggattttcagggtctcctcatgctgctacagaacctacctacaatacactggggcaacgaagaaattgggctgcttctcgccgaggcatacagactcaagctacatgtttgccgatgccccaaatcactaccgccgataggtgctgtctcctccggggacccagactgccttcatctctgatggcagtctgatcactgtggccactgtgcgacgccgtggaccccggccaggaaccactcctgttgtacaaagctcacacccaccgcccaggtcttaactttctggcatccaccactccatgtctctggatgtgtcacttggaccactgtca

SEQ ID NO: 97209 - DNA, 1327 bp, Homo Sapiens
aaggccagtactataacggttctaaggtagcgaggcctgggtggcgaattcggcacgaggggaagtcggcgtgtcgagtggctcttcctggctgctgaggcgggttaaggtctgagggtcttgtggggccacggcgctgatcaccaggtgtttggcttggtcggttcttatttctcgcctggcaatggcgacgtacacctgcataacttgccgggtggcgttccgcgacgcggacatgcagcgggcccactataagacggactggcaccgctacaacctgcggcggaaggtggccagcatggccccagtgaccgccgagggcttccaggagcgagtgcgggcgcagcgggccgtcgcggaggaggagagcaagggctcggccacctactgcaccgtttgcagtaagaagtttgcctctttcaacgcctacgagaaccacctcaagtcccggcgtcacgttgagctggagaagaaggccgtgcaggcagtgaatcggaaagtggagatgatgaatgaaaagaacttggagaaaggactgggcgtggacagtgtggacaaggatgccatgaacgcggccatccagcaggccatcaaggcccagccgtccatgtctcccaagaaggcgcccccagcgcctgcaaaggaggccaggaatgtcgtggccgtgggtactggtggccgtgggacccacgaccgagacccgagtgagaaaccaccccggctccagtggtttgaacagcaggcgaagaagttggcaaagcagcaggaggaggacagcgaggaggaggaagaggacctggatggagacgattgggaagatattgattctgatgaagaattggaatgtgaggatactgaagcaatggacgatgtgggtggagcaggatgcagaaggaggaagaggctgaggaagggcgaccttggtgcatccctatcacggactgcttaatgttgtcgcatcattccagctcgctgatgagaatgtggtcacatgacagagacagcgtttattaatactgatataggacaatcttcagatttaggggcgcttcatactggagagacactgggcgtggacaacatgtccggggggccaacggaagcagggaacatatcgcacagaagggtaggccatgaatcaacagagcgagtaggacacagagaggcagccggcacatgcgcacacatagggcgcaacacaccagcggagggacacagccggagagccagaacggacgaaccagaggcccgatccggcctccacacaagactgagagcaaaggcaacacgaggcgtacaacaccactgtctcgtcccatcgaaagaa

SEQ ID NO: 97210 - DNA, 661 bp, Homo Sapiens
taggctaggtacgaggctgggtggtgaatcggcacgaggctcctgagctccttttgatgcgtaagctctgtttttggccctctttgaaggcagggccaaacttttcttagtgcctctcaccttagggtggccctccagggaaggtgctccttgaatggctggattggccctgcccaccgtcaaactgctacatgtaggaatagctgatgaggaaatacacaaggcctcagtgccccttggcctctttacaaaaggagaagttggaaggggattgtgggaggagcccctgggggcctggtctgtcctccaccagaacttggagttgctgccagcagaggatctgtgcctcagctgaagactagctccggaatgtcataggggtgtgactgtgtaagccttctcctcctcctcgtttctgtggcatggcacaggttgcctggttgctcgagccttccccatgttgacatcctccacaagcttgcctttgctctgtctacagcttagtaccccattctggagggcactttctggtgcttggaaggagagaagaaagcaaaagccacatgcctggcatggccaagccagagacagatccacctgtcagaggaaggaagaagtaaagggggcatgcagggcttttgggggccagatcggctcagaa

SEQ ID NO: 97211 - DNA, 877 bp, Homo Sapiens
  misc_feature (66)..(66): n is a, c, g, or t
  misc_feature (185)..(185): n is a, c, g, or t
ggccctacacgtgcgaagcagtgtggccgcgggcttggactggaaagtccagggttggtcattccnccaccgggacacacacggagtgggcccaggtgtgcagtcccgggggctagccaccggggaaagcacagagaagccaccacaaggggaggtggcctttccgcaccaccccggacgttcantcacaggccccccggagttacccgtgtgaggagtgcgggtgcagcttcagctggaagtcgcagctggtcatccaccgcaagagccacacaggccagcggcgtcacttctgcagtgactgtggccgcgccttcgactggaagtcgcagctggtcatccaccgcaagggccaccggccggaggttccatgagcagccagacagcacagtccctcggggcctcggtgttctcggggcctggatacagcctctggggcaccagcagaagactctggaggcagcaggggatgccagagtgaacaaggggtcccaagccagttccctgcccctggtctggtctcccccaaaagacctgggtgcaaggaaaaggagctgctctctctcttcttgcccctgcctcctagagggaggtctgggttcccttctatggctgaccagtgcctgtggggtgactgccaagcaccaggctccctccctccctgtgacatggcctgggctgacaacactccctctcctgggacctccttgcctcaggtgggtgttcaaaaactgtgccttcccactcgtctgtgcagaggctgggcctgaggtctcagtgtggagagcagcagaagacccaggaaagcacagttggcttccgtttctcctgctccctgtgtgtgttagaattttaacataaattccactttcataat

SEQ ID NO: 97212 - DNA, 1001 bp, Homo Sapiens
  misc_feature (268)..(556): n is a, c, g, or t
ggtacgctccggattccgggatatcgtcgaccacgcgtcgccaacaaaaaaaatccctcacttttgttttctgtttattgcttacctggctttttatatggcatttgcaaaagaagaggtctccctcaatcctcccctttagggaaggagtcaacagtgtaactaaatttctctaggaagatggaaagtacttaaataatgtgtgtgtggttttcctttggggacgtggttaacggtccagaagaatcccttctagaaagcattttannnnnnnnnnnnnnnnnnnnnnnnnnnnnnnnnnnnnnnnnnnnnnnnnnnnnnnnnnnnnnnnnnnnnnnnnnnnnnnnnnnnnnnnnnnnnnnnnnnnnnnnnnnnnnnnnnnnnnnnnnnnnnnnnnnnnnnnnnnnnnnnnnnnnnnnnnnnnnnnnnnnnnnnnnnnnnnnnnnnnnnnnnnnnnnnnnnnnnnnnnnnnnnnnnnnnnnnnnnnnnnnnnnnnnnnnnnnnnnnnnnnnnnnnnnnnnnnnnnnnnnnnnnnnnnnnnnnnnnnnnnnnnnnncacaaaagcacacacaccgacacaccccatgaaatcggccttgggcaaaaaacggcaagggaaatcccacattccaagtacacacgcacgggggcccccagaaaaaacaaaactataaacccacaaggaggacaacacgaaaaggggcgaggatgcaaacccatcaagggtgagcccgacagggagaatagggacaggattggacccttttgcgccacatgagagggacacccagctggccacaaagagggaggtgcacaggcaaaagcacctgtaccaacaaagctcgaaaacaggacaaacagccgacagaggacagaaaccccagacgaatcagtagcgacaacccgcaaacgagtccgcgaccggaggccacacgaggtgacaaacacaccgcgcaccagcaacagaacaccaacgaaaagcaagcgcgagccacgaggcg

SEQ ID NO: 97213 - DNA, 1218 bp, Homo Sapiens
tgaagctcagagaggacacccatcattgtggtcaactatattccccagggttcaatagattcactctttgaaggaacgtggtactcagttagggtggatgaaaagcacagaagaacttacgctcggcgtcccactccaaactgatgacacatttggatgaaggagtaggacgttgtgcattcaaacatgagcaactgagcatattccaagccctgccaagaaagtaccgaagactgccctgccacagacagcagaacctgaagcagctgtcattagtaatggggaacattatagatagctctgtgacggtgcaagacttcagggtggggtgggcatggggtgggggtatgggaacagttggaggaatgggatatctggggataattttaaaggattacatgttatgtaaatttttatgtgactgacatggagcctggatgactatcgtgtacttgggaaagtctctttgctctatttgctgacatgcttcctgttgtggtctggccaatgccaaatgtactcgaatgatgttaagggctctgtaaaacttcatacctctttggccatttgtatgcatgatgtttggtttttaaacatggtataatgaatgtgtacttctgtcagaagaaagcagaggtactaatctccaattaaaaaattttttaacatgtaagaattttgtacttgaacaacaagattacagaaagtacctgtggtttctggaaaacatttctagcttggggaatgtgacaacattccccagtgtggtaaaactggggtaaaatgtggtaaaatgtgatacgcacaaaccctttgaaaatagcaaaacaaacatgccctttttctaaacattgataaatcctaaagaggaaagaaaagaagctggggacaattaaaacaactggctttctgggaaattcttggaattggttaagttccaggccagcagtgacaaaagttatggtaatgacctctgaacagagaaacactgccattgaagaggcttctggtatagaaaacatggtacattcaggagctgtgaatatagctctaggtgtgctcctgaatcagttcatggtagattatgctgaacaacagtgagatgttattggaggtgtggatgagggagtagtgtgcagtccttctttgcaccttattttaaagaataatgaaaattttctggttactttttttaaaaatttaaaatggaagggaaga

SEQ ID NO: 97214 - DNA, 859 bp, Homo Sapiens
aaggtggtcaagccacccatgcaccgctggctatttggacaagcaacgggctgctgcaggcgaggcaccccgaaaggcaagactggtcgtgggggacgccagaagaaccgctttgggcttcctggacccagccagactaacctccccaacagccaagccagccaggatgtggcgtcacagcccttctctcagggcgccctgacgcagggctacatctccatgagccagccttcccagatgagccagcccggcctctcccagccggagctgtcccaggacagttaccttggtgacgagtttaaatcacaaatcgacgtggcgctctcacaggactccacgtaccagggagagcgggcttaccagcatggcggggtgacggggctgtcccagtattaaaaggtggcggcggaagagctaagcaacgtggcttagtccatcagcatcttattctgggtaataaaaaataaaaataaacggatacctgttttccactgctaaaactgaagcaccactgtgtgagcaacaggaagggagagcgcacgagggagaggagccgaggcgagcgccccctgctggccgcggcgggaggagcagagggagcggaggaggggcggccgccgggagccgcggcacaggaggcccgctccgtcccatcggggctgctggcagggcggagggaggaagaacctcatctcagagtagcctttcctctgtgcttttatatctttttctctttgattgaaggggactaagtcttagcagggaaaaaacttcgcatcttggggccgaagcagctcttgcaaagaaagaacgtgcggggcaaaccccgggaggggggttgtcaagcctacggaagagc

SEQ ID NO: 97215 - DNA, 750 bp, Homo Sapiens
aggcaggtacgaggctgggatgtagaatcggcacgaggtcggtgccctcggcccccaaagaggacagtggcagcgtcccctccacggggcccagccaggcactcccatctcgctgaagaggaagtcagcgggcagcatgtgcatcacccaattcatgaagaagcgcaggcacgacggccagattggtgctgaagacatggacggcttccaggcagacacggaggaggaggaagaggaggagggcgactgtatgatcgtggatgtcccggatgctgtggaggtccaagccccgtgtggacccgcttccggagctgggggtggtgtgggggtggacaccggcaaggccaccctgaccgcgagcccactgggtgcatcctgagagcaggggtgacgtatgtagaacgcttagggtgtcctccccacagagcagatacttgaaccgactcaattcctgtgtaaagagcactttgtcctgcttcacggacctccccaaagtgtgcagagttctatataggatgctggattagttcctttgatatttgtaaaaattcccccaagagccgcatatgaatctgccctttaataaagcattattgagattgctggcctattggggaagcctgcgggcacaggagcaggcgtggaatccaatacttgtaaatgaattgaagcgtcaggaccacccgcctggccacgtgcgcgggcccctggacctaacgaggcagtgtataaacttattctctagccctg

SEQ ID NO: 97216 - DNA, 521 bp, Homo Sapiens
cattcctattacaatgctgtgaaaaaagttctgcttcttaggtgaatgggtactttctattttgtttctaaacgagcaattttgaggatgaaatgggaagatatcattgcttcctttttgcacctattgggtatgtacactctggccgaagggagtccttatgtttagtttcaaaatatattactttcctggattctcttcttcactttttctgactttgggtccattttcttttcattgcctccttttccaggcagctctattcttgcagagcccatagcaggacatggttaaaattcccaatagaaaacactaaaaagaaagtctgtggaatcactagtgactaaatactgggaacctattttctcaatcttccgccatgttgtgttctttgtattcttgagatgataatatattatgtatttgaattcctgaaaaatggaaaatgtttaagatatatgtatataaagtgtatgctgtattggtgcaataatggtaaataaaaatatgacaaaagtgaa

SEQ ID NO: 97217 - DNA, 401 bp, Homo Sapiens
tacatgctgccattctgccaagagaggctgtctcaggccttccttagaatcagagaaggaagcgtcctgtttggagagacccagagagcaccgccagggaggcgctcgcgcaaggccacggtcagcacaggcacggtcccgctttccttagtgcttggagcaatttccataaaacattcaccagaaaccttttgcacatcggtctctgccacacgcagtagaatttccgcagggctgtggctcggccagcagcggttccaggagagtggcagtgcgcacgggcctccagccgtgccttccccctgcaggccccgtctgctgggcctgctgcccagtgcactcagccccaggtagcagaactcacgttcccactatagcaagaaataaaggcaaaagagaac

SEQ ID NO: 97218 - DNA, 1033 bp, Homo Sapiens
aaaatacggctaggtacgaggcttggtgttgaattcggcacgaggcaacctgcagccctcatctccggccggcgagtagggccaggtgttgggagctcccacgtgggacaagatggtgtcttcggcgcagatgggcttcaacctgcaggctctcctggagcagctcagccaggatgagttgagcaagttcaagtatctgatcacgaccttctccctggcacacgagctccagaagatcccccacaaggaggtagacaaggctgatgggaagcaactggtagaaatcctcaccacccattgtgacagctactgggtggagatggcgagcctccaggtctttgaaaagatgcaccgaatggatctgtctgagagagcaaaggatgaagtcagagaagcagctttgaaatcctttaataaaaggaaacctctatcattagggataacacggaaagaacgaccacctctagacgtggacgaaatgctggagcgcttcaaaacagaagcacaagcgtttacagaaacgaaaggaaatgtcatctgcctgggtaaagaagtctttaaaggaaaaaagccagacaaagacaataggtgcaggtatatattgaagacgaagttccgggagatgtggaagagctggcctggagatagcaaagaggtccaggttatggctgagagataccaagatgctgatcccattcagcaagccccagggtgcttcccgggcccttctcatacacggtggtgctgtatggtcctgcaggcttgggaaaagcacgctggccagaaactaatgctagactgggcagaggacaactcatcacaattcaatatgggtctactcaggtgaggagctcagcgctggccgtgcagttgcgagtggtctcgggaggctgaatgggggggacttcccatctagccagccggaactgtcggtgggtttgagtgggacccccggggcgtgaatggggtgggaaaaaggcgcccgggtgaggggttccagcgtcacccggcatgggaccagggcggggtcatg

SEQ ID NO: 97219 - DNA, 849 bp, Homo Sapiens
  misc_feature (67)..(127): n is a, c, g, or t
cgcgggctccatgaacatgtcgtcgtacgtgggcgctggcatgagcccgtccctggcggggatgtcnnnnnnnnnnnnnnnnnnnnnnnnnnnnnnnnnnnnnnnnnnnnnnnnnnnnnnnnnnnnnatggggccgcacttgagtcccagcctgagcccgctcggggggcaggcggccggggccatgggcggcctggccccctacgccaacatgaactccatgagccccatgtacgggcaggcgggcctgagccgcgcccgcgaccccaagacctacaggcgcagctacacgcacgcaaagccgccctactcgtacatctcgctcatcaccatggccatccagcagagccccaacaagatgctgacgctgagcgagatctaccagtggatcatggacctcttccccttctaccggcagaaccagcagcgctggcagaactccatccgccactcgctctccttcaacgactgtttcctgaaggtgccccgctcgcccgacaagcccggcaagggctccttctggaccctgcaccctgactcgggcaacatgttcgagaacggctgctacctgcgccgccagaagcgcttcaagtgcgagaagcagctggcgctgaggaggcggaggcccgcggcagcggcaagaagcggcgcgaagccaggctcacaggtcatcggggaggcgcgggccggctccgagatcgcggacggtcgctaataagagccccggcagaacaggagggcggaacaaggagaccgggggagacccaagggccccggaaaagggggcacgaggcacacaggggcgaggaaggaaactcaccctaatttgggccccccgacatatctctg

SEQ ID NO: 97220 - DNA, 975 bp, Homo Sapiens
  misc_feature (324)..(382): n is a, c, g, or t
cctaacgtcgggcccgggtcatgcagggttgtggctgttaacttttaaactgccatgcactcggcttccactatgctgggagcggtgaagatggaagggcacgagccgtccgactggagcagctactatgcagagcccgagggctactcctccgtgagcaacatgaacgccggcctggggatgaacggcatgaacacgtacatgagcatgtcggcggccgccatgggcagcggctcgggcaacatgagcgcgggctccatgaacatgtcgtcgtacgtgggcgctggcatgagcccgtccctggcggggatgtcccccggcgcnnnnnnnnnnnnnnnnnnnnnnnnnnnnnnnnnnnnnnnnnnnnnnnnnnnnnnnnnnncgcacttgagtcccagcctgagcccgctcggggggcaggcggccggggccatgggcggcctggccccctacgccaacatgaactccatgagccccatgtacgggcaggcgggcctgagccgcgcccgcgaccccaagacctacaggcgcagctacacgcacgcaaagccgccctactcgtacatctcgctcatcaccatggccatccagcagagccccaacaagatgctgacgctgagcgagatctaccagtggatcatggacctcttccccttctaccggcagaaccagcagcgctggcagaactccatccgccactcgctctccttcaacgactgtttcctgaaggtgccccgctcgcccgacaagcccggcaagggctccttctggaccctgcaccctgactcggcaacatgttcgagaacggtgctacctgcgccgcagaagcgcttcaagtgcgagagcatggccctgaagaggcgcagggccccggagcggaaagggcgccgggcaaggccacagcaccggggggccggcggcaccaaaccggggcggccccgaagcgcccgcagagcacagggcggaagagcgccg

SEQ ID NO: 97221 - DNA, 911 bp, Homo Sapiens
  misc_feature (594)..(645): n is a, c, g, or t
gtccccccgatctggagccgcccgccgcctccccgagtgacctgtgaggcctggctccgcgccgccttctgccgctcccgcggcgcctgcggcctccttcagcgccagctgctttctcgcacttgaagcgcttctgcggcgcaggtagcaccgttctcgaacatgttgcccgagtcagggtgcagggtccagaaggagccccttgccgggcttgtcgggcgagcggggcaccttcaggaaacagtcgttgaaggagagcgagtggcggatggagttctgccagcgctgctggttctgccggtagaaggggaagaggtccatgatccactggtagatctcgctcagcgtcagcatcttgttggggctctgctggatggccatggtgatgagcgagatgtacgagtagggcggctttgcgtgcgtgtagctgcgcctgtaggtcttggggtcgcgggcgcggctcaggcccgcctgcccgtacatggggctcatggagttcatgttggcgtagggggccaggccgcccatggccccggccgcctgccccccgagcgggctcaggctgggactcaagtgcggccccatgcccgccannnnnnnnnnnnnnnnnnnnnnnnnnnnnnnnnnnnnnnnnnnnnnnnnnnnggacatccccgccagggacgggctcatgccagcgcccacgtacgacgacatgttcatggagcccgcgctcatgttgcccgagccgctgcccatggcggccgccgacatgctcatgtacgtgttcatgccgttcatccccaggccggcgttcatgttgctcacggaggagtagccctcgggctctgcatagtagctgctccagtcggacggctcgtgcccttccatctccctcgtgccaattccccccagcctgacctgccattggt

SEQ ID NO: 97222 - DNA, 960 bp, Homo Sapiens
ggctgctgcttttctgctcctggaagcggccaaggggggaagcggcgagctcaacatggagctttcagcggtgggggagcgggtgttcgcggccgaagccctcctgaagcggcgcatacggaaaggacgcatggaatacctcgtgaaatggaagggatggtcgcagaagtacagcacatgggaaccggaggaaaacatcctggatgctcgcttgctcgcagcctttgaggaaagggaaagagagatggagctctatggccccaaaaagcgtggacccaagcccaaaaccttcctcctcaaagcgcaggccaaggcaaaggccaaaacttacgagtttcgaagtgactcagccaggggcatccggatcccctaccctggccgctcgccccaggacctggcctccacttcccgggcccgggagggccttcgaaacatgggtttgtccccgaccagcgagcagcaccagcaccagcagcacctgccgcgcagaggcccctcgggaccgggaccgagaccgggatagggaccgggagcgggatcgagaaagggagagggagcgagagagggagcgggaacgtgagagggaacgagagcggggtaccagcagagtggatgacaagcccagctcaccgggggaccagctcgaagaagcgaggccccaagccccggaaggagctcccggagccctcaacagaggcccttaggcgaaaccagggccggcctcggagagtacctcaagggccaggaaggctggacgacaccccttccggggacaggaaaggttccaagccgggcacagggtgatcccagctaggcccgaaagaagtgactcggaacatggtgcagtgtggtgtgaacaggccttagcacagctgatgccagggcacactggtgtggacacctccgggcagggtataaagaccgggtgctatctgaggcaaagcagggtgcctaaatcca

SEQ ID NO: 97223 - DNA, 472 bp, Homo Sapiens
tcgcaccccaaggcgcacctgagaactcacacaggtgagaggcccttcgcctgcagctggcaggactgcaacaagaagttcgcgcgctccgacgagctggcgcggcactaccgcacacacacgggcgagaagaagttcagctgccccatctgcgagaagcgcttcatgcgcagcgaccacctgaccaagcacgcgcgccgccacgccaacttccacccgggaatgctgcagcggcgcggcgggggctcacggaccggctccctcagcgactacagccgctcagacaccagcagccccaccatcaacccgcccagctcgccctgagcccgccacaaccatgagcaaccgctcccacccaaaagtgagtccctgacctttccttttctaataagaaagaagagagagaacttgatgcaaagtccacgaaaaaacaatttttttcacctcaggtgtcaaagtaaatttgttcaag

SEQ ID NO: 97224 - DNA, 468 bp, Homo Sapiens
cttcttacctctgccaagagcctccagatgtgcctgcagcctagtccctgcccaagcttctcccccagccaccctctgcccctgtggtagagcccactataggcccaggcgccttacgtgcttctcccctggacctatgtgcatccctcacctgccagttatgtggctgccaagccccacaggctgtcatggtggctcttgccacacttcccttcctgagctgacctgacctcactgccacctcttgcattgggatcctgagggctggcccctgctcactgatgggccctcccaggcccgtcaagccctggtgaaggagcttagcttgtcttcttggcaattcacaatgcctcactccacaccctaaaactggagcgtcccctatggtctcctgctgtggcttgggtgccgggcgtctcccgcctccaggatctcctctcacctgcccccattaaagctctgccactc

SEQ ID NO: 97225 - DNA, 672 bp, Homo Sapiens
  misc_feature (44)..(44): n is a, c, g, or t
tttgagaaaattttggcctactatgatgttagtacataggagcnttggaaggtctacaagtgcatgcgtttgtcaaagacatgatggagcttgtcaagcccagcatcagcggggtggaccttgataagttccgcgagattctcctgcgtcactgcgactgtgaacaaggatggaaaaattcagaagtctgagctggctttgtgtcttgggctgaaaatcaacccataatcccagactgctttgccttttgctcttactatgtttctgtgatcttgctggtagaattgtatctgtgcattgatgttgggaacacagtgggcaaactcacaaatggtgtgctattcttgggcaagaagagggacgctagggccttccttccaccggcgtgatctatccctgtctcactgaaagcccctgtgtagtgtctgtgttgttttcccttgaccctgggctttcctatcctcccaaagactcagctcccctgttagatggctctgcctgtccttccccagtcaccagggtgggggggacaggggcagctgagtgcattcattttgtgcttttcttatgggctttctgcttagtctgaaaggtgtgtggcattcatggcaatcctgtaacttcaacatagattttttttgtgtgtgtggaaataaatctgcaattggaaac

SEQ ID NO: 97226 - DNA, 738 bp, Homo Sapiens
agttccccggagacagaagtagagccggaccgccggaaaccgtagatccggggaggtcggggccgcggtgaactccagttcaccaggacaggaagtgacagcggaacgccggaaaccgcagatccacggaggtcaggccgcggagagctgtagttccccggaaccggaagtgatggcggacctccggaaaccgtagattccgggcggtcggagccgccgggagctgtagttctcccgcggctcagagaagtaggcagagagcggacctggcggccgggcagcatggcggggctggagctcttgtcggaccagggctaccgggtggacgggcggcgcgccggggagctgcgcaagatccaggcgcggatgggcgtgttcgcgcaggctgacggctcggcctacattgagcagggcaacaccaaggcactggctgtggtctacggcccgcacgaggcgagtgggcgcgcgggatggggaatcgtgtggccgtgggagctgcggggcagccgggctgagcgctggctcggggacttgaggggcaacggccggcgcgcctcagtctacacagccgatgctcagcaccgcatctcactcggagtaaacgcaagtccttagtgtgctgcgcggtggtcctgcctttctcatcggcctctgtccctgcgccctccttcctctttgcggctcttcaacgtgctaggcactcccccactcgctccctctcctttcagctctactccg

SEQ ID NO: 97227 - DNA, 562 bp, Homo Sapiens
caggctagtacgaggccgggtgtgaatcggccgaggctagatggcggtggctgcggcggttggcgctgcgtagctgaggtcgaaaaggcggccactggggccgaggcagccaggaaacgtgtgggcctctctgctgcggtctccgagggccgaccgctgccggcggcgggtcgtgggggctgactgtcgctctgcctttgacaggagaggctgcttcttgtagaggaaacagctttgaagtgtggagcgggaaaggagcagtttctgagctgcaaaaactagtttctaaacagagagttaattgttaaatccagtatggccacaggaggaggtccctttgaagatggcatgaatgatcaggatttaccaaactggagtaatgagaatgttgatgacaggctcaacaatatggattggggtgcccaacagaagaaagcaaatagatcatcagaaaagaataagaaaaagtttggtgtagaaagtgataaaagagtaaccaatgatatttctccggagtcgtcaccaggagttggaaggcgaagaacaaagactccacatacgt

SEQ ID NO: 97228 - DNA, 1101 bp, Homo Sapiens
gccggtccggcgcgagcccccgtccggggccctggctcggcccccaggttggaggagcccggagcccgccttcggagctacggcctaacggcggcggcgactgcagtctggagggtccacacttgtgattctcaatggagagtgaaaacgcagattcataatgaaaactagcccccgtcggccactgattctcaaaagacggaggctgccccttcctgttcaaaatgccccaagtgaaacatcagaggaggaacctaagagatcccctgcccaacaggagtctaatcaagcagaggcctccaaggaagtggcagagtccaactcttgcaagtttccagctgggatcaagattattaaccaccccaccatgcccaacacgcaagtagtggccatccccaacaatgctaatattcacagcatcatcacagcactgactgccaagggaaaagagagtggcagtagtgggcccaacaaattcatcctcatcagctgtgggggagccccaactcagcctccaggactccggcctcaaacccaaaccagctatgatgccaaaaggacagaagtgaccctggagaccttgggaccaaaacctgcagctagggatgtgaatcttcctagaccacctggagccctttgcgagcagaaacgggagacctgtgcagactggtgaggcagcaggtgcatatcaacaatagctatccaaacatccagtggttcgaaagatgagttctgatggactgggctcccgagattcagcaagagatggaggccacggagaattgtcacctggagcagcgcacaggttaaggttgaggagcctcgagaccatcaggtctggcaaactctgtgtctgaccggcaccttatcttacatggcagtatacagtcggcatcaaagcctggaggacgcataactgagccctataggggttgggcgcacttcctatttgcatgcaccggggaaatcatggagactttcgtgtatttttcgggacgttgcaggaggccttggctacccgccgttatgccgtcacggacgcaaacccggtaaaacaaggccggataaacccggggaacacacaaatccgaggccctcaaa

SEQ ID NO: 97229 - DNA, 730 bp, Homo Sapiens
taggctaggtagcgaggccgggggggaatcggcacgagggccgcgagaacagagtggacggagcgtaggagagaccgaaaaggctgggggtgggagtagcggatttgaagcacttgttggcctacagaggtgtggcaagcagagcacctcagaactcaggcgtactgcccgccgcccgagccctgcgagggccgatagcgagggtgtggcccttatctgcacccagcagagcgccggcggggtttccgcatgggccggaccgtggtcgtgctgggcggaggcatcagcggcttggccgccagttaccacctgagccgggccccctgcccccctaaggtggtcctagtggagagcagtgagcgtctgggaggctggattcgctccgttcgaggccctaatggtgctatctttgagcttggacctcggggaattaggccagcgggagccctaggggcccggaccttgctcctggtttctgagcttggcttggattcagaagtgctgcctgtccggggagaccacccagctgcccagaacaggttcctctacgtgggcggtgccctgcatgccctacccactggcctcagggggctactccgccttcaccccccttctccaaacctctgtttgggctgggctgagggagctgaccaagccccggggcaaagacctgatgaagactgtgcacagttttgccagcgccgctggactgaggtggcgtttttagcag

SEQ ID NO: 97230 - DNA, 1003 bp, Homo Sapiens
gagaccgaaaaggctgggggtgggagtagcggatttgaatgcacttgttggcctacagaggtgtggcaagcagagcacctcagaactcaggcgtactgcccgccgcccgagccctgcgagggccgatagcgagggtgtggcccttatctgcacccagcagagcgccggcggggtacggtcttaggacctcgatctccttctccctcattttctctcatccctacctattgtgggtttccgcatgggccggaccgtggtcgtgctgggcggaggcatcagcggcttggccgccagttaccacctgagccgggccccctgcccccctaaggtggtcctagtggagagcagtgagcgtctgggaggctggattcgctccgttcgaggccctaatggtgctatctttgagcttggacctcggggaattaggccagcgggagccctaggggcccggaccttgctcctggcatgtggagagcaggtttctgagcttggcttggattcagaagtgctgcctgtccggggagaccacccagctgcccagaacaggttcctctacgtgggcggtgccctgcatgccctacccactggcctcagggggctactccgcccttcaccccccttctccaaacctctgttttgggctgggctgagggagctgaccaagccccggggcaaagagcctgatgagactgtgcacagttttgcccagcgccgccttggacctgaggtggcgtctctagccatggacagtctctgccgtggagtgtatgcaggcaacagccgtgagctcagcatcaggtcctgctttcccagtctcttccaagctgagcaaacccatcgtttccatattactgggcctgctgctgggggcagagtcggaccccacagccagactcagcaactcattcgccaggccttggtgagcgctggagccagtggtcacttcgtggaggtctaagagcatgttgcctccaggccttgaaaaccacctgactaataaggg

SEQ ID NO: 97231 - DNA, 619 bp, Homo Sapiens
aggctaggtacgaggctgggggttaatcggcacgagggtgccctgtgagaccgccaagatggtggtgggcgcgttccctatggcgaagctgctatacttgggcatccggcaggtcagcaagccgcttgccaaccgtattaaggaggccgcccgccgaagcgagttcttcaagacctatatctgcctcccgccggctcaactgtatcactgggtggagatgcggaccaagatgcgcatcatgggcttccggggcacggtcatcaagccgctgaacgaggaggcggcagccgagctgggcgcagagctgctgggcgaagccaccatcttcatcgtgggcggcggctgcctagtgctggagtactggcgccaccaggcgcagcagcgccacaaggaggaggagcagcgtgctgcctggaacgcgctgcgggacgaggtgggccacctggcgctggcgctggaagcgctgcaggcgcaggtgcaggcggcgccgccacagggcgccctggaggaactgcgcacagagctgcaagaggtgcgcgcccagctctgcaatcccggccggtccgattcccacgcagtgcctgcgtccaagaaataggagcttgctggatggaacctg

SEQ ID NO: 97232 - DNA, 931 bp, Homo Sapiens
  misc_feature (906)..(906): n is a, c, g, or t
caaggaagcgaggcctgggtggcgaattcggcacgaggatcatccactgcaccctggcctgcaggccctggctgcgcccggctgccctggtgggctacactgtgttgtcgggtgtggccggctggcgtgctctcaccgccccctccaccagtgctcggctccgggcatttggatggcaggctgctgcccgcctactggtatttggggcccggggagtgggtctgggttcaggggctccaggctccctgccctgctacctgcgcatggacgcactggcgctgcttggaggactggcaaatgtaacccgtctgcccgagcgctggggacctgcccgctttgactactggggcaactcccaccagatcatgcacctgctgagcgtgggctccatcctgcaactgcacgccggcgtcgtgcccgacctgctctgggctgcccaccacgcctgtccccgggactgagctgccatgccagcctgcccacagcagcctcctagagttagcaacaccaggtgttcctcccaactcgtctgcaaggggctggctccttggatgcttccagctcatgagatgtctcagcaggagccctgttcacccgttcttccctgtggactgacctcttccacccacgccgtggcgctccaacttccttccctgccttttccctccaagctcctattttactgtgtcagctggaaggaaacctttccctcttgggacctctttaccctctgtgacctgtggggttagaccagagagggactctggggtcacgtcttgctctgagagttcaagtcctgccaggccgccagcccagagcctcctcaccctatcctggtcctcccaccaggcctgtggccagtcttcctgatctccatctttctgccctgcataccagccctcccancagccacaagcttgccccgccctgg

SEQ ID NO: 97233 - DNA, 859 bp, Homo Sapiens
aacgatacggtaggtacgaggctgggtggtgaattcggcacgagggttcaggacactgggtccccttggagcctccccaggcttaatgattgtccagaaggcggctataaagggagcctgggaggctgggtggaggagggagcagaaaaaacccaactcagcagatctgggaactgtgagagcggcaagcaggaactgtggtcagaggctgtgcgtcttggctggtagggcctgctcttttctaccatggcagcccagggctatggctattatcgcactgtgatcttctcagccatgtttgggggctacagcctgtattacttcaatcgcaagaccttctcctttgtcatgccatcattggtggaagagatccctttggacaaggatgatttggggttcatcaccagcagccagtcggcagcttatgctatcagcaagtttgtcagtggggtgctgtctgaccagatgagtgctcgctggctcttctcttctgggctgctcctggttggcctggtcaacatattctttgcctggagctccacagtacctgtctttgctgccctctggttccttaatggcctggcccaggggctgggctggcccccatgtgggaaggtcctgcggaagtggtttgagccatctcagtttggcacttggtgggccatcctgtcaaccagcatgaacctggctggagggctgggccctatcctggcaaccatccttgcccagagctacagctggcgcagcacgctggccctatctggggcactgtgtgtggttgtctccttcctctgtatcctgctcatccacaattgaaccttgctgattgttggactccgcaactgggacccatgccctc

SEQ ID NO: 97234 - DNA, 1103 bp, Homo Sapiens
aacgctagtatgaggcctgtgtgtttaatacggcacgaggcgcactactaccctagcccgatggcatctgaacttatcagtttaaataaacacaaagggaaaatgggaaaataataataatactatcatgtgatggcatttacccgggctcctaaagcagctgacttccttttgctgcgtctgagacgaggcatctatttcctcaaaaggccaggagcccgggcctccctccctgtctactctggtctctcatatagaaacttgcacctggcccatgccacaaagaactgggtgcccaggggcacttaggacgctgggtgatgtcatgagagggtcatgggggtggttggcctaggagcccagccagccacagcaggaggaggtagggagctgggcatgcaccttggttaagccccaacccctatggcaaagtctctgccaacactcctctgaaggctcatttaccagtctccagtggacccggagtgtctaaatagagaactacccacctgccacatagaaagaaatgctctgtatggcagggcaggcctacctgggaaccagtcaggaaccagtgctctggaaggcccgggaccatattcttccctgaccatgtccatgtgaccttgacaggtcagacctctgtagctcaatgtcaccctggctatggaaggggctggtaactgacggtaaccgccctccacctactagcacacatacaacacctatccccccagagaatcacagagatggtagcaagctttgtaactcaccaaggtcaatgaggaaacagtttatctttcctggaactaaggtttatcacacgttccaactactatactcagcacactccgccgagcgctacgacccataggccaggcccaaacagagaatacgtcccagcggacactaaccgagactcatagcacactccctctgggttatacatgtcaaaactaacaaatgacacagtaagcttccgtcatgcgcatgcagcacgatgtgaaaacagtgaagccatattaggtgttgccctactgtcatgggcccctcacacgtttactgctgtagcaacagagccaacacactaacatggcgcactt

SEQ ID NO: 97235 - DNA, 852 bp, Homo Sapiens
acttacggctaggtagcgagtgctgggtggtgaattcggcacgagggagcgcttgaggttgagtttgaggggaagatgtggagcgtgtggttcttgtgtacatgtcatgatgactgtgtgcctgggtggcagcgtctattcaactctcacctctgcagctcagggacctcgtggagacctcaccaaacctgcagggacctccgtgtcactaagtgtgctgtgtaaatgccccatctcatgggggagagacagccacggaggccttcctctgaccatagcttgatggactggcggttgctacaagatccggctccgagaatgtacctgtgtctgagcctggaagaggctcgggtctggctaccgggctgtggtatcaccattcccgtgatctgaggccatggaagaggctcgggtgtccggcatccgaagcgatggatttcccattacaccgtgatctgagatctggaagagtgctcgggatccggatccagagacgtggttcaccttacccgatgtcatggagacccttggagaagaggggctctaggggtcccggattccgacgaccgtgggagaccactatcaacggtggacatgaggcacgtggaaggagtgcatctgggtgttcctggggtccttgggagccggttgggatagaaccattacaccccggagctcattgaaggcccttggaagagagggatccggggattctgggtaccttgggcagtgggataccacaagagaacatgagccctgggagaaggaattcgggatacggggattccagggatcacagaacagatgtaccctatgatttagaacttgaaaaaaagatcaaaatgaagaatg

SEQ ID NO: 97236 - DNA, 900 bp, Homo Sapiens
  misc_feature (607)..(607): n is a, c, g, or t
  misc_feature (610)..(610): n is a, c, g, or t
  misc_feature (636)..(636): n is a, c, g, or t
  misc_feature (719)..(719): n is a, c, g, or t
gcggccgcttccgactcagcctcttcagcgacctgcccgaggacacggagttgcagaggaagctagaccatgagatccggatgagggaaggggcctgtaagctgctggcagcctgctcccagcgagagcaggctctggaggccaccaagagcctgctagtgtgcaacagccgcatcctcagctacatgggcgagctgcagcggcgcaaggaggcgcaggtgctggggaagacaagccggcggccttctgacagtggcccgcccgctgagcgctccccctgccgcggccgggtctgcatctctgacctccggattccactcatgtggaaggacacagaatatttcaagaacaaaggtgacttgcaccgctgggctgtgttcctgctgctgcagctgggggaacacatccaggacacagagatgatcctagtggacaggaccctcacagacatctcctttcagagcaatgtgctcttcgctgaggcggggccagactttgaactgcggttagagctgtatggggcctgtgtggaagaagagggggccctgactggcggccccaagaggcttgccaccaaactcagcagctccctgggccgctccctcanggnaggcgtgtccgggcatcctggaaagnggctgggggggttccagggagcagtcccatcttgctccccacccaagtttggtgggggggtcctcggtaacacccttcttggntcacaaccacactcacccctggcagcaggggcaaagatgggattccgcacacatggacctcaccccttgcccacgtcatgtagggaagaacccttgcctgggttggcccctttttatggggaaaaccgggggggtttgcccggtccggggaaaatttcaacccctcttctgggaatggaat

SEQ ID NO: 97237 - DNA, 1092 bp, Homo Sapiens
ggggcatgcgcgagggcagcgaccgcgactcagtctccgcagagcccgggcgggagtagctggtggaccccgttgagctgccgaacttccgggactcccccgcgaccccttcccagcttcccgtccgctccgccgcagcgattgtctcggtgggttgattcggcacaaaccgcccgacccaggggccggtgcgcgtgtggaaggggaagcactcccctcgtggtcgcctggaggtgcgctggaggagggggtgacataaccagggactcgaggtccgccgtgggaatgatccacgaactgctcttggctctgagcgggtaccctgggtccattttcacctggaacaagcggagtggcctgcaggtatcgcaggacttccctttcctccaccccagtgagaccagtgtcctgaatcgactctgccggctcggcacagactatattcgcttcactgagttcattgaacagtacacgggccatgtgcaacagcaggtgggtcctgttctctgtgggtgtacacctctagagggcaggagctatgtcaagctttcacctctagagggcaggagctatgtcaagctttcagtgaatttatcggtaattcatgtgaaataagttatggatttctcatcactagaaatattcaagtgaaggcaaggcctctaattggtttgtttgtataacttttaaaagaaacaagcctgataatgtctttctcaggtttcagggcctgagctgagaagttggcttctgtttgtttgatttcaggatcaccatccatctcaacagggccaaggtgggttacatggaatctacctgcgggccttctgcacagggctggattctgttttgcagccttatcgccaagcactgcttgatttggaaacaagaggtaagaaccggcgagatattagcgaaaccaccctctgggacaggtagattagggggcatgtcttggaatctgaaaatgcccttttgataagaatcagggtagttaagagttgaaccagttggccttgcttgccgggaaggtaccgggttccctcatgattgcccaactgggatccaagggggtacgaatcctggaagagc

SEQ ID NO: 97238 - DNA, 1081 bp, Homo Sapiens
  misc_feature (937)..(937): n is a, c, g, or t
ggcacgagggagaaaagactgcgaggtggccgcagctgtggccggagaggtgggagtcggagcgaggccctctcgggggagcagggtgaacgccggccactctaggatcctcactcggggagaggaggcatagctcgcggtgtcacctccagccgcaacgtactccggcacaaagaatgaaccagcagtggaagagaaaatactgtaagctggctgactgctggtgaagaaaatgctttatttttgtggcaggcatctgtgggatctgtaatagaaatgatggctggctgtggtgaaattgatcattcaataaacatgcttcctacaaacaggaaagcgaacgagtcctgttctaatactgcaccttctttaaccgtccctgaatgtgccatttgtctgcaaacatgtgttcatccagtcagtctgccctgtaagcacgttttctgctatctatgtgtaaaaggagcttcatggcttggaaagcggtgtgctctttgtcgacaagaaattcccgaggatttccttgacaagccaaccttgttgtcaccagaagaactcaaggcagcaagtagaggaaatggtgaatatgcatggtattatgaaggaagaaatgggtggtggcagtacgatgagcgcactagtagagagctggaagatgctttttccaaaggtaaaaagaacactgaaatgttaattgctggctttctgtatgtcgctgatcttgaaaacatggttcaatataggagaaatgaacatggacgtcgcaggaagattaagcgagatataatagatataccaaagaagggagtagctggacttaggctagactgtgatgctaataccgtaaacctagcaagagagagctctgctgacggagcggacagtgtatcagcacagagtggagcttctgttcagcccctagtgtcttctgtaaggnccctaacatcagtagatggtcagttaacaagccctgcaacaccatcccctgatgcaagcacttctctggaagactcttttgctcatttacaactcagtggagacaacacagtgaaaggagtcataggggagaaggagaagaaga

SEQ ID NO: 97239 - DNA, 940 bp, Homo Sapiens
aggctaggtacgaggcctggtgttaaattcggcacgaggagaacagagaggactgttgcagggtgcgggcagcacaattccacatggcccagctcctgcgttgggcctgtgagccagcggagggagtgcctggccctgctggggagctggagcggcagaagctgatgcgagcagacctgcaccaccagcacagcgtgctgcacagggcgctgcaggcatgggtgacttaccagggcagggtgcgaagcatcctccgggaggtggcagccagggagagccagcacaacaggcagctgctgcgcggggcattacgtcgctggaaagagaacaccatggcccgagtggatgaagccaaaaaaacctttcaagcaagtactcattacagaaggaccatatgttccaaggtcctggtccagtggcgggaagctgtgtcagtgcagatgtattaccgacagcaggaggactgtgccatctgggaggcccagaaggtgctggacaggggctgtctgcggacctggtttcagcgctggtgggactgcagccggaggtcagcccagcagagactgcagctggagagggcagtgcaacaccaccaccggcagctgctgctggaggggctggcccggtggaagacgcaccatctgcagtgtgtcaggaagaggctcctgcacaggcagagcacccaactgctggcacagagactcagccggacctgcttccgccagtggagacaacagctggcagccaggaggcaggagcagcgggcgacagtgcgggccctgtggttctgggccttctcgctgcaggcaaaggtgtgggccacgtggctggcctttgtactggaaaggaggagaaagaaggcgcggctgcagtgggcgctccaggcctaccaggggcagtcctccaggagggtgcacgcggctctgcgcttgcagcaagc

SEQ ID NO: 97240 - DNA, 538 bp, Homo Sapiens
acaggtggggccgaagggactggtgatgccgtgttgggggaaaaggtgcttgaagaagctctgttgtctcgggagcatgtcttggaattggagaacagcaagggccccagcctggcctctttagagggggaagaagataaggggaagagcagctcatcccaggtggtggggccagtgcaggaggaagagtatgtagcagagaagttgccaagtaggttcatcgagtcggctcacacagagctggcaaaggacgatgcggcgccagcacccccagtcgcagacgccaaagcccaggatagaggtgtcgagggagaactgggcaatgaggagagcttggatagaaatgaggagggcttggatagaaatgaggagggcttggatagaaatgaggagagcttggatagaaatgaggagggcttggatagaaatgaggagattaagcgggctgccttccagataatctcccaagtgatctcagaagcaaccgaacaggtgctggccaccacggttggcaaggttgcaggtcgtgtgtgtcaag

SEQ ID NO: 97241 - DNA, 908 bp, Homo Sapiens
ggctagtacgagggctggtgttgaattcggcacgagggggagcatgtcttggtggaattggagaacagcaagggccccagcctggcctctttagagggggaagaagataaggggaagagcagctcatcccaggtggtggggccagtgcaggaggaagagtatgtagcagagaagttgccaagtaggttcatcgagtcggctcacacagagctggcaaaggacgatgcggcgccagcacccccagtcgcagacgccaaagcccaggacagaggtgtcgagggagaactgggcaatgaggagagcttggatagaaatgaggagggcttggatagaaatgaggagggcttggatagaaatgaggagagcttggatagaaatgaggagggcttggatagaaatgaggagattaagcgggctgccttccagataatctcccaagtgatctcagaagcaaccgaacaggtgctggccaccacggttggcaaggttgcaggtcgtgtgtgtcaggccagtcagctccaagggcagaaggaagagagttgtgtcccagttcaccagaaaactgtcttgggcccagacactgcggagcctgccacagcagaggcagctgttgccccgccggatgctggctccccttgccaggcctaaccagcagagggctcaccagcaaacaaagacctacgtgagctgcctgaagagccttctgtccagacccaccaaggacagtaagccaaatatctctgcacacacatctccctggctcctgcctggactgaccacacccagtgaaggagttgccagaccgggcaggcatcctggtggaagatgcactgtgtcccttgatgtcgacagcagcaagtgtccttgggggtctccagacactgtcaattttcagcttcggctggaga

SEQ ID NO: 97242 - DNA, 801 bp, Homo Sapiens
cacgtctgttattcgtggggaaaaggtgggccaaaccctgctgaaacagattctacaaatactggcataaaggggtggcattattgtctttatatcggtaaatttactgcatatagataatatccaggatgtgtggctcattctttgcagctcgtttctatactgtttgtaatatacagtttttgtaaccatatgattgaaaagaagaaagtctatgcttaggccagtcagtacacccaatgtttaacaaaataacatattcttgctttcacaaatatagttgaacaagatttccctaaaaattccaccaggattaatctctaaaattctagtctctgatttgcaaatgcacatttgtcactgaataatggaattatgtataacaagccaaacattcttatctttagacaaccatagaactgtcccacaaaatatttctaagcttatttctaactattaggaggaatgtgcttttccatctaaaatactcaccaaaatatagttaattgtggctttatgaagcttaacagtctcattacagatttagtttaccaatcaacagcatgtctactgcttggatccatacaaaactatcggttcaagttgatgtgacaagggaagggagcaccagatgacacataaatctgtctgattctatgcctgtacttccaacaaacttactgtcagagaatatgacctaaatccattttctaaactgttttcatgtgttgcaaattattctagtcaactgctgttttatgtcatactctgtgtaatctctgattaaatttaatatactgc

SEQ ID NO: 97243 - DNA, 501 bp, Homo Sapiens
catggctcaggcccccccagctctgtggggggcctgtaccgggacatgggggcccaggggggaaggccctccctcatcgccaggatccctgtggccagaatcctgggggacccggaggaagagtcctggagcccctccctgactaacctggagaaggtggtggtcacggacgtgacctcaaactttttgaccgtcaccattaaggaaagtaacacggcccaaggcttttttaaagagaaaagatgaatgctgggtgggtgtgtccaggaggagagcaggggagagagtgagcgtgagcttggcatagtgatttttatttctgggtgggatgtggccttttggcggggcccgtccctgatgtcacccccaccccaccagcccctttcatccctccttcctccccctcagtttttgttggaaagattatctctagagttatattttctattagatgtaaatatgttatttaagaaaaatatctaaatatatatatttcaactc

SEQ ID NO: 97244 - DNA, 598 bp, Homo Sapiens
tttttttcaaggttcaaatactttttattagacacggccaggcagagaagaccatgggagttcccgaggggccccagctttcaagggcgacgggagagacacaggataaaaggttaaaagtgcagaggcagagtctggggctcaggttgggtctagggtgtcctcaaacaggctgaggaggttccgaggctcaaaggaggggaaggagccccaaggaggctctgagttgatgtcacttaggtccagggcatccctgggtgtgcacctgctccggggggtggaggtgctccccacagtccgggccaggacagcatcaggggagagtgaaggcctgcaggagggcaggcgagacaaggagggtgtccagggctagggagtgccggatgaaaccagctctgtccctgtgcaggctccaggctcccgcctgacaaacaggcagggagccacagtcagggacaataaaaacttggtgcactctgaaagcagcacttggacagccttcaaagtccttccatctggctgcactccaaggccccctctgtccttttcagaacacatggacttggaggcagatttgaaataaacttttagtaaatgt

SEQ ID NO: 97245 - DNA, 538 bp, Homo Sapiens
ccacacccaagatcaggggccctggggacggcaagtgaataaagcacatttccacccaattttgtcatccgagagagagcacaaactgcaggcccttgttgcagctgaaggaagaccctacagagaatggaattgagagtggagacaggacacttcacaggacacttgagcacagtcaagattttattcacacttttggttcctgtgttttatatcgaagacttagctatgaattgctatctaaatctcagagcttagaagccaacccagtgactagaccttccagtgaagaaagtgatctcaagaggtccagggacttaacagccaagccacaccacccgacaggttcttctgtgacaccgagagatctaacccaaggcctgggttatgtcttagtcgagacatcatcatctgagaagcaccacatcctttcagacacatcctcggacacacatgcggtcttggtgcccccaggttcaatcctgcgttagctcttttgatgagaaggaaataaaccaaaccagccacttgcaaaaaa

SEQ ID NO: 97246 - DNA, 1774 bp, Homo Sapiens
ctggcgccattacctgaagttctcctccagcgtttccgcaccctctccgattagcggtcccaggagtttccaaggtaaccgcgcagtagggcggatctcattaggcggaaagcgaaacccggaagtgacgctcttaccgggtgtcagcagcgagagggttcgaagatggcggcgcgcaagggtcggcgtcgcacgtgtgaaaccggggaacccatggaagccgagtccggcgacacaagttccgagggcccggcccaggtctacctgcccggccgggggccgccgctacgcgaaggggaggagctggtcatggacgaggaggcctatgtgctctaccaccgagcgcagactggcgccccctgtctcagctttgacatagtccgggatcacctgggagacaaccggacagagcttcctcttacactttacttgtgtgctgggacccaggctgagagcgcccagagcaacagactgatgatgcttcggatgcacaatctgcatgggacaaagcccccaccctcagagggcagtgatgaagaagaagaggaggaagatgaagaggatgaagaagagcggaaacctcagctggagctggccatggtgccccactatggtggcatcaaccgagttcgggtgtcatggctgggtgaagagcctgtggctggggtgtggtcagagaagggccaggtggaggtgtttgcgctgcggcggcttctgcaggtggtggaggagccccaggccctggcagccttcctccgggatgagcaggcccaaatgaagcccatcttctccttcgctggacacatgggcgagggctttgcccttgactggtccccccgggtgaccggtcgcctgctgaccggtgactgtcaaaagaacatccacctctggacacctacggacggcggctcctggcacgtggaccagcggccattcgtgggccacacacgctctgtggaggacctgcagtgggtcacctgactgagaacacggtgtttgcctcctgctcagctgacgcctccatccgcatctgggacatccgggcagcccccagcaaggcctgcatgatcaccaaagccaccgcccatgatggggacgtcaatgtcatcagctggagccgacgggagcccttcctgctcagtggcggggatgatggggccctcaagatctgggaccttcggcagttcaagtctggttccccagtggccacctacaagcagaacgtggcccccgtgacctccgtcgagtggcaaccccaggacagagggggtctttgcagcctcgggtgcagaccaccagatcacacagggggacctggcagtggagcgggaccctgaggcgggcgacgtggaggccgaccccggactggccgacctcccgcagcagctgctgttcgtgcaccagggcgagaccgagctgaaggagctgcactggcacccgcagtgcccagggctcctggtcagcacggcgctgtcaggcttcaccatcttccgcaccatcagcgtctgaggcgtcccactggctctgatcttgcttcctgcttggaaactgaagtcgaattgggctcccctggaaggggttcattcaggtctgttgactgagactggccggcctgtgggctgccgtgatggattctgtttgacgtattgttctctagaaggcctggctctgatccagtgacccctcctccctgactttagaggctggtgctgtgtcgggaggaaggtcagggctcctgagcagcaataaaggaccaggaagaggcctgaggtgt

SEQ ID NO: 97247 - DNA, 255 bp, Homo Sapiens
caggacccagttttggctgctggttcccagcaggggactcgggggatatacagtggctgcaccaaattggaggtgtgggttcctccaacacaatttgcttctgcccgttgtcttcctgccagctgggtttggccaggatttctccgtgtgggggatacatgcgaccctctcccctcctccctgactttagaggctggtgctgtgtcgggaggaaggtcagggctcctgagcagcaataaaggaccaggaagaggc

SEQ ID NO: 97248 - DNA, 2022 bp, Homo Sapiens
gtgacggggccccggctcagcaccccgtgagagctccctccccggccttgttttgctctggcatcgccgccgggggagggagcgagggggccgggcaccgggcgcaaaggcagggggatggccatggaagggttgaggggccccgtcggacagagggcccagccgtgatccagcgacgggtttggggctccgggaggggtgggggggcagcgggcggcggcagcagtggccgcacatctggatggaagcgagctttgtccagaccaccatggctctggggctgtcctccaagaaagcgtcctctcgcaacgtggctgtggagcgtaagaacctgatcaccgtgtgcaggttctctgtgaaaacgctgctggagaagtacacagcggagcccatcgatgactcatcggaggagtttgtcaattttgcagccattttagagcagatcctcagccaccgcttcaaagcctgtgccccagcaggtccagtgagctggttcagctcagacgggcagcggggcttttgggactatatccggctggcctgcagcaaagtgcccaacaactgtgtgagcagcatcgagaacatggagaacatcagcacagcccgggccaagggccgggcatggatccgggtggcactgatggagaagcgcatgtcagaatacatcaccacggctctgcgtgacacccggaccaccagacggttctatgactctggagccatcatgctgcgggatgaagccaccatcctcaccggaatgctgatcggacctgagcgccatcgacttcagcttctgtctaaagggggaagtcctggacgggaagacccccgtggtcatcgattacacgccctacctaaagttcacgcagagctacgactacctgacggacgaggaggagcggcacagcgccgagagcagcacgagcgaggacaactcgcccgagcacccgtacctcccgctcgtcaccgacgaggacagctggtacagcaagtggcacaagatggagcagaagttccgcatcgtctacgcgcagaagggctacctggaggagctggtgcgtctgcgcgagtcgcagctgaaggacctggaggcggagaaccggcggcttcagctgcagctggaggaggcggcggcgcagaaccagcgcgagaaacgggagctggaaggcgtgatcctggagctgcaggagcagctgacaggtctgatccccagtgaccacgcccctctggcccaggttccaaggagctcactacacccctggtcaatcaatggccctcactgggaacgcttaatggggccgagggcgccagcaactccaagctctaccggagacacagcttcatgagcacggagccgctgtcagctgaagccagtctgagctcggactcccagcgcctgggaagagggcacgcgggacgaggagccctggggtcccatcgggaaggaccccaagccctccatgctgggcctctgcggctccctggcctccattcccagctgcaagtccctggcgagcttcaaatccaacgagtgcctggtgagcgacagtcccgagggcagcccagcactgagccccagctgaggaacagcatgggcagtgccagccccacctgccaggggccatggacacctgccacctttcttcaacaagagtcccccaatccaggctacccttccagagaacgcttacccacccagccagggttctctcggggaagatctcgtctgctcaccttagctttctgcccttgccagcacgggctgcggaagaaagcacgctgggccaggaggcaggggtgcccaagccacagggagcccctggggaagcctgctccattcttctggtgaccttggcgctccttcactcatctcccctgccccctcaggaactggtggcccagcttccacacccccacctcccagtctatagcctctccatctgtctgtgtatggcctggagtcactccttcctcagcccccagggcaagagagctcaaataaaaaccagaggactgaaaaaa

SEQ ID NO: 97249 - DNA, 800 bp, Homo Sapiens
ccagtactctacggtttaaggtagcgaggcctgggtggcgaattcggcacgagggacaagctggagacagcgccaagatgcggcgctacaggatcgggggcttaaaacactggaaaacctgctcgcctccatccgtaagggcaatgccattgacgaatgcggacatcccgccgccagtggccataggaaaaggcccggcgtccacgcctacctacagccctgcacccacccagccggcccctatgaatcgcgtctagccccagagcccagggtcacccgtggagggaccttctgccaacgccgccagactcatctccaggcttggctaagccccgagatgcccccaggtccctgcagccctggccctctggcccagttgcagagccgccagctgcgactacaagctggctgccctccacgccaagcatgcagggagataccactgtctgccgctagacacttccgcgtggctaagagctttgatgctgtcttgagatggccctgagccggtggtgagcccgtggagcctctcctgtcctgcacccatccaccagaacaggtgcaaacgaagagaaacacacggtaaacgaaccaggaagagaaggctcgaaaacaacgaagacagtagagaagcatagagacacaaccacagcaggaatcgaggaaacgaccacgcccacggaaagaagccaagaggccgatacggaaaggcaggcaacagaggaggacaccggacagaaagtcccccgggcgaaccaaccccgacgacggacgcgagggaaacaccccaaggaccaaga

SEQ ID NO: 97250 - DNA, 589 bp, Homo Sapiens
tgctggtctgcttcccatgcctgcagccggcgctctgcaacctgggcttccagctcctgcttcctggccgatttcagcttttcactctcctctttctcgcgacgagccaactctctcacctcctcaagatttcgaataagttgctccctgtgtttcagggattcctcttgtgcccgtcggttctgctcaatcttctcttgtatttgctgttgtctccctgtcagaacctcgctcatcagtctgtcccgtgcgctgcgctctcgggcccactctgcctctctcttttcccacatctccttggcctcctccctcagcagcatctgcagctctgcctcccgcgcccgctccagctgcagctgctcctcaatggcctgcttcatccaggccacatcggccatgacctgctcccgcctggccaggtggaggcgctggctctcgtcctccttctcgaggagggcctgcaggatccgcctgtctgcctccagctcctcttggatctgctgtgtgcgtctgctgagttgagcgttatactgatatctcaagaaacgcctgaaggagaatcaaatgtgggctaccttcagtatctcgg

SEQ ID NO: 97251 - DNA, 740 bp, Homo Sapiens
  misc_feature (349)..(425): n is a, c, g, or t
gtgactcggcacgagggatcccaaggaggcaatctgtcaggcgccgcccgggcggcagtatgcctgagggggtcctccgtgttcgcgcctcccgccgcctgcactgaaaggtctgtacctgagcctggatacttgaacagaggcagacactgcggctcaaaaccccaagggtaggtgcctattgtgcggagtctcggaacgcctgtctggaagaagagttccggcggctccccgaacgcttggagaaagcgcttggatgcagttgcaggaatatcctagctctgagacaaaaattgggaacctcagcatgagtttgtcacctgaatgaaataaaaaaaatcacgttgannnnnnnnnnnnnnnnnnnnnnnnnnnnnnnnnnnnnnnnnnnnnnnnnnnnnnnnnnnnnnnnnnnnnnnnnnnnnttcaggaattcaagactggcttgagcaacatagcaagacttcatttcaaaacaaacagaaaaaagccaccaccttcagtatttcttgccaaagcaaaggagccatttgttctttacgatggtcaggaaacggaagcatcaagggtcatcaaatgaaaaattttcagcatttcagcctctctgctcagggaaatacctgaatctagaatatcacaacatgagccaaaaccgccccatttctcatgccacatgtcactcttaacacagttactcacctcgagctggtggctttggggctgatatcctttggagggcg

SEQ ID NO: 97252 - DNA, 790 bp, Homo Sapiens
  misc_feature (278)..(299): n is a, c, g, or t
cagcctttctggcaggtcctcccctctcttgtcagatgcccgagggaggggaagcttctgtctccagcttcccgagtaccagtgacacgtctcgccaagcaggacagtgcttgatacaggaacaacatttacaactcattccagatcccaggcccctggaggctgcctcccaacagtggggaagagtgactctccaggggtcctaggcctcaactcctcccatagatactctcttcttctcataggtgtccagcattgctggactctgaaatatcccnnnnnnnnnnnnnnnnnnnnnntcagaaccctgccatggaactgtttccttcatcatgagttctgctgaatgccgcgatgggtcaggtaggggggaaacaggttgggatgggataggactagcaccattttaagtccctgtcacctcttccgactctttctgagtgccttctgtggggactccggctgtgctgggagaaatacttgaacttgcctcttttacctgctgcttctccaaaaatctgcctgggttttgttccctatttttctctcctgtcctccctcaccccctccttcatatgaaaggtgccatggaagaggctacagggccaaacgctgagccacctgcccttttttctgcctcctttagtaaaactccgagtgaactggtcttccttttgggttttttacttaactgtttcaaagccaagacctcacacacacaaaaaatgcacaaacaatgcaatcaacagaaaagctgtaatgtgtgtacagttggcatggtagtatacaa

SEQ ID NO: 97253 - DNA, 546 bp, Homo Sapiens
atctgtgactcccggacgaccggcgcgttttggcagaggtggaaggactttgaggtccggcatggcaatgaggacaccatcaaggaaatgctgggtatccggcgcagcgtgcaggccacgtacaacacgcaggtcaacttcatggcctcgcagatgctcaaggtctcgggcagtgccacgggcaccgtgtctgacctggcccctgggcagagtggcatggacgacatgaagctgctggaacagcgggcagagcagctggcggctgaggcggagcgtgaccagcccttacgcgcccagagcaagatcctgttcgtgaggagtgacgcctcccgggaggagctggcagagctggcacagcaggtcaaccccgaggagatccagctgggcgaggacgaggacgaggacgagatggacctggagcccaacgaggttcggctggagcagcagagcgtgccagccgcagtgtctgggagcctgaaggaagactgacccgtccctcccccctcgccacctccgtcttccgcagcctaggggatcctctacatc

SEQ ID NO: 97254 - DNA, 398 bp, Homo Sapiens
tgaaccaccgcacctggccctggtagtgatatttaatccaatccaacaactataggctgggttaaataaaaggtcattattgtctatattccaagtggaattaaatgtagtcacagagattcctaacattttccttatatttaagggaaatcacttctaaaaaaacacactaatcagaactgtgatgctctaattagaaacaactcatctggccaactatttgctgctcagagtttcttatttcttagatgaaaaaaactcatcagttatattcatgtgatcgcggctaaaaagtcagtattttctttttgttctaatgtggcttcatttgaaatttctcagattctacattgtactaattatgaataacaaattataaattaaaaactcttaaagag

SEQ ID NO: 97255 - DNA, 758 bp, Homo Sapiens
ggaaaacggagagccgaaggagtcaatctaaattcgatgagcgcgtcgggctccaaggcaggcgctgtcagcccgggagggctgtctgggatttctagagggtcccagaacgggttcttcccaggccgatcccgcctgcttcctgccccgtctctccacccgcctcccgccctctgtaagggaccccgagggcggcgccggaaacacggagaaggcccagaacggcgcgggacccgagaggcctacgttggcaaacgcagcccgctgcccctttgctcgcttcccccgggcctggagtggctcctgtcgcttctggcgctccgatttcgagaaatgactttcagctgtgcaaggcgagaatgctactttagataatgagaaaaaatctctcgaatggctcccaaaatgaggtccttgtttaagaggccacaggaagccgccagccgaacgctgataccaaagaggaggccaagaagcggactgtggcttggtgacctgtttggtattgccaaattttcagcttttattaaagctgaaacaccttggctgtttaaaacgttcgacaaggacttttttatgaacgttaacggcacagcatacgggtttttggaacaacacaaacacacaaggcaggacttcagcccgtccgcccccttgtgcaggtccattcatgaacctcgagttagaggccttgcttctgaaactcacgaatctagtagggaagacctgtgtagacgactaacattcatacctccaag

SEQ ID NO: 97256 - DNA, 527 bp, Homo Sapiens
taccgaatgagcagacgccggcgctatgaagggcacaaggtggagggctactcattgggctgggagtgctccccagccggtgacttgctggtgccgggcagccccgatggccgggtcctgatgtacaccttccgcaaagccagccgagcatgcacactgcaggggcacacacaggcctgtgtcggcaccacctatcaccccgtgctgccctccgtcctcgccacctgctcctggggaggggacatgaagatctggcactgagctttttgtcactgaaccttcccgatgccagctgggctcttggactcccctcttcctcaagggtagatgagaggaacgagcacagaggttggctgtgggtcctgggtaccaccttctgagcctcagtttcctcatctgtaaagtggggagaaaagtctgtttgcctcaggagtgtgaggactacactagtgaaagcgcctggcgggcagccggcgatgcccaataaatgtgtgttttgctgtttgttaagtgatttcaccccaaaa

SEQ ID NO: 97257 - DNA, 884 bp, Homo Sapiens
  misc_feature (619)..(619): n is a, c, g, or t
gatgttaaaacagtgaaattacagaaacagaacatagccaccctttttcatcagtgaccttttcttcacgtggaggtcaactcagtaggtgagaataattagtaggttcagcagaataaactctttacaattaataactcagtggaaaatgatgttcagatggtgaaatgtggaaatgttttagacaactctattttcagcctgtgcttctcactcaccatcctgttgggattaacagttgagggccatcgctgcctaaacatttagcgtgcggtttcccatcagttttaccgtgaatgtgaaaaggtgaaactggtgctgacttcggcagcaggtatactaaaattggaatgacacagaggagattagcatggccccctgcgcgaggaagatctgcagattcatgcagcattccatatttttttaagaaaaggttacactgtgcaccgacatgtggagctagaaggaaaagcttttaagtctcatgtttgctgactataaaaataaatcatagtaataatattgaacattctactttaaaaattattaataaaaccataaatgaaacacttgagcacactttaaaaagtacataaatccatgagtccatatgcctatnttaaggtggtctggttaatatccaggattcatactcagatgagaatagctcaggaaagcctgaaatggcttatgtgaactgattgcggaaatgaaattcacggcttgggacctgttcttaggagtgggtacggtcgctagaaatggaaatcaaggcgccgaaggggggtggtacccccgggcacactttcgtgaggacccgcgagccgggacaaaggcgcgcggggcacagaacacggataaaagagggcggcagagaggaaaac

SEQ ID NO: 97258 - DNA, 808 bp, Homo Sapiens
ggcagtaactactacggtcctaaggtagcgaggcctgggtggcgaattcggcacgagggctcggggggccgctggagtgcccagcgggaacccgaaagtttgtaagaggaagagagcgcgcggcgagcgagcgagcgggccgggggcagcggcagcggcgccggggaccatggtgctgccggcgcctcctccgcgggcgtgaaggcggcgctcctactccctccccggactccgcggtgtcccagaagcttttgttgacaattccagtttccgaacaaaacatttcggcaatggtgagggcttcgatcccttctctgatttgctgtcagccatgaacggatggatgtgatgcctgctagccaaaaggcttccctctgtgtgttgcagtcctgtggcattatgcatgccccctcccagtgaccccaggctttttatggctgtgagacacgttaaaatttcaggggtaagacgtgaccttttgaggtgactataactgaagattgctttacagaagccaaaaaaggttttgagtcatgatgcaagaatctgggactgagacaaaaagtaacggttcagccatccagaatgggtcgggcggcagcaaccacttactagagtgcggcggtcttcgggaggggcggtccaacggagagacgccggccgtggacatcggggcagctgacctcgcccacgcccagcagcagcagcaacagtggcatctcataaaccatcagacctctaggagtcccagcagttggcttaagagactaatttcaagcccttgggagttggaagtcctgcaggtccc

SEQ ID NO: 97259 - DNA, 1103 bp, Homo Sapiens
  misc_feature (1074)..(1074): n is a, c, g, or t
cggcacgaggcgccgcggtgcggagagcaggtggtgctggaagcgcgtgaggccgggagctcgagagagctaacagactagccggctggacatctggaccgctggatccggaggtggcgaccccggcctgacccggaccctaaatccgtccccgccccagagggcggaggcgcgcgctcgattccccccacgcggcggcgccgcctgtttacgtctgcagatctccaggggagcccaccagcctagtcaacatggcctcggaagacattgccaagctggcagagacacttgccaagactcaggtggccgggggacagctgagtttcaaaggcaagagcctcaaactcaacactgcagaagatgctaaagatgtgattaaagagattgaagactttgacagcttggaggctctgcgtctggaaggcaacacagtgggcgtggaagcagccagggtcatcgccaaggccttagagaagaagtcggagttgaagcgctgccactggagtgacatgttcacgggaaggctgcggaccgagatcccaccagccctgatctcactaggggaaggactcatcacagctggggctcagctggtggagctggacttaagcgacaacgcattcgggcccgacggtgtgcaaggcttcgaggccctgctcaagagctcagcctgcttcaccctgcaggaactcaagctcaacaactgtggcatgggcattggcggcggcaagatcctggctgcagctctgaccgaatgtcaccggaaatccagtgcccaaggcaagcctctggccctgaaggtctttgtggctggcagaaaccgtctggagaatgatggcgccactgccttggcagaagcttttagggtcatcgggaccctggaggaggtccacatgccacagaatgggatcaaccaccctggcatcactgccctggcccaggctttcgctgtcaaacccctgctgcgggtcatcaacctgaatgacaaaaccttcactgagaaagggcgccgtggccatggccgagaccttgaagaccttgcgggaggtggaggggattaattttggggactgnctggtgcgctccaagggtgcagttgccat

SEQ ID NO: 97260 - DNA, 538 bp, Homo Sapiens
  misc_feature (36)..(36): n is a, c, g, or t
caggctgcacttgagaaggggaaaggactcggaagnaggaatgggtgggcggaaggagtccttttgaaatattccacttccctctctgtctcatccatatccacactgtctaggtcaatatctttaggtagaaagacatcatcaattgaattgttgactctgtctcctttcttcttcttatttttcttgttcttgccctttggctgaggggactctgccagcaccagcttgctgttctgctgatgctcaccgggagaggtgggctccataggggttgggtttgacttttcgtccttgatgtggttcagctgctttttgttattgttattactgttgacttttctctcctctcttttctgctctgtgatggacatgaggtcgaccaccttagcctttgactcagtctgggcccggggcttggactgcccctctgtggccttggggggctctgtgggcctcctcgctggctcgctgctggccttgctggtctgcctcagcttctgcttgccatttccttctttatggtgctgcatgatgt

SEQ ID NO: 97261 - DNA, 949 bp, Homo Sapiens
ggtcaaaggcctgcgtcaggttgcactgtagcctcggcagtgaaccgggaggtactaccaggtcgccgtcgttgctccgctcgctctgagagagcatggccctgagaggcgtctccgtgcggctgctgagccgcggacccggcctgcacgtccttcgcacgtgggtctcgtcggcggcgcagaccgagaaaggcgggagaacacagagccaactggctaagtcctcgcgtcccgagtttgactggcaggacccgctggtgctggaggagcagctgaccacagatgagatcctcatcagggacaccttccgcacctactgccaggagagactcatgcctcgcatcctgttggccaatcgcaacgaagtttttcatcgggagatcatttcggagatgggggagttgggtgtgctgggccccaccatcaaaggatatggctgtgctggggtttcgtctgtggcctatgggctcctggcccgagagctggagcgggtggacagtggctacaggtcggcgatgagtgtccagtcctccctcgtcatgcaccctatctatgcctatggcagcgaggaacagcggcagaagtacctgccccagctggccaagggggagctcctgggctgcttcgggctcacagagcccaacagcggaagtgaccccagcagcatggagaccagagcccactacaactcatccaacaagagctacaccctcaatgggaccaagacctggatcacgaactcgcctatggccgatctgtttgtagtgtgggctcggtgtgaagatggctgcattcggggcttcctgctggagaaggggatgcggggtctctcggcccccaagatccagggcaagttctcgctgcgggcctcagccacaggcatgatcatcatggaccgtgtgaagggtcccgaggaagatgtgtccctgggtgcattcagctggggggc

SEQ ID NO: 97262 - DNA, 824 bp, Homo Sapiens
tagtgtaggtacgaggctgggtggcgaattcggcacgaggctctcgcggccgggggaccgcagcgcggggctagcccggagacccggccaccggcctggggcgccttcacgccgtctcggagcggataatgcggtgagcaggcaccacgccggcagactcggctggatctgcgcacagcggcagggattgcgtgcgcccgcgggaggcccggggcagcggctgggatcctcagcggcggccggtttgtcctggttgtggtcaagactggatgatgtaactggctctctaggaagcctcacttggccgtaacctcaggaaggttctctttgaccccatctcatttcgaagccacttctgaagccacttgagaaaaatgatgtgacagttcctatcaaaaaggattcagaaacatataccatctgtgaagaaagtggccctttctcccgcttgcaaaatagacattctcaaattccaaaatgccagccaagaccccaatttacctgaaagcagccaataacaagaaaggaaagaaatttaaactgagggacattctgtctcctgatatgatcagtcccccgcttggagactttcgccacaccatccacattggcaaagagggccagcacgatgtctttggagatattttcctttcttcaagggaactacgagcttttacctggaaaccaggagaaagcacacctgggccagttccctgggcataatgagttcttccgggccaacagcacctcggactctgtgttcacagaaacgccctccccggtgctcaaaaatgccatctccctcccgaccattggaggatccc

SEQ ID NO: 97263 - DNA, 900 bp, Homo Sapiens
  misc_feature (821)..(821): n is a, c, g, or t
acaaatgtgcattctgccccatggccttcaagactgccagcagcactgcagaccacagtgccacccagcaccccacccagccccacagaccctcccagctcatttataagtgctcctgtgaaatggtcttcaacaagaagaggcacattcagcagcatttttaccagaatgtcagcaagacgcaggtgggcgtcttcaagtgccctgagtgcccactcttgttcgtgcagaagccggagttgatgcaacacgtcaagagcacccacggtgttccccgaaatgtggacgagctgtcaagcctccagtcttcagcggacacatcctcaagccgccctggctctcgagttcccactgagccaccagccactagtgtggctgctcggagcagctccctgccttctggccgctggggtaggcctgaagcccaccgcagggtggaagccaggccgcggctgaggaacactggctggacctgccaggagtgccaggagtgggttccagatcgggagagctacgtgtcccacatgaaaaagagccacggtcggacattgaagcggtacccatgccggcagtgtgaacagtccttccacacccccaacagcctgcgcaaacacatccgcaacaaccatgacacagtaaagaagttctacacctgcgggtactgcacagaggacagccccagctttcctcggccctcccttctggagagccacatcagccttatgcatggcatcagaaaacctgattttgagccagacgtccaaagtgaaaactccggggtggacattcccctcagggtgaccatctgaaaagacagtcantggaagtgggggacgcctcaggcaccagcaatggcgcaactgtctcttccaccaaaagcaccagtcccctttttcagtg

SEQ ID NO: 97264 - DNA, 1237 bp, Homo Sapiens
  misc_feature (73)..(158): n is a, c, g, or t
  misc_feature (196)..(251): n is a, c, g, or t
gcttccggtcgtcgtcgtcgccgctgctgccgctgctgttgctcctgaggctgctggctgaggccggaggatnnnnnnnnnnnnnnnnnnnnnnnnnnnnnnnnnnnnnnnnnnnnnnnnnnnnnnnnnnnnnnnnnnnnnnnnnnnnnnnnnnnnnncagagcgcgcttttccgtccgcctgaggagccgaagcnnnnnnnnnnnnnnnnnnnnnnnnnnnnnnnnnnnnnnnnnnnnnnnnnnnnnnnnacagccatgtcctcgtcagccggcagcggccaccagcccagccagagccgcgccatccccacccgcaccgtggccatcagcgacgccgcgcagctacctcatgactattgcaccacgcccggggggacgctcttctccaccacaccgggaggaactcgaatcatttatgacagaaagtttctgttggatcgtcgcaattctcccatggctcagaccccaccctgccatctgcccaatatcccaggagtcactagccctggcaccttaattgaagactccaaagtagaagtaaacaatttgaacaacttgaacaatcacgacaggaaacatgcagttggggatgatgctcagttcgagatggacatctgactctcctgccagggtttagaagaacagccgcaaccctggtaacttggtgggcaccctggatttggcccaattaggcatcaacctttggaaaaggtccgaaagagggcctaatctccacgccaggtcccccggtggacagtcgctccccccttcccgcggccccttccctcgatgggggtgcacacaccatcaactggggtacaccatcaggacattccctcttatctgcccatcgaaggtgtccgcgatctatcacgtgaagccctagcgcgccacagtcggagtgtccccgaaccgttgtcaacccgcgtttctccctacctacagcgggccgctcccaatagccgccgcatccttcccatgatcagatggcctctattcccgctaaccaccccgcaccgaccctaccgccgtccgctccgcccgttcgttgtttctcccaatagtcgcctccgcattcccccccctactctcactccccctggtccgatagccatacccccccctgctcccgctctccgcgaacctatgtccggtgtcataagagaagggggcacaaagttacgcccccgcgcagccgagtcttacgccgcgagtaccctcgcagcctatacgct

SEQ ID NO: 97265 - DNA, 606 bp, Homo Sapiens
catcgctgtcaatgacatgggttcagcctcatcgtcggccagcctgagggtcctaggtccagggatggatgggatcatggtgacctggaaagacaactttgactccttctacagtgaagtggctgagcttggcaggggcagattctctgtcgttaagaaatgtgatcagaaaggaaccaagcgagcagtggccactaagtttgtgaacaagaagttgatgaagcgcagaccaggtcacccatgagcttggcatcctgacagagcctccagcaccccctgctcgccggcctcctcaacacctttgagacccccaccagctacatcctggtactagaaatgcctgaccagggtcgcctcctggactgcgtggtgcgatggggaagcctcactgaagggaagatcagggcgcacctgggggaggttctggaagctgtccggtacctgcacaactgcaggatagcacacctggacctaaagcctgagaatatcctggtggatgagagtttagccaagccaaccatcaaactggctgactttggagatgctgttcagctcaacacgacctactacatccaccagttactggggaaccctgaatttgcagcc

SEQ ID NO: 97266 - DNA, 1389 bp, Homo Sapiens
  misc_feature (885)..(885): n is a, c, g, or t
  misc_feature (1289)..(1289): n is a, c, g, or t
gcatagtgaatatagaacagtgggttaacaaagcaggctggtacggtcggaatcccgggatatcgtcgaccacgcgtccggtcgttagccgggggaaagatggcggaaaatttaaaaggctgcagcgtgtgttgcaagtcttcttggaatcagctgcaggacctgtgccgcctggccaagctctcctgccctgccctcggtatctctaagaggaacctctatgactttgaagtcgagtacctgtgcgattacaagaagatccgcgaacaggaatattacctggtgaaatggcgtggatatccagactcagagagcacctgggagccacggcagaatctcaagtgtgtgcgtatcctcaagcagttccacaaggacttagaaagggagctgctccggcggcaccaccggtcaaagaccccccggcacctggacccaagcttggccaactacctggtgcagaaggccaagcagaggcgggcgctccgtcgctgggagcaggagctcaatgccaagcgcagccatctgggacgcatcactgtagagaatgaggtggacctggacggccctccgcgggccttcgtgtacatcaatgagtaccgtgttggtgagggcatcaccctcaaccaggtggctgtgggctgcgagtgccaggactgtctgtgggcacccactggaggctgctgcccgggggcgtcactgcacaagtttgcctacaatgaccagggccaggtgcggcttcgagccgggctgcccatctacgagtgcaactcccgctgccgctgcggctatgactgcccaaatcgtgtggtacagaagggtatccgatatgacctctgcatcttccgcacggatgatgggcgtgggctggggcgtccgcaccctggnagaagattcgcaagaacagcttcgtcatgggagtacgtgggagagatcattacctcagaggaggcagagcggcggggccagatctacgaccgtcagggcgccacctacctctttgacctggactacgtggaggacgtgtacaccgtggatgccgcctactatggcaacatctcccactttgtcaaccacagttgtgaccccaacctgcaggtgtacaacgtcttcatagacaaccttgacgagcggctgccccgcatcgctttctttgccacaagaaccatccggggcaggcgaagaagctcacctttgattacaacatgcaagtgggaccccgggggacatgggagagcacccgcatggactccaaactttggcctgggctgggctcccctggctcccctaanaaaccgggtccgtattgaaatgcaaagggtggggacttgagttcctggccgcaaatacctcctcctagccccttaaaaaatctgagggcaaaaattggat

SEQ ID NO: 97267 - DNA, 968 bp, Homo Sapiens
  misc_feature (93)..(93): n is a, c, g, or t
tggagacagaggagaggggttatatattaaatgtttccaaacaggctgggaggacggccaggaacagggggtccaagggctgcaaagacaagntgagcatctctggaaaccctggtccctccaagccctgtcagaaatccaggggggtgaggtcccaaaagtcacagtcgaagaggtctctgatgccctcgccctcctcgaggccgaagtggtagtcgagggcctcgtggggtggggaaaggctgatgaactcctcagggagaaggccggagaagtcctcccgcacatgctccaggagcgagtcggccgccaccagcggggacagggcggtcctcctcccacgggagccccgcaggctgcccatccgggacaacagcggttcttgctccaggctgagtagagactggctgggatctgtggtgagggatgaggggggagatgatggtggtggtgacactatggtggcagagtcagtggccctgttctcctcctcagaagtgacctcctgggatggggtcttcccagggctgatcccacctacggtctcctcagggcacaggaaaacatcgatcgggccttgtttgctcttaagggagatctgaaagttctccgaagagtccacggcttggagctgggtctcaggaggggctttgatcaccataaccatctgctctgcagggtctgcaatgctacgaaggtcctgacacgtcacgtaggccaggcgctggctgtcagtgtcctcggagagcaggcgcagctgcgtagtacagatattcatcaggtggtccagctgctgctcgctctcctgcagctgtcggaggtcctgggtcaacccctcaagccgtccgcagacgcccactgtggtgtggctgcccagccactggatgtggttcttggacttcttggcaatgagctggatgccctcaaggaccctcgtgccgaattcgccacccaggcctcgcttcctt

SEQ ID NO: 97268 - DNA, 387 bp, Homo Sapiens
gagaaccgcacgggctgccggcccatccccatcatcaagcttgagtggggctcgccctgggccgtgctgcccctcttcctggccgtggtgggcatcgctgccacgttgttcgtggtgatcacctttgtgcgctacaacgacacgcccatcgtcaaggcctcgggccgtgaactgagctacgtgctgctggcaggcatcttcctgtgctatgccaccaccttcctcatgatcgctgagcccgaccttggcacctgctcgctgcgccgaatcttcctgggactagggatgagcatcagctatgcagccctgctcaccaagaccaaccgcatctaccgcatcttcgagcagggcaagcgctcggtcagtgccccacgctttatcagcccc

SEQ ID NO: 97269 - DNA, 569 bp, Homo Sapiens
tataggctaggtacgaggcctgggttgtgaattcggcacgaggggacagctgtgtagcctgtggatccttgaggacagcaggtccccaggcaggagcaccctccccatggccctgggaggccaggctgatgcaccagggacagctggcctgtggcggggccctggtgtcagaggaggcggtgctaactgctgcccactgcttcattgggcgccaggccccagaggaatggagcgtagggctggggaccagaccggaggagtggggcctgaagcagctcatcctgcatggagcctacacccaccctgaggggggctacgacatggccctcctgctgctggcccagcctgtgacactgggagccagcctgcggcccctctgcctgccctatcctgaccaccacctgcctgatggggagcgtggctgggttctgggacgggcccgcccaggagcaggcatcagctccctccagacagtgcccgtgaccctcctggggcctagggcctgcagccggctgcatgcagctcctgggggtgatggcagccctattctgccggggatggtgtgtacc

SEQ ID NO: 97270 - DNA, 824 bp, Homo Sapiens
tgagagtccagagccggacgttccggccgcttcgggctggcggctggagagcgctcgggtcatgtctgcccaggggactgcgagttcctggtgcagcgagcccgggagttggtgccgcaagacctgtgggcagccaaggcgtggctgatcacggcccgcagcctctacccggcagactttaacatccagtatgagatgtacaccatcgagcggaatgcagagcggaccgccaccgccgggaggctgctgtacgacatgtttgtgaatttcccagaccagccggtggtgtggagagaaatcagcattattacatcagcattaaggaacgattcacaggacaaacaaacccaatttttaagaagtttatttgaaactcttcctggtcgagtccagtgtgaaatgttactaaaggtcacggaacaatgcttcaacacgttagaacgatcagaaatgttgcttctacttttgaggcgcttccctgaaacggtggtgcagcatggggttggccttggggaggcactattagaggctgaaactattgaagaacaagaatctccagtgaactgctttagaaaatcatttgtctgtgatgtccttcctctaataattaacaaccatgatgttcgattacctgccaatttattgtataaagtacttgaacaaagcagtgaatttatatcaattatgtcactaggtctacttcaatagaaatccgcatcaggggcccagatacatctgatttatggcactaaaaacgtaggccccagaatacctattacagggggggcgggaaaactcccgatccgggcctggggaggcgcgcc

SEQ ID NO: 97271 - DNA, 933 bp, Homo Sapiens
  misc_feature (665)..(673): n is a, c, g, or t
ggggggggaggacgccgtggcctctgtgctggacgtgaatgtagtagggactgtgcggatgctgcaggccttcctgccagacatgaagaggcgcggttcgggacgcgtgttggtgaccgggagcgtgggaggattgatggggctgcctttcaatgacgtttattgcgccagcaagttcgcgctcgaaggcttatgcgagagtctggcggttctgctgctgccctttggggtccacttgagcctgatcgagtgcggcccagtgcacaccgccttcatggagaaggtgttgggcagcccagaggaggtgctggaccgcacggacatccacaccttccaccgcttctaccaatacctcgcccacagcaagcaagtctttcgcgaggcggcgcagaaccctgaggaggtggcggaggtcttcctcaccgcttttgcgcggcccgaaacccgaccctgcgctacttcaccaccggagcgcttcctgcccctgcctgcggatgcgccctggacgaaccccgcgggctccaactacggccaccgcccttggacccgggaatgtgttcgtgcgacgctcccggccacagcccgagggctggggccccaacggcgggcgggcgcggcccgcgccccgggcccacagtcagcacgccccggagaccagttcgacnnnnnnnnncccccgccattccgaccggccgctccggctcgggccgcagcgtttacgaggcttcgcagcggacgccgggtccccgctgcggggttgcctctagccccgcgggcaggcgtaaatgtaatcgccgcgtcagtccgtctcagaccacattcaccctctatacccgcccgttgcatacgaacgtcgcctaccgccggtatcgtcagcgcgctcgccgtcgccgcacctggcgtcacctgtacgcgaccgctgccccctaagct

SEQ ID NO: 97272 - DNA, 1528 bp, Homo Sapiens
  misc_feature (1301)..(1301): n is a, c, g, or t
  misc_feature (1313)..(1313): n is a, c, g, or t
  misc_feature (1315)..(1315): n is a, c, g, or t
cttacggctaggtacgaggctgggtgttaatacggcacgagggcgcggggctggtagcggccggagccgtgcgagttctctaccctgcttcgcgagcgggcgagagaacgcgagtcccaggatccccggcacccacttctcttccactgcattcccccggcgcgtgtgggaccgaggtggacatggatccgcagaggtcccccctattggaagtaaaggggaacatagaactgaagagacctctgattaaggccccttcccagctgcctctctcaggaagcagactcaagaggaggcctgaccagatggaagatggcctggagcctgagaagaaacggacaagaggcctgggtgcaacgaccaaaattaccacatcccacccaagagttccatccctcactacagtgccacagacacaaggccagaccacagctcaaaaagtttccaagaagacaggaccccggtgttccacagctattgccacagggttgaagaaccagaagccagttcctgctgttcctgtccagaagtctggcacatcaaggtgttcctcccatggcaggagggaagaaacccagcaaacgtccagcctgggacttaaagggtcagttatgtgacctaaatgcagaactaaaacggtgccgtgagaggactcaaacgttggaccaagagaaccagcagcttcaggaccagctcagagatgcccagcagcaggtcaaggccctggggacagagcgcacaacactggaggggcatttagccaaggtacaggcccaggctgagcagggccaacaggagctgaagaacttgcgtgcttgtgtcctggagctggaagagcggctgagcacgcaggagggcttggtgcaagagcttcagaaaaaacaggtggaattgcaggaagaacggaggggactgatgtcccaactagaggagaaggagaggaggctgcagacatcagaagcagccctgtcaagcagccaagcagaggtggcatctctgcggcaggagactgtggcccaggcagccttactgactgagcgggaagaacgtcttcatgggctagaaatggagcgccggcgactgcacaaccagctgcaggaactcaagggcaacatccgtgtattctgccgggtccgccctgtcctgccgggggagcccactccaccccctggcctcctcctgtttccctctggccctggtgggccctctgatcctccaacccgacttagcctctcccggtctgacgagcggcgtgggaccctgagtggggcaccagctcccccaactcgccatgatttttnccttttgaaccngngcgtattcccaccaggaagtggacaggatgaagtgtttgaagagattgccatgcttgtccagtcagccctggatggctatccagtatgcatctttgcctatggccagacaggcagtggcaagaccttcacaatggagggtgggcctgggggagacccccagttggaggggctgatccctcgggccctgcggcacctcttctctgtggctcagg

SEQ ID NO: 97273 - DNA, 1275 bp, Homo Sapiens
  misc_feature (965)..(983): n is a, c, g, or t
attacgggctaggtacgaggcctgggtttaatcggcacgaggcccgggagaagcactttctgtgtgaggaaggccgctgcagcacggagcagttcacccacgccttccgcaccgagatcgacctcaaggcccacaggacggcctgccacagtcgcagccgcgccgaggcacgccagaaccgccacatcgacctgcagttcagctacgcgccacggcactcgcgccggaacgagggggtcgttggtggcgaagactacgaggaggtggacaggtacagccgccagggccgagtggcccgggctggcactcgcggagcccagcagagccgccgaggaagctggagggaagaagaggaccgagaagtagcagctgctgtccgggcctccgtggccgcacagcagcaggaggaggctcgcaggagtgaggatcaggaggaaggcggtaggcccaagaaggaggaggcagcggcgcggggacctgaggatccccgtggcccccggcgctcaccccggactcagggcgaaggcccaggccccaaggaaacctcgacaaatggtcctgtaagccaagaagccttctcggtgacaggcccagccgccccaggcggccctcccaccacccagcccgaagctcaaggacgaagacttccccagcctctctgcctccacttactcctcctgctccactgcagcaaccccgggccctgtggggttggcgctgccgtacgccatccctgccagaggcaggagtgccttccaggaggaggacttccccgccctggtgtcctcggtgcccaagcctggcaccgcccccaccagccttgtctctgcctggaacagcagcagtagcagcaagaaggtagcacagcccccactctcggcgcaggctaccggcagcggccagcccaccaggaaggctgggaaggggagcaggggcggcaggaagggcggcccgcccttcacacnnnnnnnnnnnnnnnnnnncggcggcccggccctgcaggagcttctgagcacgcgccccacgggctccgtctcctccacactggggctggcctccatccaaccctctaaagttgggaagaagaagaaagtgggctcggagaagccaggcaccacattgccacagcccccgcccactacctgtcccccagggctttgcaggccccggaagctcctgccagcagagccgaggggccagttgccgtcgtcgtcaatggacacacggagggcccggccctgctcggagtgccccaaggaaccccctgggctccca

SEQ ID NO: 97274 - DNA, 1244 bp, Homo Sapiens
ggagagagtatgaagtcgacggcgcgccgaattcggcacgaggcgctacctggacaatgatgagctgcttaagcacctgcgccgcgaccactacttctgccacttctgcgactcggacggggcccaggactactacagcgactatgcctacctgcgtgagcacttccgggagaagcactttctgtgtgaggaaggccgctgcagcacggagcagttcacccacgccttccgcaccgagatcgacctcaaggcccacaggacggcctgccacagtcgcagccgcgccgaggcacgccagaaccgccacatcgacctgcagttcagctacgcgccacggcactcgcgccggaacgaggggatcgttggtggcgaagactacgaggaggtggacaggtacagccgccagggccgagtggcccgggctggcactcgcggagcccagcagagccgccgaggaagctggaggtacaaaagggaagaagaggaccgagaagtagcagctgctgtccgggcctccgtggccgcacagcagcaggaggaggctcgcaggagtgaggatcaggaggaaggcggtaggcccaaaaaggaggaggcagcggcgcggggacctgacgatccccgtggcccccggcgctcaccccggactcagggcgaaggcccaggccccaaggaaacctcgacaaatggtcctgtaagccaagaagccttctcggtgacaggcccagccgccccagggtgtgtgggggtgccaggcgccctcccaccacccagcccgaagctcaaggacgaagacttcccccgcctctctggctccacttcctcctcctgctccactgcagcaaccccgaggccctgtggggttggcgcctgccacacgccatcccgtgccaaaggcaagattgcccttccaggaggaaggacttccgccgcccttgggggcctccggggcccccaaaccagggcaaccgcccccccaccatgccttgggtctctgggctggaaacggccgactagtaatcggcgaagaggggaaacggcatcccgccccgattcctccggggcagggtttaacgcgagggcggcggaccgccaccgccaggcgaaaggggtggagcaagagggaaggacagaggggaacaagtggaaacgcgagctggcaccaaacactgtttcgccacacttagaccagggcgtgatcccaagtagagtgttgtggacgccacccaacctgatatcgggtgata

SEQ ID NO: 97275 - DNA, 1162 bp, Homo Sapiens
tcagtaactctaagggtttaaggtagcgaggcctgggtggcgaattcggcacgaggcctcgtgcgaattcggcacgaggcgctccttggctggtgcctggagcccgggcgcaccccaccgctcccgggacctgttgggggctggcccgaaccgtcgtcgaagggagccgctcggccacccccgactgttcctcgccccgcccgacgttcccatcaagtggccgaaccagccggacgagccaaactcgccgggcctcccggcggcagcaggtggccccgtccttccagggagggcccatgcgaccccgcggcgctccggagccctctcggaccgcccccgccaggcgggaatggagcgcggatggggaccggagaggagctggccccggctgcgactacagtctatcgcacgactgcgacgacgaaaacgctcggggaggcctggagacgacgaggagttcaccgggcactgtgcacggagtctgacggggtgcggccggcccgaaagccgacggcaggtaattcccagcgtgatggaccgacagaccaggtgaatgtgggccaatcaacctttccagggagataacagaagccggagggctaccatacgaggtcccatcacgcggggggcgcggctgccgggaactggggagtccctcctggggaatccacggcgagccccgacacgggatctatgagcgccagggtacccggcacgaaaccaacggacacgcgacggacgggacccaactggcgaacgcagggcccgccgtgcggaggagcagaaatggaccagccatagcatgcggacaccaggagcagatccgcggagccgaggcaatggggcgggtgaattacacatgggctggcgaaacattgaggggagacgaaacgaccaagggattactgtagcgaaggaggaaagcatgtcaaggttaaggtaaccgtgggttcccacaagacaataagaacccttggtcgagaccaccacaaccgaacaactcagggacacacatcgaagcattggccctccagagcacatcagacccggggcgggaccaagagcgcaccaacagggacagccaagtggacgaccatcggcgccgaagggaggagcacagagagcgcccgagggcaaacgcacggacaggacgatgcggcga

SEQ ID NO: 97276 - DNA, 1242 bp, Homo Sapiens
  misc_feature (1040)..(1040): n is a, c, g, or t
  misc_feature (1062)..(1062): n is a, c, g, or t
  misc_feature (1077)..(1077): n is a, c, g, or t
  misc_feature (1083)..(1083): n is a, c, g, or t
  misc_feature (1100)..(1100): n is a, c, g, or t
  misc_feature (1107)..(1108): n is a, c, g, or t
  misc_feature (1110)..(1111): n is a, c, g, or t
  misc_feature (1115)..(1115): n is a, c, g, or t
  misc_feature (1127)..(1127): n is a, c, g, or t
  misc_feature (1130)..(1130): n is a, c, g, or t
  misc_feature (1151)..(1151): n is a, c, g, or t
  misc_feature (1156)..(1156): n is a, c, g, or t
ataggctaaggtgcgaaggcctggtgttgaatcggcacgaggctgaagcttctgctggagtggaaccagctggacttagccaatgatgagattttcaccaatgaccgccgatgggagtctgctgaccttcaagaagtcatgtttacggctctcataaaggacagacccaagttgtccgcctctttctggagaatggcttgaacctacggaagtttctcacccatgatgtcctcactgaactcttctccaaccacttcagcacgcttgtgtaccggaatctgcagatcgccaagaattcctataatgatgccctcctcacgttgtctggaaactggttgcgaacttccgaagaggcttccggaaggaagacagaaatggccgggacgagatggacatagaactccacgacgtgtctcctattactcggcaccccctgcaagctctcttcatctgggccattcttcagaataagaaggaactctccaaagtcatttgggagcagaccaggggctgcactctggcagccctgggagccagcaagcttctgaagactctggccaaagtgaagaacgacatcaatgctgctggggagtccgaggagctggctaatgagtacgagacccgggctgttgagctgttcactgagtgttacagcagcgatgaagacttggcagaacagctgctggtctattcctgtgaagcttggggtggaagcaactgtctggagctggcggtggaggccacagaccagcatttcatcgcccagcctggggtccagaattttctttctaagcaatggtatggagagatttcccgagacaccaagaactggaagattatcctgtgtctgtttattatacccttggtgggctgtggctttgtatcatttaggaagaaacctgtcgacaagcacaagaagctgctttggtactatgtggcgttcttcacctcccccttcgtggtcttctcctggaatgtggtcttctacatcgccttcctcctgctggttgcctacgtgctgctcatggatttccattcgntggcacacccccccgagctggncctgtactcgctggnctttgncctcttctgtgatgaantgagacnngnnaggnctgccctgacancangaaaccccctcggttcgtcgnggggnaggcatccttttctaaaagccgagaagggaatagggaagttggcttcctgaaagtttcaaaaaggccgctaatttttccccaaagg

SEQ ID NO: 97277 - DNA, 970 bp, Homo Sapiens
ccagggcccggcggcccagcacacacaggccaaaacacagcgtgaccagcggggagttccaatcctggtccacgggctggctgcgccggaaggcgcagtactggatccacctcgaggtgccacagcacaaaaggagggccagcgagaggccagacaggcggaggtcatagtcctcatccacactcaacgagaaggtgggatccgagtcggcatagccgggcacccgcacaggcctcagggctgccgtgatgccctcatggctgagccacacctccagtctttggtgagcggctcacgtagtagatgatgctcttgacatagtaggtgatgaggatcttgcggaggtcgaaaacctgcagcatggaggcagcattattgtcactaatgctatagccctccagcacgtacttgctggctgttacctcccaagccagccagcgctgcccaaaggcagcattgaaggacaggacccgtggcaggtggccaggttcacagcagcaacagccctcgtcctcctccacaccctcggtgatagcctccacctcgcgctgctggcagtaagtgccccggaactcaaggccacgcagctggaaggtgacgaggccattgccaacctcgatgaggtgcaccagggcgttgaggtagtcagaggccaggacgaagcagtcaccagggccatagttgccccagcggcccagcaccaggtccccacacagtgtgtgctgcagcgaacgtgtcaagtgctcatagaagatggagttgaggttgttgtcatcagcgccagggttcctgtccagctgtgtgaccaggcgggtgttggaatgatccacacgtttagtgttgtagtcgcgctcccagaacttgaggggccgagcgtaggacatgatgaagacggcactgcctagcagtgggttgagaggcgtggagaagagccccgagagcagggcctggacgaacagcatggccgagt

SEQ ID NO: 97278 - DNA, 238 bp, Homo Sapiens
aaatcgtacggctaggtagcgaggcctgggtggtcgaatcggcacgaggcctcgtgccggggaactctcaactttgactcttaagttcaaattgcaaccatcttaaaacataaagccaaaaccccacccttatcccctccagctaccacatatactatattcacagccaaatatctcaagaagctatttccttaccatttttctttctctgccaatctggcttcaaagtacacagaaa

SEQ ID NO: 97279 - DNA, 404 bp, Homo Sapiens
gggtaagggtgctgattcctgaggcctagcttagactcatcgggaatctctgagagcccaggaatttgcatttttaactctattctcccatatcctgggtttagagaagtgctgccattgtggtggttcagggtcctccctgctgcttgtcacagaggccactgcggggagaggaagctgggacacccccaaggcccttctctggagaggggcctcacctttcaaaaaggctccggttgttgcctgatgctctgcacagagctgtaagtccgcagcccatgcacttctgtaatctgctgggtgcctagttatctttcttcttgtttgggcagaatccgggcctgaatgccacccaccccaggaagcccaggacaaggcagacagccttgtaaagtcccattcct

SEQ ID NO: 97280 - DNA, 824 bp, Homo Sapiens
ataggctagtagaggctgggtgttgaatcggcacgagggggtgcaggacgatgtggggatggagctgaaggcacatgcagacgttgggaggtgccatgtaactacacctcccgggtctgggagtactcctccagcattcagaactctgacaatgacctgcccgtcgtccaaggacagctcctccttctccctgaaaggctatccctccctcatgcggagccaaagccccaaggcccagccccagacttggaaatctggcaagcagactatgctgtctcactaccggccattctacgtcaacaaaggcaacgggattgggtccaacgaagccccatgagctcctggcggaaggaacgaggcgccacacccctgctcttcctcctgaccctgctgctcttgccttctaagctactgtgcttgtctgggtgggagggagcctggtcctgcacctgccctctgcagccctctgccagcctcttgggggcagttccggcctctccgacttccccactggccacactccattcagactcctttcctgccttgtgacctcagatggtcaccatcattcctgtgctcagaggccaacccatcacaggggtgagataggttggggcctgccctaacccgccagcctcctcctctcgggctggatctgggggctagcagtgagtacccgcatggtatcagcctgcctctcccgcccacgccctgctgtctccaggcctatagacgtttctctccaaggcctatcccccaatgttgtcagcagatgcctgacagcacagacaccatctccattcacatgggccactctgttccca

SEQ ID NO: 97281 - DNA, 1120 bp, Homo Sapiens
ggccgagaataactacgcgggagcccacccgttctccccatcccggggggctccgtaggcagcccacatccacctgaggtgcccggacccggaagagggacctcgagtccagcagaaagatctgatgagtggcctgggaatcgagaggccggactccccaagagctgcagaggctgcagaggcagtgcagaccagctccctcccaccagacagcacagtagctaggaagccagagcaccaggtcaggaggaagacaggggtgtggcgcctcgttccttccgccaggagctcatggggcttcgttggacccaatcccgttgcctttgtttgacgtagaatgccggtagtgagacagcaatagttctgcttgccaagagttccaagtctggggctgggccttggggctttggctccgcatgagggagggatagcctttcagggagaaggaggagctgccttggacgacgggcaggtcattgtcagagttctgaatgctggaggagtactcccagacccgggaggtgtagttacctttggtgccatagagattgttgaaattcttctgggtggtctccttggtgaagcggccaggagacgagggctggtatgatgtccggaccccacctttgggtgtcaggtacatggagtatctcttcatggtgtccggtgcactccactcacccccgaagctgttcgtgtagttgttcacatagcgatggtcaccaccgttctccatgtggttcctctcaatgaagttacggctcaggtccgccttgcacatcttctcaacgtggcgcatgcatacattgagcaggtcgtccttgaagttgcctagtgactgtcccaggccctccccctccagcaggacatgataggtgggcaggggtggggggagagagtaattgctcatcaatgcaccaaattcctgcagaaacaacacagagtcgctgatgctatgcagctgctcccgggtctgcttgtcctcatgcagcaccttggctctctcatccagagcatccatgatcaccttcacttggtccacagcatcctgctcccgctgctccagcgcagccctcacttcctcctttatgcttctccaggtccctcgtccgatttgacc

SEQ ID NO: 97282 - DNA, 855 bp, Homo Sapiens
atcggctaggtagcgaggcctgggtggtgaattcggcacgagggtgcttggcgcgtaccgtgcggtccctgtagttggaggacgggcggtcgcgcggcctttcccactagccggaggtcggagataagtacccgccgcccggctcctctcgggaaagcggggtggtcctcgaaccttcagcgagggtggggagttgcccagtagcctctagttcgttagtcaaaacgtgaaaaaaaagacctgctttgccctgggaaatagtaaccctgccaaatacatcagcttgtaggagacagaggatgtgatggagctgcttgaagaagatctcacatgccctatttgttgtagtctgtttgatgatccacgggttttgccttgctcccacaacttctgcaaaaaatgcttagaaggtatcttagaagggagtgtgcggaattccttgtggagaccagctccattcaagtgtcctacatgccgtaaggaaacttcagctactggaattaatagcctgcaggttaattactccctgaagggtattgtggaaaagtataacaagatcaagatctctcccaaaatgccagtatgcaaaggacacttggggcagcctctcaacattttctgcctgactgatatgcagctgatttgtgggatctgggctactcgtggggagcacaccaaacatgtcttcttgttctattgaagatgcctatgctcagggaaggggtgccttgaggttcccctccagaagtctgaaacctggcgcggggagaggctcttttctcggctgggtccttggaatgtagaggggaacctaacggcggcacaacaccacacacggcggaagtttggagtcaa

SEQ ID NO: 97283 - DNA, 795 bp, Homo Sapiens
tcaaattctcccaagctggaggtagtggagcaaacaagatcagcaacaatgagggagcagctgcaccactttgtgttactctctgatggccagcacagggctgcaagtagtggctgcaaaaaccagacaaatagatggaaatccaggaactagaggaaattcaggcctgccaggggctctgggaagtgtttgttactctctcagaaagagccaggattatctgcacaaaactggaaggtttattgtgattggcgggattgtctcccctgtccacgactcctatggaaaacagggcctcgtgtcaagccggcaccgtctcatcatgtgtcagctggccgtccagaattctgattggatcagggtggacccttgggagtgctaccaggacacctggcagacgacctgcagcgtgttggaacaccaccgggacctcatgaagagggtgactggctgcatcctctccaatgtcaacacaccttccatgacacctgtgatcggacagccacaaaacgagaccccccagcccatttaccagaacagcaacgtggccaccaagcccactgcagccaagatcttggggaaggtgggagaaagcctcagccggatctgctgtgtccgcccgccggtggagcgtttcacctttgtagatgagaatgccaatctgggcacggtgatgcggtatgaagagattgagctacggatcctgctgctgtgtggtaagtgacctgctggagtcctttctgcaatccagggctctggaacgaggcagatatggaggtgatagtggtgactttg

SEQ ID NO: 97284 - DNA, 631 bp, Homo Sapiens
gaagacgggccgggggactgggggtggaggaggccgcctccccttcggcgcactgccccctggcagactcttccgccgggtccgcctccttttcaccagcacctgttcaaccggaacatcaagggcctggggcccgccgcggccccccgtcggctctttagtacctttcatccggaagggagatgaatccccgcccaggaggggggagtagggcgggggagaacttgtccttgacctggtctttggcgtcagggatttactcccttaatcccggagaggcgggagtttggggaggtccaggaagctgagttctgggctgcagccccacacctctcctcgctccggtggacacagggaatctcggagggctgccgggacgaagaggctacatctacacagggcggtgtaggggaagcccgtctcttcgacctccgtgcctgggagtaggggccgagagccagattattgcgatgaccggaatcccggcgaggacggccgcgctccggttccttggtcaaatttgtgaatttcgctaacacgaaaagttaaacaagacacagaggagaaactgcacttaagggtttctaacgaattacctttactagcaagaataaaactgcaagaaaattaa

SEQ ID NO: 97285 - DNA, 1094 bp, Homo Sapiens
ggaacggcagtaactataacggtctaaggtagcgaggcctgggtggcgaattcggcacgaggtggtctggctgccaggccctgggggtctaggggtgcaggagcggccagcgctggggccagcgggacagggcagagcctcatcgttctgcagaatgtggggggtggggaggcagggccacaggaaatgagtggggtgcagctccagcccctccgaccagccccagaagtaaccacggtccagctccagccagcgcaggaggtgaccacagtccagctccagccagcacaggaagtaaccacggtccagctccagccagcacaggaggtgaccacggtccagctccagcccgtggccggccagctctccaattccagtgggggagctgtggctactgaggcacccaacctgctggttgttcagagcggggcagctgaggagttgctcactggcccaggccccggggaggcgggggatggcgaggccagcactggtgtggtccaggatgtcctctttgagacactccagacggacgagggcttgcagagcgtgctggtgctgagcggggccgatggcgaacagactcgactctgcgtacaggaggtagaaacacttcctcctgggctgacggagccgcctgccaccggaccacccggacagaaactcctcatcatccgcagcggccccagcactgagctgctggacagcaggaacactggaggaggcaccgcacgctgaaggctcctggcccaccgcgtacaggccaggcctcggggacccgcggggctccccggggctcaggctcccaaatgggtgcacgttcgtccccgcagaagctggcctgtgttatgacccctcagggctgcccttcagtccagattgtccaagactctacgcgggagtcagctggtgaacaccggttttgagcgagaggctgtgattcccttcggcccggaagagaggaccggattaatgccagcacgtgtcggggatggtgcgcaggtgggttgtaataagaaccgggtctccgaggaagacgagtaagaaacactcgggtcatagcgggtgtgggaagaggtgttagactcggcagc

SEQ ID NO: 97286 - DNA, 924 bp, Homo Sapiens
tgtagtacgaggctcgcgtggttaattcggcacgaggcaagagttggctcttgtgatgtggaggcttgatgctgcggttgggggctgcactacctgcgtccgtggaagcctctgcctcagcggggacggcctcctgctgcaggtcctgggcagcccacagtagtgctagctgaggcccagaggaacgggaggaaagggaggcagcgccggacggcgcagctggccaagaggcgggcggggccagaaatacctcatgcccctgcaccagcccctccgtctccaggccccaggcctctttgtggacccatcttcctcctctgccaccccgatcttcactcggatacctcttgatttctgtggataagggaagcggccacttctccctccctgagacccgaggatgcccctggtgggggtggccttctcaggactcctgggtggcacagcagcaggaccttgtcatgggactgatgctgagcagggagggggctgccaggctggctgccgatgctccgttcacataagccagtgtggttctggggacctgaggagccctgtggcacccacagggggcacctatgtctgccgtggctcctcgggttgcgtgccctgtgtgacaaagcccaacagcaagggtgactcctggcaggtggggggcagcacgatgggcagagggccagagctctggccacttctgcccacattcattagggttgtgaactttgtcttcactcttttcgtgccctggttgtgaggatgctctaagaggtaatgccagggcccttcactccgaccccatgactgggaagaggctgtggagcgacgtggacctaggaggctcaaggcagtggtgtgggagcctgtatgaagacgcagatagcagtgaggagatggagaaagagagggtacaagcccaatgatgcg

SEQ ID NO: 97287 - DNA, 882 bp, Homo Sapiens
ttatgtggtagagagtatgaagtcgacggcgcgccgaattcggcacgagggcttcctgcacctggtgacgcttggcgaaactgaggtctcatggagaagccccggagtattgaggagaccccatcttcagaaccaatggaggaagaggaagatgacgacttggagctgtttggtggctatgatagtttccggagttataacagcagtgtgggcagtgagagcagctcctatctggaggagtcaagtgaagcagaaaatgaggatcgggaagcaggggaactgccgacctccccgctgcatttgctcagccctgggactcctcgctccttggatggcagtggttctgagccagctgtctgtgagatgtgtggtatcgtgggtacaagggaagccttcttctccaagaccaagaggttctgcagcgtctcctgctccaggagctactcctccaactccaagaaagccagtatcttggctagattacagggaaaaccaccgaccaaaaaagccaaagtcctgcacaaggctgcctggtctgccaaaattggagccttcctccactctcaagggacaggacagctggcagatgggacaccaacaggacaagacgctctggtcttgggcttcgactgggggaagttcctgaaggatcacagttacaaggctgctcccgtcagctgtttcaagcacgtcccactctatgaccagtgggaggatgtgatgaaaaggatgaaggtggaggtgctcaacagtgatgctgtgctccccagccgggtgtactgggatcgcctctgtcatccagacagcagggtatcgggtgctgcttcggtatgaaggctttgaaaatgacgccagccatgacttctggtgcacctgggaaca

SEQ ID NO: 97288 - DNA, 964 bp, Homo Sapiens
  misc_feature (27)..(27): n is a, c, g, or t
tgagactcgtcgcaccgtttccgccgncaccaccgcgcctccgcctcggccgacgacgcagctgctcctggtccccgtccctttgccgccctcgtcaggcccagctctcctgcgccgccgcctcccgacgcgccccgccatgccgctctactccgttactgtaaaatggggaaaggagaaatttgaaggtgtagaattgaatacagatgaacctccaatggtattcaaggctcagctgtttgcgttgactggagtccagcctgccagacagaaagttatggtgaaaggaggaacgctaaaggatgatgattggggaaacatcaaaataaaaaacggaatgactctactaatgatggggtcagcagatgctcttccagaagaaccctcagccaaaactgtcttcgtagaagacatgacagaagaacagttagcatctgctatggagttaccatgtggattgacaaaccttggtaacacttgttacatgaatgccacagttcagtgtatttcgttctgtgcctgaaactcaaagatgcccttaaaaggtatgcaggtgcctttgagagcttcaggggaaatggcttcagcagcagtatattactgcagccttagagattagtgagattccatggataaacacttcttccagtattccacactattattctactgcagttttgcacatggcttacccaacagttgtgcagagaaaggtgaaacaaggacaagaatctatcaacaggatgttaatgaatgtggcatacaaaatgcatgcggagtatggaaagagaaaattggaagacaatagaggatgattgtggtaaaagaggaagaatctgcatatgaataggagggacacttctacaaggaaaagtaatcggtaaagattagggagtgagttggaactacatgaagtgaaagaagggagagaagagtacaaggaaggaaaaattagtaaagggaa

SEQ ID NO: 97289 - DNA, 608 bp, Homo Sapiens
  misc_feature (593)..(593): n is a, c, g, or t
gctggcggttccgtttggtctgagggagcgatggcggtacgcgcgttgaagctgctgaccacactgctggctgtcgtggccgctgcctcccaagccgaggtcgagtccgaggcaggatggggcatggtgacgcctgatctgctcttcgccgaggggaccgcagcctacgcgcgcggggactggcccggggtggtcctgagcatggaacgggcgctgcgctcccgggcagccctccgcgcccttcgcctgcgctgccgcacccagtgtgccgccgacttcccgtgggagctggaccccgactggtcccccagcccggcccaggcctcgggcgccgccgccctgcgcgacctgagcttcttcgggggccttctgcgtcgcgctgcctgcctgcgccgctgcctcgggccgccggccgcccactcgctcagcgaagagatggagctggagttccgcaagcggagcccctacaactacctgcaggtcgcctacttcaaggtgcagacctgcctggaaccaggcggccggggtccttctggggagaggagtgttgcaggggacctgaggagcttgggggatcggggaagtgtccgcanggaggggaaagtggc

SEQ ID NO: 97290 - DNA, 515 bp, Homo Sapiens
ttgctgctacctgaatttcagcaagatccaaagcaggaaaatggggctaaaaatagtaatcaattaggtgggaacacagagagcagcgaaagcagtgaaacttgcagcagtaaaagccatgatggagataaattcattccagctccaccttcttctccattgagaaaacaggaattagaaaacttaaagtgctccatacttgcttgcagtgcctacgtggctctggctttgggtgataacctcatggctttgaatcatgcagataaacttcttcagcagcccaagctgtcaggatctcttaagtttttgggacatttatatgctgcagaagccctcatctctctcgacagaatatctgatgccattactcacttgaacccggagaatgtcactgatgtctccttagggatctcttcaaatgagcaggaccaaggatcagacaaaggtgaaaatgaagcaatggaatcctctggtaagcgggcccctcagtgctaccccagttccgtcaactctgc

SEQ ID NO: 97291 - DNA, 894 bp, Homo Sapiens
ccgggatccgggatgtgcaggaaaggctaaccggggttggggtgctccccctaaatctggaaaaatgaacatgaacatccttcaccaggaagagctcatcgctcagaagaaacgggaaatggaagccaaaatggaagcagaaagccaagcagaatcaggtggccagccctcagcccccacatcctggcgaaatcacaaatgcacacaactcttcctgcatttccaacaagttggccaacgatggtagcttcttgcagcagtttctgaagttgcagaaggcacagaccagcacagacgccccgaccagtgcgcccagcgcccctcccagcacacccacccccagcgctgggaagaggtccctgctcatcagcaggcggacaggcctggggctggccagccatgccgggccctgtgaagagctactcccacgccaagcagctgcccgtggcgcaccgcccgagtgtcttccagtcccctgacgaggacgaggaggaggactatgagcagtggctggagatcaaagtaacacccccagagggagccgagactcggaaagtgatacgagaaattggcccgctttgtggcagaaggaggccccgagttagaaaaagtagctatggaggactacaaggataacccagcatttgcatttttgcacgataagaatagcagggaattcctctactacaggaagaaggtggctgagataagacaggaagcacagaagtcgcaggcagcctctcagaaaagtttcacccccagaggacgaacgaggtcaagaacctttgcgagaaacagcgcgcagggtcataagcggacgcagggtcccgaaggtggaaacccattgcccacgagaacaagcgtgaaaccaaggcattcagcttactgactgag

SEQ ID NO: 97292 - DNA, 749 bp, Homo Sapiens
tcttatcgtgcaaaaatgcaaatgctgggttatccttgtagtcctccatagctactttttctaactcggggcctccttctgccacaaagcgggccaatttctctatcactttccgagtctcggctccctctgggggtgaaactttaaggaggctgtcagtactggggttcaactcacacaccccacagtcaataggcacactctctctttgatctccagccactgctcatagtcctcctcctcgtcctcgtcaggggactggaagacactcgggcggtgcgccacgggcagctgcttggcgtgggtatgtagctcttcacagggcccggcagtgctggccagccccaggcctgtccgcctgctgatgagcagggacctcttcccagcgctgggggtgggtgtgctgggaggggcgctgggcgcactggtcggggcgtctgtgctggtctgtgccttctgcaacttcagaaactgctgcaagaagctaccatcgttggcaaacttgttggaaatgcaggaagagttgtgtgcatttgtgatttcgccaggatgtgggggctgagggctggccacctgattctgcttggctttctgttccattttggcttcaatttcccgtttcttctgagcgatgagctcttcctggtgaaggatgttcatgttcatttttccagatttagggggagcaaccccaaaccaccggatagcctttcctgcaacatcccggttgtccatcttgagactcatcc

SEQ ID NO: 97293 - DNA, 896 bp, Homo Sapiens
ctaagggcgagagagtatgaagtcgacggcgcgccgaattcggcacgaggcgacagatggcgctgcgggcgatgcgggggattgtcaacggggccgcacccgagctacccgtgcccaccggtgggccggcggtgggagctcgggagcaggcgctggcagtcagtcggaactacctctcccagcctcgcctcacatacaagacagtatctggagtcaatggtccactagtgatcttagatcatgttaagtttcccaggtatgctgaaattgtccatttgaccttaccggatggcacaaagagaagtgggcaagttctggaagttagtggttccaaggcagtagttcaggtatttgaagggacttcaggtatagatgctaagaaaacgtcctgtgagtttactggggatattctccgaacaccggtgtctgaggatatgcttggtcgggtattcaatggatcgggaaaacccattgacagaggtcctgttgtactggccgaagacttccttgatatcatgggtcagccaatcaaccctcaatgtcgaatctacccagaggaaatgattcagactggcatttcggccatcgatgggatgaacagtattgctagggggcagaaaattcctatcttctctgctgctgggctaccacacaatgagattgcagctcagatctgtcgccaggctggtttggtaaagaatcccaagatgtagtagactacagtgaggaaattttgcaatggattgctgcatggtgtaacatgaactgccggtctcaatctacttgagaatgctcatgacatgttgctctttgactgctatgacacatgacgatacatctcgcgctcaccactattcgctcagtggactgtgttttaaactatttctactcaagtc

SEQ ID NO: 97294 - DNA, 775 bp, Homo Sapiens
taggctaggtacgaggccgggtggttaatcggcacgaggccagaagccggtcaaggtccaggttgatatcacctacacggagggtggggaggcgcagaaggagaacggcatctactccgtcaccttcaccctgctctcaggccccagccgtcgcttcaagagggtggtggagaccatccaggcccagctgctgagcacacacgacccgcctgcggcccagcacttgtcagacaccactaactgtatggaaatgatgacggggcggctttccaaatgtggaattatcccgaaaagttaacatgtcacctccacgaggccatcctctgtgaccgaaggcagctgctgcggacccgccctccctccgctcctgctgttgctgccgggcagtgaggcccagcccagcgccccgtccaccccgcggcagctcctcgcctcagctccgcacggcccgtgggaggaaggccaggctcgggggagcctcctccagcccggccgacccggactcccggtcacctgacccctcagcaagaacagctgcctcccgtcctctcgtctcacccgcgcctcccttgcctcatctggggcggctgtgggctctggcgctcctctctggctgaggtggaaacagagacaccctgtggcaccagagccttcccagcaggcaggccgctgggctgggatcagtgttatttattgccgtttattatggatcctccgactctgtcaggaaggcggggcacatcctgcgttggcgttcagcggggggtggggcagc

SEQ ID NO: 97295 - DNA, 939 bp, Homo Sapiens
  misc_feature (14)..(14): n is a, c, g, or t
  misc_feature (21)..(21): n is a, c, g, or t
  misc_feature (36)..(36): n is a, c, g, or t
atatcctacaccanacgtagnccccactcgataaanatcagtttgttcacgccatgtccatcgttgttgtttctcccgccgtgcaatttctttcagcttgaaggctgcttcacaacgccgccttcgccggtccccacgttctgcagcctctatcttcatttgttctctcttgtagctgcgctgatacgctgttactagacgccgaagcctagctgttagggcagagcccggaggccagaataaatggcctggctgttgggtcacctgggcttcatctccatcaatcactgagatctcctcatccatcatcatcaagggatcaccctcatcatcttggtcctttgggggaccttggagtggtttatattcaggatcttcacaatctttatcaaagtcaaccccttctactatgtcagagaagttatccaacactcgatgttctgctgcaattgctttgtcatctggtcggccagccttttctaggaaacataaggctgggtctgccctcatggtattatatttctcatagccatgtttaaagactccaatgagcagcgacttgtcagcctcactgtcccaccaagttgttggaacctccagttgatccactactgggaaccatatgtcaatctcactggcaatcgcaccccctaacaccttttctgcttggtctccaataacctcctgcctcaggtagtatagcattcgtacccgcaacagtaccttgttacactgatgtttcaagtgcttcttataactttcatcttggaacaagtgtcagggttatatttccggatccatctgccttatggatatcaaaagtgctttgtgactttactttttttcctttggcgtccacgaggcacagggatagatagacctgaatgattctgcaattctttggtctgcctcggccgattcacgccggcctcaccctag

SEQ ID NO: 97296 - DNA, 797 bp, Homo Sapiens
tacggctaggtgcgaggctgggtgtcaattcggcacgagggccacatcgccttccacgtgcccgccgggcagcccctagcccggaacctgcagcgcctcttcggcttccagcccctggcttcgcgggaggtggacggctggcggcagctagccctgcgcagcggcgacgcggtctttttggtgaacgagggcgcagggtctggagagccgctgtacggcctggatccgcgtcacgccgtgcccagcgccacaaacctgtgcttcgacgtggcggacgccggcgctgcaacccgggagctggcagcgctgggctgcagcgtgcctgtccctcccgttcgcgtgcgggacgcgcagggtgccgccacttacgccgtggtcagctcgcctgccggcatcctcagcctgaccttgctggagcgcgctggctaccgcggacccttcctacccggcttcaggcccgtgtcctctgcgcctggccccgggtgggtcagccgcgtggaccacctgaccttggcctgcacccccggcagctcccccacacttttgcgctggttccacgactgcctgggcttttgccacttgccgctgagcccaggtgaggatcccgagctgggcctcgaaatgacagcagggtttgggcttgggggactgaggcttacagccctgcaggcccagccgggcagcattgtccccactcttgttctggctgagtcccttccgggggcgacgacacgacaggaccaggtggagcagttcctggcccggcacaaggggcaggcctgcagcacgtggggctg

SEQ ID NO: 97297 - DNA, 881 bp, Homo Sapiens
gcaaggtcaaccagctccctatcaaagacacacgggagggatacgtctgtgaggagccattctgtgttcttccggctttcagtcttccatatcagtgaatgttctcttctcgtaattctgaacgaggttggaagctgtgatctgagaagcctgccccttctcccaacactgaaagtcattcagtcctttcttgccctgtttgaaataagcccctctccatctcgtctagcctggctaccagggctgaagtgtcttcgttgtaagcattctgtgaggagtccatgatgcggcgaaaacgtccgataaaagtctgcagcagagactgggaaatgtctgcattctcgggactgtcaaaatgcaggagctgggagccaaacccgtagaaatggggccccattttgtggaggtccaccacattgggatctgcactgaacacagtcctccaaccctcttggtagatcttggggagttccacagaaaggatccgtcgcttgttgtcaaaaagtccttttgccagccacaagggtagttcaagcttggaaccctgtgggaccgcgttgtcagtctcggcgcctgcgctccgctccaggaagaaagcgccaaggcgaggcatggcggtctccgtgcgcaccggcagcttctcgtgggacatcaggatgtcgtccaaagaaagaaagttctcctcaggccccagcgcacccgactccactcggaaataagcctctgacatggcggccacttgagcttctccgcttccactcgcgtgattcggaggagcctcaggagttaggggtgtacaagacggggaagcggagactgggcaggatggtggggtcaggaaagtcctcgtgccgaattcgccacccaggcctcgctacctt

SEQ ID NO: 97298 - DNA, 1278 bp, Homo Sapiens
ggaactgatctcagctcgggcccgcgttacatcctcctcctcttcttccttcggcccagctttccttaggggctgcaacccggacgccgaggccggtttcggagtggggagtgcccattttctctccttcccacgttcctggcccccagacgccatttgcaggcgggtggcttgggtcagcctccccgcccccacccgactcccgtcacgggagagcgcacaccgcgccccgagaaccaatcagcagccgcgttaggtaaccatgtctgagtctggacacagtcagcctggactctatgggatagagcggcggcgacggtggaaggagcctggctctggtggcccccagaatctctctgggcctggtggtcgggagagggactacattgcaccatgggaaagagagagaagggatgccagcgaagagacaagcacttccgtcatgcagaaaacccccatcatcctctcaaaacctccagcagagcggtcaaaacagccaccacctccaacagcccctgctgccccgcctgctccagcccctctggagaagcccatcgttctcatgaagccacgggaggagggggaaggggcctgtggccgtgacaggtgcctctacccctgagggcaccgcccccacaacccctgcagcccctgcgccacccaagggggagaaggaggggcagagaccaacagctgtgtaccagatccagaaccggggcatgggcactggcgacagcagccatggaccctgtcgtgggtcaggccaaactactgcccccagagcgcatgaagcacagcatcaagttggtggatgaccagatgaattggtgtgacagtgccatcgagtacctgtggatcagactgatgtgtggtggtggtgtcctgggcctccaggggacaggcaagtccatggtcatgtcattgttgtcagcaaactccagaggaggacagcaaggacttatgttttccgggccagagcgctgaaggtgaaaggaacgaggggggcaacagacagtggatcgatgctttattacccaagaacggatgtttctggacaaacagccatccggagcccttatctagaccagctcagcgattatgacgcaactgctccagagtaaacttcccaaatttgtgaatgcgtcacccgatgggctctctcacggcgcgtgcgctgggccggcggtcacgcacggttcaggtccgcgaccgaaggggggcgccccagatcggagatgtcgaacctggaccaacttcaacacagagagctcacgcaca

SEQ ID NO: 97299 - DNA, 875 bp, Homo Sapiens
agctgctggaatgctgggcttgaccagtgagcagttggcaattctacaaagaagtggacgtagagattgtcatactcatagccttgggctgaaacgacctctccatttacaaagagccggagggcacctgggacagtcatctcaaagtcggtgcctacgaggctgctgagatactccttgtgccggccataaagatccttgaacactcgccgttcccgctcctcctcctccggctgtgcgtggggggaaacattgtcgatcgtatatttccacagctcctgcttctccccctccgtctcaatcctgtagggtcctttgaggcccgtgaagtcaggctttactgtgatcacaccattgctatccaccttcagagtacacaggacatgttcatacttcttatagccaagctttttatagggccccaggtctgccatgatgtgcattgtctgaagaggggtgttaatgacgtggttgttcctgacaaactcttctgagggctcccaggtgacgatgcgtgacttgaggatgccgccctccatccctcgcctgtcctgccggcgacgcctgacatttgccattcgctcgaccaagaatgaaggcacctcgctggctgcagtggtcattctctgacagtgctcctccaaattggtgtatctatcagagtcagtgtaggtaaagattcgtcggtttttcttgccacccgaattctccagcttcaggatctcctgacggtactgataatccaaaggactctgacaggctgtttcattttggtacagatctaccttcaaactggctaaagagcttctcctgccacccaatcacaatctcctcctcttcgtcttcctctggacggtgtccactgccctcgtgcc

SEQ ID NO: 97300 - DNA, 1438 bp, Homo Sapiens
ggcagtaactccataacggttctaaggtagcgaggcctgggtggcgaatccagcacgagggtctgacggcttgagtagcgctagggagaatccctgcaggtaatatttgacttttgcttcatattaatctgagtggaaaataaaagggccctcttctcctctcgcttccctgccgggcaggcgccatggcggaagcctcggcgacgggcgcctgcggagaggcgatggcagcggcggaaggctcctcgggcccggcgggcttgactctgggccggagcttctcgaactaccggcccttcgagccccaggcgttgggcctcagcccgagctggcggctgacgggcttctccggcatgaagggctgaggctgcaaggtcccgcaggaggcgctgctcaaactcctggcgggactgacgcggccggacgtgcggcccccgctgggccggggcctggtgggtggccaggaagaggcgtcccaggaagccggcctgccggcaggagcgggccccagccccacctttccagccctgggcatcgggatggactcctgcgtcatccccctgaggcacgggggcctgtcactggtgcagaccacggacttcttttaccccttggtagaagatccctacatgatggggcgcatagcttgtgccaacgtgctgagtgacctctacgccatggggattactgagtgtgacaacatgttgatgttactcagcgtcagccagagtatgagtgaggaggaacgcgaaaaggtaacgccactcatggtcaaaggctttcgggatgcggctgaggaaggagggacggcagtgaccggtgggcaaacgggtggtcaccccttgcgattataactcggtggagttgcccactgtagtatgccaacgcaactgagttcataatgccggacagcgccgtcgtttggggacgtgctaggtgtaacccaacaccgttagggaacccaacgttgcctgtcactgccccaccactgggctggataatcctgcacacatcggactaacaggtacaccatggtggctctcccagacgaaccacgtgcacctcgccctattcaggacagcatggtcacactatggctacccctttcagcgaaactgtctgaagagattagatggcagcacaattttacatgcccaatgttcggtgaccaacggtatatattcagagcggcttatgggcgattcctaaggaccatgtatcacacgaagtcctgtgtaacaacgaaacgcacgcaactactgacgtggccccgttgtcgataagacaatgtcatggacaacaagaatgacacagaacatggttaggccgcgtaacaaccgagaccaggtgaacacgacatggagacgcatatcacaggaacgctccgcgcgcataccgtctcgggaccatcactagtcgtgagtcacacagcaaaagg

SEQ ID NO: 97301 - DNA, 1826 bp, Homo Sapiens
  misc_feature (21)..(21): n is a, c, g, or t
  misc_feature (898)..(927): n is a, c, g, or t
ttacggctagtacgaggctgngtgttgaattcggcacgagggggacaggcagctacgggcccgagtgtgactggtgggcgctgggtgtattcgcctatgaaatgttctatgggcagacgcccttctacgcggattccacggcggagacctatggcaagatcgtccactacaaggagcacctctctctgccgctggtggacgaaggggtccctgaggaggctcgagacttcattcagcggttgctgtgtcccccggagacacggctgggccggggtggagcaggcgacttccggacacatcccttcttctttggcctcgactgggatggtctccgggacagcgtgcccccctttacaccggatttcgaaggtgccaccgacacatgcaacttcgacttggtggaggacgggctcactgccatggtgagcgggggcggggagacactgtcggacattcgggaaggtgcgccgctaggggtccacctgccttttgtgggctactcctactcctgcatggccctcagggacagtgaggtcccaggccccacacccatggaactggaggccgagcagctgcttgagccacacgtgcaagcgcccagcctggagccctcggtgtccccacaggatgaaacagctgaagtggcagttccagcggctgtccctgcggcagaggctgaggccgaggtgacgctgcgggagctccaggaagccctggaggaggaggtgctcacccggcagagcctgagccgggagatggaggccatccgcacggacaaccagaacttcgccagtcaactacgcgaggcagaggctcggaaccgggacctagaggcacacgtccggcagttgcaggagcggatggagttgctgcaggcagagggagccacagctgtcannnnnnnnnnnnnnnnnnnnnnnnnnnnnncaccttcccatctagatggccccccggccgtggctgtgggccagtgcccgctggtggggccaggccccatgcaccgccgccacctgctgctccctgccagggtccctaggcctggcctatcggaggcgctttccctgctcctgttcgccgttgttctgtctcgtgccgccgccctgggctgcattgggttggtggcccacgccggccaactcaccgcagtctggcgccgcccaggagccgcccgcgctccctgaaccctagaactgtcttcgactccggggccccgttggaagactgagtgccccggggcacggcacagaagccgcgcccaccgcctgccagttccacaaccgctcccgagcgtgggtctccgcccagctccagtcctgtgatccgggcccgccccctaacggccggggaagggaggggcccggcccccggccggcgaacggggctcgaagggtccttgtaaccgagaatgctgctgctgctgctggggggatcacagaccatttctttctttcggccaggctgaagcccctaccttggatgggaaaaactgccaggcctggggaaagcacaaaaccagggaacccccaagttccaatactccaccgaaacccccacctaatcgattggttccacaaagctgcaaaagctttaacctggtgcaataacgacactgcctccgagagaaacataattgggtaagaatctcctgccctgcctctaacagcggaacatcatgcctttaaggccaaagacgtggcattgatttccggagaaataattagaaacataccaaccaataaaaacagaagacaagtttacaaagacacccaccgaccagggagtcgatggcaaaagtcaaagggagaaaattaggaacaagcaccacg

SEQ ID NO: 97302 - DNA, 746 bp, Homo Sapiens
  misc_feature (570)..(584): n is a, c, g, or t
  misc_feature (612)..(624): n is a, c, g, or t
  misc_feature (644)..(654): n is a, c, g, or t
  misc_feature (675)..(685): n is a, c, g, or t
gctggtaccggtccggattcccgggatggggttgggaagatggcggctcccagcctcctcaactggaggcgagtttcttccttcacggggccggtcccccgcgcccggcacggacaccgagcggtggccatccgggagctgatgatcatctttggagggggaaatgagggcatcgcggatgagctgcacgtctacaacacggctacgaatcagtggtttctgccagctgttagaggagatatccctccaggctgtgctgcccatggatttgtctgtgatggtaccagaatattagtatttgggggaatggttgaatatggaagatacagcaatgagttatatgagttacaagcaagtcgttggttatgggaaaaaagtgaaaccccatccccctccttctggtttacccccttgtcctcggcctggacatagctttctctttatatggtaaccaaatgctatttgttttgtggggcctggcaaacgaaaagcgaaaattccaaccaatatggttccccgaaaatttaaatggatttttattgaattgggagctaaccccatgggctcccnnnnnnnnnnnnnnnttgaaacacatttccccagggactaaannnnnnnnnnnnncccttttccccaaaaaaaannnnnnnnnnnggttgtgttatattttggccnnnnnnnnnnntttcggggaaagcccctcaaaaaggggtttggttttttgggggggaaaaaatgtggggggg

SEQ ID NO: 97303 - DNA, 882 bp, Homo Sapiens
  misc_feature (172)..(182): n is a, c, g, or t
  misc_feature (770)..(770): n is a, c, g, or t
cttccctgcttgatctgtgtaccctgctctttctccttcattccgcagcctcctttgccctgtgacctgcaggtactggacggtccctagagaggataccgggacgctcctgaagccgcgagatgatttcaagcagatgcagcctgaccattagggccaaggccaaattgcnnnnnnnnnnngaagtttgcctttattctactccatccacatctaaactttggaggtcaaggctgtggacagatcagaagacatagttccctccttctggggctccacatccttcattcactgatctctgggaaggaggatgggtggcaggatgggtcttccatgatactgaagggagagccacatgttgatgcccaggaccagctgcctccttggtctgaaaggcctgatcgaggccaggattggctatgagagctgggaaatgggaccatctttgaagccatgggagagggtgagagccaccatcactcatgttcttgaatgggaactgcctggagaccctgaagaagaaggagcctgaaggaggaaggaggaggctgagccatcccgggaacatgggctggatgaggccaagccaggagacgacaccaccagatagaagtcaccattcaggatttggacttttctgtggagatcctggccccgagatcgaacccttctccctgtgggtgttcccgcaggagatggtgctggagatccaccagctgttcatggaccatgaatacccatgtcaccacatcacttctcactgcacctgngtggcagcacactggaccacgtctcagagctgcgcagcatggcagggctgcaggcgggcttgctgctccacgtggtgggagaaccctgcaccatgcacaagggcccacggtg

SEQ ID NO: 97304 - DNA, 2479 bp, Homo Sapiens
gcttctggtgtgagaatgttaaacctatgttgagaatgaatgctgaggcccctaacctcgagccaggtactcgctgcttcacgttgattaagtctcttttaaaagccaacagctcatcaaggaagtggatgccaaaactactcatggaattctacagaaaccagtggaggctgacaccgacctcctgggggatgcaagcccagcctttgggagtggcagctccagcgagtctggcccaggtgccctggctgacctggactgctcaagctcttcccagagcccaggaagttctgagaaccaaatggtgtctccaggaaaagtgtctggcagccctgagcaagccgtggaggaaaaccttagttcctattccttagacagaagagtgacacccgcctctgagaccctagaagacccttgcaggacagagtcccagcacaaagcggagactccgcacggagccgaggaagaatgcaaagcggagactccgcacggagccgaggaggaatgccggcacggtggggtctgtgctcccgcagcagtggccacttcgcctcctggtgcaatccctaaggaagcctgcggaggagcacccctgcagggtctgcctggcgaagccctgggctgccctgcgggtgtgggcacccccgtgccagcagatggcactcagacccttacctgtgcacacacctctgctcctgagagcacagccccaaccaaccacctggtggctggcagggccatgaccctgagtcctcaggaagaagtggctgcaggccaaatggccagctcctcgaggagcggacctgtaaaactagaatttgatgtatctgatggcgccaccagcaaaagggcacccccaccaaggagactgggagagaggtccggcctcaagcctcccttgaggaaagcagcagtgaggcagcaaaaggccccgcaggaggtggaggaggacgacggtaggagcggagcaggagaggaccccccccatgccagcttctcggggctcttaccacctcgactgggacaaaatggatgacccaaacttcatcccgttcggaggtgacaccaagtctggttgcagtgaggcccagcccccagaaagccctgagaccaggctgggccagccagcggctgaacagttgcatgctgggcctgccacggaggagccaggtccctgtctgagccagcagctgcattcagcctcagcggaggacacgcctgtggtgcagttggcagccgagaccccaacagcagagagcaaggagagagccttgaactctgccagcacctcgcttcccacaagctgtccaggcagtgagccagtgcccacccatcagcaggggcagcctgccttggagctgaaagaggagagcttcagagaccccgctgaggttctaggcacgggcgcggaggtggattacctggagcagtttggaacttcctcgtttaaggagtcggccttgaggaagcagtccttatacctcaagttcgaccccctcctgagggacagtcctggtagaccagtgcccgtggccaccgagaccagcagcatgcacggtgcaaatgagactccctcaggacgtccgcgggaagccaagcttgtggagttcgatttcttgggagcactggacattcctgtgccaggcccacccccaggtgttcccgcgcctgggggcccacccctgtccaccggacctatagtggacctgctccagtacagccagaaggacctggatgcagtggtaaaggcgacacaggaggagaaccgggagctgaggagcaggtgtgaggagctccacgggaagaacctggaactggggaagatcatggacaggttcgaagaggttgtgtaccaggccatggaggaagttcagaagcagaaggaactttccaaagctgaaatccagaaagttctaaaagaaaaagaccaacttaccacagatctgaactccatggagaagtccttctccgacctcttcaagcgttttgagaaacagaaagaggtgatcgagggctaccgcaagaacgaagagtcactgaagaagtgcgtggaggattacctggcaaggatcacccaggagggccagaggtaccaagccctgaaggcccacgcggaggagaagctgcagctggcaaacgaggagatcgcccaggtccggagcaaggcccaggcggaagcgttggccctccaggccagcctgaggaaggagcagatgcgcatccagtcgctggagaagacagtggagcagaagactaaagagaacgaggagctgaccaggatctgcgacgacctcatctccaagatggagaagatctgacctccacggagccgctgtccccgcccccctgctcccgtctgtctgtcctgtctgattctcttaggtgtcatgttctttttttctgtcttgtcttcaactttttttaaaactagattgctttgaaaacatgactcaataaaagtttcctttcaatttaaaaa

SEQ ID NO: 97305 - DNA, 1017 bp, Homo Sapiens
  misc_feature (871)..(879): n is a, c, g, or t
gcctgggtggcgaattcggcacgagggcgcggcggcggtagcagccaggcttggcccccggcgtggcagcagacgcggacccctccttcctggcggcggcggcgcgggctcagagcccggcaacgggcgggcgggcagaatgagtctgcaggtcttaaacgacaaaaatgtcagcaatgaaaaaaatacagaaaattgcgacttcctgttttcgccaccagaagttaccggaagatcgtctgttcttcgtgtgtcacagaaagaaaatgtgccacccaagaacctggccaaagctatgaaggtgacttttcagacacctctgcgggatccacagacgcacaggattctaagtcctagcatggccagcaaacttgaggctcctttcactcaggatgacacccttggactggaaaactcacacccggtctggacacagaaagagaaccaacagctcatcaaggaagtggatgccaaaactactcatggaattctacagaaaccaggggaggctgacaccgaccctcctgggggatgcaagcccagcctttgggagtggcagctccagcgagtctggcccaggtggcctggcctgacctggactgctcaagctcttcccagagccccaggaagttctgagaaccaaatgggtgtctcccagaaaaagggtctggcagcccctgagcaaggccggggagggaaaaccttagttccctattccttagaaagaagagggacccccgcctctggaaccctaaaagaccccttgccggaccaaatccccagcacaaaggggagaactccccaccgggggccaggaagaatgccaagggggagactccgccccggaaccgaagggggaatgccgcgcccnnnnnnnnncttggggctccccccgacaagtgcgccaccttccccccccgtgggggcaatgccccgtagaggagaccctgcgggaggggagccccccgttggcagggggcgtgcctccgcccaaacacccctgggtgtggccctggc

SEQ ID NO: 97306 - DNA, 389 bp, Homo Sapiens
gctgctcttcttgagccagacgaggtgctgaaggaatttgtcctgcctttcttgaggttagatgttgaagaggtagacctcagtctgaggatcttcatccagactctagaggcaaacgcgtgccaagaggaatactggctccagacctgctcccccggtttccactcctcttcagcttgtgccagctcctggaccgcttcagcaaatactggcagcttccccaggaaaaacggtgccctctcctttggataagaaggggtctagcgattccttttcctggagctccctgggggaaaattggttccccccatggtgaaaacttttcccccgggaggttggggatcaaacccccgggccggggtcccccccggcaaggttaaaaaaagcct

SEQ ID NO: 97307 - DNA, 951 bp, Homo Sapiens
acggcagtaactataacggtttaaggtagcgaggcctgggtggcgaattcggcacgaggctggacaggatactccaagcgggcctggacgtggagcgtctctccctcaggaatttcttccatcatttccattccaagcgaggcatgtggagccgtcgccagatgaagacgctgtagccggagggtgtccgcggggcccagcactccccgctctggactagcagtggctccccagggccctgctactgttcagggatggggagtggggtgacggctggaccccaagaggcctcgaagctgacggcccactccacctggagctgtcccctcacagaggcaggttccggggctcctgtctctgcctcctcggccttcagaagggaggactttgagagagaggccaggagggaccacttgctcagtcgagaacgggaagagctcctgagaaggacgggtcaggaaggagagatctgactgagcgacaccatcctcatccatgaaggtgcacgcccacatcccccaagcgctcctcacaccaagcgctgacccaacagagcctcttctagtggaccatattttattggggggcggggattttaaaaaaccagaaaaccgaaacatgctggtccagcagcgggggtgaggtagtagcactgagggacatgtaccaacgatgcagggctcacgacacacttcgtatgtaccctagggcgtatgtacctggacgcgggaacggtcccacgatgggggaagaatctctggtcgcacccccaagggcgtccgtgccattatcccagagagcaccaccatgttgcacaagtaagccaccacagaacaccccgggccaccggatacaggcgcattacaacttccctcccggaaggggcacagtaaggacaaaaagcacagaaaggggcaggaacaggggcttcgggccatggcaacgcggaga

SEQ ID NO: 97308 - DNA, 974 bp, Homo Sapiens
gcggccgctccaacatgttaccattctgatgttggagccggttagcgaaccccaagagtgcagagtgtggagcgtggagcgccgggactgtgcacgcttgaccggaagcccagaccagtgcggtcctagccagagagaaaggacatttgccaacaatgagacacgaagcgcccatgcagatggcctctgcccaagatgccaggtacggccagaaagactcctctgatcagaactttgactacatgttcaaattactcatcatcggcaatagcagtgtggggaaaacatcttttctattccgttatgcagatgactcctttacatctgcattcgtcagcacagttgggatcgatttcaaagtaaaaactgtattcaaaaatgaaaagagaatcaagcttcagatttgggacacagcaggccaggaaagatacaggactatcaccacagcctattatcgtggagccatgggctttattttaatgtatgacattacaaatgaagaatccttcaatgcagtacaagattggtcaactcaaatcaaaacatactcttgggacaatgcccaagttattctggttgggaacaagtgtgacatggaagacgagcgggtcatctcaactgaagcgaggtcaacatttaggagaacagcttgggtttgagttttttgaaacaagtgccaaggacaacattaatgtcaagcagacatttgagcgccttgtggatatcatctgcgacaaaatgtcagagagtttggagactgatcctgccatcactgctgcaaagcagaacacgagactcaaggaaactcctcctccaccgcagcccaactgtgcctgctagtgtccccgtgcacacaggcagctccagggggctctggttgccaacaaacagcatttgtaaatggtctattagccttcatttatactgcctaacaattatttgaaggaataaattgatgtcaatggctaaaaaaa

SEQ ID NO: 97309 - DNA, 802 bp, Homo Sapiens
aatggctaggtacgaggctgggtggcttatcggcacgagggccgctatagctgccggcggtgtgcgactgagtcggtggcgaagacgggaacgcgacgatggcggagactctgcccggggtcgggcgactcgggccctggcacggcttctctcggcccgggcgttgcggagactgggacgaggcggctcagcgagctgcgggtgatcgatctgcgggcggagctgaagaagcggaacctggacacgggcggcaacaagagcgtcctgatggagcggctcaagaaggcggttaaagaagaggggcaagatcctgatgaaattggcatcgagttagaagccaccagcaagaagtcagccaagagatgtgttaaaggactgaagatggaggaggaaggcacagaagataatggcctggaagacgattccagagacgggcaggaggacatggaagcaagtctggagaacctgcagaatatgggcatgatggacatgagtgtgctagacgaaactgaagtggcgaatagcagtgctccagattttggggaggatggcacggacggccttctcgattccttttgtgatagtaaagaatacgtggctgcacagctgagacagctcccggctcagaccccagagcatgctgtgggatggggaaggatcttagaacactttggaaacttcatcgttgaacttcaaagtaactccggacattgaggatccttttgggcagaaatgagaaatctcgacttgggggacttggtatctggccgtaaaaagaagccgaggggagcttgccggcggc

SEQ ID NO: 97310 - DNA, 1115 bp, Homo Sapiens
  misc_feature (926)..(934): n is a, c, g, or t
ttagtacgaggcctgggtgttgaattcggcacgagggaagagactcccgggctcttaacgtcgggtatcaggagtttcttcccggagcaaggacccccaagacggaagaggatggccgcggcggctctgaggagattttggtcccggcgccgcgcagaggcgggcgacgcggtagtggcgaagccgggagtgtgggcgcggctggggtcctgggcccgctgcgctgctccgtggactacgcctgaggcctgcagggacgcttcggcggaggctagggcccggccggggctgcgccgctgtgtatgtgggtctgctgggcggcgcggcggcctgcttcacgctggcgcccagcgagggtgccttcgaggaggcgctgctggaggcgtcggggaccctcctgctgctggcgccggccacccgcaaccgctgagtccgaagccttcgtgcagaggctgctctggctgcggggccgtggccgcctgcgctacgtcaacctgggtgctctgctcgctggtgtacgaggcgcccttcggagcgcccaggccagcctctaccagtgcgcgttgccgctacctgcagccccgtctggaccgacttccccggccgggtcctggaacgtgggcttcgtgggtcgctggtgggtgctgggggcctggatgcgcgactgcgacatcaacgacgacgaattcctgcacctgccggcgcattgcgggtggtcgggccccagcagctgcatttccgagaccaacgagcggctcttcgatgagaagtacaagcctgtcgtgctcaccgacgatcaggtggaccaggcgctgtgggaggagcccgtcttgccaaaggcgaaaacggacagctcgccctaggcaggccatcgttggtgagggggggccgagataaacctttggccccgtctgggaactggcgtnnnnnnnnncaggctcgcttgtcgctcccctggggacgttgcaaattatttgccaggggttccgcggtcggaactaggggggggctatccccccgcctgtgtttatagagcagctaaacacgcccggtgggggagaccacacactactcccgcgcggggcgctatgatctcgcccggagatgggatgcag

SEQ ID NO: 97311 - DNA, 545 bp, Homo Sapiens
  misc_feature (1)..(1): n is a, c, g, or t
  misc_feature (441)..(441): n is a, c, g, or t
ncagtgtgagccaccggtcccggcttaatcatttttagtatattcacaggattgtgcaaccatcactacaacccaagaacattttgatcatccaacaaagaaacacctcttgcccattggcagccatgccccattctcacgttcactctcagccccaagcaatgtatgtacttttcacctctgtagaattgactattctagatatttcacataaatagaatcttacagtatgtggtctttaatgactggcttctttcaattagcataatatttccaaggttcatccatgttgtagcatgtgttagtactcttttttttattgccaaataatatttcattgtgtatatataccacattttgtttattcattcaccagttgatggacatttgggttgtttctgtgttttagctatcatgcataatgctgctatgaatatttgntatacgttcgtgtgacgttgtttacttccctggctattcctggcggggcggcggcaccgggagccgccgcctggcggcgcggggtgaggcgccccccgcggttt

SEQ ID NO: 97312 - DNA, 177 bp, Homo Sapiens
cctacggctaggtacgaggctggggtgttaaatcggcacgaggaatagcataagcagtggagtgtgtcttcccctccctgcagtgttccttcccgtgggatgatcactctttagctgtatttggggctagaatgagatttgaaggaggccatggaacttctctttagaaagcctgcc

SEQ ID NO: 97313 - DNA, 970 bp, Homo Sapiens
taggctagtacgaggcctggttggaatcggcacgagggaggagcagctgtgctgctggctgtgctcggccttagtggtgtcggggtctagtggacagagaagactcttggccaggcagatggcttctcggtggcagaacatggggacctccgtgcgccggagatctctccagcaccaggagcagctggaggacagcaaggagctgcagcctgtggtcagccatcaggagacctctgtaggggccctggggtccctgtgcagacagttccaaaggaggctgcccctgagagccgtcaacctcaacctccgcgcagggccctcctggaaacgcctggaaaccccagagccaggtcagcagggcctccaggctgcagctcgctcagctaagagtgctttgggtgccgtgtcccagagaatccaggagtcctgccaaagtggcaccaagtggctggtggagacccaggtgaaggccaggaggcggaagagaggagcacagaagggcagtggatccccaactcacagcctgagccagaagagcacccggctgtctggagccgcccctgcccactcagccgcagacccctgggagaaggagcatcaccgcctctctgtccggatgggctcacatgcccacccattacggcgatcaaggcgggaggctgccttccggagcccctactcctcaacagagcccctctgctctcccagcgagtctgacagtgacctagagcctgtgggggcggggaattcagcatctccagaagctgtcccaagagctagatgaagccattatggccgaagagagtggtgacatcgtctctctcattcatgactgaggaagtgcctgcaggaaacaagccctgtctgaccgccaaagctccatactcaaggcatgtctatgcctccccgtgagctttcctggaaaaaacccccgggagtcgtcagtaccccctgggccactgctaaacaa

SEQ ID NO: 97314 - DNA, 1597 bp, Homo Sapiens
  misc_feature (1329)..(1329): n is a, c, g, or t
ccccgttcgaactgagggactgcagaccgcctctgggtagctggattgaagcccaccccgtccccttctggtaccaaagtgcttactcctctccaaagtgccgtgtctgaactgccgctgggaagaagcggctcctgagacgcgcccacacctttcacctgccgcgcgcttccccctcctcggccaccttcccggcggaagcagcgaggagggagccccctttggccgtcctccgtggaaccggttttccgaggctggcaaaagccgaggctggatttgggggaggaatattagactcggaggagtctgcgcgcttttctcctccccgcgcctcccggtcgccgcgggttcaccgctcagtccccgcgctcgctccgcaccccacccacttcctgtgctcgcccggggggcgtgtgccgtgcggctgccggagttcggggaagttgtggctgtcgagaatgggggtctgtgggtacctgttcctgccctggaagtgcctcgtggtcgtgtctctcaggctgctgttccttgtacccacaggagtgcccgtgcgcagcggagatgccaccttccccaaagctatggacaacgtgacggtccggcagggggagagcgccaccctcaggtgcactatggacaaccgggtcacccgggtggcctggctaaaccgcagcaccatcctctatgctgggaatgacaagtggtgcctggatcctcgcgtggtccttctgagcaacacccaaacgcagtacagcatcgagatccagaacgtggatgtgtatgacgagggcccttacacctgctcggtgcagacagacaaccacccaaagacctctagggtccacctcattgtgcaagtatctcccaaaattgtagagatttcttcagatatctccattaatgaagggaacaatattagcctcacctgcatagcaactggtagaccagagcctacggttacttggagacacatctctcccaaagcggttggctttgtgagtgaagacgaatacttggaaattcagggcatcaccagggagcagtcaggggactacgagtgcagtgcctccaatgacgtggccgcgcccgtggtacggagagtaaaggtcaccgtgaactatccaccatacatttcagaagccaagggtacaggtgtccccgtgggacaaaaggggacactgcagtgtgaagcctcagcagtcccctcagcagaattccagtggtacaaggatgacaaaagactgattgaaggaaaagaaaggggtgaacagttggaaaacagacctttttcctcctcaaaagtcattccttctttcaatgtcctctganccatggactatggggaactacacttgcggggctcccaaaagctgggcacaccaatgccagatcatgctattgacgtaaatagagagcagtagaaaagttggtaccagtggagagccacaatgccggataggacagtccagtctacagccccagtgtgagcgagccaaagaagagcaggggccgcgagtgagcaagctagagggcgggttggtgcctctggtgcccggtcaattgttgggcgttcccgggaggcccccccacgtggcgc

SEQ ID NO: 97315 - DNA, 706 bp, Homo Sapiens
  misc_feature (638)..(638): n is a, c, g, or t
cacggctaggtacgaggcctgggtggtgaatcggcacgaggcttcccagggctaagatgagtcctcaacacgagtttccgagcaaactggtacccaggggttaacatgtgcctgggctgacctccaaccccgccgcggcccctgaccctgcggaaggtaacgagaagcagcgcggcccagccgcctggtccgtccgcccttagcacgccggggacctacggccaaccccgcgccccaacttcccgccacaagttctctctgcaccggcaaaaagagaaactccacccacttttccgctaacacgtcggacccgctttaggcaaacgtgagtagaaggggacgccttgttctcactcccagcggggaaaaaagaaccaaacgcggaagcagcgactctgcccgggccggagctgaggcccgggggctgggacggcccggagtccccggcatctaactccgacggcagcccttttccgagcggggccgcggctccggcactgcaagcggaggtgccgcccgccacccaagaccccagagcaagagactgaccgggcctcaggatcccccgtcgccgggccgcgcgcaccgcctcctacctgccgctgcgacgaggcggagcccccgggcctacagtcccngcggggaaggcgggcccagcactcgagcctgccctttcctagacctgcctaacttctctccagctgcg

SEQ ID NO: 97316 - DNA, 803 bp, Homo Sapiens
gtgggacactcataaggctaggtacgaggccggggtggtgaattcggcacgagggggtggtggatctgttggtcccgttttcccgtcgcacggtggtggccactgttggcttctgaatggtttgcaaggcggatatccacgccaaggcctttggatcggccgtgggtacatccgtctgagccgttcctttccatcgcagagcggcggcctccggcggcgctctccagtcatggactaccggcggcttctcatgagccgggtggtccccgggcaattcgacgacgcggactcctctgacagtgaaaacagagacttgaagacagtcaaagagaaggatgacattctgtttgaagaccttcaagacaatgtgaatgagaatggtgaaggtgaaatagaagatgaggaggaggagggttatgacgatgatgatgatgactgggactgggatgaaggagttggaaaactcgccaagggttatgtctggaatggaggaagcaacccacaggcaaatcgacagacctccgacagcagttcagccaaaatgtctactccagcagacaaggtcttacggaaattggggaataaaattaatttagataagctaaatgttactgattccgtcataaataaagtcaccgaaaagtctagacaaaaggaagcagatatgtatcgcatccaaagataagggcagacagagcaacctgtagaacaggtgtttggatcccagaacaagaatgattttactccagatgttgactagaggaatccttaaccgagataaatgggctggcattagcacaggg

SEQ ID NO: 97317 - DNA, 814 bp, Homo Sapiens
gctaggtacgaggctgggtgttgaattcggcacgagggcctgggggccgcctgccggtgctgcgcgggttggtacgcgtgctgaaccgctccttcgagaaggcggtgcacgtgcgggcctcacacgacggctgggcttccttttgcgaccacccagcgcgctacgtcccgcgcagcccgccgtgggcaggagcgggaggcaacaggagcaggagatcccatcctggatccggggctcggcctgggtcccggccaggcatccgcctcctcgcccgacgacggcggcctgcaccgaccgctttgccttccagctgccctttgctgagggcgcgggcgatggggcgcgcctcgacttcgtggtgcgctatgagacccctgagggcactttctgggccaacaaccacggccgcaactacacagtcctgctccggatcgcacccgctcccacacccactgatgccgaagggctgccccagcagcagcagctgccgcagctggagccacagcccgagtgccagggtcccgtggaggctgaggccaggcagctgaagagctgcatgaagccggtgaggcgcaggcctgccgaggaggaactgaagacgaagaacatggatgataacacctttgccatggcagagcatcctgatgtccaggagtcagtgggtccactggtagcccccacccctctccgtccatggccccagatgacacttcaggtctgctggagtttgttggagttccactccagaccctgtttgcctgagtatcaccagcagaggctgcagaacagcaaagattgctgccttttccttcct

SEQ ID NO: 97318 - DNA, 542 bp, Homo Sapiens
gcggccgctgagcagtggagccagccccagcgcgggtttcagcagcctgaggctccggcccattcgcacgctgagctctgccgtggagcagctgaggggctgcagggtggtcggggtcatcgagaaggtgcagctggtccaggacccggcaaccggagggacctttgtggtgaagagcctacccaggtgccacatggtgagcagggagcggctgaccatcatcccacacggagtcccctacatgacgaagctgctcaggtactttgtgagcgaggactccatcttcctgcacctggagcatgtgcaaggaggcactctctggtcccacctgctctcccaggcgcactcccgacattctgggctcagctctggctctacccaggagaggatgaaggctcagctcaaccccccacctcaacctcctgaccccagcgaggcttccctcaggccatgcccctggccaggacagaatcgccctggagcctcctaggacttctccgaaccttctcctagctggggaggccccatccaccagaccccag

SEQ ID NO: 97319 - DNA, 1098 bp, Homo Sapiens
  misc_feature (873)..(881): n is a, c, g, or t
  misc_feature (934)..(956): n is a, c, g, or t
  misc_feature (1028)..(1037): n is a, c, g, or t
aaggtagcgaggcctgggtggcgaattcggcacgaggggaagggaggggctgcctgtctctggaggtgtcaggcaggcaggtggcaggcagctcacccacccaccccatgggatcccccagcccttcacccgcgcctgccttgtccccatgatagttgacaatcggggcttcctgcaaggcccgtctgtctgtccaggactcctggtggccagattcggcctccgaccttgaccttaaactgcagctgaccccaggggctcgccgctgcccctcccctccacaccaaggcctgagacagcaggagccccgcctggcccgaagccgtttccaccgcagcaggcagaggggctggacaggcactgtcagccaatgtggggggtcctgaagacacccccttggggcacccgagtgccccttctcagggctcagtctgaccgtagccacgtcctgcctcgcgccgcccctcgggcctgacctggaagctccgtcagctccgtccttgtccttagagctgagcccagaccccggggtctggccgaatcctcacccccagggcagtgtttttggtctgccaccttcaggaaaacggctgcggcctcggcctcccttcgggcacccaggaatgcgggggtctgctcagtccccccaccctccatgctccaacccccgggggctgcggagcctgctgccccctccccgcgggtggggacgttctatgcaatacagggttccactttagaagtgcgcgcggctagggtcaccgcccgcccttcccggcgcagcccccgagctccacagctggggcagcccctctggcttctaaatccgcgggcgggattcttcctcctgtttagttttttagtttttccttnnnnnnnnncaacacatcgatggactttgcttccctgttcttgaagaatacgttgaatgtcnnnnnnnnnnnnnnnnnnnnnnncctccagagacgccctgcctggccctgctgcccctccggaatctcgtatgatggtcaccagtcggtgggccnnnnnnnnnnctctggccttgcctggtgcccctctgcccctatcagtggactgtcccttccagaacccccc

SEQ ID NO: 97320 - DNA, 1448 bp, Homo Sapiens
ccccgcaagaaatattgcgtgggggcccttttttctccccaaaaccagggggccctgtggggtccatcgccctttgtttttggggggcaaagtttttggggccgttcgggggctgctggctttcttgcccaagggaaggaagggcatgcctgcagagggctaggatggaagggccctttggccttcttactggcagtgggctttgctcttgtcccaccagtggactgcagccatgggaagtgacctgaagcagtggagccgaggaacagaatcagggcggtgagcaagatgccagctaggggctgaaagttgccagggctagaggtgatgctgaagggaatgtggacccacagcttccctttaccaaaggacggttccaaggcgtgggtgtgttttcattcctctctcctgttagctaggtgttccagttttggaaggggcatgtctgggcccggccacttcagttacagtcatagacgaagtcatagttgctgggctccttgggaatcggcggaggtgcgtcagggatctggatgttttccaggtccaggaggcggagcttgatttccatgctgagcagggtgtccaggtcattccgcgtcaggtcgctcatcatgtccttcccgagtagcgcattcagtccatccgtccagatacagtactcatgcttgtcaggagcgatgaagttcagttggcagtttgagtcatacaagatggagaaagcgagttcaagcacctccttgttttgtttaagggcacctttctctttcatatgagggcagtcctttcccgtcaccacggctttgatatctgccaccggcagtttgtcctgcaaggaatcgtggggcacttctccctgaggactctcttctaagtctccgtaatgcaggactttgtgatttggcgaaagccgacaataccaaaacttgtcttgcctccgccgggcattgagtttcctaaagcaggtcccttccacaaggcggttcaggcgttgctgtttgatcagctctaagatttctggctgaatcttctcctttagttccaaaatcgggcgggactggaaatcttcctggttcatcctctcggactggcggattttcaggatctcagtgtagctcaggttctgcagtttgctcttgaactggtccagggagctaggcttggttgtaagtgctctcataacctgctccttcaccacctgcattaccaagctcccgtaagtccatctttcccaaccacaaatactgattctaagctgctgccaccacaaagcgacttagagtcgtccccctgaagaacaatgtgctggaataccaccagatggttcctgagtaagcttgttcatgaaacaggtttccagttgagccatgtgaacagagacccgccgcacacctttaaatggtatacactcccctcgtgccgattaacacccggcctcgatcctaggc

SEQ ID NO: 97321 - DNA, 711 bp, Homo Sapiens
aactggctaggtacgaggctgggtgttgaattcggcacgagggccactcagaagcccggatcatcgctaggtccctgagcggacggctgcgccttgggctggcagagcagtcaggtgctggctgccctctcccaggcagtgagcctcacgcccccgggccaagaattcccaccagccatggatggatgctgggaagggcaagacagcagaggccagaaagacgtggctggatggagcaaggcatgatcctgaagcagacgttctgcgaggttcccgacctggaccgaattatccccgatgctgctggagcacggccatggaacgtctcccggagcactgcaagctgatgcccagggattcccctgaaaccaatgttggcccatcccacccggggcatcagcgaggtcctgaaacgctatgagcgaggcagcattacacctgcgaactacaaatatgacgggcagagggcacagatccacgccctggaaggcggggaggtgaagatcttcagcaggaatcaggaagacaacactgggaagtacccggacatcatcagacgcatccacaagattaaactcccatcggtcacatccttcatcctggacaccgaagccgtggcttgggaccgggtcatgaagcgatccagccattccaagtgctcacctaccgtaaacgcaggaggttggatgcgtctgagatccaggtgccgtg

SEQ ID NO: 97322 - DNA, 1432 bp, Homo Sapiens
  misc_feature (1163)..(1241): n is a, c, g, or t
ttagctcagcctgcaactaaagctgtagtcgactccaatagccatccatgacatccctgcctgtgcctagatcagaggccagagggccccctcagttgcctgagcagctggtggcttccagggagcatctctgctctacccctgccccatgcctgccctgcgtgctggttccttcagacccctaaccctactaaccagcaggctcatctcacctccaggcctgatacatttcttttctttcttttttcctcccccaatttaccctgggcctggagcagccaagaatttcgggctgtttgactttctgtgagcccccagcgaggggaggcccagcctccgaaggagaccaggaaccctgcttcagcagcccctcagagcttcccaaggatgtccagcccccacaaccacacgttaacataatgagtcactaggcttctggggagggcccaacttcacccatgcatgagagaatctcctcctttccagagagaatcggatcgcaccacgtgtggcagcctgcggcggggggagcggggcctctttagctctctttatctttctctctcactcatgtatgcatacatgcacaggagatgcatacacaggtgcctatgcaagttcatttaagcctcagggctggtccctgcccaaagggctggaccctcctaatcctctcctaggttgtggggctggtcccctgacacccttctccccttcctggtagaccttaaacctcgcacacatgtccccagcattttctcacctggataaagcccataagctgggtctcaggctgggctcagcaaaggactcgccttgcaaccgacaggccattcccacccccacacacaacctcccctgttttcacattcaccatggcatcccagagcaaggacacaggagcccacaggccagttgaggttgggcaaggagacttccaggacttccagacagagtaccaggtttctatttttcaccttattctctactttaaacaaatcataactttctctttaagcctctgctataaattctcctggctctcctgggcttccatattctggggctgggtgtcaaaagtgagatgaagttcttagctccaggtttcgggtaaaccaaggtaggaacatttggcatttatttcaatttaacaatacttcctnnnnnnnnnnnnnnnnnnnnnnnnnnnnnnnnnnnnnnnnnnnnnnnnnnnnnnnnnnnnnnnnnnnnnnnnnnnnnnnagaacaggctggcaaaatagcaaaccctgttctactaaaattcacaccttccttgggtgtgttggccctgcccggtactcagtctcaagaggctggaggccagaattgtcgaacccggaacacgggtgccggtgaaacccccacccgggtgaaacgagcttgtcccaacccacccaaaacactccgggtcg

SEQ ID NO: 97323 - DNA, 737 bp, Homo Sapiens
  misc_feature (28)..(28): n is a, c, g, or t
acaccttacggctaggtagaggccggcngttaatcggcacgaggtaaacatgaatagagccttctttgatgaagaggaagatcattggaaactacatcctataaccagactggagaaccagcagatgatgaagcggccagtctcagccgtgggatataagagaccattgagccagcacgcaagaatgtccatgatgattcgtccagaggcccgatatagggcagaaaacattgtgctgttagagctggacatgcccagccggaccaccagagactatgagggtccagccattgcccccaaggtccaggctgcattggatgcggctctgcaggatgaagatgagatacaggtggatgcatcatcatttgaaagcactgcaaataagaaatccaaggccaggcctaaaagtggaaggaagtcgggatcctcctcctcttcctcaggaacccctgcatctcagctttatccacagtctcgggggctggttccaaagtaaagccagcttctcctctcccagggcggaaacagcatttgccttctgagagaacgagactagcaaaaagctgcacgagaggattcggcccaaactcagaactgttcccctgaggagaagcggtggcctctttgcagatcaaccaacttaatctggttgaacgtgctgttcctaatctggcactcagcccctctgggaaacatcttttaattagcatctcagaaatgctgggtaggtaaagtgc

SEQ ID NO: 97324 - DNA, 764 bp, Homo Sapiens
  misc_feature (520)..(520): n is a, c, g, or t
tcagtagaggcccggtgttaatcggccgagggggagtaggcagcgtggcgcgtccgctctcgcccgctctcgcccgctcgccagccggctctcctcccgccgcaggacccgcgcgccgcgctcgggggccatgcagcgcctggccatggacctgcggatgttgtcccgggagctctccctctacctggaacaccaagtccgggtggggttcttcggctcgggggtgggcttatcccttatcctgggcttcagcgtcgcttatgccttctactacctgagcagcattgccaagaaaccccagttagtgaccgggggtgagagtttcagccgcttccttcaagaccactgtcccgtggttacagaaacgtactacccgacggtctggtgctgggagggtcgaggacagaccctgcttagacctttcatcacttcgaagcccccggtgcagtacaggaatgaacttattaaaactgcagatggaggacagaatttcactgggaactggctttgactaatgacntaacagtacgtgttatatggatgccagcaccagacctactatcttatggttgcctggcctcacgggaacaagcaaggagtcatatatccttcatatgatccatcttagtgaagaattaggatacagatgtgtggtttttaacaacagaggagtggcgggggagaatctcttgacgccaaggacttactgtgtgctaacactgaagacttggagacagttattcaccatgtacacagcctgtaga

SEQ ID NO: 97325 - DNA, 677 bp, Homo Sapiens
  misc_feature (213)..(287): n is a, c, g, or t
aacggctaggtacgaggcctgggtgtgtgaattcggcacgaggctccaggccaagctccacctcggcctggaaatggttatctcctgaatccggcagcagtgacagtggccggttcagcgtcagggcctgtggctgtgcccagctctgacatgtctccagcagaacagctcaaacagatggctgcacagcagcaacaaagggccaaactcatnnnnnnnnnnnnnnnnnnnnnnnnnnnnnnnnnnnnnnnnnnnnnnnnnnnnnnnnnnnnnnnnnnnnnnnnnnnctcaaatcagacttcaaattggtctcccttaggacctccctctagtccatatggagcagcttttactgcagaaaaaccaaatagcccaatgatgtacccccaagcctttaacaaccaaaaccctatagtgcctccaatggcaaacaacctgcagaagacaacaatgaataactacctccctcagaatcacatgaatatgatcaatcagcagccaaataacttgggtacaaactccttaaacaaacagcacaatattctgacttatggcaacactaaacccctgacccacttcaatgcagacctgagtcagaggatgacaccaccagtggccaaccccaacaaaaaccccttgatgccgtatatccagcagcagcaacagcagcagcaaca

SEQ ID NO: 97326 - DNA, 1266 bp, Homo Sapiens
  misc_feature (1061)..(1081): n is a, c, g, or t
agccgtgtttaatcggacgaggcatatcgtgggcacaagcgggacctgcagcgcggacgcgtgatcccgcgctggaacgtgtcgcacctggtacgcaagacctggaagtgcggctacgtggaatgctcggcaagtacaactggcacatcctgctgctcttcagcgagctgctcaagagcgtcggctgcgcccgttgcaagcacgtgcacgctgccctgcgcttccagggcgcgctgcgccgcaaccgctgcgccatcatgtgacgcctgcgcgcccctcgggctgcaccggcactggccgacgcggagggcggggccgtactgcggggctggggcggggagcgggcgggaaatggaactgtgacggtcccggcctgaggcccctgcagccacgcacctcccggtgagaagcagagcgcgagagggagccctccgtaactgcccagccctgccccttgcccccgtggcttcctgggacagccgccttcagtgctgtatttagtgcagtgcccggcccgacccgcgggggtgccacagcctttagggatgggggtgagcgtgcaatggaggctgggcggtggcgaggtgccgccttggccgggcccccacgtgtctcctcccagaactgtgtcctgtctttgcctgggttgtcctctcctttcccgtgtccgcccaccccagcgtcctgtcggtacttcacctgctctcacctaccctccaggcccctcccagctccgctcacagggctctcatttccggtccatccccttgtcgcagatcctggcagcttctttgtgaggccaggccttctgactgtcagcaccaccggcacagggcagagatgcgggtggcccaaggaccacgatcaaggggtccgggggaccgaggtcccagatcagtgaggggagaaggttgagctctccggcttccaggagacctccccgccagcagcccccagagacacaacaacctaccttccagccttaactcgatggtccgtccctgccaggtgcccctcactcttcctgacccaaagccagatcacccccgtgggttaaaacnnnnnnnnnnnnnnnnnnnnnggacagagtgtggaagggagcccccaaaggatagttccttttcatgatgccaggtccagtcttttattcccttctggatactggaatcggatctgtcagaatgggaatgtgggtccggggcggacgggcaggatgtgcccaaagggttagtgtgcccataaaatttgtgcccgttaacccattgt

SEQ ID NO: 97327 - DNA, 780 bp, Homo Sapiens
tgctaggtagcgaggctgggtggtcgaattcggcacgaggcaggatgtcctattgctaagtgggtggttcgcagaagcagcagtgaagagaagctactgtgtttggtgcgggagcgagctggccacacctgtgaggctgcagtgattgtgattctcatcctggtgtgggaaggaatcccgctgtctctggctgacaaactctactcggagcttaccgagacgctgaggaaatacggcacgctcaccaatcgccggtgtgccttgaatgaagagagaacttgcgcctgtcaggggctggatccagaaacctgtggtgcctccttctcttttggttgttcatggagcatgtactacaatggatgtaagtttgccagaagcaagatcccaaggaagtttaagctgcttggggatgacccaaaagaggaagagaaactggagtctcatttgcaaaacctgtccactcttatggcaccaacatataagaaacttgcacctgatgcatataataatcagattgaatatgaacacagagcaccagagtgccgtctgggtctgaaggaaggccgtccattctcaggggtcacttgcatgtatggacttctgtgctcatgcccacagagacttgcacaaacatgcagaatggcagcacattggtatgcactctcactagagaagacaatcgagaattggcgggaaaacctgaggatgaacaggttcacgtcctgccttatacaagtctctgacgtggatgattgggaggtggagccggggggaaacggg

SEQ ID NO: 97328 - DNA, 845 bp, Homo Sapiens
tcatactgctaggtagcgagagctgggtgtctcaatctggcacgaggagctccgccgctgcacactgcagcctctgctgaacccctgccgcgccgccgccttcgccagccctggacctggacctggcccgccttcccttcctccgctccagccggcctccgtgccccgcaacctcctcctcggcgaagtctccctgtgcctgccccatgtctggcctgccccctgcctacatgctgaatgacaatggtgctggctcctgctggccccgtgggagcccgagtactggccacgacccctgctgatgctggctggcatcttctcctcctgactacaagcggcatgatgacctgaaggagatgctggacaccaacaaggattctctcaagctggaggccatgaagaggattgtggcgatgattgcccgaggaaagaatgcttcagacctgtttcccgcggtggtgaagaactgtggccttgtaagaacatagaggtgaagaagctttgtctatgtgtacctggtacgctacgctgaggagcagcaagacactggccctgctgtcacatctccaccttccaacgtggcctaaaggatcccaaacagctgatacgtgccagtgccctccgatgtcctctctagcatccgtgtgcccatcatagtgcccatcatgatgctagctatcaaggaagccgcctcggacatgtcaccctatgtgcgggaaaacagctgcccacgccatccctaaactctacagtttggactctgaccagaaggatcagctgatagaagtcattgagaaagcttctggctgacaagaccacgctggtggcgggcaagtgtggtgatg

SEQ ID NO: 97329 - DNA, 756 bp, Homo Sapiens
tcggctaggtacgaggctgggtgttgaattcggccgaggccgggggtttgaagccgcgccgcgagggagcgaggtcgcagtgacagcggcgggcgatcggacccaggctgccccgccgtacccgcctgcgtcccgcgctcccgccccagcatgacagccccggcgggtccgcgcggctcagagaccgagcggcttctgacccccaaccccgggtatgggacccaggcggggccttcaccggcccctccgacacccccagaagaggaagaccttcgccgtcgtctcaaatactttttcatgagtccctgcgacaagtttcgagccaagggccgcaagccctgcaagctgatgctgcaagtggtcaagatcctggtggtcacggtgcagctcatcctgtttgggctcagtaatcagctggctgtgacattccgggaagagaacaccatcgccttccgacacctcttcctgctgggctactcggacggagcggatgacaccttcgcagcctacacgcgggagcagctgtaccaggccatcttccatgctgtggaccagtacctggcgttgcctgacgtgtcactgggccggtatgcgtatgtccgtggtgggggtgacccttggaccaatggctcagggcttgctctctgccagcggtactaccaccgaggccacgtggacccggccaacgacacatttgacattgatccgatggtggttactgactgcatccaggtgggatccccccgcaacgccccc

SEQ ID NO: 97330 - DNA, 1132 bp, Homo Sapiens
acccgcacagtcccgttggcttccgtgagcaccaatccgtgtgggagtccccctcagctgtcaccctccacggcaccagacgcccatcagactgagcaggggccagagtgacagcaggcccagctttcgccagcagagtgggggcacaggagcagcccggagtcgctccaccaccgtagcgccccagcagtagcagctcggcgaagtagtcagcggcagtggcgatcagcgcagcaccagtcacggcggtggccagggtggtgagtgggcggggccagcgcagagtgagcagggcacagagcaggccgccccccaagcaacagccccagtggaccccacacggaagcctggctggtagtagggtgcggagcccagcagggcagcagctgcgagcagcaggccgagcagcagccccaccaggaagaggcccacgctgcgcactagcatggccaccagcccgcagagcagcccgatgcccagagcgatgcccgcgctcgccccagcactcagctgtgtctctagcacccgctctcggtagcagaggaggaagatgaccaccgagccaaacagcaacccagtgaggaagagcactgccttgaagcagcggtaaccgaagaagcagtagacgactccaaacaaacagcacatgatgcagacgagggccggcagtgcctggtacctgcgctccaggggctgttcacaaggtgcaccccagaaggcatcatctggctcagggggcagcagctggaaccgcagtgttgccacagtccccggcatagtgctgggctggaggcgacctgagcttctgagtgaaagaggctgtgcagaggcccgaggggccggggttgcggggcgccagaggctccaactgactggggtccagggaaagtccgtcgtgcgaggaagggggctgctgggccggagagaatggtgtcggcgcggtggcggcgccgctccacgtccaacaccggctggcactccagtcccgcggcgtccgggaactcgggctgggcctgaggaaggggaaggcgcaggagccggggctcgggccgccccagaaccgcggccccatgccctgagcccgcccgcggcctttggtgctgatggacagcatcccgggaattccggaccg

SEQ ID NO: 97331 - DNA, 791 bp, Homo Sapiens
atcagctaggtacgaggcctgggtggttgaattcggcacgaggcaaaaccatcggggaaccacatgttgactgtgagcaaagtgtcttccgattagcagcctcagtggatgccctggtggcctctccagggctgctcagtgcaaggccccccacccatctggtatggaaacctgccggctccaggccagacccaggagccaagagaaggctgaagccagcttggctgtgttctctgatctaggccttcccagaggaggacgagcagaagctgtgccacttggaattgcaacccatgagttcagaaggcacactctgccatgctgagctccaagggtgctaccaggggaagatgggatctatagagtctctgggccctggccccagggaggagcacatttttcttgaccctcacctacctggtgctagtttggtcaaccctgcctgcatacatgggctcctgtcatggggcccagagtcccttgcagatatagaaataggggaggagctcaggtctgcgccaggcaggaagaaggcaggcttcttggcttccagaggtgccgcggtggcctcctggcatcatttgttattgcctctgaaacaagccttactgcctggagggcttagattcctgcttctccaatgtagtgtgggtatcttgtagggtatgtggttggatgcaaggcgtgctccaggcacctctcctgaagttctgcctttgggattcgtgggacctttttagcccatttactggagcccgggctcggtttgagggcctgattgctggctttag

SEQ ID NO: 97332 - DNA, 558 bp, Homo Sapiens
  misc_feature (93)..(93): n is a, c, g, or t
acctacggctaggtagcgaggctgggtggtgaatcggcacgaggctagaggaaccatgttatgaatagcacttgagggctcaaaggatctaanatgggggagtcaggtggctgggtggaaaagatgaaaatacaacaaacagttttatatgttaaatcatgttaagctgaattcagtgtctaaactgggttttttattatagctccaaatttctataacataacgaaatacaatttagatactaattaggccaacttaccctataattctttaatgattcagtagggaatgtttgaatatggggcaggataatgggtaaagctgttatcctatggaacactcagaagaaaaagcccattagtatcttggtggggataatggaattgactgttggtgatttcaggaagtctttgtttgagatctgtgagaaaaattctgtcacattttcatcttcttcaagatcttactatccctgaaaattacttaatcacaaaaaatatgtgtttagtataataatagtataaaatgacattatgaaaagtatattagtggccgggt

SEQ ID NO: 97333 - DNA, 423 bp, Homo Sapiens
agataagatatattgcgttgaactataatttattgttgattgctgaatgatttagggcgggggggtgggcaccccctgaaattctgccctggaggagtggcctcaccctaaccctggccgtggctaataataaggcccacctcttagggccgtggagtgaaataagttttccaggtaatgcgcagtagagccctcagccctccgctgaagttgcgttaggaaggaggaagggagaggtaaatgctgagcccgcaggcggcagtctgtgcctcggagagaaactttatcccaaccttgctgggggccttgacgccacaccttgcccacaagagcaccccggcagccacacctgccctctggggtcctgaaaccccgagcccgacctcgtgccgatttcacgcgcggcctcgacctaagcgataa

SEQ ID NO: 97334 - DNA, 853 bp, Homo Sapiens
tcctcccccccgccaccaccctcccacaccacacccatagcgctaggtacgaggccgggtgttacatcggcacgaggaataaatggaaccagtgttgtttaatactgagaatcagagtccagccagagaccatgaaggcagaagggggcccatggggccatcttcccttgtcccctttacattatttatggacaggtcaaactgagaccctgagagggcaagccacttggccaaggtcacagagcagcttgctggcaaaaaagccgtatcaccccccacttcttgctgcagggcgagtagcaccccatgcgcagctctaaaagctggtgcagcatttccaaagtgtgttctgaaggacactttggagaggaacagtgggcttggtggctttagaggcctgtgtccacagctcacaccaggcaatattctgggcttgaattgcagctctgcacttcggccagtgacttgtgcctcacccctactactccctttcattaagataggctggtgatagtatgcagcctcagagggtcgtcatgagccacttagagaacacagcctatgcaacagtaaatgcttatcaagtgtaggcataggcccagaacctgttctaccacggggtgtggggcatgtggagacaatcaggaagactggtgggcatacactgagcggctgcagaagccaggagcctcagagatgagaccaacgtgtgtgcagcactctccacaagctggccccagtcacttatgcatcacatcggtacagcaacccttatgaggctggccttgcggggaatccctgtactacgggcatagctgaacctacccgccgacacttccttccaaggcaggcc

SEQ ID NO: 97335 - DNA, 657 bp, Homo Sapiens
cggcgaccttaggtgcactcactagaccccaagtggttttaaaactctccgcacgcgctgtaccggtccggtatccgggatatcgtcgaccacgcgtcggtctgccttctgcctccctttgggatctgtgtcttccagggatcagctgcttggcttctgctggaggtgcctccctgtgggggcgcagcctgcctcctgctctcagttcctcgccagaggctgctgcccttcctggctgggctcaggaggctccttgtaggcatatgatggggagggggtgcccctacccacctccaagaggctacagccctgtgtctggccatgtgagccctggcctttcaccgggttgctggtttcttttctgtggggcccagacttctgtaaagcacacagatgctgggtaagatgaaaaactgtggcccaacagggcttaaccctatggatggtgggatttttatccaatagtttggcctggtgtgcccacaggatgggaacagggaggcaccatcaacacttgtcatgttaatgagcttttctttgctcgaggtgttcagagacaagtcctgtgtctacctgcgtcagcctgaaaatggaaatattggctgttgactcttgtcatttagtgacttcatccccctccccacaggagagagcgtc

SEQ ID NO: 97336 - DNA, 724 bp, Homo Sapiens
taggctaggtacgaggtccgggtggttgaactcggcacgaggaaaggagccagtgcgaatatatcaacagtgtggaggaggtggctaaggcatttcctgaacgcgtgtacgtcatggaggatatcacattcaacgtgaaggttgcttcaggtgaatgcaatgaagacactgaagtttacaacatcaccctgtgtactggggatgaactcactctaatggggcaggcagaaatcctttatgcaaagacattcaacggtaaaagtcacgactcaacacaatcttcaaaaagattgggaagctcaattccagtcagcaagcgtgggaaaaggcaaaatgccgtgcctcatttgtatgaatcaccggaccaacgaaagcattagccttccattccagtgcaagggcagatttagcagcccgaagtcccctggaacttcagatgcaagagggcgaacacaccatccgcaagcattgtggagaaaaccaggcttcctgtgaatgtgactgtgccaagccctccaccgagaaacccatacgacctccacttcatccgtgaggggcaccgctataagtttgtagaacatccagaccaagacggtggtggtttgctgtgtgctgcggaacaacaagatcctccccatgcactttcctttgcagttgactgtccccaagttcagcctccagaacactggtgagggagagagctggccgaaacctggttcatcac

SEQ ID NO: 97337 - DNA, 686 bp, Homo Sapiens
  misc_feature (578)..(578): n is a, c, g, or t
  misc_feature (674)..(674): n is a, c, g, or t
ataggctaggtacgaggcctgggtggtgtaattcggcatgaggcaagaacttgagtgatgacatgaaggaggtggccttctctgtcaggaatgccatctgctccggccctggcgagctgcaagtcaatggacatggcctgccagaccaatgggtcccggacgatggggacccagactgttcagaccatcagtgtgggcttgcagactgaagccctgcgtggcagcggtgtcaccagcagcccccacaagtgtctcactccaaaggctgggggcggtgctacacccgtgtcgtctccttcccggagccttaggagcagacaggtggcccctgccatcgagaaggtgcaggccaagtttgaacgcacatgctgctcccccaagtatggttctcccaagctgcagaggaagcccctccccaaagccgaccagccaacataacatggacgtcaccagggatggcccagaaagggtacagtgagtcagcctgggcccgctccaccaccacaagggagagccccgatgcacaccaccattaatgatggcctctccagacctcttcaacatcattcgaccacagnccccggggtgcaggaccccttccagaaggggctgcgggcccggcagtcggtctcgctcagcagagccccgacaagaagctgggcccaggccagganacaggcaccaat

SEQ ID NO: 97338 - DNA, 735 bp, Homo Sapiens
  misc_feature (568)..(577): n is a, c, g, or t
  misc_feature (586)..(586): n is a, c, g, or t
  misc_feature (608)..(608): n is a, c, g, or t
  misc_feature (698)..(698): n is a, c, g, or t
  misc_feature (707)..(708): n is a, c, g, or t
taggctagtacgaggcctgggtgttgaattccgcacgaggtactcatgccaggagcggcagtggcactttgtaataaaatcttatgtttattttccactgttgaatacacataccttagtgttcccagagagggaagcctacaatgctatccaatgaatagtttgcagatggattaaatacatgtaccaatgaaataaaacgtgcagatttggggctttttgcctcctacctttgctctgggcccagagctccccgatgatgacacgggaggtttgtgcaaagatctgaagtcaagaaggattagtttaaagagtcagatgaaaaaggacacaaatgaaaatgcttctgcatgagcctgaaaaccaacacttagcaatgagtgattctgactttggggcctgtaacaaataatagcaaatgagggaagtttccagtggcttcacagcaggagggcaatggccagggaaccactgtgaaacagatcagtcaacgggacttcctggttcttgaggaagctttgaaggcagggagtgtggcatacatgtaaggggtctttgttgctaatannnnnnnnnngaggcatantactttgcaggggcaaatcttncaagttgccacttcctgagaactccctcattttagtgaatatatatttcaagcccagtagttgaatagcactattattggcactgtgcangaacaccannatgtgcagacagggacttgaactcact

SEQ ID NO: 97339 - DNA, 703 bp, Homo Sapiens
  misc_feature (308)..(308): n is a, c, g, or t
aatgtggaatatagaacagttggtaaaaaagcaggctggtacggtcggattcccgggatatcgtcgaccacgcgtcgatctgaagtggagccggcaggcttgctggggctggacttgggggaggaggcctctagatggggccaggtgtggtgggggagtagggtggccgctgtctgtgtaaccagtggaccttgagctccaagactgcctggcccgcctaagctggtccattggggcccaatgcagaaccctggctctgagtcctcaatcctgtccacataaaggagtggagcccggtccccctccanggaggggaaagaactcgtgtccagggatccacgccatggcagacgtgggctcttggggtagcaggagccgccttatgggggaatagggctcagctggtgacaccttctgcccacaggtgccaagtcctgccctgccaacttcttggcagctgccgacgacaaactcagtgggttccagtgggacttcctgtggcccatactggtggttgagttcctggtggccgtggcagcaatggcctggccctgtaccgcttcagcatccggaagcagcgcccatggcaccccgccgttggtcttctctgtccagctggcagtcagcgactgctctgcgctctgacgctggccccgatggccggctacctctatccccccaagcacttggcgctatggggagg

SEQ ID NO: 97340 - DNA, 631 bp, Homo Sapiens
taaagtccaagctgctccatctgcagccacccttttctggagttaaaggggcaagcggcaccttttctctatttcgcagtttccattcggtcctggtaacttatggagtccagaagaagtaggatatacagaagtcctcagtagttttcccaaagggagacactgtctccttcccgcaacctccagacactgcagtacagggttgttagatattagatagtacgtttctccgtgtgggcaaaggctcgcggcttaggtctctaagcagatcgaaagtcggggtccagaccgagaggatcttcaggtctcgtccacccaatctcaagcctctggaagggcgggctgccggcgacctcctccagtcccgggacccggaacccgggaccctggacgccggtgcgggcgggcctgccctcctctgtgcctggcccccagtctggccctcctacctgttgaccaggcctgaaccacgcaccggggctccgctgtctctgcttggctgccttaacctgcgtgggtctggagaccggagggagaaaggctagatccgcagccttgggctgctccgaacttaatgtctttccccctcgtgccgaattcaacacccaggcctcgtacctagccgtatgta

SEQ ID NO: 97341 - DNA, 952 bp, Homo Sapiens
  misc_feature (731)..(764): n is a, c, g, or t
aacgtacggctaggtacgaggcctgggtgttgaattcggcacgagggatggacatggggaaagacattaagttcggagcagcccaaggctgcggatctagcctttctccctccggtctccagacccacgcaggttaaggcagccaagcagagacagcggagccccggtgcgtggttcaggcctggtcaacaggtaggagggccagactgggggccaggcacagaggagggcaggcccgcccgcaccggcgtccaggtcccgggttccgggtcccgggactggaggaggtcgccggcagcccgcccttccagaggcttgagattgggtggacgagacctgaagatcctctcggtctggaccccgactttcgatctgcttagagacctaagccgcgagcctttgcccacacggagaaacgtactatctaatatctaacaaccctgtactgcagtgtctggaggttgcgggaaggagacagtgtctccctttgggaaaactactgaggacttctgtatatcctacttcttctggactccataagttacaggaccgaaggaaactgagaaatagagaaaaggtgccgcttgcccctttaactccagaaaagggtggctgcagatggagcagcttggactttattttttacgttgcgggaagcccgccggcagcggccttatgccaattgattttcccagctcccagccctggatgtctagctatctccaggacannnnnnnnnnnnnnnnnnnnnnnnnnnnnnnnnncttcaatgtatcagaagaactgaagctcgctggccgcgagttcctcccgagtcccaggatggaagaagattatttcactaagtctcagaggtattatgcatatgaaagaaaaaagtcctcattcaggactgaagtgtgggtatgaagttttggaccctttgcggtggaagaggcgaaaataacgggag

SEQ ID NO: 97342 - DNA, 545 bp, Homo Sapiens
  misc_feature (36)..(36): n is a, c, g, or t
acacaccaccagcgaacatacggctaggtacgaggnctgcggtgttgaattcggcacgagggaggtcgcggtggggcgagagctgggcctggagactcccctgggaggcaacagcggggtctgcagacgcccttctccagccggagctgggactgttcagtcactgggagaagggatgtgggtctgaagagcttggttgcagaaacttcggggtctacaaacgcaggcgggagctgagccaaaagagcttgtttgctgggaggtgggagatgcagcccggggaaggcgcaccaaggtcaaggcggaccgggcgcccccagaggccgacaacttgagaatattgactacgaacacacagaggaccacagaggccaaggaaagcaggacagcgcacaggagggacagaggtcaccctagatgggcacacggggcgtagcgccccgccagccgacccgaccaagagacacaacgccggcagaacgcgtgcaaacaggatcaagccaaggaaagcgcacccgatccagccgaagagcgccgatgccaac

SEQ ID NO: 97343 - DNA, 696 bp, Homo Sapiens
ataaataatttctttctggttgtattttcaagtcacaaattggaaaaggcttacatctagggacccactgttgattcctaagttgtgggtgggtgatatcagtggcctcagtgcctgcataaccctcacctgtttatgactgatctactgtaaccttcctcaggttgagagtgagctgctgtgagccagtgacaactactgctacaacttgctgttacttgaaattcgtgtgctatgttggtagcacaggagtaggcgggcgggggtttggtgtgggcactaggtaagtgggtggcaaccggctctttgggaccattggtgctgacctttgcctggtcacctgcctgtgcctaggccaagtgaatgttacatcttggaacctgagccatggaggtggcgccactccctgaggagaaaggtgtggccaaaggaaactcctgcatggtcctgtccttccccttccctacatttcacttggggctaatgatgtaaagccccccttgagttggggatgggtgtggaggatagtgcagacacccctgttaccagacatccagggaagaattagggagggggggtcaattattaagttcctaggtctaagggttgagaaggtgggagtttaaaccgaagtgcctggataccagcgggtagccttacccaggccccaggaaatgggctggttgaactcttttc

SEQ ID NO: 97344 - DNA, 750 bp, Homo Sapiens
gggctaggtagcgaggctgggtggtgaatcggcacgaggcactggagagaagccctatgagtgcaacctgtgtgggaaatccttctcccagagttccaaacttattacgcatcagcgaattcacactggagaaaaaccgtatcagtgtattgaatgtgggaaatccttcagatggaactctaacctcgtcatacatcagagaattcatactggagagaaaccgtacgattgcactcactgtggaaagtccttcagccaaagctatcagttagttgcacataaaagaactcacactggagaaaagccctatgaatgtaacgagtgtggaaaagccttcaatcgaagcactcagctcatcaggcatctgcaaattcacactggggagaagccgtacaaatgcaatcagtgcaataaagcctttgcaaggagctcctaccttgtgatgcatcagagaactcacactggtgagaaaccttttgagtgtagtcagtgtgggaaagccttttcagggagctctaaccttctttcccatcacagaattcattctggagagaaaccctatgaatgtagtgactgtgggaaatccttccggcagcgatctcaacttgtagtgcatcggcggacacatactggagagaaaccttaggagtgcagtcattgtgggaaagctttcatccagaggtctcccctcatcatgcaccagaggacgcatgtcggtgggaagagctatcagtgtgacgtgtattaagc

SEQ ID NO: 97345 - DNA, 753 bp, Homo Sapiens
aggctaggtggaggccggggtgtaatcggcacgaggacatccagtaccaggtagaacttctatgcctggagcgccccgggggtcggccggtttgtggcctccatggccgcctcagggatgcgcctacctcatcctgctcttcctcatcgagaccaacctgcttcagagactcagggtgcatcctctgcgccctccggaggaggcggacactgacagaattatacacccggatgcctgtgcttcctgaggaccaagatgtagcggacgagaggacccgcgatcgcggccccagcccggactccctgctccacacacctctgattatcaaggagctctccaaggtgtacgagcagcgggtgcccctcctggccgtggacaggctctccctcgcggtgcagaaaggggagtgcttcggcctgcatgggcttcaatggagccgggaagaccacgactttcaaaatgctgaccggggaggagagcctcacttcatggggatgccttatgtcgggggtcacagaatcagctctgatgtcggaaaggtgcggcaagcggatcggctactgaccgcagtttgatgccttgctggaacacatgacaggccgggagatgcggtcatgtcgctcggatccggggcatccctgagcgccacatcggggctgcgggagaacctctgggggcctctgtggagcacatgcaacaagcggcaggacgtacgggtggacagcggaagtgagacggatgccgatcgggacg

SEQ ID NO: 97346 - DNA, 790 bp, Homo Sapiens
gcaagcagcacacagacaccgcgcgcaaccgtatgagaagtctccccggccccagtaccggcaggcagaccgaattccccaggctctctcagtcatcaccgggcggtcccggggagttccctacgtaaacatcggctgcaagcgggcaccctcccctggtggggagccaggggctgcctccatggaattggtttctggtccgggtgtgtccgggggcctcctgccaacactcaggggcactgtctgctggcagcctggttccggaaggtgctggtgctcaccctggagggtgacatccttcccagcctgctgctctcgggcgcggaggctcctcagtatggggattttctccatcatctccaggctgatcttgaaccaggtgattcccattggctttgggcgcttgcagcctgtggcgatgactctggttggagtgaggatgtagtccacagtgatgtcgtgctcctcaacaagctcttcagggatgtccacgacctggcagtcgtggacgatggtgaccaccggcgtctccttgctgacggcgcccatggataccatcatggcatattccagatcggcgtagccttctcccttcccgattctccagcctttttcagaaacggcgacggatcccaccacaactaaatccacgaggactctggagtccaagcctatggggacactgtagttcctcacaccctgagaggtggcacattttctcaagatgtctttagttgccccagggggcctcgtgccgaattcggcgcgccgtgacttcatactctctcgc

SEQ ID NO: 97347 - DNA, 759 bp, Homo Sapiens
agagtatgaagtcgacggcgcgccgaattcggcacgaggggagccgagggcagtaggtgtctccaaacaggacatacgtgaacaaatttggggctacatggaatcacaaaatttagctgactttccccgacctgttcatcacaggatacccaagctttaagggcgcttctcatgctgccgagcaactcccacgcttgcaggcgttcaaaacggccaggaccattaaagtaaatcctgatgccccccagaaaagtgctcgcttcttcgtccttgaaagcaaaaaaacattgttggttccaacaccacgactgagaacgggattgtttaataagatcacaccaccccctggggcaactaaagacatcttgagaaaatgtgccacctctcagggtgtgaggaactacagtgtccccataggcttggactccagagtcctcgctggactttagttgtggtgggatccgtcgccgtttctgaaacacacggctggagaatcgggaagggagaaggctacgccgatctggaactatgccatgatggtatccatgggcgccgtcagcaaggagacgccggtggtcaccatcgtccacgactgccaggtcgtggacatccctgaagagcttgtcgaggagcacgacatcactgtggactacatcctcactccaaaccagagtcatcgccacaggctgcaagcgcccaaagccaatgggaatcacctggttcaagatcagcctggagcatgattggacgaaaatcccc

SEQ ID NO: 97348 - DNA, 921 bp, Homo Sapiens
gcgactgcatcaccatggagccgagggcaggtgtctccaaacaggacatacgtgaacaaatttggggctacatggaatcacgaaaatttagctgactttccccgacctgttcatcacaggatacccaactttaaggggtcttatctggcttgccaaaacatcaaagacctagacgtttttgccagaacacaggaagttaaagtggaccctgataaaccactggaaggcgttcggctgctggtgctgcagagcaaaaaaacattgttggttccaacaccacgactgagaacgggattgtttaataagatcacaccaccccctggggcaactaaagacatcttgagaaaatgtgccacctctcagggtgtgaggaactacagtgtccccataggcttggactccagagtcctcgtggatttagttgtggtgggatccgtcgccgtttctgaaaaaggctggagaatcgggaagggagaaggctacgccgatctggaatatgccatgatggtatccatgggcgccgtcagcaaggagacgccggtggtcaccatcgtccacgactgccaggtcgtggacatccctgaagagcttgttgaggagcacgacatcactgtggactacatcctcactccaaccagagtcaccgccacaggctgcaagcgcccaaagccaatgggaatcacctggttcaagatcagcctggagatgatggagaaaatccccatactgaggagcctccgcgcccgagagcagcaggctgggaaggatgtcaccctccagggtgagcaccagcaccttccggaaccaggctgccagcagacagtgcccctgagtgttggcaggaggcccccggaacacacccggtaccagaaaccaattccatggaggcagcccctggctccccaacaggggaaggtgcac

SEQ ID NO: 97349 - DNA, 821 bp, Homo Sapiens
  misc_feature (35)..(36): n is a, c, g, or t
ggctaggtagcgaggctggggtggttagaattcgnngcacgaagggtttagcggcaggaggaggagttaagggtgatcttgtgagaagagtcatgctggtgacatcaggaggggtacatggcggggatgggggaggtggtgctgctggactgagccagtggagggggaagatctgcagctagcatagtttcgagtgctctagtgaggagtgatggtcaccgtgtttgttgtgtacttacgtgtgcgtgagagctttcctcgcagaggccctcccaacgaacagctcgtctcagcaaggcagtctgttccttcctggtcacgaggtggccagagcacaatgtataggcagaccaggggtccttcctctcccaatgtggccatgtggaggacaggatgtcttcctgggggttgggatggactctctgggcagctgtactctctctcctacctgcctccctgcagtccctcccatggatgactcaggcgcgtcccagaagcaatttctatctgtccccttcacgtttcaggccttggggagtctctgctcctacctgactctgtgtcgtaatttcaggggagcatcagtggaggaggcagtgggggcagcagcagcctcctgaccaatgcccgctcttggggagtgaggattctgcacgtggatggtaccctttctgtgctgggctcctgtggcagggggcacttggtgacttgaccaggggtgtcggtttttgaaggtcctggcctgtgggcttctggtacggaggccgaaattctcgtgcccgtggtccccagtgggggttgggcggggacggggagcccta

SEQ ID NO: 97350 - DNA, 967 bp, Homo Sapiens
aacggctaggtagcgaggccgggtggtagaagtcggcacgagggagcaggaaatgcctgagcggcgcctgagccccaggtaagcaggctaggatgtgagagacacagtcacctgcagcctaaggactcaaaagctgtccccaggtcacagaagggagaggacatttcccactgaatctgtctgaaggacactaagccccacagctcaacacaaccaggagagaaagcgctgaggacgccacccaagcgcccagcaatggccctgcctggagaacatccaggctcagtgaggaagggtccagaagggaatgcttgccgactcgttggagaacaatgaaaaggaggaaactgtgactgaacctcaaaccccaaaccagcccgaggagaaccacattctcccagggacccagggcgggccgtgacccctgcggcggagaagccttggatatttccacttcagaagcctactggggaaggctgaggggtcccagctccccacgctggctgctgtgcagatgctggacgacagagccaggatggaggccgccaagaaggagaaggtagagcagatcctggcagagttccagctgcaggaggaggacctgaagaaggtgatgagacggatgcagaaggagatggaccgcggcctgaggctggagacccatgaagaggccagtgtgaagatgctgccacctacgtgcgctccaccccagaaggctcagaagtcggggacttcctctccctggacctgggtggcactaacttcagggtgatgctggtgaagtgggcgaaggtgacgaggggcggtggagcgtgaagaccaacacagatgtatcatcccgaggacgcatgacggactggtgaaatgtcttggatatctctgatgcttcgattcggagcttgataacaaaagtgccgggtactccttcgggggcaaatcaaggccctcacggcagggtagccggaag

SEQ ID NO: 97351 - DNA, 1417 bp, Homo Sapiens
  misc_feature (141)..(188): n is a, c, g, or t
ttcccaggccctggcttccgcctcgggtgcagggcccggcccccctgcccaccacattgccggttcaggagcccccttggccctccacacgtagtccgagatctcggtcgcccttcgtttcccccctcggatgccttgaannnnnnnnnnnnnnnnnnnnnnnnnnnnnnnnnnnnnnnnnnnnnnnnagactcgtacgtcactgctcttttccgccatcagcccttggctgagctggaaaagagacaggcctcttggacggatggtctgccggatcatgagggacatggtgtccctgagctcgtcgctggtcttggggaggcaccacccatcccgttctgtgcaggaattctctgccccgtcattgcggtgaatgatcttctgcaactcttccacattcaagtcgcataactggtagaacatctgccgatagggtggcaaggccccttcccggaagatgtagacagagtccttgagcgttgttacttgctggaagctgggtttccgagcaccactcgtccccgacgggcccaggccctgctttcaggtcatgcatggtgacaagctggctggatgtcttcttgacggtgatggggaggcatgtagttgtaggtgctgcgctttgctttgaccggcaagtcactgggggcgtaaccgtgtttcattccacaacggattcggaaatcgaggacttgataaatcttggcatctgggttttttcgggggtcatacccaaatcgaatccataggctgcgccaggggcctgttatcatgtaataggctatgaagggaagcaagaccttgagcttgtctgggtggacgctgatgttggccttgacagcatttcgggaccagatgggacggatgtcaaacagcttcctcagctcctcctccaccttccggtccacggggttagtgcagactctcctccacgtctgggctgcagcctccagtggctgctggggcacctcctcatcctcaaagtggacaaagatggcatggtgggggcgccgggctctgctcaggccaatcagattctcacctgagatggggggatggtggtagccttcccggtgctgggtctctggtcggtagaagtagtccaccggggcgtccagccgggagaagatgggtggggggatgtagagcggcagctcctggtggaaaaaggcctccttctcgggccggagcatgagcacctggtcatacatggacgtatgcttgccgcctgcttccgtatgcacagccaagtactggaagtcagacatccccgggagacgccttcctcgccgcccagagtcggcagcatcttagccacatcacgcaccactcccgggtactccacgcacaccatgcgtcgctcccgcctcagctccacggggacggcggcccccagccccaaatcgccgcctccgcc

SEQ ID NO: 97352 - DNA, 1271 bp, Homo Sapiens
aaggtagcgaggcctgggtggcgtattcggcacgaggctcgctggctagtaggagagactggtgcttgccccgcccggtggactaactcgcttaattttaaataaaaagtcgaggacacggcggtcgttttcccgaagacatgggccctcccatgggccatttgctccctggaggccctcgcgtcttgctgagcccggggagttaggatgacgcgagcggtgagggagcccggaacgattccttcgcggaacaattgaggcgaggcctttgggagtactttgtgggacggaccctggcgggccctgccagacgcacagggatggcggcggaggcggccgatttggggctgggggccgccgtccccgtggagctgaggcgggagcgacgcatggtgtgcgtggagtacccgggagtggtgcgtgatgtggctaagatgctgccgactctgggcggcgaggaaggcgtctcccggatctacgcagaccccaccaagaggctggagctgtacttccggcccaaggacccatactgccacccagtgtgcgccaaccgcttcagtaccagcagcctgctgctccgcatcaggaagagaacgaggcggcagaaaggggtgctgggcactgaggcccactccgaggtcacatttgacatggagatccttggcatcatctccaccatttacaaatttcaggggatgtctgacttccagtacttggctgtgcatacggaagcaggcggcaagcatacgtcaatgtatgacaaggtgctcatgctccggcccgagaaggaggcctttttccaccaggagctgccgctctacatccccccacccatcttctcccggctggacgccccggtggactacttctaccgaccagagacccagcaccgggaaggctacaacaatccccccatctcaggtgagaatctgattggcctgagcagagcccggcgcccccacaatgccatctttgtcaactttgaggatgaggaggtgcccaagcagccactggaggctgcagcccagacgtggaggagagtctgcactaaccccgtggacggaagtggaggaggaactgtagaagctgttgacactcgtccatctgtccgaaatgtgtcagggcaactcagggtcccccgacagtccaggtggtccttaagcatatgaaaggccggggcgcatgttccttggttaccccaaaaccatgcaattaggctcctcccacggggaaagggccctggtgggagggcaaaacccggagatacggtg

SEQ ID NO: 97353 - DNA, 821 bp, Homo Sapiens
cggctagacgaggcagggtgtagaatcggcacgaggggctggttggaggaggtagatcaccctttctgcgggggacgatttcgtcggtggtaggctgctaccatgaggttgaatcagaacaccttgctgctggggaagaaggtggtccttgtaccctacacctcggagcatgtgcccaggtaccacgagtggatgaaatcagaggagctgcagcgtttgacagcctcggagccgctgaccctggagcaggagtatgccatgcagtgcagctggcaggaagatgcagacaagtgtaccttcattgtgctggatgccgagaagtggcaggcccagccaggcgccaccgaagagagctgcatggtgggagatgtgaacctcttcctcacagatctagaagacctcaccttgggggagatcgaggtcatgattgcagagcccagctgcaggggtaagggccttggcactgaggccgttctcgcgatgctgtcttacggagtgaccacgctaggtctgaccaagtttgagggctaaaattgggcaaggacaatgaacccaagcattccggatggtccagaaacttcactttgagcagtgtggcctacgagcagtgtctctcagggaggtgaccctcagactgacagttgagtgagtccgagcattcacgtggcttctggagcagaccagccacgtggaacgagaagcctttacaggacgatggtccgggcagagccctggcctgatggctgggccttgtgcgcaggcaactctgtgtgagcagcgtgttggagccatacacttcaaagaccagagccttgactggc

SEQ ID NO: 97354 - DNA, 1279 bp, Homo Sapiens
cgagaggatccagagattctccgagaaaatgggcattttctctgaggacccaaaagacagacatatctacacaaattgatatagcagactactctttgatggggaatggtaaagggacaaggacaaagtgaaggttgctgagaagatacaagttctggctataagaagggcagaggagcagaggcaggagacagaggtgggcaggcatctggcccaccccaggaccctcctggaggggcttggacactgggaggaatgaaggctggcacgggagctggcacggggtggtggatggagatgctggctcagggaggggaccgacagcagtgatgaagatgcctagtcatctcttctcggggcatctgtgaggcacagctgtgggcagagggcaaggtcagcaggactatgtattgaagttggccttgagtttctggaaggctgccctggcggacccgcctctcctcctcctcccgcttccgctcatcttgctcagctttcaactctgcttcaaacttactggccgatgacaaggcttggaccttggcttcaaagaagttcttggcacctctgacaccctccagggccacatcgatctcagaaagctttgccagcgccatcagcccactgtcctcctgcagctcccctgccgcggccttgtggaaaatgagcaggaactcccggaagctgagcttgccatcgaagtcctcatccacctccttgatcatgctcttcaggcccaggtgggtctggggggcccccagcttctccatcatcagcttcagctccatcaggtcgatgaagccatcccgcccagcgtcatacagtttgaacatgctctccaggtccttgatgaggcggcggctgaactcagggaactccgtgtaggggttgaagaccctgcagcgccggggccgcgcagcgccctcgttgatgtccagccgccggctcagctgggcgctcagctccgcgtcggcgctggccgtgggcgcacgggcgggaggctcgggctcgggcttgggctccggggctggggcgccgaggggagccagctgggggccactctcctcggcctcctcgcgccgcagccggcgctccagcttgcacgccagctcctcactggccatggcggcggatcgcaggacgcgggaacgcggggacgcgggacgggacgcagggagctggcgggcggcgcgctcctcgcaggctcgaggctctacaacactccgccgaggcggcggggacccggcggtgggagggtcatcccgggaattccggaccc

SEQ ID NO: 97355 - DNA, 939 bp, Homo Sapiens
  misc_feature (290)..(316): n is a, c, g, or t
caaaatatgactaggtacgaggcctgggtgttgaattcggcacgagggcagcccagaacgcagccatgggggcagcccaggtgccatgaatcagcctcagaactcagtattccgccacccccaattacacgtactccaatgagatgtgaaccagccacgcctaccagtgtggcagagctgggtgccattgtggacagtggtggctcaatgccacatcgtcatatgtggttaccaagcagggttcccccttcccttttctccttccctactttgtacaaaggaccagagtnnnnnnnnnnnnnnnnnnnnnnnnnnngtctgtaccccagcccccacctttcagattctgctcttggcactcagctgtgggctgcacgtggagctgtcccgtgcggtagtagctgtgtctgtgtcccctcgtgaaatagtgtgcagtggaggtctcttgtggttgctagatgtgtgtttagagctaaaccagaccccaaacaccaacctacacactgaccctcttgacatctggaaaccatactgaccactggacccatgggaaccccctacacaggtgaggccagcgcgaagagccatagacagaaacgacgtggccccatatccatagaggaataagacgctgagaaatagaaacataactaacacgaactcaccgtgggaaacaaaaacaaagaaatcaagacacatccaagcgcggacgagttggagacagggctgggcaccaagcgccaaaaggaacatacccacaaagaatagagagaaacccaacacacgaacaacagaaatacaacaagacaccaaaccaacccacaactgaccccacgatagcaaataccaggaggcagcacccatgtgcccgaagtagaataaacaagaacgcagagagactaacgccacccacgcgaacagtcacaatcagcgcaagac

SEQ ID NO: 97356 - DNA, 1057 bp, Homo Sapiens
  misc_feature (49)..(49): n is a, c, g, or t
taggtaggtacgaggctgggtgtctgaatcggcacgaggaccctcaggncatcctgatgggcggaggcccctcgaggtgacacccaccactcagccgagcgggactacgagtctgctttgtgctccgcgaggaccagaaacacctgcaagaggcacggagaggaggcgcctttcaagaggcgcctttcatggaactgagtgactggcctggcttggggacaccaacaagccttccccctcctgctggacacagagacacccacccagcacaccagacacaccctctgagtcacctaggccgcctggggctgagaagacctaaccgaggggccagatggcttcgaccggcttagaactgctgggcatgaccctggctgtgctgggctggctggggaccctggtctcctgcgccctgcccatgtggaaggtgaccgccttcatcggcaacagcatcgtggtggcccaggtggtgtgggagggcctgtggatgtcctgcgtggtgcagagcaccggccagatgcagtgcaaggtgtacgactcactgctggcgctgccacaggacctgcaggccgcacgtgccctctgtgtcatcgccctccttgtggccctgttcggcttgctggtctaccttgctggggccaagtgtaccacctgtgtggaggagaaggattccaaggcccgcctggtgctcacctctgggattgtctttgtcatctcaggggtcctgacgctaatccccgtgtgctggacggcgcatgccgtcatccgggacttctataaccccctggtggctgaggcccaaaagcgggagctgggggcctccctctacttgggctgggcggcctcaggccttttgttgctgggtggggggttgctagtgctgcacttgcccctcgggggggtcccagggcccagccattacatggcccgctactcaacatctgcccctgtccatctctcgggggccctctgagtaccctaccaagaattacgtctgacgtggaggggaatggggggctccggtggcgctagagccatcagaaagtggagggcccat

SEQ ID NO: 97357 - DNA, 826 bp, Homo Sapiens
ttacggctaggtagcgaggcctgggtggagaattcggcacgaggagacacagagccctgggttgtggaagaggtggctgttccctgtcatcagtatgcagcgattgctctttccgccgttgagggccttgaaggggaggcagtatctgccgctcctggctcctagggcagcgcctagagcacagtgtgattgcatcaggcgccctttgaggccaggcaatacagcaccatctctgaagtagctttgcaatctggaaggggtacagtgtcccttccctcaaaggctgctgagcgggtggtgggccgatggctcctggtctgcagtggaacagtggctggagcagttattcttggtggagtaactaggttgacagagtctggcctctcgatggtagattggcatttaataaaggagatgaagccacctacaagccaagaggaatgggaagcagaattccaaagataccagcaatttccagaatttaaaatcttgaatcatgatatgacactgacagaattcaagttcatctggtacatggagtactcacaccgaatgtggggtcgccttgtaggccttgtgtacatcctgcctgctgcctacttttggagaaagggctggctcagccgtggcatgaaaggacgtgttcttgccctctgtggcctcgtctgcttccagggtctgttgggatggtatatggtgaaaagtggactagacagaaaaatcagactcccatgacatccctcgggtcagtcagtaccgccttgctgccacacctgggatcagccctggttctttattgtgccagttgtggacctcactgtcacgg

SEQ ID NO: 97358 - DNA, 1036 bp, Homo Sapiens
  misc_feature (178)..(255): n is a, c, g, or t
  misc_feature (830)..(846): n is a, c, g, or t
aacttacggctaggtagcgaggctgggtggtgaattcggcacgaggcttcccgtctgtctgcgcccccatttctccatttctgccggggtctcccccttcccttcagcccattccccctcggttttatccatttccttgcctcctttttgtgtcttcatttttcctcctgtctgcatnnnnnnnnnnnnnnnnnnnnnnnnnnnnnnnnnnnnnnnnnnnnnnnnnnnnnnnnnnnnnnnnnnnnnnnnnnnnnntgggtttgtgtgtctgcatctccatcttaccccttgcctgactgtaccccgtagacccctgtttctcctcctgcacctgtgtccccatctgcccttcttgttgctcctgtcatgtgtcaccatcttccctcctgtctgccttcttcctccacttgtgtcagcttgcatttttttattcctgactgagtcaccacacccctctcccctgatcaaagggaatattagtttttaatttggatcgactgaggtgccaggagaaactgcagtcccaggtatccagacagccaccaggatggtccctcgccccacccccaccgcctctccccaccttttccaacgtgttgcatgctgggagctggggggtgtgggggaaggggctgccggcttctttcaggaggctgaggtttggaggcaaaatcaacctgggagaccaccccggccacggcgcctcagtggacaggtgggaggaaaagaaaacttcttaccttggaggagggacatcccgcttccttatccttagcttttttgttgctcctccccactgccccttttaatttatttggttgtttgcggannnnnnnnnnnnnnnnntaggctgggccgggaactgtccgaggtgctgagctggggcgggaccggaatcctcccggtagggtaccagggactgagttgggcctggggccgtgtccaaggtgccaatgatgcgggccgacagagcgggccgcactgtctgtctgtccgtctgtcccggaaagaactataaagcgctggaagcgcctgc

SEQ ID NO: 97359 - DNA, 954 bp, Homo Sapiens
tacacacaaaggaaagacagaaagagacaaacacttacggctaggtagcgaggcctgggtgttgaattcggcacgaggcagtctgtcatgttcatggcatcctcccagatcagcactgacaccgtctcctccatgtctggctcctacatcgcccctggcactgaagaggagggagaggctctctcttccccccagcctgccagcagggccccctcagaagaaggagaggggctgccagcggagtctccagacagcaactttgctggcctcccagctggagagcaggatgcagagggaaatgatgttatagaggaagaggatggatcacccacgcaggaaggccagaggacgtgcgcatttctaggtatggagtgtgacaataacaatgactttgacatcgcaagcgtgaaagcactggacaataagctgtgctctgaggtctgcttacctggtgcctggcaggctgatgacaatgccgtcagtcggaatgcccagcgccggcgcttgtcatccagcagcctggaggactctgagacgaggccctgtgtgtggggccctttggctgtctgagccccagcctctgcacttgggctcccctcctgccctgcattccatccatcctcactcagctgctgcctactgggcatcctcagcaagatgctggagactttttaccctcctgtgacagctgttacaacctgtaaccacaatccctcacctctcagagggaactggaaccctcctttctccgtgtgacctaaagccactcaatgaactgcagctcacgagaccttttgcagggactctgcgaatgtcctcacggtatatcgactgtccaggtggagctggggtccatgggctaatttcttacacatctttttttctccttaaggggtagaaccaagaaggcttagagttctggcaggctttgttacaaacatccctctgggcatt

SEQ ID NO: 97360 - DNA, 1182 bp, Homo Sapiens
acacttcagttattagaggaagtaacacaaggggatatgagtgcagcagacacatttctgtccgatctgccaagggatgatatctatgtgtcagatgttgaggacgacggtgatgacacatctctggatagtgacctggatccagaggagctggcaggagtcaggggacatcagggtctaagggaccaaaagcggtaaggggcacgtgtgcaccaaagggaatgctgccactctgaggaagtgttagggtgggtactaccagagcctgagtagggcagcaagggctccaggcaatctgggtctctgagccccctactttcctttgggtctacagtatgcgacttactgaagtgcaagatgataaagaggaggaggaggaggagaatccactgctggtaccactggaggaaaaggcagtactgcaggaagaacaagccaacctgtggttctcaaagggcagctttgctgggatcgaggacgatgccgatgaggccctggagatcagtcaggcccagctgttatttgagaaccggcggaagggacggcagcagcagcagaagcagcagctgccacagacacccccttccgtgtttgaagactgagataatgtctcccctgtaccaagatgaaacccctaagggaacaaaggcttcttcggggacagaaactgccactggccttgaaagggaacaaaaggatggcatctcagacagtgatagcagtactagcagtgaagaagaagagagctgggaacccctccgtggtaagaagcgaagccgtgggcctaagtcagatgatgacgggtttgacatagtgcctattgaggacccagcgaaacatcggatactggaccccgaaggccttgctctaggtgctgttattgcctcttccaaaaaggccaagagagacctcatagataactccttcaaccggtacacatttaatgaggatgagggggagcttccggagtggtttgtgcaagaggaaatacaccacctgaacgacgttgcctgttggtataatgagtgacctttccggaacctggcggtaatcagctctcctatcaaagggctgagctagctaatcaaagagatgccaaggtggtcactataaaagtaacctgttactatgacttaacataaggtgaattaattcaatagtgttgtggatccttcactcaca

SEQ ID NO: 97361 - DNA, 1508 bp, Homo Sapiens
  misc_feature (1421)..(1421): n is a, c, g, or t
aacaatgtgaatatagaacagtggttcaacaagcaggctggtacggtccggaattcccgggatatcgtcgaccacgcgtcgggccagcgaaatcatggtagatgatgaagagttggcacagcatccagctaccactgaggagatacgggtgtgctgtcaggacatcagagtgttggggcgcaaggagctcaggtcgctactaaactggagaacaaaacttcggcgatatgtggccaagaagctgaaagaacaagcaaaggcactggacatcagcctcagctctggagaggaagatgaaggtgatgaggaggactcaacagctggaaccacaaagcagccctctaaggcaggcaggcggaagaggaggaggcaggaacaactgaaccagaccttggcagaaatgcaaggcccaggaggtggcggaattgaagaggaagaaaaagaagctgttgcgtgagcagagaaagcagcgggagcgtgtggagctgaagatggatctgcctggggtttccattgcagacgagggggagactggcatgttctccttgtgcaccatccggggtcaccagttattagaggaagtaacacaaggggatatgagtgcagcagacacatttctgtccgatctgccaagggatgatatctatgtgtcagatgttgaggacgacggtgatgacacatctctggatagtgacctggatccagaggagctggcaggagtcaggggacatcagggtctaagggaccaaaagcgtatgcgacttactgaagtgcaagatgataaagaggaggaggaggaggagaatccactgctggtaccactggaggaaaaggcagtactgcaggaagaacaagccaacctgtggttctcaaagggcagctttgctgggatcgaggacgatgccgatgaggccctggagatcagtcaggcccagctgttatttgagaaccggcggaagggacggcagcagcagcagaagcagcagctgccacagacacccccttcctgtttgaagactgagataatgtctcccctgtaccaagatgaagcccctaagggaacagaggcttcttcggggacagaagctgccactggccttgaaggggaagaaacaggatggcatctcagacagcgatagcagtactagcagtgaggaagaagagagctgggaacccctccgtggtaagaagcgaagccgtgggcctaagtcagatgatgacgggtttgagatagtgcctattgaggacccagcgaaacatcggatactggaccccgaaggccttgctctaggtgctgttattgcctcttccaaaaaggccaagagagacctcatagataactccttcaaccggtacacattttaatggaggatgagggggagccttccgggagtgggtttggtgcaagaaggaaaaagcangcacccggatacgaaacagttgccctggttgggtaaagaaggaagggtgggagcattacccggaaaacgcctgggcggggaaaaatc

SEQ ID NO: 97362 - DNA, 1028 bp, Homo Sapiens
ggctaggtagcgaggcctgggtggcgaattcggcacgaggccgctccctcgctctgctggggcctccggacgcgcttcccacgcgggtctctggaacactcggtccgaacgcacgcctgcttgcactcacactgcggttcacacccggaggcgctctcgcactcacactgccgctcacgcgtgctcacactcccccacgcgcgctccgctccggctccagccccgcgcccagcgaaggcgcaggcactgctgccgagagcgccgaggggccccgcggccttcccatggcggacctgagcttcatcgaagataccgtcgccttccccgagaaggaagaggatgaggaggaagaagaggagggtgtggagtggggctacgaggaaggtgttgagtggggtctggtgtttcctgatgctaatggggaataccagtctcctattaacctaaactcaagagaggctaggtatgacccctcgctgttggatgtccgcctctccccaaattatgtggtgtgccgagactgtgaagtcaccaatgatggacataccattcaggttatcctgaagtcaaaatcagttctttcgggaggaccattgcctcaagggcatgaatttgaactgtacgaagtgagatttcactggggaagagaaaaccagcgtggttctgagcacacggttaatttcaaagcttttcccatggagctccatctgatcactggaactccactctgtttggcagcattgatgagggtgggggggaagccggaggaatcgcatcatgctctgttgtcagataggaagacatgtgggttgaagtgtgaatgaatctcagaatcaggatagggagccaaaatactgttatctaaattatacagacgtgggggatatggggtgaagggcttacaacacctgggagggtcggatatcggacttaaattcgagaaaataggggcagtgggagataggtgtgtagaaaggccagaaaggtcaaaaagtggagaaaggaaaagtagatatttataaatagaa

SEQ ID NO: 97363 - DNA, 1203 bp, Homo Sapiens
  misc_feature (334)..(380): n is a, c, g, or t
  misc_feature (1040)..(1041): n is a, c, g, or t
cataagggatcgaagggccggcgcagtaatcggcacgagggttttcgcagccctgtattcaggatcagagtgaggaagaggaggaggaagaaaaacatcctcctaagcctgccaagccggagaagaatcggatcaataaggccgtatctgaggaacagcagcctgcactcaagggcaaaaagggaaaggaagagaagtcaaaagggaaggctaagcctcaaaataaattcgctgctctggacaatgaagaggaggataaagaagaagaaattataaaggaaaaggagcctcccaaacaagggaaggagaaggccaagaaggcagagcagggttnnnnnnnnnnnnnnnnnnnnnnnnnnnnnnnnnnnnnnnnnnnnnnntctaaggcagatgatccctatgctcatcttagcaaaaaggagaagaaaaagctgaaaaaacagatggagtatgagcgccaagtggcttcattaaaagcagccaatgcagctgaaaatgacttctccgtgtcccaggcggagatgtcctcccgccaagccatgttagaaaatgcatctgacatcaagctggagaagttcagcatctccgctcatggcaaggagctgttcgtcaatgcagacctgtacattgtagccggccgccgctacgggctggtaggacccaatggcaagggcaagaccacactcctcaagcacattgccaaccgagccctgagcatccctcccaacattgatgtgttgctgtgtgagcaggaggtggtagcagatgagacaccagcagtccaggctgttcttcgagctgacaccaagcgattgaagctgctggaaagaggagcggcggcttcagggacagctggaacaaggggatgacacagctgctgagaggctagagaaggtgtatgaggaattgcgggccactggggcggcagctgcagaggccaaagcacggcggatcctggctggcctgggctttgaacctgaaatgcagaatcgacccacacagaagttctcagggggctggcgcatgcgtgtctccctggnncaggcactgttcatggagccccactgctgatgctgaatgagccccacaacacctggaaatcaacgctgtcatctgcctaataactactccagggctggcggagacctgctgaatgtcccctgaacaggcttcttgaggatgccgcctgatacaccaccccag

SEQ ID NO: 97364 - DNA, 806 bp, Homo Sapiens
cgccgccaaagacagccagggagggcccaaagacccggcagaccggggaagattccggggctcccagccggagaactgggccaagcaatccgagaccttccagcacagccacatgggggactggatgcaggcagccaaggctggaaaatgccctgtggcaggagctgccttctcacagcctcactctccacgatcaggttacccagtgtatacagacacagctctatgaagtctgagctgtgactggagaggtaggtgaggaggtaagaagtggctggcaggcaggcctcagcaacagtggactgctcggagtgagagagctcatgcaggcaccgagccgcctcaagctgcagcagggcctggttgctggtcaggagcccgaccagggtccgcatgctgccctccagccggatgaaggtttgctgtgtttcagggtgctgcaagcctcgacgaaggctgaccagagccccctctctctccttttcctctgtcccccgctgggcttgccgcaggaactgctgcacctcggtttccccgaggatcgcagccacacatccctctccagcttcctctggggcgtcgtttctcagcagcctcttgctgaccagctgctgctccctccgcgccttccgcagtgctgcctcccgctcccgcgcggcggcgccgtagctcctccaccccgcagaccgtgggcctgaggcggccctgccgtcggctccacatggtggagcaggaggaggaaagccgaaggaaacagcagccacaacgctcccaggggcgtagaagatggcaccgactgcgcagcc

SEQ ID NO: 97365 - DNA, 1063 bp, Homo Sapiens
  misc_feature (889)..(889): n is a, c, g, or t
cgctaggtacgaggctgggatgtagaatcggcacgaggcataactatgcccgagctgtcctttcccagccctgcaacacactgcatcttactgtgcttcgagagaggcgctttggcaaccgagcacacaaccattctgatagtaactctccacgagaagagattttccaagtggctcttcataaacgggactctggtgaacagcttggcattaaattggtgcgaaggacagatgagccaggggtttttattcttgacctgttggaaggggggttggctgcccaggacggcaggctaagcagcaatgaccgagtgctggccatcaatgggcacgacctgaagtatggaactccggagcttgctgcccagattattcaggccagtggagagagagtgaatttaacaattgctagaccagggaaaccccagcctggtaacaccattagagaagcaggaaatcatagcagcagcagccagcaccacacaccaccaccgtattatagcagaccaagctcacataaggatcttactcagtgtgttacatgccaagaaaaacacattactgtaaagaaggaaccacatgaatcccttggcatgaccgttgctgggggcaggggaagtaagagtggtgagctgcccatctttgtgaccagtgtgccaccccatggctgccttgcacgagatggcagaataaagagaggtgatgtgttgctaaatatcaacggcattgatttgaccaatttaagtcacagtgaggcagttgcaatgctgaaagccagtgccgcgtcccctgctgtggcccttaaagcacttgaggtccagatcgttgaggaggcgactcagaacgcggaggagcagccgagtactttcagcgaaaatgagtatgatgnccagttggtccccatcatggggtcatggtggcttgggcttcccagcacacttcatagcgtgcacgatatagtcttacgaagaagttacttgggaagtggggcttagtatcgttggtggatatgagagatcacaccaatcagcctttgctcttacgactatgtcttgggaactct

SEQ ID NO: 97366 - DNA, 908 bp, Homo Sapiens
aactaactgtctacggtacgagccctcgggtttatgaatacggcacgagggtgcgctacacgaagcttggcagaagctctgtagtgctcatggagtgctggtaccaggaggattcggtagtacgaggaacagaaggaaaaatccaagcaattgcctgggctcggaatcagaaaaagcctttatttagggcgtgtgcttagggatgcagttggcagtggttgaattctcaagaaacgtgctgggatggcaagatgccaattctacagagtttgaccctacgaccagtcatcccgtggtcgtagacatgccagaacacaacccagggcagatgggcggaaccatgaggctgggcaagaggagaaccctgttccagaccaagaactcagtcatgaggaaactctatggagacgcagactacttggaagagaggcaccgccaccgtatttgaggtgaatccagtctggaaaaagtgtttggaagaacaaggcttgaagtttgttggccaagatgttgaaggagagagaatggaaattgtggagttagaagatcatcccttttttgttggggttcagtaccaccctgagttcctgtccaggcctatcaagccctccccaccatactttggcctcctcctggcctctgtggggcggctctcacattacctccagaaaggctgcaggctctcacccagggacacctatagtgacaggagtggaagcagctcccctgactctgaaatcaccgaactgaagtttccatcaataaatcatgactgatcttgtagcggatgattcttcaagagacccttcaaacttgggtagagtttacagctctgactttacactcggctttggagactttctttaaattatgtttttattaagattattttattatgcggaaaggta

SEQ ID NO: 97367 - DNA, 1015 bp, Homo Sapiens
cttatctatagagagtatgaagtcgacggcgcgccgaattcggcacgaggtgtatgcaggtgctcaaatccacttgacacatcagtgaaggagaaaatatcaatgttctgccatgttgagcctgaacaagtgatctgtgtccacgatgtctcatccatctaccgagtccccttgttgttagaggagcaaggggttgtagattattttcttcgaagacttgaccttcctattgagaggcagccaagaaaaatgctgatgaaatggaaagagatggctgacagatatgatcgcttgctggagacctgctctattgcccttgtgggcaaatacacgaagttctcagactcctatgcctctgtcattaaggctctggagcattctgcactggccatcaaccacaaattggaaatcaagtacatagattctgcggacttggagcccatcacctcgcaagaagagcccgtgcgctaccacgaagcttggcagaagctctgtagtgctcatggagtgctggttccaggaggatttggtgttcgaggaacagaaggaaaaatccaagcaattgcctgggctcggaatcagaaaaagccttttttgggcgtgtgcttagggatgcagttggcagtggttgaattctcaagaaacgtgctgggatggcaagatgccaattctacagagtttgaccctacgaccagtcatcccgtggtcgtagacatgccagaacacacccagggcagatgggcggaaccatgaggctgggcaagaggagaaccctgttccagaccaagaactcagtcatgaggaaactctatggagacgcagactacttggaagagaggcaccgccaccgattgaggtgaatccagtctggaaaagtgtttgcgagaacaagcttgaagtttgtgggcaagatgttgagagagaagcgcactgcaactgtgggttgaaaataccctttttggggggttcgacccccgggttccttccggctattaacctccaacatattgggccc

SEQ ID NO: 97368 - DNA, 880 bp, Homo Sapiens
ccaggagcccccgtgaacagcccgggcagcctccactccttctgctcgcgccgctgcctgaaaccgtacagctgcagccccatggacagcaccaggtgcagcagtgagatgacccccagcagactgtagctaacacgggccctcaggtcctctccgggcaggctgcggacacggaggtacgtgatccccgtgagcctcttggccaggtggtagaagacaccgtggatgtaaaaccaggcaacatgtagccgctggaggcaggcgaggccctgtctgaggacgaagaccgcccgcagcagcgccctcctctgctgctcagtcagggtggccgtgtggtgacgcatccagcgccgcgcccctgagcagccacgcccacctggccccaggctcccctgcaagggtcgcccactgtcggggtcagcctgcagctcctgctccagggggagcagggccttgtccagcaggtagggcaggacggcatgcagtgtcaccagcacgccacggcgcagcgaggagggcacatgtatccgcgatgggtccacctggatgatgctgacgtactcctcccccagggtctggtagcctgcaagtgtggtgaggccaaagtaggccacatctgagagcagctcaacctccttcctccactccagccacttcctcgcacccgccaggctgtgcagggcgccgcccgccgcgctccgcagcccaccgcggtagtactcgtccttctgcgccgcgcggatcacctccggggggctggcggcggccggggccatgcacgcgggttcgggtggtcccgagcagccacgccggccacgcccacgccccgacgcgtgggtcgacatatcccgggaaccggaccggaccagccgcttgtttt

SEQ ID NO: 97369 - DNA, 984 bp, Homo Sapiens
aaaacttacggctaggtacgaggcctgggtgttgaattcggcacgaggctcaaaggccaagctgtgcgcaaacagctttgggacacggccaacacggtgaaggaaaagttcgggaggaagctttagtgaatccttactggttgggagccttcccgacatgaacaagatgctggataaggaagacttcactatgatgaagagagccatctttgcaacgcagcggcagtctttcccccctgtgtgcacccacaatatgctggatgactcctcagaccccatcctgaccaccatccgccgaatcggcctcttcaatagcagtgccgacagggtgaaggtgattttccacccggagttcctctcctccacaagccccctgctccctgtggactatgaggagtttgtccgtggctgtcaccttggagtcttcccctcctactatgagccttggggctacacaccggctgagtgcacggttatgggaatccccagtatctccaccaatctctccggcttcggctgcttcatggaggaacacatcgcagacccctcagcttacggtatctacattcttgaccggcggttccgcagcctggatgattcctgctcgcagctcacctccttcctctacagtttctgtcagcagagccggcggcagcgtatcatccagcggaaccgcacggagcgcctctccgaccttctggactggaaatacctaggccggtactatatgtctgcgcgccacatggcgctgtccaaggcctttccagagcacttcgctaacgagccagagaggcggatgcgcgccagaggtaccgctaaccaagggcagcctcgagtgccaccggtggccctcggtggtcacgaaaagtccaggccggaccagagtgagggacaagaaggagacaccgaaagggacgcttgaggagacaggaacggcaaagtagagagaaagagcggccagaacaggcaacaacgggccaaatg

SEQ ID NO: 97370 - DNA, 1168 bp, Homo Sapiens
  misc_feature (256)..(256): n is a, c, g, or t
  misc_feature (1035)..(1035): n is a, c, g, or t
ttatgctaggtagcgaggcctgggtgttaattcggcacgaggccgaccatgagcgtcgggtcgcacgggtagcgtgggtcagggcttgggcgccagctaccgccgcggcgcctcgagcttcccggtgcctccgccgggcgcccagggtgtagcggagctgctgcgagatgcgaccggggcggaggaggaggcgccctgggcggcgacggagcggcgaatgccgggccagtgctccgtgctgctcttcccgggccanggcagccaggtggtgggcatgggccgcggtctgctcaactacccgcgcgtccgcgaactctacgccgccgcccgccgcgtgctgggctacgacctgctggaactgagcctgcacgggccgcaggagaccctggaccgcaccgtgcactgtcagcccgcgatcttcgtggcatcgctggccgctgtcgagaaactacatcacctgcagccctcggtgattgagaactgtgttgctgctgctggattcagtgtgggagagtttgcagccctagtgtttgccggagccatggaatttgctgaaggttggtatgcagtgaaaatccgagctgaggccatgcaggaagcttcagaagctgtccccagtgggatgctgtctgtcctcggccagcctcagtccaagttccaacttcgcctgtttggaagcccgggaacactgcaagtctttaggcatagagaaccccgtatgtgaagtgttccaactacctctttccagattgcagggtgatttcaggacaccaagaggctctacggtttctccaagaagaattcctctaagtttcatttccagacgcaccagggagttgccgggttagggcggcaattccacacccgactcatggagcaagcgtggagccctgaagcaagctttaaagcgagtcgacatttagaagccctggggttctgcaactcgcaggctccagggcatgaaaaggggatacggggcaatcacaactgtgtgccgagatgggtcccagtgagtgggcgcaccgaggctctacngaggaaaagggtgtgtccaccaatgagagcggagaggggaacccaagatagaggggaacacgcggtgagacacagcagtgcgccgagtgacacccaggagggacagttctcgctgtgagtaatatcgcgcttc

SEQ ID NO: 97371 - DNA, 556 bp, Homo Sapiens
tgcggccgccacggtaacgcgcgcgggcaggtgtccgaccatgagcgtccgggtcgcacgggtagcgtgggtcaggggcttgggcgccagctaccgccgcggcgcctcgagcttcccggtgcctccgccgggcgcccagggtgtagcggagctgctgcgagatgcgaccggggcggaggaggaggcgccctgggcggcgacggagcggcgaatgccgggccagtgctccgtgctgctcttcccgggccagggcagccaggtggtgggcatgggccgcggtctgctcaactacccgcgcgtccgcgaactctacgccgccgcccgccgcgtgctgggctacgacctgctggaactgagcctgcacgggccgcaggagaccctggaccgcaccgtgcactgtcagcccgcgatcttcgtggcatcgctggccgctgtcgagaaactacatcacctgcagccctcggtgattgagaactgtgttgctgctgctggattcagtgtgggagagtttgcagccctagtgtttgccggagccatggaatttgctgaaagtaca

SEQ ID NO: 97372 - DNA, 1276 bp, Homo Sapiens
aattacggctaggtacgaggctgggtggtgaattcggcacgagggaactggaggcagtgcccaacatccccctggtgcccgatgaggagctggacgctttgaagatcaagatctcccagatcaagagtgacatccagagagagaagagggcgaacaagggcagcaaggctacggagaggctgaagaagaagctgtcggagcaggagtcactgctgctgcttatgtctcccagcatggccttcagggtgcacagccgcaacggcaagagttacacgttcctgatctcctctgactatgagcgtgcagagtggagggagaacatccgggagcagcagaagaagtgtttcagaagcttctccctgacatccgtggagctgcagatgctgaccaactcgtgtgtgaaactccagactgtccacagcattccgctgaccatcaataaggaagatgatgagtctccggggctctatgggtttctgaatgtcatcgtccactcagccactggatttaagcagagttcaaatctgtactgcaccctggaggtggattcctttgggtattttgtgaataaagcaaagacgcgcgtctacagggacacagctgagccaaactggaacgaggaatttgagatagagctggagggctcccagaccctgaggatactgtgctatgaaaagtgttacaacaagacgaagatccccaaggaggacggcgagagcacggacagactcatggggaagggccaggtccagctggacccgcaggccctgcaggacagagactggcagcgcaccgtcatcgccatgaatgggatcgaagtaaagctctcggtcaagttcaacagcagggagttcagcttgaagaggatgccgtcccgaaaacagacaggggtcttcggagtcaagattgctgtggtcaccaagagagagaggtccaaggtgccctacatcgtgcgccagtgcgtggaggagatcgagcgccgaggcatggaggaggtgggcatctaccgcgtgtccggtgtggccacggacatccaggcactgaaggcagccttcgacgtcaataacaaggacgtggtcggtgatgatgaaccgagatggacgtgaacgccatcgcaggcacgctgaagctgtacttccgtgagctgcccgagcccctcttctcactgacgagttctaccccaacctcgcagagggcatcgctctttcagacccggttgcaaaggagagctgcatgctcaacctgctgcatgtcccgccggagtacaacctgccgt

SEQ ID NO: 97373 - DNA, 1250 bp, Homo Sapiens
  misc_feature (295)..(331): n is a, c, g, or t
ataggctaggtacgaggctgggtgttgaatcggcacgaggctgagactcccgtctaatggactgcattgagagccggctccggcgcgagttgcctctccgcttcacgctcgatttccaggcattcttcccttattaagtattcgtgtaatattaatagtcatgaatatctgctattaggaggctccaggaacgctgcccagcgcggttattagaagctcaagcgaagccgccgctaagaaaagagggggagacacggattaaggaacacgcacgcacccacacactcacacatannnnnnnnnnnnnnnnnnnnnnnnnnnnnnnnnnnnnaaagaactttgaatcataaccagtcgcggcaggatagagaccgtgggttcgaccagctgaaggcgccgcgcgaatcggtggttcaagttcggatggatccgagccgggctcccgcgctccggggagcgtcggcgccgtgactggagtcctgggtggcgcggggctctcggcgccttttgtgtggggcgcgctcgggcggcggggcagccgggcgctccaggcttgcttgtttttttccaccctgactcgttaccccagactcttcgcagatgttagttcacagtttttcagccatggaccgtcacgacggcaccagcaacgggacggcacggttgccccagctgggcactgtaggtcaatctccctacacgagcgccccgccgctgtcccacacccccaatgccgacttccagcccccatacttccccccaccctaccagcctatctacccccagtcgcaagatccttactcccacgtcaacgacccctacagcctgaaccccctgcacgcccagccgcagccgcagcacccaggctggcccggccagaggcagagccaggagtctgggctcctgcacacgcaccgggggctgcctcaccagctgtcgggcctggatcctcgcagggactacaggcggcacgaggacctcctgcacggcccacacgcgctcagctcaggactcggagacctctcgatccactccttacctcacgcccatccgagaggtcccgccatgtagaaagacccgggtattaacatcccagatccaactggtaattaagaaaggccccgtggcccctgtccaaggtcaacaggcaatggccgtctccgccattccctattaacaaggaccaacttctttcggggggcgtgggggaaccccaacgaaatccttcctggttcagtttcccgggtccc

SEQ ID NO: 97374 - DNA, 748 bp, Homo Sapiens
aaaataggctaggtagcgaggctgggggtgaatcggcacgaggtataactgggaatgtggtgattaccctacccacgagcacagcagagctggatggctctaatgtcctcagatgacaagggaatagtcagctacctctggactcgagatgaggggagcccagcagcaggggaggtgttaaatcactctgaccatcaccctatccgtttttctttcagagacctggttgatgggaagccgtacatcttttcacgctgaaatgtgaccgatgcaaagggttgagagtgagcacagaccgggaccactgtggaggtgaacacgctgactcccaggtagaaagacaagcctggttggatgagtcagtcttggactatcaacgtcagtcagctaacgtgagaggctgagaggggatgttcatccgccagattggggtcctcctgggggtgcgtggagttccgacagtcattgtgcaaagagattcagccgtacagcggagcagagcagcctaatagatggtattctggtgttcaaacacgagcctccccgaccagatcttcaaaggccatgaggtggcagcgatgctcaaggagtgagctgcggacagcaagaaggcagactttttgatattcagagccttggaagtctaacactgtcacatgtcagctgaactgttccgaccatggccactgtgactcgttcaccaaaacgcggtatcttgtgacccttttggatggagaatttcatcaag

SEQ ID NO: 97375 - DNA, 990 bp, Homo Sapiens
cactgatgatcatggcatcaccagctatgagtggtcactcagcccaagcagcaaagggaaagtggtggagatgcagggtgttagaacaccaaccttacagctctctgcgatgcaagaaggagactacacttaccagctcacagtgactgacacaataggacagcaggccactgctcaagtgactgttatgtgcaacctgaaaacaataagcctcctcaggcagatgcaggcccagataaagagctgacccttcctgtggatagcacaaccctggatggcagcaagagctcagatgatcagaaaattatctcatatctctgggaaaaaacacagggacctgatggggtgcagctcgagaatgctaacagcagtgttgctactgtgactgggctgcaagtggggacctatgtgttcaccttgactgtcaaagatgagaggaacctgcaaagccagagctctgtgaatgtcattgtcaaagaagaaataaacaaaccacctatagccaagataactgggaatgtggtgattaccctacccacgagcacagcagagctggatggctctaagtcctcagatgacaagggaatagtcagctacctctggactcgagatgaggggagcccagcagcaggggaggtgttaaatcactctgaccatcaccctatcctttttctttcaaacctggttgagggaacctacacttttcacctgaaagtgaccgatgcaaagggtgagagtgacacagaccggaccactgtggaggtgaaacctgcaccaaaatggtattttttgttcaaacgagcctccccacagatcttcaagggcatgaggtgcagcgatgctcagagtgactgcggagcaaaggcgacttttgaatcaagcctggagtcacctgtcacatgcactgactgtcgacatgcactggaccgtcacaacctgatcgtacctttgatgagatctcaggcactgagagaagcacgatgactgtat

SEQ ID NO: 97376 - DNA, 775 bp, Homo Sapiens
aaccgttgccacaccgtccccctgccgtgaccttcagccggattacctcccgcctgattcatattgccttggacacatcaggagggcacctgtgtggcctactcccttaaagccccagagtctggtcctctagtttcagaaaacacacacagtgcctccaccggagtcagtcagatgcgcagggatggtctgggaattgcacccttatattctggtcatctccactcctcagccttagctcaccactgccccccatgccctgccactgacaatgacactgctccatctccctgtcctcaaatgtcagtcccctcaaccacccaggtagccctgtctctgcagagactctctcttcagtggctgggttgggtcctgattttcagacccctcccatgcccacactcccctctaggaaagcaaatatctcacaggcatctctgcagatcttgcctctgggtccagcaatcacaaccaggacatcagaaccttggggttggaaggaatgtgtaagctcacctagaatgaccctgtacagaaatcccttccacagcatgcctggcagacgactgcctagactctgctggaatacctccagtgatggggcactcactaccttcacaggcagccattcaacattgaagagtttcagctgctggaatgccctttgtatagggcataaatgaacccaattgtccctctcacttctccctttcccctaggcattattcccctcgtgccgattaaacacccggcctcgcacctagccatttttttc

SEQ ID NO: 97377 - DNA, 1144 bp, Homo Sapiens
cggcccctgccattcatcaccttctgtgttgccccaagtgccttggtcttcctagccccctgcgctttccttgaccgcacctcccccagctgcactttcaattggcacgcccctcagtgagctcctgaggccccggatcggtcactttgtgagcccctcttcaggtgcactagggggacgtggagctctcatgcctgttcagggcatgggcagaacaagcaggcgtgctgccagccacccgcggcaaggtgaggggctgtggcctgtgccatggactcccagcagcatccctgctgcctccagactgagacagagaccacggctgcctctgtgcttgcctgagcctcttaattaagagtctttcccaatgagaccaatttgattacaaattcacaagatatttgggaatgttccaatcacacagcagcaaggtccctctgcctgggatccagccaggcccaagggggtgggaatgcaggcagatgggccaaggtcacccgggatgcccagagccccgctgtcgggcccaggcaccactacgtggcagtcgcagctcctgccagtcacctgggcagcggggggaggggagaaccttgggggtgttcagcatcacaaagaggcggaaaactcttccagaaagatctcaccaaaatcatgcctccctaacaaacaaatcctgcttttctaaaaacctcaatgggcctatccgagcccactgcagtcctagtttcttcaaagctgtgtaaggcacttgaatggcttattaacaccacctggaaaagttcctgtttcaatcctgatttagaaaataaattcaataatactgcaaaaaaaggttccttgaaaaatagctttaaaaaagtaaatacttaagttttctaaagaataaaataaatgctaagctctgcttaaattatatgacacaacaggtcatcttggcactgataaaacaaagagaaaacctggaatactgcttcggaactagacctccctggaaaaaaacaaacacaccgaccaaagacacacgtgcgtcgccggttccgggctcagggaagagagcagcccggaaggccctggtgggcccaagcacatcatggctgcctgcctcgtgccgattaaccacccagcctcgctacctagcgca

SEQ ID NO: 97378 - DNA, 624 bp, Homo Sapiens
gaagatgaacacgcatagtctgtgtgcaggggcatgagcttacagctggaattagagataaaggaaaaggcacctgagccctgtgacatgcggggggtcaggggaggtgggacatatgtggcctcgtagccagagccccgcctgtttcccaggacattctgaatacgggtgagagactgcgcgttggacaatcactgtgagtcccgacccttaccagaaaagtcactcgcagcgtcgtttccaggcataggttaggatcaccatgctctcccacgggccgtatgttgcaatcctgatatgaaaacgtcttctatctccttcaactgcggcaggagcacaggtgaaagaggggagcccagactgggggtagactgtattcgtgggttatggccctatttacagatcagtcatgatagctctgcagatttgctggggctctgtggcgcagtggaggcgaggacagaggtggccctgctctgggagatcccttcctaactggggctccctgacggcttcctgcacaggaggggcccgacgccggcgggacaagcagggagcccagatcagccttggaaagctcaggctcaaaccagagctcaatgtggaaattaaaaaacaaacctt

SEQ ID NO: 97379 - DNA, 894 bp, Homo Sapiens
ctgggaagatctgctcttctggtacagcatcgtcttctaccatcaggacgtagttctgggttgtaggtctgcaggggatgactcccaggcaataggacatagtcctgcttctctttctcaaaacgagttggtcgaagggtcatcaccataatcatcctcagtgccctcatagcgattggccacagggacatacttggagagcaacttggcatcaaaatggctcacactacgctccacgttgcacaggaagagttggtgcccctcgcactgggggccacattgctgaagaagccggtggaactgggacacaacctgcaggacgtagtggaagccaggctgcctgtccacagtgatgatggtgatcaccagccagggccggggggtggcctgccagacaatgggcactgagccattggcagagggaagctcctcaaaatagtggagggcagcctcaccctctttcaagctttgctgcaggaactcttggctcatttggttcagatgccaatggcgcagatagaagtaagagtgtagaagtcggtgacaggccaggggggccagcaggccaaacgtcaccactgttaggatgaagagctggacagcagtgctgccccaggagagtcgccgcagcctccggaggagcatggcagctggagaggttgaagtgctcatgaggtcaacttttgttcatgtctggtcccaagaaaaaaccatcctggaactcaggccagagtcatcagaaatcaaacccggttggggcgaccagctcggtcccctgcgcgcgccgagggccgcctctggtattgcccaggctggctagctcatcccggtggaggcgccatctccggggcccggaaggagcgggcgcaatcccgggaattccggaccggtacc

SEQ ID NO: 97380 - DNA, 584 bp, Homo Sapiens
  misc_feature (21)..(21): n is a, c, g, or t
gggcttggatcgaggcagggnggtgaaatcggcacgaggcatgttatcttggtgggatccgctcagctctgattgttgcaagacagaccaaagaagcccacacatccacctttattcttctccatcaccagaaaagaaaccattttccatcttacaagcataacactctcaagtggtgaaatattagaaaagcagtgttcatgaatacatcgttaatgtttttaccagagcaacatcgagcttggctcagatctgccatggagcacagctagtctaagagctagaggcctggtgctttcaaaagacttcatgtgagattttcgtgtactttactcaggaaagtgtgaatctctaaaaaataataataataagcacatgttttcatgattcattaattctccttttggttccattaaccatttcttggttgtgctcccaagctttcctggagcctccacaaaggagagtagccaggagtaacgagaggacggtcaggtgggcacttccaaaagctggagagacccttctgaggaccctccaccatcagcggggcctcaggggaccctgtcctaacactggtgtgg

SEQ ID NO: 97381 - DNA, 720 bp, Homo Sapiens
aattaggctaaggtacgaggctgggtgtgtgaatcggcacgagggatggatgccatgattcccgagcgggagatgaaggattttcagtttagagcgctaaagaaggtgagaatctttgactcccctgaggaattgcccaaggaacgctcgagtctgcttgctgtgtccaacaaatatggtctggtcttcgctggtggagccagtggcttgcagatttttcctactaaaaatcttcttattcaaaataaacccggagatgatcccaacaaaatagttgataaagtccaaggcttgctagttcctatgaaattcccaatccatcacctggccttgagctgtgataacctcacactctctgcgtgcatgatgtccagtgaatatggttccattattgctttttttgatgttcgcacattctcaaatgaggctaaacagcaaaaacgcccatttgcctatcataagcttttgaaagatgcaggaggcatggtgattgatatgaagtggaaccccactgtcccctccatggtggcagtttgtctggctgatggtagtatttgctgtcctgcaagtcacggaaaacagtgaaagtatgtgcaactcttccttccacggtagcagtaacctctgtgttgctggagccccaaaggaaagcagctggcagtgggaaaacagaatggaactgtggtccagtatcttcctactttgcaggaaaaaaggtct

SEQ ID NO: 97382 - DNA, 839 bp, Homo Sapiens
tattccacagcatacggctaggtacgaggcctgggtgttgaatctggccgaggctttcagaaagcagaagggctgctgctccgtggcccagagaccaggcctggccctcaattattataaggaggctggattatggagtgactgctctgcgcatctgcaaggactatgtgcccagccagctggaggctctgcaggaagaatatgagctgggaagctactaagaacgggggccatgggcgtgttggagggattcgtggacacaatgctcgcacactgcgcgagcacgtgctggatgatgtacatgcctgtgcctgtggacttgctacctcaaatgtgcgagactctgtgaaacagctggcctggcgtgagaatgtgcttggatgaaggcagctgaactctccatcaagtttctgcctccccaacgtaatatggaatgtcgttctggctgtaggaccccagctgatttggaatttggaaagcacatgtgcagctgcagagctctatctgaatctggaccttgtcaaggaatgcaatcgatgctttcatcgagggtgaggacgtggaacaaggcgaagacgtgtagctaaaggagttcagatcccaggtatgaagactatgtggaaccaagcatcataaaggagttcctcaaagaatcagggcaaagtggactcgctggtggggttgtggatgtgatcagctgctttggagctgtatgtggagcaggcgcagtgggacaagtgccttgaaacaactaccagcagaacttaaagatctgcacaagtatgtggcttgtatgcactcactgaccgggggacctgccagatggccggtttcgcagg

SEQ ID NO: 97383 - DNA, 942 bp, Homo Sapiens
aatcatacggctaggtagcgaggcctgggtggagaattcggcacgagggcgacaatggcggtcgctcgtgcagctttggggccattggtgacgggtctgtacgacgtgcaggctttcaagtttggggacttcgtgctgaagagcgggctttcctcccccatctacatcgatctgcggggcatcgtgtctcgaccgcgtcttctgagtcaggttgcagatattttattccaaactgcccaaaatgcaggcatcagttttgacaccgtgtgtggagtgccttatacagctttgccattggctacagttatctgttcaaccaatcaaattccaatgcttattagaaggaaagaaacaaaggattatggaactaagcgtcttgtagaaggaactattaatccaggagaaacctgtttaatcattgaagatgttgtcaccagtggatctagtgttttggaaactgttgaggttcttcagaaggagggcttgaaggtcactgatgccatagtgctgttggacagagagcagggaggcaaggacaagttgcaggcgcacgggatccgcctccactcagtgtgtacattgtccaaaatgctggagattctcgagcagcagaaaaaaagttgatgctgagacagttgggagagtgaagaggtttattcaggagaatgtctttgtggcagcgaatcataatgcttctccccttttctataaaagggaagcaccccaaaaaactcagctttcggtgcacgttggcagagctgcccaaggatccaacccagttgcatccgaaccttctcaagctttatgcaaaagaaggagaccaatctggggtctaatctggtggatgtttcacttgggcagagaggtggtggagtatgcagatggctttaggagccagtattttggtggctggaaaacccgggagatttcggaggactacct

SEQ ID NO: 97384 - DNA, 1071 bp, Homo Sapiens
cagtcgacggtaccggacatatgcccgggaattcggccattacggccgggggaagcaaacaggcagcgcgcgacaatggcggtcgctcgtgcagctttggggccattggtgacgggtctgtacgacgtgcaggctttcaagtttggggacttcgtgctgaagagcgggctttcctcccccatctacatcgatctgcggggcatcgtgtctcgaccgcgtcttctgagtcaggttgcagatattttattccaaactgcccaaaatgcaggcatcagttttgacaccgtgtgtggagtgccttatacagctttgccattggctacagttatctgttcaaccaatcaaattccaatgcttattagaaggaaagaaacaaaggattatggaactaagcgtcttgtagaaggaactattaatccaggagaaacctgtttaatcattgaagatgttgtcaccagtggatctagtgttttggaaactgttgaggttcttcagaaggagggcttgaaggtcactgatgccatagtgctgttggacagagagcagggaggcaaggacaagttgcaggcgcacgggatccgcctccactcagtgtgtacattgtccaaaatgctggagattctcgagcagcagaaaaaagttgatgctgagacagttgggagagtgaagaggtttattcaggagaatgtctttgtggcagcgaatcataatgcttctcccctttctataaaggaagcacccaaagaactcagcttcggtgcacgtgcagagctgcccaagatccacccaagttgcatcgaaagcttctcaggcttatgcaaaagaaggagacatctgtgtctatctgctgatgttcactggccgagagctgtgcagtagcagatgtttaggactaatacttgctgctgagaccgtgaattttgaggggttaccggtggtgagggtggtactggcaagctgtttgttttggacgattggattggaacggaaactgggggttaaacgggtaaacggcagccatagcgaagcgggctgaacccggacaacaggattttcccaggaaaacctctg

SEQ ID NO: 97385 - DNA, 822 bp, Homo Sapiens
gggcagtaactacaacggtcctaaggtagcgaggcctgggtggcgaattcggcacgagggcgacaatggcggtcgctcgtgcagctttggggccattggtgacgggtctgtacgacgtgcaggctttcaagtttggggacttcgtgctgaagagcgggctttcctcccccatctacatcgatctgcggggcatcgtgtctcgaccgcgtcttctgagtcaggttgcagatattttattccaaactgcccaaaatgcaggcatcagttttgacaccgtgtgtggagtgccttatacagctttgccattggctacagttatctgttcaaccaatcaaattccaatgcttattagaaggaaagaaacaaaggattatggaactaagcgtcttgtacgaaggaactattaatccaggagaaacctgtttaatcattgacagatgttgtcaccagtggatctagtgttccggaaactgttgaggttcttcagaaggagggcttgaaggtcactgatgccatagtgctgttggacagcagagcacggaggcaaggacaagttgcaggcgcacgggactccgctccaatcagtgtgtacattgtccacaaactgctggagattctcgagcagcagaaaacagttgatgctgagacagttgggagagtgacagaggtttattcaggagaatgtctttgttggcagcgaaatcataattgcttctcccctttctataaaggaagcaccaaagaactcagttcgggtgcacgtgcagagctgcccaggatcaccagtgcatcgaagttctcaggctatgcaaagaaggagac

SEQ ID NO: 97386 - DNA, 808 bp, Homo Sapiens
  misc_feature (488)..(488): n is a, c, g, or t
gccagtcaggctaggtagcgaggccgggtgttaatcggccgagggtagggcggatctcgcagctacggcgttcttttaggggtggagccggcaggaaatttaaactgaagccgcggccgaaaacgccaagagattgatgctgtagctgccctgagataaccaggactgtggaatcgggaagagctcatggagctcgcgaatgtaatacggaggcctctgaggaaggagtacggaggccgagaaggagccggcatttgatgagcgaaccgggaaagggagacgagtgcctcgagctggagagttccatggctgagagtaggctccgggccccggacctaggagtttccaggtgtctaggaaaatgccagaagaactcaccaggtgccaggaagcatcccttttccggaaagtccttttacttggatctgcctgctggcaagaatctccagtttttgacgggggccattcagcaactgggtggggtaatngagggtttcctgagcaaagaagtaagttacatcgtgtccagccgcagagaagtaaaggcagagagcagggggaaaagccatagaggctgccctagccctagccccagtgaggtcagagtggaaacatcggccatggttgatccaaaaggcagccaccccaggccttcacggaaacccgttgatcggtgcctctaagcagagggaaggagctgctgcagaatgtatccgaaaccagggggatcgtggaggggagggggagaaagctctgacaggcggctgggaggagactgcggggtaagaaagcgggcagggctgcgagg

SEQ ID NO: 97387 - DNA, 1418 bp, Homo Sapiens
  misc_feature (1169)..(1169): n is a, c, g, or t
ctacggctaggtaacgaggctgggtgtcgaatcggcacgagggtggacatggcgacttgcgccgaaatcctgcggagcgagttccccgaaattgacggacaagtcttcgactacgtgaccggcgtcttgcacagcggcagcgcggacttcgagtctgtggatgacctggtggaagctgtaggggaactattgcaagaggtgtccggggacagcaaggatgacgcgggcatcagggccgtgtgccagcgcatgtacaacactctgcgtctggctgagccacaaagccagggaaatagccaggtgctactggacgcccctatccagttgtcaaagataacggagaactacgactgtggaaccaaacttccaggactgctaaagagggaacagtcctcgacagtgaatgcaaagaagttagagaaggccgaggctcgacttaaggcaaagcaggagaagcgctcagagaaggacacgctcaagaccagcaaccctctagtcttagaagaggcatcagccagccaggcaggcagcagaaaggagagtcggttggaatcatctggcaagaacaaatcctatgatgtgcgaattgagaactttgatgtgtcttttggcgatagagtactgctggctggagcggatgtgaacctggcatggggccgccgttacgggctggtggggcggaatgggttggggaagacaacgttactgaagatgctggccacccggagtctgcgggttccagcccacatttccctgctgcacgttgagcaagaggttgctggagatgacactcctgccctgcagagtgtgctggagagtgacagtgtgcgagaggatttgctacggagggagcgggagctcactgcccagattgctgctggcagggcggagggctctgaagctgcagagctggcagaaatctatgccaaactggaaggagatttgaggctgacaaggcacctgccagggcatcagtcattctcgctgggcttggctttacccctaaaatgcagcagcagcccacccgggagttctcaggtggctggaggatgaggctggccctggcccgggccctctttgctaggccagatcttctgctgttagatgaacctacaaacatgctggatgtcaggggcatcctgtggctggagaattactgcagacgtggncctccacatcctagtcgtctcccaagaacgggaacttctggaatggcattggcacagacattcatcactggacaggcaagggggtagaagggtaccggggagaaccttgggaccctctcacgagtaccacggagccggtgggcaacagcaaggcgaaaatgaggggcgcaacagatatgcgggacaatcaggggttcttgaccgggacccaaaagacacagggggccccaaggaggaaccacagcagag

SEQ ID NO: 97388 - DNA, 1023 bp, Homo Sapiens
tagcgctaggtacgaggccgggtggttaatcggcacgagggtcgtggggatggaaaagctcagcgggccatccccgagccaggccctgggctcctccctgacgtgcagggctggctcccacacccaaagccctcagaccctcaacaagcagtcttcttccctcccctccaccctgccggggcctgagatccagggagcaccacactcccacctccccgctcctccacccctggtaaatccacagtgcagctccatgctgagcttatgccccttctgcagtggccaagaagaaggaccatcaaggtggaggtgtacgactgggatcgggacggcagccatgacttcattggggagttcaccaccagttaccgggagctggcccgtgggcagagccaattcaacatctatgaggtggtaaacccgaaaaagaaaatgaagaaaaagaaatacgtgaattctggcacagacccagatcaacttcactgtggccattgatttcactgcctccaatgggaacccctcacagtccacatccctgcactacatgagcccctaccagctgaacgcctacgcgctggcgctgactgcgtcggagagatcatccagcactacgacagtgacaagatgttccctgccctgggcttcgggggccaagctgcccccggatggcagagtgtcccacgagttcccactgatgctgcccctcaatgtctgaagctgcctgcccacagctggccctggcttccttgttcctgacaagacgcagaatggcaaccaggagaacccctcatgctgcggcatcgacggcatcctggaggcctaccaccgcagcctgcgcactgtgcagctgtacggccccaccaactttgcccccgtggtcacccacgtggccaggaatgcagcggccgtgcaggatggctcctagtactcggtgctgctagtcattacctgatggggtcatctcaggacatggcgcagacaaaggaggccagggttaacgctgccaagatcgctcaaagtcga

SEQ ID NO: 97389 - DNA, 807 bp, Homo Sapiens
taggctaggtacgaggctgggtgtctgaattcggcacgaaggcgccggctggccaagggtccggagctgatggccatcgagggactggagaacggacaaggcccaactacagctggcccacggctcctcaccttccagggcagcgaactaagcccagagctacaggcggccatggcagggggtggccctgaaccactccccctcccacctgcccgctctcccagccaggagagcatcggggcacgctcacgggggtctggccacgtcacaggaacagcctgccccacagcccagcggtggagatcccagccccccccaggagaggaacctcccagagggcacagagcgtgcccctaagctttgttcttcacttcctgtgccaaggacccccaccctatgtttttatgtacccccaggctcaccctctagcccggccccagggccacctcctggcgcaccctgggccttctcctacttggccgggccccctgcccactcccccagaccctgcctcgacctaagcgccgggtccacagcctaagccgcctggcccacagagggggatgctgagggggaggcgaagggccagtgggcagcaccctaggcagtatgctacactttacacggcgggcaggacgcggtgccttgtccggaccagtcctagcgtgacccgagccccagtcggggactcgtcgcagcagtccttgcctggtgccgggtaataggcctttgattcgccaaggccggacagaagacacaagaaggacaagagagaggctccaacaagatcgaaaaaacatacaacac

SEQ ID NO: 97390 - DNA, 1684 bp, Homo Sapiens
gcatagagaccaggggcccccgcggggtgttttaaatcggacgaggcagcctgtgccccttggtggtggagagctgcattcgcttcatcaacctcaatggcctgcagcatgaaggcatcttccgggtatcgggtgcccagctccgggtctcagagatccgtgatgccttcgagagaggggaggacccactggtggagggctgcactgcccacgacctggactcggtggccggggtgctgaagctctacttccggagcctggagcccccactcttccccccagacctgttcggcgagctgctggcttcttcggagctggaggccacagcggagagggtggagcacgtgagccgcctgctgtggcggctgcccgcgccggtgctggtggttctgcgctacctcttcaccttcctcaaccacctggcccagtacagcgatgagaacatgatggacccctacaacctggccgtgtgcttcgggcccacgctgctaccggtgcccgctgggcaggacccggtggcgctgcagggccgggtgaaccagctggtgcagacgctcatagtgcagcccgatcgggtcttcccgcccctgacctcgctgcctggccccgtctacgagaagtgcatggcaccgccttccgccagctgcctgggggacgcccagctggagagcctgggggcggacaatgagccggagctggaagccgagatgcccgcacaggaggatgacctggagggggtcgtggaggctgtggcctgctttgcctacacgggccgcacagcccaggagctgagcttccggcggggggacgtactgcggctgcacgagagggcctcgagcgactggtggcggggggagccacaacggcatgcggggcctcatcccccacaagtatatcacgctgcccgccgggacggagaagcaggtggtgggcgcagggctgcagactgcaggggagtctgggagcagtcccgagggcctcctggcatcggagctggtccaccggccagagccatgcacctcacctgaggccatgggaccctctggacacagacgacgctgcttggtcccagcctccccagagcaacacgtggaggtggataaggctgtggcacagaacatggactctgtgtttaaggagctcttgggaaagacctctgtccgccagggccttgggccagcatctaccacctctcccagtcctgggccccgaagcccaaaggccccgcccagcagccgcctgggcaggaacaaaggcttctcccggggccctggggccccagcctcaccctcagcttcccacccccaggcctagacacgacccccaagccacactgaggtgccgctgctggagatgcgtgcccccggcgggctaaccgctggaccgggccactctccccagccccccttgcttctctccagccctgtcccagcaagtgcagggtgccctgcacttcaccctgtgcagagaggtgggatggggccgtgcacacagggatgcccgctccacatcctgcctgcccctcagccctggcccaggccccttttggaggcagctgaggaaggatgctggggaaagccctcttctgcagctttgtggaaggctgatcagtggctgctgggtggcgggtacccttgctcagatgcctggcagggctgggtggcgattcataaagacctcgtgt

SEQ ID NO: 97391 - DNA, 653 bp, Homo Sapiens
cacccaggcgcacttctggctgaaggggggaggtgttactgaagcttgggcactcatgtgtgtgccctccccagtcccctatcctagtgtggccagtctcattaggcagccattgatcagcctggaacttggctgtcattagtgacttgatcctggtatgacatgcattctgcgtattaggttgctcgggtattttatttccttggccacaattcccatagatccccatcttttcgtatcgcctcagtctctcaatcgatctcttttgtttaccacgtgctatcacttagtgtgagtcaagaagtgcgcctgggtgccacccaggcgcacttctgcacccaggcgcacttctgggagatggtcgggaagaagaagggagtctcaggccagaaggatggtggccagacggaatccaatgaggaaggcaaagaaaatcgagaccgggacagagactatagtcggcgacgtggtgggccaccaagacgggggagaggtgccagccgtggacgagagtttacgaggtcaggaaaactggattggatggcaccaagagtggagggccttctggaagaggaacagaaagaggcagaagggggccgtggcgagggcagaggtggcactggtaagcggagagagaaggtatactgcccagg

SEQ ID NO: 97392 - DNA, 1636 bp, Homo Sapiens
  misc_feature (660)..(728): n is a, c, g, or t
  misc_feature (1178)..(1233): n is a, c, g, or t
tgctaggtagcgaggcatgggttgcgaattcggcacgaggcctcgtgcgcacgtgggggccctgctcgcatgccgccccgccctccccccacctccacgactatttattgagcgcctgttgtgtgtcacggggctatgagggccgtggggtgtttgggtggattatccacacaggtcccggcccctgcccgggctggagttgccacagcctgtgctcctggtcctcacctggaggggccagcaggctgccgtcccaccacacgtggcctctgcgcccagcacggtgctcgccgacagtggtgtctgaacccttggggacgagggcctgggccgcggtgaggccaccagaggcaggagtggccctgggggtcccgggcactgtcgcgcttgctgcaggcggcccagccgtgtatttatttttcacctatctccttcctgtcaaggcaggccgggctccagggctccccttgcgtggggcatgtaggtgggggaggcgtctgcaggtcacctggggggcccagccctctcccagccttgcctggctgagctgtgttccagaggagccctggacaagccctcataggcagggagggggtttccgaggccaggcatccgccgccccgtgtcgcatcctggaataaaatgtggctctggcatggnnnnnnnnnnnnnnnnnnnnnnnnnnnnnnnnnnnnnnnnnnnnnnnnnnnnnnnnnnnnnnnnnnnnngcggggggcggcgcgcccaagaaagagatctctccgcaggggggagccccagatgatgcgcgcagcgccccacgtttttgtgagtcacagagagggggcgcccaccaaagaggagcgcagtatataatgagagccagagagcgggggcgcgcgtataacaacagccgcggggcagcggggcaaaccgaggcaccacgagggacacctgtgggagagacgacacctcatccgcggaggggggagccaacacaagtgggccaacaacgcacccgagggcggaaatttaaagcgcccggagggagccaagtagagaaacgtgcagaggggggataataaagaggtggtgttacaacactgggggagataattctgatggtcgggggctgtgaaagaaaagaatggtggcacgtaggggggaagaactgtgcttggggagaacgagagttttannnnnnnnnnnnnnnnnnnnnnnnnnnnnnnnnnnnnnnnnnnnnnnnnnnnnnnnctgagtagtggactgtgtatggtgaggtctgcgcgcgttctttcgtgggtgtctcgcggtatccgcgctgcgaccgccgcgggggcgcctgagagggagtcgcgacagcaacgcccgtcgtaaaggcggggcgggtgcgcgcgccgactagacggagagggccccgccgcgcccttgacgacgtacagggccgcgggacgcaggtaggacgcgcgaagcacgatgacgaaagaggatcgagccgcctgtggcgcgcagtgagcgaacagtgtctgtgatacggccgatgatccgtggcagacagccgcgcggcggcgaggggaagtacgattgagatcactgcctggctctagtcgtgttgtgtgccggtgcgtatggagtgccgaccaccgctgcaacagcc

SEQ ID NO: 97393 - DNA, 201 bp, Homo Sapiens
tcggctaggtagcgaggctgggtgtgtgaatcggcacgaggactgtcccgaagagctgagagtagaggggccaggagcttcagggctgcggccagactgtggcccagagctcagatcccaaaggacccataggagaggcaggggccactcattcactctgcaagagaccagcagaatcctgagggagatgctgacaaatca

SEQ ID NO: 97394 - DNA, 1407 bp, Homo Sapiens
  misc_feature (17)..(17): n is a, c, g, or t
gggctaggtagcgaggntgggtggtgaatcggcacgagggcaagacagcctactgcgacatccacacgcctccaggttcagcacgccgactgcctgccctgtcccacagcgagggtgaggaggatgaagatgaggaggaggatgagggtaagggctggagctcagagaaagtcaagaaggccaaggccaagtcccggatcaaaatgaagaaggcacggaagatcctggcagagaagcgggcagcagcacctgtggtgtcagtgccctgcatcccaccacacaggcttagtaaaatcaccaaccgcctgaccatccaaaggaagagccagttcatgcagaggctgcacagctactggacactgaagcggcagtcacggaatggggtcccattgctacgtcgcctgcagacacacctgcaatctcagaggaactgtgaccaagttgggagagattctgaggataagaactgggcccttaaagaacagctcaagtcctggcagcggctccggcatgacttggagcgagctcggctgctcgtggaattgatccgcaagcgggaaaaactcaaaagggagacgatcaaggttcagcagattgccatggagatgcagctgactcctttcctcatcctccttcgcaaaaccttggagcagctccaagagaaggacacaggcaacatcttcagcgagccggtccctctgtctgaggtaaccgaattggacgaagtacctgactacctagaccacatcaaaaagcccatggactttttcaccatgaagcagaacttggaggcttaccgctacctgaattttgatgattttgaggaggacttcaacctcatcgtcagcaactgcctcaagtataacgccaaggacaccatcttctaccgggcagcagtgcggcttcgtgagcagggtggtgctgtgctccgccaggcccggcgccaggcagaaaaaatgggcattgactttgagacgggcatgcatatcccccacagcctggctggagatgaggccacacaccacactgaagatgccgaggaagagcggctggtcttgctggagaaccagaagcacctgccagtggaagaacagctaaagctgcttctggagcggctggacgaagtgaatgccagcaagcagagtgtgggccgctcacggcgtgcaaagatgatcaagaaagagatgacggcactgcggcggaagcttgcccatcagcgagagacgggacgtgatggccctgagcggcatggcccctccaagccgggggtagtctgacaccccacccggcagcctgtgacaaggatgggcagacagatagtgcggcagaggagagcagcagccaggagacaagcaaaggtctgggtcccaacatgtcctcaaaccccgcacatgaggtgggcaggag

SEQ ID NO: 97395 - DNA, 891 bp, Homo Sapiens
ctagaacgaggctggggtggaaaatcggcacgaggctggaaggggaagaggctctggaaggggaagaggctctggaagggctgatctggggactggggcaggaagcttctgcaaggcttccaggacgtctcccgcgaggcctccccgtgtgtggctgaggatggctgagcagcagggccgggagcttgaggctgagtgccccgtctgctggaaccccttcaacaacacgttccatacccccaaaatgctggattgctgccactccttctgcgtggaatgtctggcccacctcagccttgtgactccagcccggcgccgcctgctgtgcccactctgtcgccagcccacagtgctggcctcagggcagcctgtcactgacttgcccacggacactgccatgctcaccctgctccgcctggagccccaccatgtcatcctggaaggccatcagctgtgcctcaaggaccagcccaagagccgctacttcctgcgccagcctcaagtctacacgctggaccttggcccccagcctgggggccagactgggccgcccccagacacggcctctgccaccgtgtctacgcccatcctcatccccagccaccactctttgagggagtgtttccgcaaccctcagttccgcatctttgcctacctgatggccgtcatcctcagtgtcactctgttgctcatattctccatcttttggaccaagcagttcctttggggtgtggggtgagtgctgttcccagacaagaaaccaaacctttttcggttgctgctgggtatggtgactacggagcctcatttggtattgtcttcctttgtagtgttgtttattttacaatccagggattgttcaggccatgtgtttgcttctgggaacaattt

SEQ ID NO: 97396 - DNA, 976 bp, Homo Sapiens
tggaggagctgctgaggcgcgagctgggctgcagctctgtcagggccacgggccactcggggggcgggtgcatcagccagggccggagctacgacacggatcaaggacgagtgttcgtgaaagtgaaccccaaggcggaggccagaagaatgtttgaaggtgagatggcaagtttaactgccatcctgaaaacaaacacggtgaaagtgcccaagcccatcaaggttctggatgccccaggcggcgggagcgtgctggtgatggagcacatggacatgaggcatctgagcagtcatgctgcaaagcttggagcccagctggccgatttacaccttgataacaagaagcttggagagatgcgcctgaaggaggcgggcacagtggggagaggaggtgggcaggaggaacggccctttgtggcccggtttggatttgacgtggtgacgtgctgtggatacctcccccaggtgaatgactggcaggaggactgggtcgtgttctatgcccggcagcgcattcagccccagatggacatggtggagaaggagtctggggacagggaggccctccagctttggtctgctctgcagttaaagatccctgacctgttccgtgacctggagatcatcccagccttactccacggggacctctggggtggaaacgttagcagagggattcctctgggccggtgatttttgacccagcttctttctacggccactcggaatatgagctggcaatagctggcatgtttggcgggctttagcagctccttttactccgactaccacggcaaaatccccaggccccaggatttcgaaaagcgccttcagttggatcaactcttttactatttgaacactggaaatctttttggatcggggtaacaaaggatcctccccgaacttcttgaggaatctggtccaagggagcgggccttactcttggaaaggaggcctctcaagggttcccc

SEQ ID NO: 97397 - DNA, 961 bp, Homo Sapiens
  misc_feature (684)..(701): n is a, c, g, or t
cgcctccggtcggcggagcctggtggccgcagcggcggtggcgacgacggccgagacgtggggatggcgggcgccgggagcgaagcccggttcgccgggctgtcgctggtgcagctcaacgagctgctggaggacgagggccagctgacggagatggtgcagaagatggaggagacacagaatgttcagcttaacaaagaaatgacacttgccagcaaccggagcctggcagaaggaaaccttttgtaccagccccagctggacacgttgaaagcacgcttgacccagaaataccaggaactccaggttctctttgaagcctatcagataaagaagaccaaattagacagacagtctagcagtgcttccttggagaccctgttagcacttcttcaggcagaaggggccaagattgaggaagacactgagaacatggcagagaagtttctggatggagaacttcctctggattccttcattgatgtctatcagagcaaacggaaactggcccacatgcgacgggtgaaaatcgagaagctccaggagatggtcctaaaggggcagagactcccacaggccctggccccgctgccccccaggctgcacgaactggcacctaccgccccccttccctaccctgccccagaggccagtgggcctcctgccgttgcacctcggcgcatnnnnnnnnnnnnnnnnnnggtgcctgcgggacgcttagccaccccgtttactgcggccatgagttcgggacaggccgtgccgtacccaggattacagtgcccgcccctgcccccccgcgtggggcctccccactcagcaaggattctcttcccaagttcgtggtccccatattcgcccacctctccctcagagacccccggccccgggttcccctccaaaccaagccggggtttcatccctccaatgaaccgccgggcgcgggtccctttcccgggaa

SEQ ID NO: 97398 - DNA, 838 bp, Homo Sapiens
caaaaagatcaacataggctaggtagcaggccccgtggttaattcggcacgaggccaaggggcctgaacccgagtttgggcctgaagtccttgctgcagacctgagtgcttaaatctggggcttgagacctcccaatcttgactcagcaccccaatatctgaatgcagaaccccgggatcggatctcagactctaaaccccaccgtttggctgcttagcatcccaagactggacctgggagaccctgaccctgaacaacccaaactggacccgtaaaactggaccctagaggcccaatatttaggggtctggaaccccgagtattaaggtctggagactccgttgccacagatttgagccgagtcaggacacagtccctctacagaagccttggggacaggaaaagcatgaccagatgctccctccagagccctgacctctgactcccctggagctaggactctgctccctggggctgcttctagctcagtgacacccctgcccgcgatggccatcctcccgttgctcctgtgcctgctgccgctggcccctgcctcatccccaccccagtcagacacacccagcccatgtccccgccgctgcctgctgccagacacagtcgctgcccctaagcgtgctgtgcccaggggcatggcctcctgttcgtgccaccctcgctggaccgccgggcagccgagctgcggctggcagacaacttcatcgcctccgtgcgccgccgcgactggccaacatgacaggcctgctgcatctgagcctgtcgcggaacaccatccgcacgtggctgcggcgccttcgcgactgcgggccctggtgcccg

SEQ ID NO: 97399 - DNA, 796 bp, Homo Sapiens
aacgatcggctaggtacgaggcctgggtggcgaatccggcacgaggccagatcgggatctgcggccgcaccggcagtgggaagtcctccttctctcttgccttcttccgcatggtggacacgttcgaaggtgagttgtaaggcgggcaccccacgtgtacccacagccaccagatgaggcctcagccctggcacgtggtcagacatgacaggaggcccagcagtcaccgccttcccctgcaccctcactgggacccatgcagggcacatcatcattgatggcattgacatcgccaaactgccgctgcacaccctgcgctcacgcctctccatcatcctgcaggaccccgtcctcttcagcggcaccatccgatgccatcatcacagaaggcggggagaatttcagccagggacagaggcagctgttctgcctggcccgggccttcgtgaggaagaccagcatcttcatcatggacgaggccacggcttccattgacatggccacggaaaacatcctccaaaaggtggtgatgacagccttcgcagaccgcactgtggtcaccatcgcgccacaggagggccaccctcagctgtggcccccaccgcgggtgggtatttcccaccattcctgacccgcccctcctgccctgccagctcggagtgccaccatcctgagtgcagacctggtgatcgtcctgaagcggggtgcatcttgagtccgatagccgaaagctgcgcggaggacgcgtcttcgctcttcgtcggcggacgtgcctgcggccaggctccttcgccgc

SEQ ID NO: 97400 - DNA, 1114 bp, Homo Sapiens
cgtgtgctacttcatccagaagtacttccgggtggcgtccaggacctgcagcagctggatgacaccacccagcttccacttctctcacacttggccgaaaccgtagaaggactcaccaccatccgggccttcaggtatgaggcccggttccagcagaagcttctcgaatacacagactccaacaacattgcttccctcttcctcacagctgccaacagatggctggaagtccgaatggagtacatcggtgcatgtgtggtgctcatcgcagcggtgacctccatctccaactccctgcacagggagctctctgctggcctggtgggcctgggccttacctacgccctaatggtgagcggcagtgggctagggcagaggaggggtcagacaccagcactcccggagcaccttcgtcactggagacatgagacactcccaggccttaccccaatttcattggcatctgatgccagagggacagtgcgggcaggaaggctgaccagcaggccccagggcccaggccccagacaggtggaggtcggggagccacatgactgaccctccctgtgcctccagggagggctgctctgagcaggcagtggatggcagcaacaaggaatctggggccctggcccctctccagccttaagaagagccattctggtggctgaggacagaactaagcgaccatggagtgtgcgccactggcttgcaccccacaggtctccaactacctcaactggatggtgaggaacctggcagacatggagctccagctgggggctgtgaagcgcatccatgggctcctgaaaaccgaggcagagagctacgaggggctcctgggtgagaggctcagggagaggggtggggaagagtccaaggaggagtgtgtctgggttgggggccacaagggagcctggggatggggtggcactttcggatactagctgtggcccatgcctggtggctgagcccagcccggcccccagcaccatcgctgatcccaaagaactggccagaccaagggaagatccagatccagaacctgagcgtgcgctacgacagctccctgaagccggtgctgaagcacgtcaatgccctcatcgcccctgga

SEQ ID NO: 97401 - DNA, 473 bp, Homo Sapiens
ttgccttcttccgcatggtggacacgttcgaagggcacatcatcacagaaggcggggagaatttcagccagggacagaggcagctgttctgcctggcccgggccttcgtgaggaagaccagcatcttcatcatggacgaggccacggcttccattgacatggccacggaaaacatcctccaaaaggtggtgatgacagccttcgcagaccgcactgtggtcaccatcgcgcatcgagtgcacaccatcctgagtgcagacctggtgatcgtcctgaagcggggtgccatccttgagttcgataagccagagaagctgctcagccggaaggacagcgtcttcgcctccttcgtccgtgcagacaagtgacctgccagagcccaagtgccatcccacattcggaccctgcccatacccctgcctgggttttctaactgtaaatcacttgtaaataaatagatttgattatttcct

SEQ ID NO: 97402 - DNA, 530 bp, Homo Sapiens
  misc_feature (443)..(455): n is a, c, g, or t
tgcggccgcaccggcagtgggaagtcctccttctctcttgccttcttccgcatggtggacacgttcgaagggcacatcatcattgatggcattgacatcgccaaactgccgctgcacaccctgcgctcacgcctctccatcatcctgcaggctcagggagaggggtggggaagagtccaaggaggagtgtgtctgggttgggggccacaagggagcctggggatggggtggcactttcggatactagctgtggcccatgcctggtggctgagcccagcccggcccccagcaccatcgctgatcccaaagaactggccagaccaagggaagatccagatccagaacctgagcgtgcgctacgacagctccctgaagccggtgctgaagcacgtcaatgccctcatcgccaatggacagaagatcgggatctgcggccgccaacnnnnnnnnnnnnngtactggtaccccaggaggatgccttgtaactgctctttggtcatgatagtggtaatgaatccattcatgtcaaa

SEQ ID NO: 97403 - DNA, 632 bp, Homo Sapiens
tgcggccgcaccggcagtgggaagtcctccttctctcttgccttcttccgcatggtggacacgttcgaagggcacatcatcattgatggcattgacatcgccaaactgccgctgcacaccctgcgctcacgcctctccatcatcctgcaggaccccgtcctcttcagcggcaccatccgatttaacctggaccctgagaggaagtgctcagatagcacactgtgggaggccctggaaatcgcccagctgaagctggtggtgaaggcactgccaggaggcctcgatgccatcatcacagaaggcggggagaatttcagccagggacagaggcagctgttctgcctggcccgggccttcgtgaggaagaccagcatcttcatcatggacgaggccacggcttccattgacatggccacggaaaacatcctccaaaaggtggtgatgacagccttcgcagaccgcactgtggtcaccatcgcgcatcgagtgcacaccatcctgagtgcagacctggtgatcgtcctgaagcggggtgccatccttgagttcgataagccagagaagctgctcagccggaaggacagcgtcttcgcctccttcgtccgtgcagacaagtgacctgccagagccca

SEQ ID NO: 97404 - DNA, 973 bp, Homo Sapiens
gcggccgcgcgtggatgcggcgggagctggaagcctcaagcagccggcgccgtctctgccccggggcgccctatggcttgaagagcctggccacccagtggctccaccgccctgatggatccactgaatctgtcctggtatgatgatgatctggagaggcagaactggagccggcccttcaacgggtcagacgggaaggcggacagaccccactacaactactatgccacactgctcaccctgctcatcgctgtcatcgtcttcggcaacgtgctggtgtgcatggctgtgtcccgcgagaaggcgctgcagaccaccaccaactacctgatcgtcagcctcgcagtggccgacctcctcgtcgccacactggtcatgccctgggttgtctacctggaggtggtaggtgagtggaaattcagcaggattcactgtgacatcttcgtcactctggacgtcatgatgtgcacggcgagcatcctgaacttgtgtgccatcagcatcgacaggtacacagctgtggccatgcccatgctatacaatacgcgctacagctccaagcgccgggtcaccgtcatgatctccatcgtctgggtcctgtccttcaccatctcctgcccactcctcttcggactcaataacgcagaccagaacgagtgcatcattgccaacccggccttcgtggtctactcctccatcgtctccttctacgtgcccttcattgtcaccctgctggtctacatcaagatctacattgtcctccgcagacgccgcaagcgagtcaacaccaaacgcagcagccgagctttcagggcccacctgagggctccactaaaggtctcaagacaccccccaaccaactccaagggtccccacctaaccattaccaagagggctcatcttatgctcaggtgggggcttgggaaacctcagcaagggttaggtctaggctaaaggaattccctgatagagc

SEQ ID NO: 97405 - DNA, 1142 bp, Homo Sapiens
  misc_feature (1078)..(1078): n is a, c, g, or t
cggcgctgggggcggcaggttgcggcggcgccggagcgggtctccaggctggcgagcgcccaggacaggcatgttgttgggactggcggccatggagctgaaggtgtgggtggatggcatccagcgtgtggtctgtggggtctcagagcagaccacctgccaggaagtggtcatcgcactagcccaagcaataggccagactggccgctttgtgcttgtgcagcggcttcgggagaaggagcggcagttgctgccacaagagtgtccagtgggcgcccaggccacctgcggacagtttgccagcgatgtccagtttgtcctgaggcgcacagggcccagcctagctgggaggccctcctcagacagctgtccacccccggaacgctgcctaattcgtgccagcctccctgtaaagccacgggctgcgctgggctgtgagccccgcaaaacactgacccccgagccagcccccagcctctcacgccctgggcctgcggcccctgtgacacccacaccaggctgctgcacagacctgcggggcctggagctcagggtgcagaggaatgctgaggagctgggccatgaggccttctgggagcaagagctgcgccgggagcaggcccgggagcgagagggacaggcacgcctgcaggcactaagtgcggccactgctgagcatgccgcccggctgcaggccctggacgctcaggcccgtgccctggaggctgagctgcagctggcagcggaggcccctgggcccccctcacctatggcatctgccactgagcgcctgcaccaggacctggctgttcaggaacggaaaaatgccgaggggcaggggcagcctggctctggggagccggcccctggaggcagcagagcgagccttgcaggctcaggctcaggaagctggaggagctgaaccgagagctccgtcagtgcaacctgcagcagttcatccagcaggaccgggggctgcgctgccaccgcccccacggccctgacaggggccctcctggcactcaagggccggaattgggtcctgggggggaaggttgggaaggtgaaagaaacctgnccccagccccccactcccaagctgactttccccaaccccaagggggccctcctggcctttcagg

SEQ ID NO: 97406 - DNA, 1195 bp, Homo Sapiens
cccagacgtaaaacattgggctgtacagcaaaacacagaaaattcaaagagatgtccccaagatgcagaagaggacagctgtcctcaggagtctgtcacgggccagctgggggcattcatatttcccaagacccttttccagctgcatctcaccatagcttttatatgactgaaaaaatgtccaggaggttgaccagatagctgcatacatcgctgaaaaggtggccatggagaagcagcagtggcctcatgctattgtggtcatgtgaatggttttcgaggcctgcccacagaaaatggggtgggatccccttccagatgttttcagtgaggtgaaggacttcacaggatgccatcttcagcgtaggctcattcttctctcctccagtgtaacagacaggcacacccctgagcctcagcttcaggaagaagaacctgcagaaatcctgctcataccagttctgtcttgtgaggagtcactagccctaaatgcttatttggggaggtaactgggagaaaagctcgttccatgccagctttagaaaaatctgggaagatactctgtagccgtgcaaacttacaagtgaaaatgatgagtgttaagtagaaaataaccagagccagcagcaggacaatctccgctctgtatttcttaaaagtctcttctttacgctgtgcagggcatcctgtcactctcaagatcaccttgccacttaggtttctctgcccatccgggtcctgcagagtgcacctgtatgtccccgagttgcagctggtagtgtttcggatcttcagggaatagggcctttcattgggggcgtcgaaagaaccattttgccccttctgatgatagtgctgtcccctgaggtggtcttcctggggtgtctccatcctctcttcaccaccctccaataacttgacccaggagaccgtgtagggaacctgcggatcccagggggcggtgcagggcaagtccacatcttcggagcaagccaccttcacctccggcgtcgcgggagccaggctgtaggcgcagctcaggagcagaagctggaggccgcgcgacatggctggagcgctgcgccgctgccacgagctgcagagctgtggcgcgcgggcgccggctgcccttttatgcccgcgcgttcgggaacttccctcgtgccgaattcaacacccagcctcgtacctagcc

SEQ ID NO: 97407 - DNA, 1085 bp, Homo Sapiens
ggctaggtacgaggctgggggttaatcggcacgagggaggtgacggtgcctctgactgtccgggtccctccagcattttgcagctttctcctgtcttgaagaagtagaacggtgcccgagaaacgtttttccccttcgagactcaggaggatgaaagtcatcacttgtgaaatagcctggcacaacaaggagcccgtgtacagcctggacttccagcatgggacggctgggaggatccacagactggcgtctgccggcgtggacaccaatgtcaggatctggaaggtagaaaagggaccagatggaaaagccatcgtggaatttttgtccaatcttgctcgtcataccaaagccgtcaatgttgtgcgtttttctccaactggggaaattttagcatcgggaggagatgatgctgtcatcctattgtggaaggtgaatgataacaaggagccggagcagatcgcttttcaggatgaggacgaggcccagctgaacaaggagaactggacggttgtgaagactctgcggggccacttagaagatgtgtatgatatttgctgggcaactgatgggaatttaatggcttctgcctctgtggataacacagccatcatatgggatgtcagcaaaggacaaaagatatcaatttttaatgaacataaaagttatgtccaaggagtaacctgggaccctttgggtcaatatgttgctaactctgagctgtgacagggtgctgcgagtatacagtatacagaagaagcgtgtggctttcaatgtttcgaagatgctgtctggaataggggctgaaagagaggcaagaaagctacggatgtgtcacgacgacagcataagtcttctccgtaactgagttcactccgacgatccttgcttctcagcagtgattgtgcatctggtgaagtatgatcctatggtttcagcaaattaaggcatggcattcagtcggaaacactgtgtgggggcgtatagagggcgggaagggcaagtgccacggggcaggcgaatagtttaacacctggtttacaccatggaggcatagggtatgaagtaatgcacaccacgcacgt

SEQ ID NO: 97408 - DNA, 1116 bp, Homo Sapiens
gtagagaatagattaaatcaaggtctcaagtgtaaggcagcacagcaggtgtaagatacacggtgcccaaggaaacagagtgaacgtcaaaggctctcttgtctactctgcatcagtacagactggggaaaaccacggctgccaccccgacacttgccacacagtcacactataagccaaacttaaacggactccaggtcagactctaaaatcctcgacagtcctctagttttctcagggcttatttgccacagacctgccaaacatgtgataactgcctccaggcacttggtatgttcccggtgctggctcaccagcccgggccacacaacgtgctctcacccactcatagcactgcaagacacatctgcctgcaccgactgtcagttcatgttaacacacaaccgagaagcacagtcctgtgcagaactggagtcagttccatttcacccccacccagaaatcaagccagttccatttcgttctctggcaacactgccctgtcatccttccagctgttgccaaaatccatcgacccctttcaacagacctgaaggcatctctaagactgctacctagcccaaagctgagcacaacctctgcaacagaataagagtgttagagctggccgtggccgggcccctggagactgtcggaaaggatggttagaacttactggtccactgaagccagccagctgcgtgatcatcaggcacacgatggacaggatgagcctggtgcggcagaagatccacacaacccttcgcagggaagcagcgtctggcccaacttcattcagctcttcttgccacagtctctctagtcttctgcagttcacgtcagaagactcgtgcttggacagagaccacacgtcttccattgagagctcccccttcttgtgggccacacgggccagagaagaaagccacgaaaaagtcatacaggaaaaaagcccagcattgtccactgggtgctggtgtttggaagtagtccggatgggcttcagagcactcaagccatgatggtactttcccttgggatgctcctcatccaggattctgagctgagaatgcatggaggcatcaagagagaggccctcggctcgggctgctgttt

SEQ ID NO: 97409 - DNA, 881 bp, Homo Sapiens
agagagtcaagctgggcagaatctctcgccaagagttcaggtaaggtaatgtttattcactgggaatgctttccacagccagacagctatgctaacagtctcaagttttcttccagtttgtttagatttaaatgatacatttgtaactttttaaaaactaaattttggttggatttttcatgaaaacctcttttttctttatcccctaaaaaatggtttgaaatgtcattgttatttaaaaacccgatgtgttggaacttctttaatctgctgtttcctctttttccccccctttgaaagtttcgcatagtgtaaacattcactatgtcttttaccttccctgctcctcccatctgggaggcgctgatgctattacccagtgctgaaaaatggcactctaaaggtatgggaaggaaggagcccaaggcaaccacctgctgtcctttcagccttcctttggagactgctccatcagtgccgaggtgtgtgggaacaggcttcactgcaccgccatcttactgagttgcttcacgtgaggaaaagggggctttggccctgtgactcagttccacattttggattgcatactggaaaagaagccaatcttcttgctagtaaaccagcaacccggctgtatacagtggtgacccaagcaatggatataaacctaaaaatctgagggaggggagaggtggaatacagtagttcttggaaatctgaagtctcctatttgatcaggttatttcctgggacttggcaaaaatctgattggtggggatctcctaggacctagtggacatctggtattaatttaatctcaggaaaaaccagaaattaacccagagagagtctgggttctggaattcagcgtagcttactcc

SEQ ID NO: 97410 - DNA, 757 bp, Homo Sapiens
  misc_feature (618)..(618): n is a, c, g, or t
  misc_feature (660)..(660): n is a, c, g, or t
acgagggcctgtcctgaccaatgtggctgggtccagacatgaagaggtgctaccggagcacctcaatctacctcaactacgacgttagcttctaccatgacgaggacagtacctgccaccacaagagcccccgggaccaccgtccacagatccacctaccagaaccacagcacagagacaccaagcctgacagctgcagtcccaagctcagttagtgtccccagggctcccagcatcagcccgtctaccctaagccctgcaaccagcaaccactcccagcactatgcaaatgaagacagtaagatgggctcaacagtcactgccgctgttatcgggatcatcgtgcccatagtggtgatagccctcctgtgcatgagtggatacctgatctggagaaactggaagcggaagaacaccaaaagcatgaattttgacaacccagtctacaggaaaacaacagaagaagaagacgaagatgagctccatatagggagaactgctcagattggccatgtctatcctgcagcaatcagcagcttcgatcgcccactgtggccagagccctgtcttggggagaccagagaaccggaagacccagcccctgccctcaaggagctntttgtcttgccgggggaaccaaggtcacagctgcaccaactnccgaagaaccctctttccgagctgcctgtcgtcaatccaagcgagtggcattaagcctttgagatgatggactaccctgaggatgggatcaccccct

SEQ ID NO: 97411 - DNA, 956 bp, Homo Sapiens
  misc_feature (84)..(84): n is a, c, g, or t
gtccctcaaaacggcgtagggactgcacaagaaaggtggcccagcccacgtgcagcacaggcgtgggactgccctcctcccatntgcagatgccgtcgtagaatcgcagcaggtgggcgaagcactcagggtcctggagggcggaaccttggctctgggtgccctggctttgctcccccggccgctcctcgcccgcctccagcaagctggctgcctccttcagcaggttggggatgacatcattggctacttcaaagaactccttgtagatctcctcgtcttcccggctagtaggtgtagtcctggatgacagtggccgtgtccgcccaggcctgcagggcttcccgcacattgcggttgcgacagtggtagccagccaggtacatgtaggggtagatgtgttcatcccgatagtaggtcttggctgaggcaatgcccttgtggtagagggtgagtgggtctggccggccaggggtgggctccagctcctctagatctgccaggttccctaaggccatggggtacctttccacgatgtcccaggtcatagagcagccagagctagcttctgctgcagctgcagaagctccagcgagtcggtgtgcaggtcaatggaagggttgatggcacacaccatgaacgccacctccatcttgcggtcacagcgcatgtatgatcctttcaggtacagccagctccgctcagccacaccggcattgactgtctggcccctctcggtcctcgttgcccttgccgtgccaggtgacctcagctgtctgctccccattgggcccaaacacaacccaggcatgatcctcagacagggcgaggtggacatcccggagacccagggcctggcaggccccaaccacagcaaaggccacaccggagctgtccaatttggtgcctactgggctccaacctgtgatgaagctgaagagggactggatgtgggc

SEQ ID NO: 97412 - DNA, 1498 bp, Homo Sapiens
  misc_feature (109)..(109): n is a, c, g, or t
tctaggtacgaggctgggttttgaatcggccgaggacaagcccgcgaggctgaggggctggttgttgttggcatgctgtggctaagtgaggggagaacctctgctcccncgcccgtcttctcttctgcgtttcccgggctagggggcgtggggagtggttttagtgcggcgaagccgctcggcagcaccttccttctttgccatgtgcatgactgccctgttgtagcctgttggtgtgaaccgttgagaatccggtaaccgatgcggacgccatggagccagagagggaagtggacctgagagacaccccaggaatggtcagggaaatgcagtgcagtgccccaaataagctggtcggggcagctgaggcgatgaaagccggttgggatctcgaggagagtcatgccctgaggccaagaaagcccgcttatctaccattttatttacttgacaactgtgaagtaacccatgaccagctgtgtgaattgctgaagtatgcagttctgggcaaatccaatgttccaaaacccagctggtgccagctttttcatcaaaaccacctaaacaacgtagtggttaaggttctgcagggaatgagtcagctacacttttaacaaggttctatttggacgtttggatgtcttcgaaaagcattcagacataaattccgcttgcctccaccatcatctgattttctagctgatgttgtgggctacaaactgaacaaagagctggagatctgcccaagacaatggaagggcctttaccttctaatgcaaaagccgccatcaaccttcaggatgatcccatcattcaaaagtatggctctaaggaaagtgggcttgaccagatgccttctgacaaaggaggaaactgagaacgtttcacttttccattacaaggttttcctgattgtgaaaactttttacttaccaaatgtaatggttctatagcagacaatagtcctctcttggacttgactgtgaaatgtgcctcacatccaaggggagagagctaacacgcatctcactggttgctgaaggaggctgctgtgttatggatgaactggtcaaacctgaaaacaagattctggactacctcaccagcttttcaggaatcacgaagaagattcttaacccagtgacgaccaaactcaaagatgtacagaggcagttaaaagcactgcttcctcctgatgctgtgttagtgggccactccttagatttggatctcagagcactgaaaatgatacatccatatgttattgatacatcgttggcttttatgtcagagagcagggcagaagatttaagctcaaagttcttagccaaagtttatttgggggaaggatatacagtgtccagaagacttggtcatgatgccacagaagatgtagaacaatccttgaatggctcggtattccttaagcatggccaaaaaagatggcgactaaatctagaagatagtaatcaccagaataaagaggagcaagagctaa

SEQ ID NO: 97413 - DNA, 1420 bp, Homo Sapiens
ctcatccctgctgctggcctacactctgcagacgcactccagcctctttctggaggagctggagatgctggtgccctcaacacccacctctactagcggtgccttctggaagggcagtgagttggccactgaccccccggcccagccagccgcccccagcaccaccagtgaggtggttaagatcctggagcgctggtgggggaccaagcggatcgactactcgctgtactgccccgaggcgctcaccgcctttcccaccgtcacgctgccccacctcttccacgccagctactgggagtccgccgacgtggtggcgttcatcctgcgccaggtgatcgagaaggagcggccacagctggcggaatgcgaggagccgtccatctacagcccggccttccccagggagaagtggcagcgaaaacgcacgcaggtcaagatccggaacgtcacttccaaccaccgggcgagcgacacggtggtgtgcgagggccgcccccaggtgctaagcgggcgcttcatgtacgggcccctggacgtcgtcacgctcactggagagaaggtggatgtctacatcatgacgcagccgctgtcgggcaagtggatccactttggcaccgaagtcaccaatagctcgggccgcctcaccttcccagttcccccagaacgcgcgctgggcattggtgtctaccccgtggcgcatggtggtcaggggcgaccacaccctatgccgaatgctgcctggactgtggtggcccgcggtcacggcaggctgtggtcttcagcagtcgacggctccttcaaccgccagcgtctccatcatgggcaagcgaccccaaaggtgcgagctggcgccgtggacgtggtcaggcactgggcaggactccggctacctgatcgtgtatgtcagcaggccggccggatatgcagaagcaccgcgtggtggcagtggctgtcgcaggcacaacttcccccgacggagtcgtctccgttctgcgacgggctcaaccacgacccactacgccagaaggccactgtgttctggcggagacctggtggcagcgaggtcacaactggatacattcgcgggccgggctatggggtctccccacacaatgtgggccgggatatacgcccggcagcctggcggcgtgaccacggaggcaagaaccttacatacgtggcccggccccggcggaaagcaaagggcagcagtgccagtcacgtggtccaacgggctaatgtgggccccgcggccagctggaacagcggcaccaacaccgcatgctcctcggagccccgacacgtctcttggcacacacatcacgctgttggcgcccccggacacgtcgcgcagaacaacgtacgacacgacgaccaacaggacaggagcggggcaacacacaccaggcggacagagaga

SEQ ID NO: 97414 - DNA, 816 bp, Homo Sapiens
tcggcacgagggaaatctgttcgtttaaaagtgtgaggggctcttcacgtgggaggaaggaacagcaggcgcggaggagggggcaagcgtgtgtgagattcagtggtccatgcgtgcgtttgtcgtgtgctggtgattgggtgtggcaactcagaactgagtgagcaactgtatgatgtgggctatcgggatatagtgaacatcgacatcagtgaggttgtcatcaagcaaatgaaggaatgtaatgccacccgacggaccccagatgagcttcttgaagatggacatgacgcagatggagtttcctgatgcctcgtaccaggtggtgttggacaagggcaccctggaatgctgatcctgacagatgagagaagagaagaccttacaacaggtggacagagatgctgagctgaggtaggacgtgtcctagcaggtagggccggtcagctatcatctgcatctccctggctcagagctcacatcctgaagaaagcagtgggccacttctcccgggagggggtgcatggtgaagggtgcaccaagtggccaacagccaggaccaggtgttggaagcagagcctcagttctccttgcctgtctttgccttcatcatgaccaagttcaggccagtccctggctctgcccttcagatctttgagctgtgtgctcaggagcagcgcaagcctgtgcggctggagagtgccgagcggctggccgaggcggtgcaagagcgacagcagtatgcctggctgtgcagccagctgcgccgcaaggccaggctggggagtgtgtctctggacttgtgcgatggggaca

SEQ ID NO: 97415 - DNA, 1087 bp, Homo Sapiens
  misc_feature (982)..(982): n is a, c, g, or t
  misc_feature (1077)..(1077): n is a, c, g, or t
agtaactataacggtctttaaggtagcgaggcctgggtggcgaattcggcacgagggttcgggaaaagtgtgaggggctcttcacgtggggaaggaacagcaggcgcggaggagggggcaagcgtgtgtgagattcagtggtccatgcgtgcgtttgtcgtgtaagggtcattcctggggtttggagtgggggaacaaatcaatgtggctgtttttccgtggaaagaattcccactgcagtgtcccggagcctgcgtgtggtgggcaagctcctcaaatggtatctcacagggaataggggagtcttgaaaacgcagcttcggcagtaggaacatgaacctcttacctaaaagttccagggagtttggctccgttgactattgggagaagttcttccagcagcgaggaaagaaagctttcgagtggtatggaacctacctggaactgtgcggggtgctacataaatatatcaagcccagggaaaaggtgctggtgattgggtgtggcaactcagaactgagtgagcaactgtatgatgtgggctatcgggatatagtgaacatcgacatcagtgaggttgtcatcaagcaaatgaaggaatgtaatgccacccgacggccccagatgagcttcttgaagatggacatgacgcagatggagtttcctgatgcctcgttccaggtggtgttggacaagggcaccctggatgctgtcctgacagatgaggaagagaagaccttacaacaggtggacaggatgctggctgaggttggccgtgtcctgcaggtgggcggtcgctatctctgcatctccctggctcaggctcacatcctgaagaaagcagtgggccacttctccccgggaggggtggatggtgagggtgcaccaagtgggccaacagccaggaccaggtgttggaagcagaagcctcagttctccttgcctgtctttgccttcatcatgaccaagttcaggccagtcnctggctctgcccttcagatctttgagctgtgtgctcaggagcagcgcaagcctgtgcggctggagagtgccgagcggctggccgatgcggtgcangagcgacagc

SEQ ID NO: 97416 - DNA, 845 bp, Homo Sapiens
agagtatgaagtcgacggcgcgccgaattcggcacgaggcctgtcacaagggagcggaaaaatagcatcacagagatcagtgacaatgaggacgacctcctggagtaccaccggcgacagcgccaagagcggctccgggagcaggagatggagaggctggaacgccagcgcctggagaccatcctgaacctgtgtgccgaatacagccgggctgatgggggacctgaggatgaggagcttcccagcataggggaggccaccgcagcattggcactggcaggccggaggccctcacgaggccttgcaggggcctctgggcggagcagcgaggagcctggcgctgccacccaacgcctatgggagagtatggagcgctcagatgaggaaaatctcaaggaggagtgcagcagcactgagagcacccagcaggagcacgaagatgcacctagcaccaagctccagggagaggtgctagccctggaagaagagcgggctcaggtgctggggcacgtggagcagctcaaggtccgtgtgaaggagctagagcagcagctgcaggagtcagcccgagaggccgaaatggagcgggcactgctgcagggagagagggaggcagagcgggcactgctgcagaaggagcagaaggcagtggatcagctgcaggagaactggtgccttggaacagcatccgatgagaggacaggaggcaagccctgagactgaaaagctcttgagactggattcacattggacggataccctgaaaagaccactgccgcaggctctcgacaggtactctccatttcaaaaagacctgcattgaatcgagtcatcgtctgtgtaaa

SEQ ID NO: 97417 - DNA, 1674 bp, Homo Sapiens
  misc_feature (977)..(1034): n is a, c, g, or t
  misc_feature (1059)..(1068): n is a, c, g, or t
  misc_feature (1167)..(1175): n is a, c, g, or t
ccctgggagtcttcaacaactatttcagcctgggctttgacgcccacgtcaccctggagttccacgagtctcgagaggccaacccagagaaattcaacagccgctttcggaataagatgttctacgccgggacagctttctctgacttcctgatgggcagctccaaggacctggccaagcacatccgagtggtgtgtgatggaatggacttgactcccaagatccaggacctgaaaccccagtgtgttgttttcctgaacatccccaggtactgtgcgggcaccatgccctggggccatcctggggagcaccacgactttgagccccagcggcatgacgacggctacctcgaggtcattggcttcaccatgacgtcgttggccgcgctgcaggtgggcggacacggcgagcggctgacgcagtgtcgcgaggtggtgctcaccacatccaaggccatcccggtgcaggtggatggcgagccctgcaagccttgcagcctcacgcatcctgcatctgccctgctgcaaccatggccaccatggtgcagaatggccaatgctggctggatgctgccgcccccctgcacagtgcgaccagcagccggtgccagagcagttgcgcatccaggtgagtcgcgtcagcatgcacgactatgaggccctgcactacgacaaggagcagctcaaggaggcctctgtgccgctgggcactgtggtggtcccaggagacagtgacctagagctctgccgtgcccacattgagagactccagcaggagcccgatggtgctggagccaatgtccccgacatgccagaaactgtcccccaagtggtgcttcctggacgccaccactgccagccgcttctacagtgatcgacctgagcccagtgagcaccctcaactatgtgactgagatcgcacaggatgagatttatatcctggacccctgagctgctggggggcatcggcccggcctnnnnnnnnnnnnnnnnnnnnnnnnnnnnnnnnnnnnnnnnnnnnnnnnnnnnnnnnnnggtcactggcaagggggatgcctgnnnnnnnnnnttcaagggggaacagcttgaattgaagggctgccccaaaaagaaacgaacttttctgggaagagttcccaagggaaagcctggcaaccccgcaagcttnnnnnnnnnctgaaaccctttccgttggcaccacccgcgaaaaacgccagagcttaagaaaagtttgcggtaaacggagcctttcaccttgggcgaaacccaacccggacaaggattcaaatcccaaccctggggggcagtgcgcaaaaaggggattggctggggtgttcccgcgccttaacccctggggccctggggaaacccacacgcgacgccggcgcccccgcggggaaaagacatcccttttggaaagggcgcgcggtggcgaaaggcagaaaaaaacagggcgggaagagagacctttgtgtttatggtcgcccctacgaggacgggcgcggtgcccttgggggggccaggagcgcgcacccatttccgcgcccaacttaacacttccgtcgccaaggcccggcggcgccatccggttcccctggcagagaccgagaccctgccccgggcggtaattctccccccgtgacagccgggcttggatacagggttctcgggcccg

SEQ ID NO: 97418 - DNA, 884 bp, Homo Sapiens
  misc_feature (625)..(625): n is a, c, g, or t
ggcagtaatataacggtttctaaggtagcgaggcctgggtggcgaattcggcacgagggataaaactttcaaggtatggaacgccgtggactccgggcactgcctgcagacctactccctgcacacagaggcagtgcgggccgcccggtgggctccctgtggccggcgcatcctcagtggtggctttgacttcgcgctgcacctaacagaccttgaaacaggaacccagctatttagtggtcgaagtgactttagaatcactaccttgaaattccatccaaaagaccacaacatctttttatgtggaggctccagctctgaaatgaaagcttgggatataaggactggcaaggtgatgagaagctacaaggcgaccatccagcagaccttggacatcctgttcctccgggaaggctccgagttcctgagcagcacagacgcttccacccgggactcagctgaccgcaccattattgcctgggatttccggacctctgccaaaatctccaaacagattttcccacgagaggttcacctgccccagccctcgccttgcacccgagagagcccgtgttcctggcacagaccaatggcaactacctggcccttttctccactgtgtggncctaccggatgagcaagacggcggcgctatgaaagggcacaaggtgggagggtactcagtgggctgcgagtggtccccaggcgggtgacttgctgggtgacgggcaagcgccgaatggccgggtcctgattgtacagcttccgcacaggcagccggagcattgccacttgcgggggcaccacaggccttggtcggccccacctattcaccccgtgctgccctccgtcctcgcacctgctcctggggagggacctgacgc

SEQ ID NO: 97419 - DNA, 951 bp, Homo Sapiens
taaggctagataagaggccgaggggttacttcggcacgaggctatcagcaacaagcagaagctccagaaaacagcactctgaccccgtgtgcccatcccatactggggctgggtacagctactcgcctcagcccagtcggcctggcagccttggaacttctcccaccaagcacttggggtcctctccacggagttctgactggttctttaaaactcctttgccaacaatcattggctctcctactaagaccacagctcctttcaaaatccctaaaactcaagcatcttccaacctgttagccttggttactcgtcatgggcctgctgaagaacagtcgaaagatgggaatgagccacgggaatgtgcccattgcctcttagtgcaaggaagtgagaggcagcgggccgagcagcagagcaaggcagtgttaggcagatctgtcagtaccgggaagttatcagatcaacaaggaaagactcctatatgtcgacatcagggcagcacagacagtttaaatacagaacgaccaatggatatagggtctcctccacacagtgcggcagcccccacttgtacccacatgttccttcgaacaagaacaacctcagtggggcccagcaactccgggggctctctttgtgccatgagtggccgcgtgtgcgtggggtcccgcctggcccaggcttcggctcttcccctccaggagcagaggcagctccccagctggagatacgtgccttacggtgctttcacccccccaagctagaggggctcatcaccttgaagccctgaactgccggagggagacgctgtgggccgggacccccaggaccttttcgccatctgaatgtggtgccggtgttcctgggtgtgtgtggcccgagcttgggggggacccggggcgcctttgtgggcttgtcccctccggctttggggccccctcttgccca

SEQ ID NO: 97420 - DNA, 1079 bp, Homo Sapiens
gctaggtagaggctgggtgttaattcggcacgagggcggcagccacaccggcagattgcagaccgggcaaggtcccccaggccaggatgtcaggcctggtgttggggcagcgggatgagcctgcaggccaccggctcagccaagaggagatcctggggagcacacggctggtcagccaagggctagaggccctacgcagtgaacaccaggccgtgctgcaaagcctgtcccagaccattgagtgtctgcagcagggaggccatgaggaagggctggtgcatgagaaggcccggcagcttcgccgttctatggaaaacattgagctcgggctgagtgaggcccaggtgatgctggctctagccagccacctgagcacagtggagtcggagaaacagaagctgcgggctcaggtgcggcggctatgccaggagaaccagtggctgcgggatgagctggctggcacccagcagcggctacagcgcagtgaacaggctgtggctcagctggaggaggaaaagaagcacctggagttcctggggcagctgcggcagtatgatgaggatggacatacctcggaggagaaagaaggcgatgccaccaaggattccctggatgacctctttcctaatgaggaggaagaggaccccagcaatggcttgtcccgtggtcaaggtgctacagcagctcagcagggtggatatgagatcccagcaaggttgcggacgttgcacaacctggtgatccagtacgcagcccaaggtcgctatgaggtgggcgtgccactctgtaagcaggcactagaggacctggagcgcacatcaagccgtggccaccctgatgtcgccaccatgctcaacatccttgcctttggtgtatcgtgacccagaataagtataaaggagctgccccacctgctgaatgaagcccttagcaatcggggagagcaccttggggacctggaccatcctgctgggggctgccccactcaacaatttggcctgggcctctatgggaaaaggggccaggtacaaggggggccaaagccctctgtgccagccgggcactggaaatttccagaa

SEQ ID NO: 97421 - DNA, 722 bp, Homo Sapiens
  misc_feature (63)..(63): n is a, c, g, or t
  misc_feature (396)..(426): n is a, c, g, or t
  misc_feature (704)..(704): n is a, c, g, or t
gcctagtatacccagttctaatttaattggtaaagaaagaagtcaccttcacttagttaagancccatgatggcacggtagaaataaaaacactttaatctgggctgggtggaatggctcacgcccgtaatcccacgccactttgggaggctgaggccagaagactgcttgaggctaggagttcccggcaaacctgggcaaaactagtgacactcatctctaccaaaaatttaaaaaaatagttgggcacaggtggtataagcccgtagcccctggctatatagggaggctggaggtaggaggactgcttgagtcccggaggtcaaggctgccagtgagcccagatagtgcccaatgcactcccagcccgggtgacagagtgagaccctgactccnnnnnnnnnnnnnnnnnnnnnnnnnnnnnnnccccaatgggatcaaaaatgtgagaaaatgggcacaattagttttcgacaaatccagttttccagtttcatatttcacagaatgttgccaggagtcctttagctggcagactctccccgtgcattccaaagcattcaggttcccagaacaggtttctatacacttttcaggaacacatctgctgtgaaaaatacaatgtttgtagcactgggactccaaacaagcctgaaggggaagatgcacttaaaaatattcctcggccgaattcgacccccagncctcgtactagcctatta

SEQ ID NO: 97422 - DNA, 925 bp, Homo Sapiens
  misc_feature (651)..(876): n is a, c, g, or t
tacaggcctggtggtgaattcggcacgaggcggctactcctgctcagcatggctgctttagtgactgttctcttcacaggtgtccggaggctgcactgcagcgcagccgcttgggcgggcggccagtggcgactacagcagggactggctgccaacccctccggctacgggccccttaccgagctcccagactggtcatatgcggatggccgccctgctcccccaatgaaaggccagcttcgaagaaaagctgaaagggagacgtttgcaagacgagttgtactgctgtcacaggaaatggacgctggattacaagcatggcagctcaggcagcagaagttgcaggaagaacaaaggaagcaggaaaatgctcttaaacccaaaggggcttcactgaagagcccacttccaagtcaataaaaagcaactcctgcctcccttcctcaccctgtctctggatttcttttctatcacctagatgcttcatccagccagaagatagccttcacgttccccatctgtcttcagagcaaaagagctgggacaccaagaacaagctgttagatcactgcctgggaggcttggcttagtactctcatctctggttccattccagttcagctaagtcttgctttaaaatttttacctccnnnnnnnnnnnnnnnnnnnnnnnnnnnnnnnnnnnnnnnnnnnnnnnnnnnnnnnnnnnnnnnnnnnnnnnnnnnnnnnnnnnnnnnnnnnnnnnnnnnnnnnnnnnnnnnnnnnnnnnnnnnnnnnnnnnnnnnnnnnnnnnnnnnnnnnnnnnnnnnnnnnnnnnnnnnnnnnnnnnnnnnnnnnnnnnnnnnnnnnnnnnnnnnnnnnnnnnnnnnnnnnnnnggagtgagccaggtccccttgcctcaactggcgacggggagatctgctc

SEQ ID NO: 97423 - DNA, 223 bp, Homo Sapiens
actactactatacggctgcgagaagacgacagaagggagacgtttgcaagacgagttgtactgctgtcacaggaaatggacgctggattacaagcatggcagctcaggcagcagaagttgcaggaagaacaaaggaagcaggaaaatgctcttaaacccaaaggggcttcactgaagagcccacttccaagtcaataaaaagcaactcctgcctcccttcccc

SEQ ID NO: 97424 - DNA, 977 bp, Homo Sapiens
  misc_feature (67)..(117): n is a, c, g, or t
gtttgaccaaggcgggagcccttcacgcagaacacgagagtcacgtacatcgctgtgtaggtgaccnnnnnnnnnnnnnnnnnnnnnnnnnnnnnnnnnnnnnnnnnnnnnnnnnnngccacgaggctgggactgccaggcgcaggcaccctggtcagtgacaaagcggtccggacctggccgatcccggagaaggtggcaggcagccccagggccgtgtagttggggcggcacacggacaggaagtgtggcgtgggattgccggtcaccacctgccccgcgttggcgaagatggtcgtggtgaagaaggccgaaggagtagacccccaggaagcggaccagcctccgcactggggggctgaagcggcagcaggccccagacacgatggtgctctccccgatgactgggacggctgaaggtggtgcagggaaaaaggcacgcgccagctctcccagcaggatcgtgagggtgggcccggcagtgaccagtgcgtagacaagagcaggaggcactcggctggcagcctcaggccctgggtagggcattggcgtaggtactgtcatagcagaagaatccctgggtgtgcacagggaaggtgtccgtgaactccaggcggtaagcaagcaggatcacaatgcccagcagcaccgactccacgaagacaaagcaggggatgatggagaaactcctcttcagatgcggtctccctcccgccatggtgaaggccaggcctgtgaaagcgccctatggcttcccccaggcatgcatccacgcctgaagactcacagccgctcctggcagccagcagggcagggatggtcacccccacttgtgcagatatggaaactgaggcccaggcaggcgagggtaggcactctgggtccagcacacccaaccacgacactcactcgcgtcgaggccgccaccgcctgagcccccgctccgcactagactagccccggcgcggcgggatgac

SEQ ID NO: 97425 - DNA, 1104 bp, Homo Sapiens
  misc_feature (602)..(610): n is a, c, g, or t
gctaggaggagcgtgtgatggccgaggtggtcaaagagtgtatgagtagcaaaggattcatgtaacttgtagtacacgtttgggggacgatttgtttacagatgcttgtaatcgaagatgcacttttaggcttggaaggcgttgtgggctgggttctgggccttgggtggggttggcaggggcaggctctgcacctgtccgggattcaggtaaccagggcctgccgatgggactgaggcgggtctaggggtgtgtgtcctgtattttattgaaaaactcattcagggatccagcccctcagggggcagagggactgattattctgactgttgggagaggcttgcatggaccagagccccatcagtatgactgaaagtccagcggagccttctgtgtccctgtgcctcccagcagggtgggagtggaggaggcggccgctcccccacgaattctcactccccttgggtgccaccccgcgcgcccacggacgctcccccacacacggccacccccttagccacccctcccggagcccccactggcccgcacgcttccgctagcacattcctcgcatccgcgcggtactcgcatgtactccagannnnnnnnnatccgaaagaccacacccgaacacgcccaacacgccctcggcagacactaccagctcaggcgtctccccctacgctttcctgccgcccccaacgtacaggcggcacccatccccttccccgctaccccccatttagccgcgcccctggcgatactaataccccccgccaaataaactctctcataccaccaaacaacatccgcgcccccgagccacgcctctcccgccctataaacccgatctcccgaccgccgtacataagagatccgacccagcgtacgcgcaagacgtcgacatatcctgcaactagtatgtgcgcgattcacaagctgctaggcacttcggaatttaccccaccgccgccggccacccgggccgaaacactcacacgatccgcctccatcacgagtcttgccgatcctagatcactacggacctaactcagagcacttagcacgtactaacgacgtatcgcccctacagatcgcgccacc

SEQ ID NO: 97426 - DNA, 974 bp, Homo Sapiens
aaaggctagtacgaggctgggttgtgaattcggcacgaggctcgtgccgttgaaaattcaggctatgttcgagggcagactctgaatgtcaataggttgctgcatatcgttggatatggtgatttccagatgaaacagatagatgcccccggagaccctttccctttaaatcctagaggaattaaaccccaaaaggacccagacatggcaatggagatttgtgctacggatgctgtagatgatatggaagaaggtcttaaagtcctaatgaaggcagaccctggtagacaggaatccttgcaagcagaggttatcccagatccaatggagggagagcaaacctggcccactgaggaggagctgagcgaggcaaaggatttcttgaaggaaagttctaaggtggtaaagaaggtccccaaaggaacatccagttaccaagctgaatggattttggatggtggcagccaaagtggtggggaaggagatgaatatgaatatgatgatatggaacatgaggattttatggaggaggaatctcaggatgagagtagtgaagaagaggaagaatatgaaactatgactattggggagtctgtgcatgatgatctgtatgataagaaagtagatgaagaagctgaggcaaaaatgttggagaaatataaacaagaaagactggaagagatgtttccagatgaagtggacacgccccgtgatgtggctgctcgaattcgatttcagaaatacagaggccttaagagcttccggacatctccatggggatcctaaggaaaaactttcctcaaagattatgcctcgaatatttccaggtctgcagaacttttattaacactaggaaaagatcctttaagcgggtgaccacaaagaggttgaaggagcttgaggttgggtgggttgtcccctctgctctcgaagtccccgtccagggcgcgagggtcacggaggaaacctggttg

SEQ ID NO: 97427 - DNA, 1059 bp, Homo Sapiens
cgtcaaggcccccctcccagaggagccccgggtgttactgtggttccgacccaaccgcaggcccagccggttcccatcttgaatgggcgcccccgcctgccccatacactgttcaacaggaggttgtaattcatagccaatatggttccccgccagtagactcttccttggtggtcaaatgtcacctggattcttccctggcccaactgtctggatgccataaggttgcctttggtgccagtctttagttctcttcttgcccagaatttcgcatgctgactatcaggtcaccatctttgcttagttctccagacatctgactcaaggttccttttatgcagatcctgggaactgctcttcttgttgacagcatccatgaacttctgaacatcttgagctgactttcttaaggcagccatagcttcacggagcttctggtcttttggagttctgctcccagcatcacctgaatcaatactgaggacatcatcatcttcatcaggaatctcaattatttctgtaggccgggaagattcgtcctcagagctactgtcccggtattgtagtcccagcttggagtagaagtccttcaccaaagactcacaattagtcactgccctggatgcatcatcaaagagttggtcaacgtgagccacctcagattctttctgtattacccatgtctctaactctgctagctgcttcttgcgttgctgtacacaatccatcttctccagttcctcatcgatgaaatgccgaagttcctccatagagatacccagttcctcaaccactgcctgttgcagctctgcaatctcttcagactccactgtagctgttgctgcatccaaaccaatgcacccaggaagggaagacatgcttttgtcctctcccgtcttccagcttcaagggctctttttcaccaaccagaccccagactcacaactcaggggtcgcctcgacggaaaagagcgaaagcgaagggataagggaggagggggaggggagaagcttgacctcgtgccgattaacccaagcctcgtacctagccgtattttt

SEQ ID NO: 97428 - DNA, 962 bp, Homo Sapiens
acacatagctaggtacgaggcctgggtgtttaatcggcacgaggccttcttaaagtagtgatgaaacccatagcaactgttggagaaagctaccaatatcctcctgtgaactgggctgcacttctctctccacttatgaggctaaattttggtgaagagatccagcaactgtgccttgaaattatggtgacccaggcacagtcatcccagaatgcagctgcactattgggcttgtgggtgacaccaccactgatccacagtctgagtctgaataccaagagatatctcctgatatctgcacctctgtggataaaacacatctctgatgaacagatcctgggttttgttgaaaatttaatggtggcagtttttaaagcagcttccccacttggaagtcctgagctatgcccaagtgctttacacggtctgagccaggccatgaaactgcccagccctgcccaccacctctggagtctgctctctgaagctactgggaaaatttttgacctcctgccaaataagattcggagaaaggatctagagctgtatatcagcatagcaaaatgcctcttagaaatgacagatgatgatgccaatcggatcgcccaggttactaagagcaacatagaaaaagctgcctttgtcaaactgtacttagtctctcaaggacgattccccttggtgaacctgaccgatatgctgagcgttgctgtgcagcaccgtgagaaagaggtgttggcctggatgattctgcacagcttataccaggcacggattgtgagccatgccaatacgggcgtttgaagagaatgggagtggctcttggactgatgggtatactgaatgtggctaccgtcactctttccaatacgggtctggacaggttggactctcctgctggtattgaacgcgtgtgcttggctgccacgcccttccccgcccagcctgttgcaggctcaaaa

SEQ ID NO: 97429 - DNA, 1141 bp, Homo Sapiens
  misc_feature (1007)..(1073): n is a, c, g, or t
tcgtgttggaatgccgcgctaatattctctgttagcctctcttcgttttactttgcaggtcgagacccgtgctcagaggttatccaattacacgagggttaatttcccaagttttcttagcccaggttgtaataattaccgtccgtgaccttgattgaaaccagtgtaccagtcggcgaattgtgaggccgaccgaaagggggtcaaccatgtggtgacccggcccagattggaaccttgggggctgggactctctttgcagggcaccaccctaggaggctggcattgtctctgtacaacccctgagcaggagccgaatgtaggaaacatgactgtggctcagttctcacgaggggctgtacccctgaccagctgggctctggtgacgtggaggtcccaaccaggcagggaattcccccggggcggctggctctgtcttgcagattggggctggactgtggccagtagggacgttggtcattccgtgaccattttgtttctccagacgttaccgttgacacaaatggcttctagttgctttcccacggtgaccagcgtgtcgaagtcttgaaggcggttggcaggcggctccggcgaccgcgcctcggagctggggcagagctcagggcagcccagtccggggtctccctctagccacaggccagcactgggccaagcccagggcagcacattcatggggacgcactcaggtccggggcaccagggccagggcccggagcagcatcaggggagccagggcattccagcaggatgcaagccatcggagggcggcagcgcaggcatcaacggaggctccaccatgcgcagccatgcaggctctgtggaggccatcctgcccacccaggccacggagcccagcaagacgcacaatgcgccttccaggtgcagcagcagcaggccagggcgcaggctgacaggagcaggcaggggacaatggctggcacagtcgcatcacaggcacaagcaagcaacaggccccaggtagnnnnnnnnnnnnnnnnnnnnnnnnnnnnnnnnnnnnnnnnnnnnnnnnnnnnnnnnnnnnnnnnnnncccgggcttgtagaccaggcgaggccatgccatcgtgccgaattcccaacccagcctcgtacctagcc

SEQ ID NO: 97430 - DNA, 1264 bp, Homo Sapiens
ggcctgggtggcgaattcggcacgagggcggccgcagcctgggattccccagggacccccccggagccgccgcgtctcccatggacttgcccggggactccagcccgcctggccagccgcgtctgtgccgccagcctctgactcgagcattatggggagccaggagcccgaaacggccgaggctgcagctcccgggggccccttctcccctggaaaaggcctctcggcgggtcctggccgtggtgctagaagatgtcatggctgttcacatggtccccgtggtgccctcaaagcagacctccataccacagcaccacagctaccatcaggatcctgtccacaggcagccgcctgcctcgccaccccggcaggccgggtggtcctcgcaggccaggcctcccgaccctctgtgtttgtgtcgcgagcccttgagccgcatccaccggacctcttccaccctgaggcggcgatcaaggacaacccctggcccagaggagggcccttcacaaaaggtggaccgggccccccagcccaccctggtggtgatgctggaagacatcgccagtcctagaccccccgctgagggcttcattgatgagacccccaacttcatcatcccagcacaaagagctgagcccatgaggatagttcgccagccaacgcctccacctggggacctagaacccccattccagccatctgctctgcctgcagaccctctggagagcccaccaacagccccagatcctgctctggagctcccatccaccccaccaccgtccagccttttacgcccccgcctcagtccctggggcttggccccgatcttccgtaccgtccgctccaagctggagagctttgctgacatcttcctcacgcccaaaaagaacgcaaaagccaaaagagaaggaacgcaagaagcgaagtcacacactagaacgctgagagaagcacagagcagacaggccatggccagagggcagtagcgctaggaaaaaacagggcccacgggcagcaggagtacagcgaccggaaaagaacacaaaagacttcgaaggacacagggcgagcacgaacaacaagccagcaccaaaacacggcgccacgtcgcacagcgaccgcgcacaggcaaccagcagcagccccaaggagcgaacaccaggacgaaccaaacaagagagagggggaaacgacgggcccacacactagaaagaaaccaggaaaggacaggccgaacaggaacgcccaaagagaaagcgagaag

SEQ ID NO: 97431 - DNA, 863 bp, Homo Sapiens
tgaaaggtagatacccagctccaagagtaccaaccagtacagggatggctttcagagtctgttttggttacctgtccccagcaacatttactggtgcccacagccatgactcgtggtaccaggaccgagaggccgcccacgaaggaggacaggtagaagagaaacctccagctggcctcacagaacttcttggtcagctggggtcgatcctggttccggcgtctccggaaccatcgctgggtctgctgcagcgtgaggccacactgggcggccaggagagacagctggggctccttgggcctgtgcccttccgtgaggaagtgtttctccagcgtggcgttgggcttcacttgcctcctggtctgatccctcacacccagccaccggctcaggggcaggccaatgaatctctcaaaggcaaggcgcatggccaggaggaccagcgccaggggcagggctgccaacaagtcctgggggtgggggtagacacggccatcccggtcttctagctctgtccacgtgacattgggtggtaaccagaacctgtcctgccaaaaccactcgttgaaactggacagcattctctgctggcagtgggtgagctggaaaaacaggtaaggaaagtcctcaatgcctcttcctccacgcctggctgggcctgctggggcccaggtgcactgaatgaggcttctaatcagtcccccagctccacttctgtgtttattcacagcagctgctcctgggggtgcaggcggccgggcgcaccgagggccggcggcggggctggggacggcgcgcctagcgggctacccggagcagctgcagacacgcgccgcccgccccaggcagccggactctgctcc

SEQ ID NO: 97432 - DNA, 1289 bp, Homo Sapiens
  misc_feature (67)..(67): n is a, c, g, or t
  misc_feature (80)..(80): n is a, c, g, or t
  misc_feature (140)..(140): n is a, c, g, or t
  misc_feature (201)..(201): n is a, c, g, or t
ttgcagtttcccgggggccagcggggcttctggccagtgtctccctccacccggcaggagcagcaancaggctccacggnttcggccaccccaccaggagccagaggtcaaaattaaggggcatttcgtctggcacttgnccagtatgaagtcgaccatcagggaggggtctctgctccgcagacaggcgttcaggaggcncctgaagaagtgggcagtgatgtcctgtgtcagggcacctccgtgggagcagaagtttctcatctcagagttgaccaagtggaagaactgctcgcatctggcagtgatgggctgttctgcctggaagctgctgccgcagaggacagacgaaggcaggcggaggaggatccgtttgtacattagcagctccctctgtctctgaaggctggcagccacgctccacccgcttgtcagagcctggagccgtctgcggaaaatctcaaagaggaagtgctcctgggaaggggtgtggccgagaggcactatgaggtcttgctgcagctccaggtcagctaccatctcctgcaatctggaaataatatcctcatttcctgtgcggccaccaaagaccaaatcagaattttctgagtggtcataactccttgagctttggtggaaatccatcagtgcgttgacaagaatggtacacgcagcctgcaggtctccgtcacagccccctgaagccgaagactcagggagaaagtgctcatggatcgcccactggtggaagtcctgccgttcagtatctgaaagagcatcagcttcaggttgaatttccagctccaggtgtaaccagtcttggtaagttaagtgaacatcttcctctttcaacacctctcggaaggttctgtgtgtccagagagagagggcagctctctgccagtctgcagaaggaaggtgcaagggtctccaggaaaggctggctacgtcctcctcagaaagaggctgtcgggcctctgagaacaatctgaacatgaggaactgaaactttttaataaggcctggagataagcagctgcacaaagtatctcgtgactgggaagaaaacttgcagagagagtaagaaattgctgctgtacaaaatttcaggcagaagaacaaggaatccctcgtcctacaggtcaggaggctgtcaaagagcgcagggacaggaaggccagcaccaggtgcaggaggacccacatccacctctgggagcgcagacctggactcacccaggtgcacgccagggcagccaaccccagcacatgtggggcatacagctcggc

SEQ ID NO: 97433 - DNA, 269 bp, Homo Sapiens
  misc_feature (29)..(29): n is a, c, g, or t
  misc_feature (44)..(44): n is a, c, g, or t
  misc_feature (74)..(74): n is a, c, g, or t
aaaaacgtgggtcctcgggatcccggggnaaacgttcatcctcncgggtgcggccttcccatgcccccggaggncctcgggctgcaccccggccatccccctcgctgaattccctgtgatcagggggaaaaggaggcccagggccccctcgcctccacttctcttcttgcggtaaaggtcctcctcgccccttaaattcacgtaaccggtggccaaagcgcttgtcagggtggaagtcatctggtctgctgaagtcatcggggaagtct

SEQ ID NO: 97434 - DNA, 972 bp, Homo Sapiens
ccaaggtagcgaggcctgggtggcgaattcggcacgaggcagggtggggggttgagtcagcctcctcagagaaactgcgtgagagtgtgtgcgtgcatgggagtgtacttgtggaaaggtgtgtttgcgtagccttagggaaggaaggcaattgctccttaacagcagagtatcatgatacccccaggatcttgagttttttacaggatgttgggtttgctcaaggagtcaagaggagggcaccaagttttccttttttctaaatagctctggaaccaggcttgtaatccatagcatcaccgactctgcaaaggatttcattttggggcacagcagggtgttttaagtgctgtgacttcagctaatgatcttttcttcagccccaccccctccccactagctcgatctagtatattggggaatgcaggtggggggtgtcaccatattttttctgagctggcctttttttctcatcagattgtccaggctatattccacctgcctcttttgccctcttgagtagagttgcacacagcacatgggcaactgaagcagggttgaggggctctatctctctctctcctctgctgatgggacccttttcccctcaccctctgcccttctaagtcatagactaggtaggaaggccctatattggtccccagcatctactgaggcagacctgcaacagaagtggcattcagtccccagcagacatgggtgagctcaccccaacactgctgttgggaaggtgactgcaggaaaccaattcttacaagatccaggcccagcctttttgacctgcttgagaaggaagaaggggtgtttagcatttaatagtttgcttgtcttccactcctgccaggaagtgtttatttgcctctaattgggcctgagagaccataggggaggttgggggctcactgagggattggcttgagatgtataaagcaaaggctgggagaaacattg

SEQ ID NO: 97435 - DNA, 956 bp, Homo Sapiens
taaacttaggctaggtacgaggcctgggtgtttgaattcggcacgaggccgagcgctcggctcgcatggcagccgcttcggcgcccggccccgcggccagctaggggcggccccgcgctccctcacggcccctcggcggcgcccgtcggatccggcctctctctgcgccccggggcgcgccacctccccgccggaggtgtccacgcgtccggccgtccatccgtccgtccctcctggggccggcgctgaccatgcccagcggctgccgctgcctgcatctcgtgtgcctgttgtgcattctgggggctcccggtcagcctgtccgagccgatgactgcagctcccactgtgacctggcccacggctgctgtgcacctgacggctcctgcaggtgtgacccgggctgggaggggctgcactgtgagcgctgtgtgaggatgcctggctgccagcacggtacctgccaccagccatggcagtgcatctgccacagtggctgggcaggcaagttctgtgacaaagatgaacatatctgtaccacgcagtccccctgccagaatggaggccagtgcatgtatgacgggggcggtgagtaccattgtgtgtgcttaccaggcttccatgggcgtgactgcgagcccaaggctggaccctgtgaacaggcaggctccccatgccgcaatggcgggcagtgccaggacgaccagggctttgctctcaacttcacgggccgctgcttggtgggctctgtgggcgcccacctgtgacgtacatgctcgcataatgtccgcatgcggccttgggcctaccgggtccccctgcctttgactgcatcaaccgcactcaccctccccctggcagtgaggacttcggtagttcaacttcccaaccataaaccccccatggctctgtgccaatccgacccctggcccggaaaaggggtcccaccgcgatag

SEQ ID NO: 97436 - DNA, 1022 bp, Homo Sapiens
  misc_feature (477)..(478): n is a, c, g, or t
  misc_feature (490)..(490): n is a, c, g, or t
cttacggctaggtacgaggctggtttgaatcggcacgaggctttaacctcatcctatataatagggccgtgggatggttgtagaggtaaagcaggatgatggtgttttaagaccagagcttgggaccagggctcctacacctaattttctctcctggtagctgaacaaaggtctaaattagcttaacaaaagaacaggctgccgtcagccagagttctgaaggccatgctttcagtttcccttgttgacaattgctctccagttcctatgaaagcacagagccttagggggcctggccacagaacacaaccatcttaggcctgagctgtgaacagcagggggttgtgtgtctgttctgtttctctgcttgccgaactttctcaataaaccctatttcttatttatatttacgtggtgctggtggtgtgtgtctgggaccactttgcacagcagttcttatttcccccatgctaggtnnctgggctgccanatctcttgccttgggggcagagcctcatctctctggctactggggttagctaccttgttggagctggcaaagccattggtgttgacatcgggggtgactcctgaagccgccatatacgtgctgccaaatggttttgatcttggtgatcacccggaacttgggatcgtccaggagctgaggccaggattcaggaaagaattgtcagcagtcaagggagaggaatgacccaaccagtgacagatgtacctgtttacgaggaccccaataaaaccaagagacatttcctatcaaacgtgtgacttagtctaacgtttatctgcaagatgatcctgggagacttcctactttctgggctgtttcacaactcaacagtgctaaatcgagctctagggggccgggcgttgtaaagcatctcctgtttcagtcccagcagcgacgtttgattgagaaagccaggaccaagttaattgtggagctatcatatgacaggggacggcacacacctccgagcacagggactagaggtgaaaat

SEQ ID NO: 97437 - DNA, 999 bp, Homo Sapiens
aggccagcctgggaggccccagacccggggggcccaacggcaccgggggaacccacccttcccgccccaggaccaccctgaaggcagcttcaggatctcgccacccagaaccaagcagaggcatcttgggaggaatcgtggtcacagattgctgcgtcaaaaaaagaatggccagtgagggactggtccacacagaccactcccagcagaggaggattctacaggcaacgtcctcggcccatgctgacgaacccaaggccaggcctctgggggctgggagaagggagggccaatgtctgccttggcctgtgtcaccatggcacagtggtggctgagctcctgcagggaaatcccagaccctgagactggctctaggagtggaggtctctacaggtagggcctgaggatcagagggaaggctgacataggacgaaggcccatccaaggttttccagaatcacggcctaaaccagcaggaccatcccatcccacgccttggcaggtggcctccagcggcccccaaccccgccatgtggtgcagaccgggaatcacacaggcctcggccaaacacaggcacctggagtaaggcatgccagcatctaaggtgtgtggctggggacaggggcctactggcccaggtgggtctgggcaaagatacagtgaggaaggtagacagcccagaccagagagggcaaggccagctggtgccccctgtgccccacaggtcagtctgagttacactttaccctggacacctggaggggcagggatcaaggccaggagcctctgtgagtggtgaggtttgccaaggggcccagaatggcctccttttccccaaaggatcccaagagctgctccatctcctttccccaggtccctgagccactgggcccagtggagggcagagggagaacctgccaggcaccagggtcatacctcccacatggccgatgggataaggggtagtggccatgttcctcccccagcacgatctcaaa

SEQ ID NO: 97438 - DNA, 1627 bp, Homo Sapiens
tctttgtgctggtgttttctgctgtgtggtggtcgttgtttgtctgttttttctgcgtgtctctctctctatgagcgcttctctgttctccatcctctctcgccttgttgcgtgctcccgttcttcgctcttcctcatattgtcctgtggtgttgtctccgcttgtccgtgttttgcgctccaggtatctgttgttttcgcgggcgctcctgtgcacgggcgtccctgtgttgttctgccgctctttcgcatcgtgcttgctccggccccgttgctgctccaaacgtggtcgtcactgcagactgggatatgcatcctcaatctcctttccaaattctgaactctacatcctcactgtgaagcctttgccgagagcgccccctccgtcaggcaatgcccctgggctttctgaatcctggcgttgagcacctccttagcagacacaaagaagatgcgtccccggcctggatcgatccaccacgcccagctcatccaccaggaagctggtactacgctccatgtgctgccgccgcacctcctccatgtactcgggctctgaggcagatgcatcccagcggttgttcaggatgaagatgtttgtccgggagagacgctcactcaccttgtggaagaagtgcttttccgtctgcatcagggtggactctgagttggccaccagcacaaacacatcagcatccagaccaaacgtgtcaatccaactgtccagctctgtggtgacatccaaaaccagggctgtccatcaaaacgaggtcatccttcagaagtgggtcacttagaggttggggccacatcacactcactaggctgccggcatggagctgcttgtcctagtggagggcatgggccagctggttcacagtcttggcactcctcttttcctctgagccctcggtaaggagaaaggcctcatggccatctgtgccctctacccgcaggaagcaattggtggtgtggccaatcccagagggcagaactttgtcccagagcatggcattgatcacggtgctcttcccattgctcgtccggccaaaaaaagccactttcatgtgcctccgagccagcacctcactgatgcctctcacttaggataggtaacctttgacgtccagaacctgttcttctgtggtaacggggtccagttctgcattcctgtacgtgtcttcaaggaaggtggcgctctcctggatgtaggcccccagctgctcaaaaatgccattgatcttcttcttggcagtgacaaagtgcttaagtggggatgcattcacctcagccatgtgtctcttatttttcttgactgtgacgatagagttgcatcgagagaagagcagggacattgcgttttttggatggtgagagatcttcacagggtaggcatcatggacatggctgaagtccaaaagacaaaaagattctgagttctcttctgtcctgtctcaggttgaggttggctattgattgactgtgcttgactccaccagtcctgacttcaccttcccggcctcgcggcggccatcacactcactacgtcaccagcgagcgccaccccagggggaggcgggaggagggaagtggataagcgcgtcaccagtcgcctcagattgccccc

SEQ ID NO: 97439 - DNA, 821 bp, Homo Sapiens
  misc_feature (31)..(31): n is a, c, g, or t
aacaattatgctaggtagaggccgccggttnaatcggcacgaggggggtgcgcgtgattgcggcggcaggagcaggacctggccaggaagcgggtgccgggcctggcccagtgagcggtcgcaaatgcaatcaggagcagagagagggggagatgaagccggtggcagcgggtagcagccgctcctcctggagaggggatctctgctgctccgacagttgagcccagttccgggtgaggctgaaggctggtggaggcaaacttgtgtcgatgtaagcggtggcttggagacagaatcatctaatggaaaagatacactagaaggtgctggggatacatcagaggtgatggatactcaggcgggctccgtggatgaagagaatggccgacagttgggtgaggtagagctgcaatgtgggatttgtacaaaatggttcacggctgacacatttggcatagatacctcatcctgtctacctttcatgaccaactacagttttcattgcaacgtctgccatcacagtgggaatacctatttcctccggaagcaagcaaacttgaaggaaatgtgccttagtgctttggccaacctgacatggcagtcccgaacacaggatgaacatccgaagacaatgttctccaaagataaggatattataccatttattgataaatactgggagtgcatgacaaccagacagagacctgggaaaaatgacttggcaaaataacattgttaaaacaatgagtaaagaaagagatgtattcttggtaaaggaacacccagatccaggcagtaaagatccagaagaagattacccg

SEQ ID NO: 97440 - DNA, 1014 bp, Homo Sapiens
tgcgccaggggacagcccacgggtctggtgttggtccttcagggcagagctctcgtctgcctgggcttgaccggcaccttccccttgtgcttctgtggcctcatctgctcactttcaccttcagacgggtgctggcccggctaacacgcccagtctggggcatcgtcgcttgctcacgatgcttccacgctggatcttagatctcgcggacatcgtcagggtcctcccgacttgtccggcgtctggcctggggtgatcgagaggggcctggaggggggcaggagggagccacctcactggggagctgcccccactagtggtgctgacactgtcctccagccacgtgctatagatgaaggagtcccgcttgtggggtgttcctgaggatgacacgctctccaggcctgtgtcctctccgtccacaccctccgtctcctccaccacgctggcgaagctgctggcactggacgaggagcgggagaagtccttgagcgcctctgctctctgcgctgcggtctccgctctgttcttggtcgtgggcatctctggggagctctgagtggatgagttctccgacttgggctcctgtgagacgtgcccgctgtctggggtcttctgaccagccggagggctctccctcttctcctgcacctcctgtatgttctcgatgccaatggcgctgctgcggcgggagccgaacgggcccgacttcttcctcgtggggctcttcccagggacaatcagtgatattccagccgccttggccaggtcggggttgttgggcgcgaagctcccgctgtggctggtggacacggtgttgggcttcttgttgctcagccccatggcatccatggactggctgcggctccggatgacccgcttgaaagactccaagaagccgccgcccccactgccattctccatcttgtcctcgtcgccgcccaagcccatcatgaactgctgtggatgtgcctcgtgccgattaaaaaccgggtcctctacctagccgtactg

SEQ ID NO: 97441 - DNA, 1070 bp, Homo Sapiens
acggctagtacgagcctggtggtgaatcggcacgaggaccaacgcacacatatatcggcaaagatccatgttgcacacagacaggtgttcaataaataatttttggaataaatgtgaacactgaatagcaaataaatgttatagatcgtaatagttgtagaagattggttggagatgtagggactggatgtggggcaatggctgtgggtctagagtatattcattgtgcagtggacacacacctaatctgtcctcaaggacacgtaaccatgtggcagtgaataggaaagaccaaggtagaagcaggcaacgagaagcggaggcagggagtacagcagctaagaaatgttacattgggttcatccagagcaagaaaagctgagagctgtccgtgagggaaggccacacaggcaagaggagtgggacaggggagtaaaggagtgggctacaacaggccctgcagatgtgtgacatgccagacccgaatcagaggcgacttagaaagtgaggatcctggatgaattattttagggagaaagtgtaggtttagatcagctggctaggatgtgttctgtagggcgtacagaccaagtttggtcaggactaagaaggtagctaaaatggaagtagaacttctgggggacaggagatctagggtactccagaaccagggaaatgagaaacaaagaggggacattttaagaaagagagggaagatcattctatgaggtggacgatgacaggtgtcggcgatggtgaggcaaagtcaaaagactcactcgaagggaggaactctgcttattgtgtccatattccagagttgtgctgagtcgggccagtgggcgtcctcgggcatgtgtttcacggggtggctgtggctgggctgccgaacgggtgtcggggtttcggggacccaggaggtccggttcttcctactctggctgcgcggttttcccaagaacaggtcctttcgggctcgaaggcacctgctggttacgattgcatgcgcaccttacccaacttcctcgctgctcctagggatgcgccctttgccggtcccctcctcccct

SEQ ID NO: 97442 - DNA, 1248 bp, Homo Sapiens
cgagcttacgctagtagatgccgcgggtttaatcggcacgaggtctacacctgccgttgcctgggcctgattcctgcgggcctcgccctggctgcttcagccgattccctgcccagctccgtggctcatggtgcgcggtcagcagtggctgggccagtgctggctgtgggcgctgacactgggagtgaagtgctgtggcctgcctgcccggtgctgcgttaaggaatgttgcccaaaatgaggaagagccgcggtgccctggcggctgaggccaccccggcgtgcgtgctggagatgcgaggaggagcgtggtggcccgcgctgctgcccgccctctgcctcacctggctgcaggtggacacctgcgcaggtgtgtgccctccggcccctgaagcatggccagcagcggcatggctgacagcgccaaccacctgcccttctttttcggcaacatcacccgggaggaggcagaagattacctggtccaggcgtggcatgagtgatgggctttatttgctgcgccagagccgcaactacctgggtggcttcggccctgtccgtggcccacgggaggaaggcacaccactacaccatcgagcgggagctgaatggcacctacgccatcgccggtggcaggacccatgccagccccgccgacctctgccactaccactcccaggagtctgatggcctggtctgcctcctcaagaagcccttcaaccggccccaaggggttgcagcccaagactgggcactttgagggatttgaaggaaaacctcatcagggaactatgtgaagcagacatggaacctgcagggtcaggctctggagcaggccatcaatcagtcagaagcctcagctggagaagctgatccgctacacaagccactcacaaatgcttggtccatgtgcacatctctcggaggaatctgacaaatatgcctgaatcggtacagcgcaatgtgacagaccagcatccaggcaaaagaagaaaacggttctatgaccatgactcgttcagcaaaggaaggtcgcactatcgaactagactaaccaactagggaacatcttcaccccgcgggagcaatgtaacgctcgaagcgatcagcatatcttcaacagtcgcagagccaaccgctcgaaacaagagcgagtattagcggctcccgagccccagtaagtgaacagcacgacacagagctgacagcagtcagcgttcagttatcatttataaagagtaaatcaac

SEQ ID NO: 97443 - DNA, 965 bp, Homo Sapiens
cgggccgactgcattggggtgtaactgtcccgtccatccttgaggggttttttccggcccccgcttgtgggaccagtgacgtgggtcccagttcgtggagaattggtcctcgttgtcgggcatcccccctggagcatcacccagctgctcttcgtgcgtccgtgtttaatccttggtcccaagcgtgccattccgtcccgcatccgatcgccttgtcagctggaccggtctgtagttcctgtgtttgaccgctggaggtcggagtgtagcgccccgaggctaaccgacccacgtggagctttgggctggaggtccggcactgcttgtaggaccggtcatcctgatccccctcggtcggcgttggcgagagcaactgaggggactcgccgtagctctgcctgtcccctgcagagtggctgatgtagggtgagtaggagatcatgtcggggcggtcgatgtcatagatggccttacttttaggaagggctgccaagtccctgtagtccaggatctcaccaccaagcttggcataaatcacacggctcggagaccctgaggtgctggaagcagggacagaaatgatgctctctgaggaagttctggtttccttgtttctgtcttcagttctggctgcttgtcgacacgccggatgccagatggaggaaccttgaagatacatctcttcgccttctgcaaacatctggccgcacctgacacatagcgcgcaggaagggtggtagtgcttctctccggcctccagcacgcgccccgtgatgtatttctcacagctgtcacagcggatgccgaacttggcgtgatagtcagcttcgcagtagggcagcccatccttgctgatgtactcggcattcaggagcttcccacagctcttgcacttaaaacagcccaagtgccagtgcttgtccaagcctcgtgccgaattcaccacccaggcctcgtactagctt

SEQ ID NO: 97444 - DNA, 1282 bp, Homo Sapiens
cgtcgcggcggcatcttgagtgcgcgtgcgttgccgttctgtctctcgctgtcactgccgcggtctttcgtcttggtggtccgtgcatcgtcctcagctgcacgtctcggcagtgcccgtggcctcgttgtcggtcgtccgtgtgtcgctgcggtccgtccgtgtcgttgccttgtgccgtcctacgccattgcttccgcgtgacatttgcttctctcccctgccccgtggatctctggagcccgctctcccgtgggtgggcttcccactttctgcctgcaaccaggttcgcctggccacccgcgctcctgcgtgcagagccatgcgtttgcatgccctgaattcttcctacacagcgacctccaaaccgctgtagccagcccatcgtctcctgacacttctcagctgtctcctggccccgtgccggcagctgagacagcttctctgagatctcctcggccgcatagtggctcctggccagcagctccttccccatgtcgatgcaggaggagaagcggtctgcccgggcctctatctctgccttgatgccttgctggttcttgatgactagatccgcggaggacacatcccggggacgctcctgggcatccatctgcaggttgacctcatccatccagagcatcagttcccggacagccttgaagaagcggaacttgtctgtggtgtccagcagcagctgccggcgggcggcagagcttccctgaagctgggcccaggcctcggccacggcctgcatgtggcggccgatctcctcagccttgtctccagcgtaggccttctggagccggtggccgtcgtcctgcacctgctggacctgggggctgagggcctgaatgtcatgctcgtaggcacagtgtcggcgctgcagggcctcggcagcgttgaggtcgcggccagtcccgtccggaagctgctgctgcttgtgctgcacccgcgccagggcttggcgtgccccgtgcaggaagcgctgcagctcgtacgccgcggccagcacctgaccccgtgtgtccagcagctcaagcaggtcagcccaggcctcgttgagactgtccttccactcggccacggtggcccgtgcagcatggcccccagcaatgagcccattggccagcgcattggcgctatctacgcgctcctcgagccgatggtgcttgtgtcccgggagaactctcggaatttgtctcggagcatagtcacatgctcgcctcgtgccgaattcgccacccaggcctcgctaccttagaccgttagtagttactgt

SEQ ID NO: 97445 - DNA, 1288 bp, Homo Sapiens
  misc_feature (81)..(115): n is a, c, g, or t
acgactatactgaccacatatggcgcatcctctttattccgaacgaccgagcgcagagagtagttagcgaggaagcggcgnnnnnnnnnnnnnnnnnnnnnnnnnnnnnnnnnnncagtcgacggtaccggacatatgcccgggaattcggccattacggccggggggggtgacgtgtggttgacgagctcggcggcgggtttgctgagatctgtggccggcggcagctggtgcggggggcagctgagagcgagaggtggatcggggcggtgtgtggccagggccatgacgggcaatgccggggagtggtgcctcatggaaagcgaccccggggtcttcaccgagctcattaaaggattcggttgccgaggagcccaagtagaagaaatatggagtttagagcctgagaattttgaaaaattaaagccagttcatgggttaatttttcttttcaagtggcagccaggagaagaaccagcaggctctgtggttcaggactcccgacttgacacgatattttttgctaagcaggtaattaataatgcttgtgctactcaagccatagtgagtgtgttactgaactgtacccaccaggatgtccatttaggcgagacattatcagagtttaaagaattttcacaaagttttgatgcagctatgaaaggcttggcactgagcaattcagatgtgattcgacaagtacacaacagtttcgccagacagcaaatgtttgaatttgatacgaagacatcagcaaaagaagaagatgcttttcactttgtcagttatgttcctgttaatgggagactgtatgaattagatggattaagagaaggaccgattgatttaggtgcatgcaatcaagatgattggatcagtgcagtaaggcctgtcatagaaaaaaggatacaaagtacagtgaagggtgaaattccgatttaagtgtaatgggcatggggtttggcggaaaatggttttttgagcgaagaatggcagttcaagaacactgtgaggaaccaggtaccgatcagggaaggtatgtaaagataaagtgaatggcaaataaggctttggacaaagttcggaatcaactacaggggaaattagagggggcaaatgggaccatataggaggtgtacaatagaaccgcggatagtcctaacgggagaagtgagcacgagcatgacgggtataacaaagatatagagcaaggatagaaaagtgagtgtatagtgtgtacatgtgtttatattttatatttcttccttattctcaactatgagagacg

SEQ ID NO: 97446 - DNA, 1035 bp, Homo Sapiens
acactatacgtcagggtacgggcctggtgttgaattcggcacgaggaagatggtaagatggatgggagtggggaagtgcaggtgtggcgcattgagaacctagagctggtacctggtggattccaagtggctaggccacttctatgggggcgactgctacctgctgctctacacctacctcatcggcgagaagcagcattacctgctctacgtttggcagggcagccaggccagccaagatgaaattacagcatcagcttatcaagccgtcatcctggaccagaagtacaatggtgaaccagtccagatccgggtcccaatgggcaaggagccacctcatcttatgtccatcttcaagggacgcatggtggtctaccagggaggcacctcccgaactaacaacttggagaccgggccctccacacggctgttccaggtccagggaactggcgccaacaacaccaagggcctttgaggtcccagcgcgggccaatttcctcaattccaatgatgtctttgtcctcaagacccagtcttgctgctatctatggtgtgggaagggttgtagcggggacgagcgggagatggccaagatggttgctgacaccatctcccggacggagaagcaagtggtggtggaagggcaggagccagcaacttctggatggccctgggtgggaaggccccctatgccaacaccaagagactacaggaagaaaaacctggtcatcaccccccggctctttgagtgttcccaacaagactggggcgcttcctggcacagagatcctgactcatcaggatgacctggaacagatgatgtgtcctactaatgtcttggaccaggctctctggatggaactgcaccagaggagaaaagccggcaccatgcggatacccagacaccgggtgactaaccctttggtgagggacaccccccagggtcggcgacccgggaaccctaggaccggggggccggaccagggcccggtttcaggccccgtcaaccgcgcgcatctcctcctctaatgaacg

SEQ ID NO: 97447 - DNA, 1138 bp, Homo Sapiens
taaggactaggtaagaggccggggtgtaaatcggcacgaggagaaggtgagctgatagaggacaggcacaggaagaacaacgagaaggcccaggaggcctctgtcctactgagagacaaccgggagctacagaacttcctccagaactgccaggagctcactctctggatcaacgacaagctgctgacatctcaggatgtctcctatgatgaagcacgaaaccttcacaataaatggctaaagcaccaggcgtttgtggcagagctggcttcccatgaagggtggctagagaacatcgatgcggaaggaaagcagctgatggatgagaagccccagtttacagccctggtgtcccaaaagctggaagccctgcaccggctctgggacgagctgcaggccaccacaaaggagaagacccagcacctctcggctgccaggagctccgacctgcgcttgcagacccatgctgacctcaacaagtggatcagcgccatggaggaccagctgcggtcagacgacccgcgcaaggacctgaccagtgtcaatcggatgtaggctaagctgaagcgagtggaggaccaagtgaatgtgcggaaagaggagctgggggagctgtagagcccaggtgccttcaatgggagaggagggaggagatgcagacttgagcatcgagaagcggttcctggacctcctggaacccctaggaaggaggaagaagcagctggaatcatccagaaccaagctgcagaaccagccgggacttcagaggatgagacgcccagggtacaggagaggctgcctctgggccaagccagcgaatatggcataaatctggaacatgggcaatggccagaagaggaaccgaacctgcacatgaaatctgggccatacgccggggatgaagaagttcgcgaagggccgcgctggaggagcagcggaaccgaggaaggagctgagtgagacatgggacagaagaaacgggaaggcggaaagacgcggaagacagaacggtgagaaagagcacatacggggcagggacagaagaacgagacgacgagagaaggagaggcagacaacaaagggcgagagacgaacagggagagagaacgaggaaccaccacacataaagaagaaagga

SEQ ID NO: 97448 - DNA, 1250 bp, Homo Sapiens
tccgctgctcgtctgctactgcatcccgctcggtgtctgcggcacgtggctggctatctccgcctgatcgtgtcggtgacgctgtgttggtcgtctttcgccgtatgcgagtgctgtctgttggttgctctagttgctgtctgcacggcgcggacgcttgtgtccatcggcgcccgcttgtctcccgttgtggcctgtttggttgggccctctctctttgaggtgggctcaccttactaggccgcacggttatacgcgtgcccttccggtggtttatccctccacgccttttccttcgcctcttccattgcccgccttggccgccttcagcttgaacgcttgagctttctgctgtcggatggggccctggcctgaccatgctcagattctgttcctagccccccttttgcccggagaggcctcttggccactggtcccagtgtcatccgtgatcgtcctgagccgggccctgcttctttgctggaatggagaacgtgagggcagtttcttgttgaactcaagcgggaagacacctacatctgccatcaaagcggttcttggacacctgcagataccgtttccctggcccggttaccagcttcctgtcctgcaggatcagaacattgtctgcttcctggcttgctttggctgagccaaaaatggacgctgtctgcagttccttgtcatcatcctctttccggggctgaatgaccagtgtcacatggcagttattgtctgttgcaaacttccgaaagaccccgatgatgtagtcttgagctgcgatcctgtctgtggacagctgctcgtgacccatcatgaactgcaggttgtcgatgatcacatgacaaatgtcatagacgtagactgcatgttgcattgtatctattacagtcctgatgctttgctgtccatggaaagtcatgaaatagaggggcaggtcctcaaagcggtcagcccagtgatcatatttgtccagttgatcttccagccgcccctcggcaaactgtgtcagcatgacccgggctagtctcacattgctgatctcgaagctaccccacagtgtgttcaccccctgggaacacaaatccagggcatactcactgatgaatgtcgtctttccactgcctgttggcccacttttatctctcccacttcgccggcaacgtgagtctcccgcacatgctactcgccttgacctccctcgtgccgaattcaacacccagccctcgctacctagccgtataacggtc

SEQ ID NO: 97449 - DNA, 944 bp, Homo Sapiens
acgacaaaccacaacgaaaaaaaactagcgtagtagagccggggttaatcggcacgaggcagcatccaccgggtcgggaggtcggaggcagcaaggccttaaaggctactgagtgcgccggccgttccgtgtccagaacctcccctactcctccgccttctcttccttggccgcccaccgccaagttccgactccggttttcgcctttgcaaagcctaaggaggaggttaggaacagccgcgcccccctccctgcggccgccgccccctgcctctcggctctgctccctgccgcgtgcgcctgggccgtgcgccccggcaggccccagccatgtcgatgctgccgtcgtttggctttacgcaggagcaagtggcgtgcgtgtgcgaggttctgcagcaaggcggaaacctggagcgcctgggcaggttcctgtggtcactgcccgcctgcgaccacctgcacaagaacgagagcgtactcaaggccaaggcggtggtcgccttccaccgcggcaacttccgtgagctctacaagatcctggagagccaccagttctcgcctcacaaccaccccaaactgcagcaactgtggctgaaggcgcattacgtggaggccgagaagctgcgcggccgacccctgggcgccgtgggcaaatatcgggtgcgccgaaaatttccactgccgcgcaccatctgggacggcgaggagaccagctactgcttcaaggagaagtcgaggggtgtcctgcgggagtggtacgcgcacaatccctacccatcgccgcgtgagaagcgggagctggccgaggccaccagcctcaccaccacccaggtcagcaactggtttaagaaccggaggcaaagagaccgggccgcgaaggccaggaaagggaggacaccgaaaacaaaaatcccccctccaaagaaaacaatctctccctggag

SEQ ID NO: 97450 - DNA, 922 bp, Homo Sapiens
tgtaaattggggcccatctgtatcggactcacagaggtacttatgaaattcgaagccagatatgccagagcaccatcttctgccagcaaagacaaactggcctctctgctggcctcagctggtgaactgcatggagctccttggcttccggagctgggcctgcggatcatcgtggtgttccacccccctccagccctgcagctgggaagcctcatgccacattcccaggcccccctcctctcggcctggctgtgaacagtcccccacctaccctggccctgctttgcctttctggggagaggggccaaatatgcagggcctccacaggggtcctcacagttccgggaaggcaggcagccctgacagcttccagctacagaccagccgggattcagacctgcccaggcccagggtctgtgaggagggagcaatagttgaccctggtcttggcaggggagaccaacaggggccctgagagggtcagtcccgccgggggcagcttgctgaggtatctccgattagggctttccctgatctttgtcttcctcccaccccgctttgtggggtaaagagcatcacagccccaaacgagaagaaggcgaatgatttaaaatgaagtctgtgcttgcgcctgccctgctatgtgtgtcctctgagctgggagtcacggggcagtacacagagtgtaaacgtgccagtgggatggcagggcacagctcatgtcaccggggaggcagcagggaggctggtgccgggatgcctcaggtcttctccaggttgccctttgtcctcagggactggcgtaggtgtctgagtccagccccaagcagccccccgggggtggtaggggagatgctccaggatgctccaggaattgtgtctcagcctcgtccgattaaaccaggctcgtactagctatgtg

SEQ ID NO: 97451 - DNA, 1232 bp, Homo Sapiens
  misc_feature (1086)..(1086): n is a, c, g, or t
  misc_feature (1114)..(1122): n is a, c, g, or t
  misc_feature (1169)..(1180): n is a, c, g, or t
atacggtaggtagcgaggctgggtgttaattcggcacgaggcgataccaggaacggcagaatagtccttatcagtggcagaagatccttctgtagtatattttcagtgctgccgtatcgcgacagtacccaagtcggggacttgaagttggacggaggaagacaatcaactggtgcagtgagtttgaaagagatcattggtctggaaggtgtggagctgggtgctgatgggaagactgtttcctatacccaatttctgttacccacaaatgcctttggagcccggagaaataccatagactccacctcctctttctcccagttccgtaacctgagccaccgcagcctctccataggccgggcaagcggcacccaggggagcctcgacacaggtagtgacctgggagactttatggactatgacccaaatctcttggatgacccccagtggccttgtggcaaacacaaacgcgttctgatcttcccttcctacatgacaacagtgattgactacgtgaagccctcggatctcaagaaggacatgaacgagaccttcaaggagaagtttcctcacattaagctgacactcagcaaaattaggagtctgaaacgagagatgcggaagcttgcgcaggaggactgtggccttgaggagcccacggtggccatggccttcgtctactttgaaaagctcgccctcaaggggaaactcaacaaacagaaccggaagctgtgtgctggggcatgtgtgctgttagcagccaaaattggaagtgacctcaaaaaacacgaagtcaagcatttaattgacaaactggaagagaagttccggctgaacaggcgagaactgattgcctttgaattcccggtgttagtggccttggaattcgccctccacttgcccgagcacgaagtcatgccccactacagacggctggtccagagttcctagcactggccccgaggaaagccaaggggcatttcttctcagcttggtggagcagcacttacttactactggaaatggaaaaaaggagaactcagaataccagacttttcttcctctccaaatagtttggggaaaaancgtactagaaacctttccaggagtcttnnnnnnnnnaacccagaagggggcctgacctatgggactcctcacacggggaaaannnnnnnnnnnnctttagaacagaaagggccctggccttctgtccactaaggggaaatccctag

SEQ ID NO: 97452 - DNA, 528 bp, Homo Sapiens
ggctccgggaccccgggagtgggagcggcagtcggggacgcctcaactcgttcactcagggaatcctgcccatcgccttctccaggccgacttcgcagaactactgctccctggagcagccaggccagggcggcagcaccagcgccttcgagcagctgcagaggtcccgacggcgcctcatctcccagagatcttccttggagaccctggaagatattgaggagaacgcccctctccggagatgtcgaactctctcaggttcacccagaccaaagaattttaagaagattcattttatcaagaacatgcggcaacacgataccaggaatggcagaatagtccttatcagtggcagaagatccttctgtagtatattttcagtgctgccgtatcgcgacagtacccaagtcgggtatgtatatgcatgcatgctttgtagttctctgggtgaaaagatctcacaccaatgtacataatgtggccatcctttccattttcaagaagttgccttgctttgatactgcaaat

SEQ ID NO: 97453 - DNA, 1201 bp, Homo Sapiens
  misc_feature (942)..(974): n is a, c, g, or t
aaacttacggctaggtacgaggctgggtttgaattcggcacgaggtgcgggagcgggaggcctctccgcagaccccaagctcagcctcatgccgtggttccacgggaagatctcgggccaggaggctgtccagcagctgcagcctcccgaggatgggctgttcctggtgcgggagtccgcgcgccaccccggcgactacgtcctgtgcgtgagctttggccgcgacgtcatccactaccgcgtgctgcaccgcgacggccacctcacaatcgatgaggccgtgttcttctgcaacctcatggacatggtggagaggccacccgggaacggaacaggatgctggggttcccctccctggggctgggctcatggctgtcccaccatcctgcagcattacagcaaggacaagggcgctatctgcaccaagctggtgagaccaaagcggaaacacgggaccaagtcggccgaggaggagctggccagggcgggctggttactgaacctgcagcatttgacattgggagcacagatcggagagggagagtttggagctgtcctgcagggtgagtacctggggcaaaaggtggccgtgaagaatatcaagtgtgatgtgacagcccaggccttcctggacgagacggccgtcatgacgaagatgcaacacgagaacctggtgcgtctcctgggcgtgatctgcaccaggggctgtacattgtcatggagcacgtgagcaaggggcaacctggtgaactttctgcgggacccggggtcgagccctccgtgaacaccggtcagctcctgaagtttctctgcacgttggccgaggcatggagtacctgggaaggccaagcttgtggaccgcggactgggggcgcaaaaccgggggtgttccaggagccgtgtgggacagcggccgaaattggccgggcgaaacacgcgcannnnnnnnnnnnnnnnnnnnnnnnnnnnnnnnnccggcgggcctacacaaggagggccacaaccccaaggctagcgtattgagggggccgccagcaggaaacaagaggcgacgcccaacaactacaagtgagcgagcgacggagatacaacagccgaggccggcacaagaggcacagtagccgagcaagaaagagtgcagacgaccgcacgagacaaagcacgccagagataccgaccaaccgcagcggaggcggagagg

SEQ ID NO: 97454 - DNA, 993 bp, Homo Sapiens
  misc_feature (809)..(839): n is a, c, g, or t
  misc_feature (976)..(976): n is a, c, g, or t
ggtttccgcttggtctcaaccagcttggggcagattgcgccccggtccctgcctgtaatgctccaacaaggtccatgaggttgcagaagaacacggcctcatcgattgtgaggtgccgttcgcggtgcagcacgcggtagtggatgaacgtcgcggccaaagctcacgcacaggacgtagtcgccgggttggcgcgcggactcccgcaccaggaacagcccatcctcgggaggctgcagctgctggacagcctcctggcccgagatcttcccgtggaaccacggcatgaggctgagcttggggtctgcggagagggcctcccgctcccgcagcgccccagctgccagcagcccctcctgtccactggtgtggtgcttgacgcggtaccagctcttgttctcgcaggcctccaggatggtgaccacgtcgcccttgcggaaggccagctcccctggcttggggcgggtgtgctcgcatttggtgatacactgggtgcccggggcccagcgcctcgttggcatcctggctgagacgggaggggggtgccaggctcggaggaagcgggggctcacccggggaagttcctcagcagaatcacagccgtgaaatgcccgccaggaaaccagagagcctcgccccgccatcgcccccagagggaaactgaggcaggtgagaggcacactgagcaagtggtcacagtcggggacgctagggaatggcctgccacaggccaggcggctggcacaggaggtagggagctgggtgccactggaccgagcctggttcttcctgttttctgctcagggggnnnnnnnnnnnnnnnnnnnnnnnnnnnnnnnaggagggcctccgcgagccggctgcacacccggaggcggtcccggctgcacaacttggagcgagttgctccgtttccatcccgaaaatcccgcaccttatccatcatcggtggggcagccctcgccgcgagaaaaanccgtcccacattgcctc

SEQ ID NO: 97455 - DNA, 923 bp, Homo Sapiens
  misc_feature (192)..(192): n is a, c, g, or t
ccggccacgagcttccgtagcctgcagagcagctctcctgggcagtccaggcacttttttcaggcgctccaggcagcttgatctcagactagaaagtgaggctgtctgttccaaaggaaaggccctgtaagaatctactttgtctaagagaagtgggggaggggaaggggccctttcagggcacccagatgntgtgaaagaggacggtttcactctgggcccttggcagacctgccttgggccccagtctggggctatttggcaccagctgttcaccccactagccactgcctcccttgtcccctgcctccattctgctgggggagggatgtcggcagtgacagtgacctgccacccttgagactcaagctttcttgccaggattcacagtgcacgtcacaagagagcaagagctgggctctggggatgtggacagatggaaaggacatgccccatgcctcgatccttttcagctcccacctgcccaggacccaaaggctggttggctttagcaccctgttttccacccaaatcaagagctgtcctgcacgtgaggaaatggcgagtgcaccccaccccgggcagcagcagagggcagagtgaccagccgtgtgcatgcccgtgcatgcccttcccgaaatgcggttcttgaaacatgtcttcagcacacgacgggcaaggccagggagtgcaggcagagggcctgacacacaaggcctcagttcaggcttccattcttggagaagtggaagaaggaggcccagccgggggaggaggggctccagagagaaaaaaatgaaaaagacagtccacatcacccgttcccacctggcctggagagctcagtctggggcactaggtgggagcgggctgccgggtcctggcatgccgactgcagcctcgtgccgattcaccccggctca

SEQ ID NO: 97456 - DNA, 1064 bp, Homo Sapiens
aaacgattaggctaggtacgaggccgggtgttgaattcggcacgaggcccagttacaaagagagaaatattcactggaacaagacattcgagaaaaggaagaggcaatcagacagaaaaccagcgaggtgcaggaattacaaaatgacctagaccgggaaacaagcagtttgcaggagctcgaggctcagaaacaggatgctcaagaccgcctggacgagatggaccagcagaaggccaagctccgagacatgctgagcgacgtccggcagaagtgccaggatgagactcagatgatctcatcactgaaaacgcaaatccaatctcaggaatctgacttaaagtcccaggaagacgatctgaaccgagccaagtcggagctgaaccgattgcagcaggaggaaacccagctggagcagagcattcaggctgggcgagtccagctggaaaccatcatcaagtccctgaagtcaacgcaagacgaaatcaaccaggcaaggagcaaactttcccagctgcatgaaagccgccaggaggcccacaggagcctggagcagtatgaccaggtgctcgatggagcccatggtgccagcctgaccgacctggccaacctgagcgaaggcgtctccctggcagagaggggcagttttggagccatggatgatcctttcaaaaataaagccttgttatttagcaacaacacgcaagagttgcatccggatcctttccagacagaagaccccttcaaatctgacccatttaaaggagctgaacccttcaaaggcgaccgttccagaatgacccttgtcgaacagcagacaattcaacagatccttgcggcgggccctttcaagaaagtgagccattccggggtctgcactgtagacttcttcagaacggacagaatgtgccttactcggatcctccgaaaacgttcttcttgaggtgacccctgatccggagccttatccccgggtctcaggaggagccttgggtgacctgcagggcgcgccactcgtgggtgtggtgtccacacttctggagcggcggctcgcgcacacgacg

SEQ ID NO: 97457 - DNA, 981 bp, Homo Sapiens
gctcctctaaatgcgcccatcgtccgtcttcgtgcccgtccacgccggcccttgccttggcctgtcccggcacgctctgagtccatggcctgtgacccgtccctcttcccttgcttccgctggccactcgggacagggaccagggcccagggctccaggagctccccagcaccatctcccacgatcacccttgactccacagccctatctttgccaggggccatcagcaccgggcttccctctcgtccaaggttcaccagcaggaccccgtcaggcacaggagacccccgggccaggaggacctcgtctccagatgctccaggagcacctgcttgccgggctcacccgacgggccaggcaagccagggaatcctctctcaccacgttgcccaggcagaccgacgatgcctctctgaccagccagaccctggggacctggtggaccttcggcaccagagggaccgtcatctccaggctctcccttctcgccagggggtccagcaggaccttggaggccgggttcaccagctcggccaggggggccgctgtctcctcgagcacctttgggaccatcttttccagaaggaccagggggaccagggggtccagggttgccattggagcctgggggtccaacgcggccagcagctccagggaatccagtggctcccggggggccttgggcacctcgggctcctttaggaccagtcactccagtaggaccctgaggcccaggtgctccagaggggccctgaggaccaggggcaccagcatcgcctttctggccggcctctccttgctcacccttggccccaggctggccatcagcaccaggaggcccagcaaatcccgctggcccggggggcccagtctctccacgttcacccggagcgccacgagcaccagcacttcctgcaggaccaaggaggtccaacttccctcgtgccgaattaaccacccagcctcagactaagccatatt

SEQ ID NO: 97458 - DNA, 1698 bp, Homo Sapiens
taggctaggtacgaggctgggtgttgaattcggcacgaggcgcccagctcgaaatcggagcggaacagcggggctgggagcggcggcggcggccccgggggagccggagggaagcgggcagcagggcggcggcgggagcacgtcctcaagcagctggagcgggtcaagatcagcggacagctctcccctcgcctcttccggaagctgcctccccgggtgtgcgtgtccctcaagaacattgtggatgaggacttcctctatgcaggacatatcttcctgggcttttccaaatgcggccgctacgtcctctcctacaccagcagcagtggggatgacgacttctccttctacatctaccatctgtactggtgggagttcaacgttcacagcaagctcaagctggtccggcaggttcggctattccaggacgaggagatctacagcgacctgtacctgaccgtatgcgagtggcccagcgacgcctccaaggtcatcgtcttcggcttcaacacccgctcggccaacgggatgctcatgaacatgatgatgatgagtgacgagaaccaccgtgacatctacgtcagcaccgtggccgtgccaccgccaggccgctgtgctgcttgccaggatgccagccgagcccacccaggagacccgaatgcacagtgcctacggcatggcttcatgctgcacaccaagtaccaggtggtctaccccttccccaccttccagcccgccttccagctcaagaaggaccaggtggtgctgctcaacaccagctactccctggtggcctgcgccgtctccgtccactcggcaggtgacaggagtttctgccaaatcctgtatgaccacagcacctgccgcctggcgccgtgcagcccgctgagcggggcgaggtgcgggatctcgccgaacattctggcctcagagaaggccgcagtaccgcatcatgtctgggctctcctgcaacgctcactcgaactagtggcaaagtgccatcagtgcaggtaagtgaggctgaactatgtcttacgaacggtcgaccaaacgaacgtccaacggcgaaggggatcacctgaaagaatgcacaggatcttgaccacatgatgacacacgaacggatccactcctaggggcacgacccgtaatgacacggagactgctaccacaaaggaagactccactagatgccactgataggattcgccacgaaagaaccaggcatccacgaccggggcgaaggaaagctaccacacacattggaccatacagagcatccagcatagcgtctggagcctacacgcaactaccaatgatgcagctaaataggaacaccagccataatcagacaccacaaggaccgtacatacacaatagaggcgctaccatgcgaaaacgaacaccgcgacacaacacccagggcggcacggagaagaaccaagagacgcagtacagaagacacctcccgaagaacagagacgcacaaaccacaaggaaactactacaccacacagcaccaccccaacacccagactagagacatcgacacacgcagaagaacccagaagcacgaccgagagagcggcacacaacgacctgccaggaggcaccaccgaatagccaacgcgaacagacaaagaggaacaaacagacaatgaaaacacaacgagagatcaccacaacaaacaccccaac

SEQ ID NO: 97459 - DNA, 262 bp, Homo Sapiens
catatggttggatctaacacatggaatcttgatgatgaccccaggagtacatgatgatcattttacacccaaggaacctgaggctcagagggtgctgtgacctgctgaaccacaccatctgaagggccagcctggtgctgaagcctccctaccagcttgagcttgctgtgaacgttgaactcccaccagtacagatggtagatgtagaaggagaagtcgtcatccccactgctgctggtgtaggagaggacgtagcggccgc

SEQ ID NO: 97460 - DNA, 1073 bp, Homo Sapiens
caggtgaggcctgtgtatcggcacgagggctacttgcgcgctgagatttccggcgtgggagcagaggtctgagtcttgcgtgggtcctctatagggtgagaagcgtggcgctcggttcctgcctcggggaagtcctggcgcagatgggccacggggccggcgtggcggcgcctgggaccgactgaggcctaggcgccggagccggccgcgcctgggctggagcggggctcctcgggcctggactgggagcccccggccccgggctcctgctggcgccgtccaaccttacatgggttcagggcgccttcgtaggcgggcacggctggtttcgggctaaggcgctctggagacctgacgatggcgtcgggcccgggctcccaggaacgggaagggctcctgatagtgaagctggaggaggactgcgcctggagccaggagctgcccccacctgacccaggaccgagccccgaggcctcccacttgcgcttcagacggttccgcttccaagaggcagctggtccccgtggaagccctcagccggctccaagagctttgccatgggtggcttcggcctgagatgcgcacgaaggagcagatcttggagctgctggtgttagagcagttcctgaccatcctgccccaggagatccagagcagggtgcaggagctgcatccggagagcggcgaagaagcggtgaccctggtggaggatatgcagagagagcttgggagactgagacaccaggtcacaaaccatgggcgggaaacagaaagtgcttattggaggaggcctttgcctctggaaacagcacgagagtcaacgagctccaagctggaggccaatggaaatgagcgaggcctggccaggtgagaatggtaggccaagcaccaaaggacccaggtggaaaggagaggataatggcccgggtacatttccgaaggctgagaaaggattatgccctcaaataaacgggagtataccacgaggggagagaataagcacacggagaaagaacaagcaaccgaaaagagagcacaaggcacaaaaaaacctacgcagatataactaaggg

SEQ ID NO: 97461 - DNA, 1012 bp, Homo Sapiens
  misc_feature (25)..(25): n is a, c, g, or t
  misc_feature (932)..(932): n is a, c, g, or t
ggcaggatcgaggccgggtgttaantcggcacgagggatgatgatagcaatatgtagtgtttctgtgtcaagttttggtgtgtattaactcttaatcttcacaataatcttattagatactattattatccccttttacaaacgaggacactgatgcacaaagatttgaaaacttacccaacgttacttagccagtaagtgatggagtcaagatttaggattcaaatctagatgttttggtttcagagcacttgcccaatcctgcctttctaaagtaagacaaatggtgtcagacaagtgccacattctagatttaatcaaggcacagagaagacagatgttgatcctgcctgaaggttttagggaaggttcctggagcaccctgctcttcagggccacccatcacctggccctccatccctttctgggactctttggagccctttctcccacacagtggcaggccatctccctgacggtcatcgagaaggtccagattgctgccatagttctgggctcgctcttcctggctgccagcatctcctggctcatctggtcctcactcagcccttcagccaagtggcaacgacaggatctgctctttcagatctgctacggcatgtatggcttcatggatgtcgtctgcataggcctcatcatccatgaaggctcctctgtctaccgcatcttcaagcgctggcaggcagtgaaccagcagtggaaggtcctaaaattatgacaagaccaagggacataggaggagatgcagggggagggaccgccagggaagttcaggccccaggaactcacggacgggcccccacctctggggccacgagccgcccccccagctgcccagcggcatgccggacgctcttggcttcagcgctgccggttatacaatctttgcacctcctttgggcagctgcggnccaccagatggcccgtttcagctcccattctggggcccaaaggttgtcctgaagggtcactaacagtcggaactggactc

SEQ ID NO: 97462 - DNA, 1382 bp, Homo Sapiens
gcagtaactactacggtttaaggtagcgaggcctgggtggcgaattcggcacgaggattcagaccagcccggctgtatccacggcaacagaagcaggagtgtcactgcgccgccagtatcactagagggtcccacaatgtggcccgggctgtgatttacctgggtgagacagcttgagccccatcgtggattccaagacatccctgctgagagagccaaggtgctaatgtagcaggacaactcatggagcccccccgggcccatcgagtaccggactggctgaccccctagggttggcagtagcccctgaccctcagtatggccaacactaccggagagcctgaggaggtgagcggcgctctgtccccaccgtccgcatcagcttatgtgaagctggtactgctaggactgattatgtgcgtgagcctggcgggtaacgccatcttgtccctgctggtgctcaaggagcgtgccctgcacaaggctccttactacttcctgctggacctgtgcctggccgatggcatacgctctgccgtctgcttcccctttgtgctggcttctgtgcgccacggctcttcatggaccttcagtgcactcagctgcaagattgtggcctttatggcccgtgctcttttgcttccatgcggccttcatgctgttctgcatcagcgtcacccgctacatggccatcgcccaccaccgattctacgccaagcgcatgacactctggcacatgcgcggcttgtcatctgccatggcctggacccttgtctgtggccatggccttcccaacctgtcttttgacgtgggcacctacaaaagttaatcgggaggaggaccagtgcatctttgagcatcgctacttcaaggccaatgacacgctgggcttcatgcttatgttggctgtgctcatggcagctacccatgctgtctacggcaagctgctcctcttcgagtatcgtcaccgccaagatgaagccagtgcagatggtgccagccatcagccagaactggacattccatggttcccgggggccaccggccaggctactgccaacctggatcgccggcttttggccgtgggcccataccaacaaccctgatgggtatccggcagcaatggggcattgcagccagccggcggctacttgggcatgggacgaggtccagggtgacaagcagttgggccgcatgtttctacgcgattcacactgctcttctgatcctctggtcaccctacatcgtggctggtaatgcgagtggtcgtgaaaaggctgttgtttgcccaacggtacctggcacggcgtggataattcgccagctgcgacaacaatggttgcttcggctaagactcaaatgctagatcagaccttggccga

SEQ ID NO: 97463 - DNA, 1472 bp, Homo Sapiens
actgggcttgaaagtcggcacgaggcggtgctggaggttgcggcggcggctgcggcgcagccccgggcggcgggtgggaagaggactaccagaggggcctgcgggagacccaggtcggacccataggagtcctgtcgtcaggacctccttgatcggtcttctgcttgggttctcggtgaaggaggagcttcgggtgttggctgggctgcgcggactcctcttgggatccgatgatggatcccacccggtgatcgggaatggggttacaatgcagtgaggcggaaaggctctcgccggggcacagaaagatccccagggccgcaaggcgtgctgtcgcctgcaaaggcactgacccacgagcccactgcctccctccttcctgggtggagcaggggcctgccttcatctccaaggcccgggggctccggcatctcgacgcggcttctggagacacgggcaaagagagacagaggctagtccgagccggagccagtgtgaccacacgtggcactgacgtcccccaagagcacatgcagtgagcctgtgtctctgaggccgtagtgggcgacgacgagacggacagtgatgtccaggcctgcgcccgggggccactggagacctgcccctcaaagcggaggaaacgccaagctcacctgaaaacctgcgagacagggcctgtgcacgagtccagtgctcctacttcgccaagtctcagggacccatccccgagcaacggtggcggcgcagagaagagcacggcgccggcgcaggtgcagagagacaggaggctgatggggggaagttgaggcacctggggcagagaaaaaaatgcattgccaagaggtttctgggtcatctactgacgaaaatgtcttcccatcagcccttgcgctggtccccagggaccctggcatccgtcgttggcgcccagggtgcgcgtcgggccactaggggtaccccaactcggacagaaggcccatgagttgaatttgaagtctgtgggaatagacggtgacggcaccaggggcagaaaaaaaacaggagacctcgcctcgtgacaagcggggcctggggtcccccatgggatgaaagtgcctaccattcatgcattaccctgggcagagtggacagttaacgacccatagtcgaagccacgggggcgctaccgggacagcaacgggggggaaccagaaaggtgaacaaatgggccactgagccggcagcggtcagggcacctgaagcgcgagaaacagtaacggaacgcggcggcgcagcacgcgactgcccgggcccccatcaaggaagggaaagtgggcgacgcatacgatgaaccccgagagggagggccgtgaagggtccggagagtgccggcgcactgaatccacagggagccaagaggaccgaaaagggtaacaccaagcaggcagacacgaccagaagcgggaagggacagcaccggagacacaaagaga

SEQ ID NO: 97464 - DNA, 848 bp, Homo Sapiens
  misc_feature (428)..(444): n is a, c, g, or t
  misc_feature (458)..(668): n is a, c, g, or t
actaggctggtacgaggctgggttggaattcggcacgaggtgggggcaggagacagcaaacataaaacctgtccctgaaaggggcaagatggccccgatggctccctgcacctgtcctggtgcctgcaggcaggcgggtcagctcccctcccgctgccaaatctcccacgtctctgtgcgctctgtcacccctgctttctggcctgagggctgggaagggaggtctggggagcccaggagctgagaagtacccaaaaaccacccccaacgccccccaaccctcaggcgtgcctgtgagtgtgtctgtgtgtctcactctgactcacccagacaactgacttcagcagccaaccttggtcattcccagaaccaccactggggggcatacgtgtggctagactgggggcgcccgaatatctgtctctacnnnnnnnnnnnnnnnnnttaatggggtgtgnnnnnnnnnnnnnnnnnnnnnnnnnnnnnnnnnnnnnnnnnnnnnnnnnnnnnnnnnnnnnnnnnnnnnnnnnnnnnnnnnnnnnnnnnnnnnnnnnnnnnnnnnnnnnnnnnnnnnnnnnnnnnnnnnnnnnnnnnnnnnnnnnnnnnnnnnnnnnnnnnnnnnnnnnnnnnnnnnnnnnnnnnnnnnnnnnnnnnnnnnnnnnnnnnnncccccgagggcactcataatgccgggtcgcgagaacaccagccggtcatgcgaactggggcccatggggcaatagcggttcctggcccccggttttcgtggacccacggggacaaccggcgggtcccctaatggggaggcgataaaattcagaaacgccgggacctgtagaggccccgcg

SEQ ID NO: 97465 - DNA, 897 bp, Homo Sapiens
cctgatcgcctggggctccgggcggctgggaccggcctggggtagctgcgcagcaggtgggtcgctcccgggtgcatgcagcgcgggggtcagagagcgaccccaacagggtagacggtctgtgggttctggcaccacctgagcccactgggcatctggtcatccctggcacctctcctttggagccaccttgtccctggctagacagtcacattttccagtgccgttttggaaagatgttgcctttggagaaggcgtttgcctcccccaggagctccccagccccgccggatctgcccacgccggggtcagcagccggagtccagcaggaagaacccgagaccatccctgagaggacccctgctgacctggagttctcccgcctgcgtttccgggaatttgtctaccaggaggctgccgggccccaccagaccctggcccggctgcatgagctgtgccgccagtggctgatgcctgaggcgcgctccaaggagcagatgctggagctgctggtgctggagcagttcctgggcatcctgcctgataaggtccggccctgggtggtggcacagtaccctgagagctgcaagaaggcagcctccctggtggagggcctcgctgatgtcctggaagagccagggatgctgctgggctcccctgcgggctcatcctcaattcttagcgatggagtgtacgagaggcacatggaccctctgctgctaccaggcgagctcgcgagccccagcaaggccttggagctggggagatccggcaccttctgagacaccctggcttactccggacccctggttctgggaacagaggacggtcagcagaagcaaagacgaagaggacggcctgcaaaacgagcagaagctgaagtcctttcagaggact

SEQ ID NO: 97466 - DNA, 1174 bp, Homo Sapiens
aaaaataggctaggtacgaggcctggtggtgaattcggcacgaggtctttaccctggaaaaggaactggagacccagacaggctatgtacagaaactccaacttcagaaggaggctttggacagaacaagctctttctggtcaaggaggctgagtgcaacatgagcagcccaaaacgagaaattccaggaagggcaggtgatggttccgaacactgcagcagtcctgatttgcgaagaaatcaaaagagaatagctgaattgaatgccacgtataagaaaattagaatgacaggaataccttgcttggagatgaacgaaatgaactgttaaaactgtgtgcgggaaaccgaaaagcaatgtaaacctctcctggaaaggaacaagtgcctcgaccaagagaaacgatgaactgatggtgtccttgcagcgcatggacagaaaaactaaaagccgttaccaaggaaaattcagaaatgagagaaaaaataacatcccatccacccctgaagaaattaagaatctctgaatgacctcgaccaagctaatgaagaacaagaaagcagagtttctaaaacgttcaggtcattgagcaacagaacattattgatgagctcacaagggaccgagaaaagctcatccgtagaagaaagcatagaagaagttccaagccaattaagagtttagcagctgaagaatctgaactaagatttcgacaattaacaaaagaatatcaggccctccaacagagcatatgacctcctacaggagcagacgggaggcatcatcgacgctgaacgagacgcaaggctcacgaaccagctcaagcagagggtgctaacggtataagccaaattgcagactggaagcgactcgggtcacgaagggccggattcaccacgggtcgaagattaccaactttcatcagagcaacccggagctttagaaagcatggaaaaacggggcgcgaaaaccacgggtaaccaggaactcaggacgcagaaaccaaagagagcatgagttcgaacccaagtcaaagacagcacgaactcccataatacgacgaaagcccaccaaagggggagacacaaacagtagaacagcgaagagaaacagcgacaagacagcattcgcgaggactacaacaaggcgaaccacgcgcaccacacacaacca

SEQ ID NO: 97467 - DNA, 1199 bp, Homo Sapiens
ttacggctaggtacgagactgggtgtgagaatcggcacgaggaagctactcagataatgaggcttccaagaggacatttttggatgtgaaaaacaatgagaaggaggacaacacacatttacaatcgtcttaattttgtactcagaaaaaggatgtgaagacaatgcacagggaatacaatagtttcagatctgtgtacagtttccttttgcttcatctcctgcaacaatgtaatgaagacaccatgatatcattaacatttcacacaaaaggaaaatgaggctgaaatggtgtgggcaaggcccaggaatctggagcatccctaaccaagcagcagagcacctgggatagagaaagtgctcaagaatgttcacttactgattactacaatcaaaaaaagatacgacactaatttaccacattcttcttacttattttatgagatactattcttccaaggtggagaaagtggagaaagtagagtgacgcagctaagggagtaaatcgaccctcagccaacaagtggcaaaagcctgaagaaagtgatcaagatcactgatgaccccgcggcccatctccaagggggcgggtatcacaaccccgacgccacaccacgtatcattccgcaaaactcccgcgcctcccacgcagaactggcaagagggaaggcgagacagcagtgaacagctggtacgcagcacccacagcaccgcggcagcagctagtgccgaatcccgctagctctttgactctgttcgcgggaagaatgggggaaacagtaaggttggggcgcctccgggagacgagggaactgaagctggccccgaagtccccgccgacaaaacggagttaaaccccattccgtggcaagtcacgccggagaccgggtgccgcgaaagggtgccccgcggtcggccctataaaagacgggccaatgaggtgtcgcgttttggttcaaaatcggggaacgaggggcggcttataaaacaattacatcgcggaggaacaagagctgttcacttgataagaagagggaaaagtgcgcctcatagtgaggagaccgactactatgtggagaagacaccacaccgcgcagagtggtggctgcgtcagtagctgagtgatgatgaggggacatcacatagcgagtctcgtgccaagttctaatttagattacaatcatataattagactccggt

SEQ ID NO: 97468 - DNA, 768 bp, Homo Sapiens
  misc_feature (65)..(65): n is a, c, g, or t
  misc_feature (648)..(648): n is a, c, g, or t
tccactaccacacacaggacagaaggacggatagacggataaggcaagttttcagcctgcggggnccgtggtgcccaccatcccagagtaggtacctggccagcccctggctctgtggaccagcacagggttggggtgggaagcctctgaccttcaacgtggagggaaagcatcttggactctacaagtctagatgtgatcaaccgccggctcagcaggaccatcgtctgggcatgaagatgtggccagcagtcctcctggagccctgtcctcagagaggtgctccaggagctgtgctcccttggcaccagggaggagcaggaaggaggagtatatagactctggcatggggctcacaggagaggggagtggctcaggttggaggtaagggcaccaggcagtgtgtggcttgggcagaggaatcaggaactcttggggggacctgcaggacccctgacccatggacagtgatgagaggagatttggataccagggacagatcgggtttggacatcatgaacaaagagaacatgagtggagaaaccacccccaaaagccacatgtggtgccagctcagctggggaggctcctgcagtgacttgggcccccacatcccatctgtctcacggcctgcactaggctaacggnctgcactgggctaacccagctggtaacaaatactccaaggccctgctttgatatacacgaagccatggtgttcaaaactgctataaatggggctttcttagggatggggtgctaaacagg

SEQ ID NO: 97469 - DNA, 1403 bp, Homo Sapiens
  misc_feature (486)..(544): n is a, c, g, or t
  misc_feature (770)..(830): n is a, c, g, or t
  misc_feature (948)..(1011): n is a, c, g, or t
  misc_feature (1217)..(1300): n is a, c, g, or t
caacaatagggctaggtagcgaggctgggtttgaattcggcacgagggcccgggttacacgttaaaaacactaaggggagcgcgcgaagctgaacttggcgctcgatgggggccgttagccgccctagagcgcgcggagccgcagaggcgtagctggactacaacgcagtgcatctcgggaggccaactcgactggactgggtgagaggacagaggtggctcgatgggcggcccgaaggccggggatcatggcgggaaggcgggcccagacaggttcagccccgccgcggaccacgacgagtcgagaacaacgaggagacggagcaacagcagtgacatggacagaaggagatgaagtaagcgagggagagaaagaggagcaggaacggaacaggcggaaagaagaccaatcatgcaccgagatggagaaaacatgaaacagatgagagaaaacgtggaacaggaaacaatgatagaacaggcacnnnnnnnnnnnnnnnnnnnnnnnnnnnnnnnnnnnnnnnnnnnnnnnnnnnnnnnnnnnggcacggagtgcacaggactgcaaatagacgacggagcaaagaaacacacaagaagccccaggacgaaagaagagtagacaccgaggacagcagcggggggaaagcaggaagaaaacaagaacgggacacccaggagggacggaggacaaaaggcaaccaagcagcacgcagaacattgtgaaaactataagggagtcccagaagaataacagagagcaaagtatnnnnnnnnnnnnnnnnnnnnnnnnnnnnnnnnnnnnnnnnnnnnnnnnnnnnnnnnnnnnntgaagcagaatgaattatgacacagaatgcaaaaaaggataggacaataagaaacaagagaaaaacgaaaacgtgaagggcagagaagacgggaggcacaaaactgcgaacacaatgnnnnnnnnnnnnnnnnnnnnnnnnnnnnnnnnnnnnnnnnnnnnnnnnnnnnnnnnnnnnnnnncggcaataccaagaggagagcagagtaaaaagaacaaacaaggagggcacagagagaaagagtgcggaacacactagaggaggaacgaggggcaaaagaggagcgaaaacacaagaaaaccaggagagaacgacagaaaggccaacaaacagagggggacagggggaggacggagaccagaggagcgggggaacgcaggaggaggnnnnnnnnnnnnnnnnnnnnnnnnnnnnnnnnnnnnnnnnnnnnnnnnnnnnnnnnnnnnnnnnnnnnnnnnnnnnnnnnnnnngcaaggcaggcgcgacaaaacagagagaacaacagcaaccgagcggaagacaggagaacagaagacagggacgaaggagggaacaaacacacagagagaaggg

SEQ ID NO: 97470 - DNA, 1136 bp, Homo Sapiens
ggggctaggacgaggctgggtggtgaattcggcacgaggtggaaggtggctgcggaacggttttaagcggaagatggaggagccggaggaaccggcggacagtgggcagtcgctggtcccggtttatatctatagtcccgagtatgtcagtatgtgtgactccctggccaagatccccaaacgggccagtatggtgcattcctttgattgaagcatatgcactgcataagcagatgaggatagttaagcctaaagtggcctccatggaggagatggccaccttccacactgatgcttatctgcagcatctccagaaggtcagccaagagggcgatgatgatcatccggactccatagaatatgggctaggttatgactgcccagccactgaagggatatttgactatgcagcagctataggaggggctacgatcacagctgcccaatgcctgattgacggaatgtgcaaagtagcaattaactggtctggagggtggcatcatgcaaagaaagatgaagcatctggtttttgttatctcaatgatgctgtcctgggaatattacgattgcgacggaaatttgagcgtattctctacgtggatttggatctgcaccatggagatggaacaggtgacgtgtctgatgttggcctagggaagggacggtactacagtgtaaatgtgcccattcaggatggcatacaagatgaaaaatattaccagatctgtgaaagtgtactaaaggaagtataccaagcctttaatcccaaagcaggggtcttacagctgggagctgacacaatagctggggatcccatggtgctcctttaacatgacctccagtggggaatggcaagtgtcttaagttcatccttcaatggaggtgggaacactcattttgggaggaggaggctataacttggcaacaaggtcatctggccatattgaaccgggtcacctagggaaaaatatctcgaaaccgaaacgaagttcccgtatgtccgatattgcgggaatcaccagggcgcaaacgaggccccgacaaaacctcatcaagatgctgtttcaaaaagttcacggggcaaacagttacggagggagaaaaaaagagggtgcccgacattcttctcgtaagtg

SEQ ID NO: 97471 - DNA, 1051 bp, Homo Sapiens
  misc_feature (907)..(907): n is a, c, g, or t
ccgaggtccgaaaaaagccagatctggaaggtggctgcggaacggttttaagcggaagatggaggagccggaggaaccggcggacagtgggcagtcgctggtcccggtttatatctatagtcccgagtatgtcagtatgtgtgactccctggccaagatccccaaacgggccagtatggtgcattctttgattgaagcatatgcactgcataagcaaatgaggatagttaagcctaaagtggcctccatggaggagatggccaccttccacactgatgcttatctgcagcatctccagaaggtcagccaagagggcgatgatgatcatccggactccatagaatatgggctaggttatgactgcccagccactgaagggatatttgactatgcagcagctataggaggggctacgatcacagctgcccaatgcctgattgacggaatgtgcaaagtagcaattaactggtctggagggtggcatcatgcaaagaaagatgaagcatctggtttttgttatctcaatgatgctgtcctgggaatattacgattgcgacggaaatttgagcgtattctctacgtggatttggatctgcaccatggagatggtgtagaagacgcattcagtttcacctcccaaagtcatgaccgtgtccctgcacaaattctccccaggatttctcccaggaacaggtgacgtgtctgatgttggcctagggaaggggacggtactacagttgtaaatggtgcccattcaggcatggcatacaagatgaaaaaatattaccagatctgtgaaagtgtactaaagggagtataccaagccctttatcccaaagcagtggtcttacagctgggagctgacacaatagctggggatcccatgtgctcctttacatgactccantgggaaatggcaagtgtctttagtacatcccttcatggcagttgcaacactcatttttgggaggaggaggctattaacttgcccaacacggctcgatgctggaactacttgaccgggggtcatcctagggaaaaaacctatccc

SEQ ID NO: 97472 - DNA, 1037 bp, Homo Sapiens
aaataggctagtacgaggctggtgttaattcggcacgaggccgaactcgggctgcgggctgttctggctctggcctccctctcctcctcttcctcttccttctgtcccctcccgcgttgcgcgcggggctcactttctgccgccggtggcgagtggctgaactcctaagtgaccaggaacagacgatttttaaccgagttctgctgcgtggagcccaggttggcgctagtgagtgcagtgtgctgacccaagtggtggtggcccaaggacgcgctgacccgtacatttggcaaagctttcattaaatgtatcagattctcgcggaagtggttgcagtccggagagtgaaacagctatctctcaagtcctgaccggttcagctgaaatctacatttgcactgaatctggcaaaacacggacgggtccgcccgagatctcaggaaacccagagcaagttacctccatgtagttgatcattctttctgaaaggacggacaccatttaccccactgcaatcctgtccaacgggcagctctgagtttagctttagcgccaaaggattgatttcccccacccgctggagatttactggggacgagcgggggaggggaggcgaaggtacctcggaggaggtcaagtgggggaggaggaggagcagcagaaaattaccagccaagcaggggagggagttggaagcccggaaatataccaggatgcctcaagtaaccttcctttaagtctcagaattcagccctcggaaaacagcctcataagtgtcctgggaaggagtcctcgggtgggctgcggaggtgatgtcacaattaccgtaattatgaataaacgaccgtaggctgtcggacgttaaggtaacgaagagggtagccggcacttaacaaggggcattggggactctccatattgtgtacggctggacgaaaactcaacaaagccaaaaaaataacacaagggagtcaccaaaaagaaagggggaaaacacacgacacaggaaacccacaagcactatttccctcaattat

SEQ ID NO: 97473 - DNA, 991 bp, Homo Sapiens
  misc_feature (145)..(167): n is a, c, g, or t
  misc_feature (865)..(865): n is a, c, g, or t
tacctcttttcctcattggcccacagagagtggagttggcctagctcttgacgcgtcccctctggtatccccaatgtgccccctccattaggggctccaggtgggctccagcccacacttgctctctgcctctgctgacacgtgnnnnnnnnnnnnnnnnnnnnnnntgctcctctctgcctgctttcccctggagtcccatgccctgccccatccagacactgcccaaggcccacccgtctatttccacctcattccccctttaagctgagaatggggtctgcctatagaagcttccagagacagctgagactgggtccccggtgcctccaccctaggatctcaggcctgctgatagaggcatttcctgtccctgtctcctcctgcatctcctttatcctgcactgccaccctctattccccattctgtgttggactttgaaggccccaagcccagccaaagcactgagttcccccttaagacacctccagcaccctcccacacaagcaaagcacaaattttggggtccatgtagcatgggccacgtaggaggctcctgacttgccaggggcccagcctcagcatacccaccgagcagctgccagcctgggctgagggtgggcatgaggcaggagtcagcacttggacctagggatgtgaggttttctgtgccccaagtttgtggcaaggtgggcactactgctgggcccacagacacagccagctggcaaaagggaggtctagcccagcagagagatgaggacattttgcttctccttcatgcccacagcatgagctgagcttctgctttgctggaaatgaaataaacttggtatgaattgtgccaaggcctccccagttgtnatcctgcctcttgttgccctccctgtccttgccccccaccccacacccatgcccctgtttccttacagattttgatattgttctaatgtgtaatagaaccagccgagtccccttttatcagaaggg

SEQ ID NO: 97474 - DNA, 908 bp, Homo Sapiens
  misc_feature (406)..(406): n is a, c, g, or t
taggacggtgtgatcggcacgaggctgactctcagcccgcgcctgggctaagcctggctaggagccgcgcaggtactcgagcagtgggcgcccagggtccgagggctctgcgcccagcgcaccgagggagccaaggccgtcgggccggcgcatttcagctgtctctcgcagcagctcagggccgcgccccctgggctggcgtcgtgccctagccaaggagaaggtgggcaccggaacgtggccgcagcgcttatctgtgaagcaagtattaaacctcagaacaggggccgcgcggcgtaaggcaggagagcagagcggaggtttcacgggagcttcgtttgccctccacactcacaagatggtcacgcgttagttgctacacagactttatctgttccacgccttngattggcactcctggggtaataaaagcccgcaggaaatgcttgggaagaaaacgttgctggggatgaacacgtgaagagaattagggagagtcgatgacagaaggaagtctgaaccataaaaggaccaataaaactcactgtctctaccctccttccttcccatgcagacctttgaccttttgccttttctacttcttcctcagtttcagtcacgtgccagactttagtcttaattacaaactgatagatggtccaccatctcaactaacagtattgacgctgtaagagcatcagattcgaaacatatctgtattaatgaagagttgactgcgatgcaagcgacaatatgtcagggaaacgaaacaagatccatagagctgttcatgctgtacagctggtaaagttgtgcccaagggtcgacatcacgtggcttaggacactagtagaaattagtgggaccggtagcccagtgttgggccggattgcaccttacagcgagac

SEQ ID NO: 97475 - DNA, 1453 bp, Homo Sapiens
ttgcttttcgcctgctctcgcccgcggttgttatgggaggatggtggattgcgggcccacgggaaggtcgcctatttttctcgttgggcccgcccattgctgtatcttacctcgaggtagaggacgccgtggcccaggacgcgggtattttttatgacagattcacgcccatattgaagaggtatttttttgtcatagtgtatacccccatataaagcccacatttctcaatagaatgatagagcgtacagtgttttgtgcgcagagagaatgtgagatctttgtaaagggggagatcccgatttagaatggccaccgggcgggtgagagtgtgtctatcgattcgacaccagaggtgtcgcgtccacaatggactcctgtgagatttctcatggagatgcctcacgatgtgggagttagcacgcgttgtgtttacacaaaagatttgaaacagagttactttttaatgtgctccgtgcagtgtcgataccctcaggtggttaaagagataaccttgacaagttttcaagggggtgttgccaactgagaaatttgtttgaccttggtattgcacgcatatgtggtgtgaacaaaggtctcctgggggtagggtctatgtaacggcaaaagcccccgttagccgttggttgcccataggggccaacgtggggagggggcaaacccaccagtttatatggtctattcccagttccccataaggggtcaggcttatactgagccagcatccagataagaagtctttgcatccgttagcagcatacatgtaacaatccaatgggcaatgcaccttgatttgatggtagattcgctgtctggggcttctatagattgagcaaattcagcggcagcaatcatcggtgtgtaacacagatcacgaactatattttcttacttagtgtcataaaagccaactttgaatatcgaaccattggggcacagacttttaccagctcgtccagaatgaaacatttctatgggatctttgtttctttcctgacatattgtcgtttgcatgcagtcactcttcattaatacagatatgtgtcaaatctgatgctcttgcagcgtcaatactgttagttgagatgtggaccatctatcagtttgtaattaagaaaaagtctggcacgtgactgaaacttctccttggctagggcacgacgccagcccagggggcgcggccctgagctgctgcgagagacagctgaaagcgccggcccgacggccttggctccctcggtgcgctgggcgcagagcactcggaccctgggcgcccactgctcgagtacctgcgcggctcctagccaggcttagcccaggcgcgggctgagagtcagttcgccagggcgcatctcggaacctcgcggggtcggtgcggtgtggtgcgttgggctgcgcgtgccgtcggtgacctttcttctctcactctcat

SEQ ID NO: 97476 - DNA, 872 bp, Homo Sapiens
tccttccccagcgggaagcctgtccttagaaccccacatctttcagttgagcccgccacgaaggaagaggtagtaaggtggaccctgtctaccgctgagttcagtctggtgccgcctggccaggctcgcctcgtacccagaccacttgtaggctccagggaccacacttcacttagcctgtcctctccaggtcttaggaccacagaggtttgcctgcatcgccaataacataaggactcttgatgtggaaagctacaattacaggctagcgcttgttgggaactgcctaagttgattcctgaggccacagcctggggagccgacacgaaatcacgcataagtcatccaccccagcctgtgctcgcttcttctgaggccagagaaacagtctcccatttctgtaactctctgtcctgggagaccaagccctagctgcctctgtctcccctctcattgagacagttttgtgccctctggacatggcagaggcctcactacagagggagtgggttggggggtttctcagtgtgggagacacagtgcaggagactcgagcagcagtggtgtgagcacgaaagccaagacagtgccgctaccataagtgctgccgtggggcctgggagggctaaaggacgtcggtctccctctcgatccccacgtacttgagagcatcagcttggctgtacctgtaatcaaagaagagctcttcgccagcttgaattgccctcttggcaaagatcccaatccgatggtctccattcaccatgaccactgcaagcaggataaacccgaggctaggttcctacccaactccaagtcaataaccagtaggcttatgggttgattttctccaaattcccagtgaaaacatg

SEQ ID NO: 97477 - DNA, 1140 bp, Homo Sapiens
gtcaagtcagcaagatctccgttggtagctatgatgcccgcaatgaatgttcgctcaccaagagtagtgcttcgtcttatcatcatggtacagcatgaaccacctagcacacagaaagatgaccacacaagcctccggcaaggacccctcccagcacctctttcctgtccaggaggccctgtgaggcccccgtggccccctgatccactggggactggttccggcggtcaggctccacggccactacagccgtattctcccccgaggtttcaaaggtgaagtcctgctccccagagccctctgctgctgggagctgactggaggctccatcctcagcagccctctcggtggcagaaggacctccatcctctgtgtggggagtgtgaaggtcagcttggctgggtcctgcaggggttgaggtctcatggtggccaggctgcatgtccctgtgggggtgggaggtggcgggctcctgggccgtggtggctgtggtcgttgaggcctgatgagtggtcgggagctgtgtggtctccctgggtcggggggtggcctcctgctcccgggcggtgaggccaggctccacttctggcaggactacagcctctccctccttgggcccctctccagccggcagggtggaggtggaggcagctgtagcctccaggccggtgggttctggagacgtgggaatagccgtcaggagctgcgtgtccttccaagtggagggggtctgctgtgacaaggtgatatcttgcaaagcacctgcacctgagccggagaagttgtcagagtcatccccagagccatcttgatcttcagggggcaaattagtagccacaatttgcggcagggccggctgcaggctcagcgccagcgcgcacagccagagccagagcgccgcgcgcctcatgctgcccggaccggcggcgggagagcggcaggctgcgcgggtcgcggctgcgggccggcttcgcgggttccgctgctcgatgctctcttgggcgcctgcccagcgcgccgctgtcccaggcgagggctgcagggtccgccggctggagtccgctctctactgccggattcctctccgctcggctcggattcggcccgcacctctcccgccgagctccgccttataataaa

SEQ ID NO: 97478 - DNA, 972 bp, Homo Sapiens
aactttcggcacgatagggactttgcgaccagcccttggttgacgcaccaacaaatttcccggaactcaggggctcccagagggcccagattacttcaccacttctgccggaggcacactgggccgggcccacaacctgattccacgcccactccagcgtttacactttcttcccctctcccacccagaggggttaaatgcctggttacttgaagttcccaaggccagcttccaatcaaatgcgtgagaaatgatacatgggatataagctgtctaccagcgcaattaaggtgagcactgtgtctcctcttcaaaggtgggatcaacagatgaggtacagagctgctgttgctatggcatgtcactgatgacaaagccagggccatgggggccctgtgccattctccaaacaataaaatcactcctagatcctatctaaaaggcaatgccactctccaaatgtacaaggaaagtgcttcagagcctctgccttgcgctccttttctgcaagtgaacaaagccaggaaagctgctctctgcattcggtaagtgtgctgtgaagttctttgggtcccagtctcctgggggctctataggctcaggagactagaggctgggtctacaggagtctgttcccaggaggcaccaggaatctgaatctaagtcaggctttggatccatttccatctcttcctttgctgtctgagttcctttggaatgcatccccacctgctgccctccttctaatttcttgttcaacttctgcagttgggtaaaaatctggaggttttcttgctgtagcttctgttgttcagccagacactttaacaccagaccctgcaatctctcaacctccacctgcagagagctgcacgcacacgcaggaggagtcagtggtgatcccttcccagcaccctcgtgccgaattcgccacccaggcctcgctaccttagaaccgtatgggttactgca

SEQ ID NO: 97479 - DNA, 1610 bp, Homo Sapiens
gggatctgggggcggcctgggggagcagccttagtgtcttcctgctgatgcaatccgctaggtcgcgagtctccgccgcgagagggccggtctgcaatccagcccgccacgtgtactcgccgccgcctcgggcactgccccaggtcttgctgcagccgggaccgcgctctgcagccgcagacccggtccacacggccaggggctacgacccttgggatttgccctccgctcagctcgagcttccctcgtggccgacggaacaatgaaggattgcagtaacggatgctccgcagagtgtaccggagaaggaggatcaaaagaggtggtggggacttttaaggctaaagacctaatagtcacaccagctaccattttaaaggaaaaaccagaccccaataatctggtttttggaactgtgttcacggatcatatgctgacggtggagtggtcctcagagtttggatgggagaaacctcatatcaagcctcttcagaacctgtcattgcaccctggctcatcagctttgcactatgcagtggaattatttgaaggattgaaggcatttcgagaagtagataataaaattcgactgtttcagccaaaccctcaacatggatagaatgtatcgctctgctgtgagggcaactctgccggtatttggacaaagaagagctcttagagtgtattcaacagctttgtgaaatttggatcaagaatgggtcccatattcaacatctggctagtctggatattcgtcctacattcattgggaactgagccttctcttggagtcaagaagcctaccaaagccctgctctttgtactcttgagcccagtgggaccttatttttcaagtggaacctttacatccagtgtccctgtgggccaatccaaagtatgtaagagcctggaaaggtggaactgggaactgcaagatggaagggaattacggctcatctctttttgcccaatgtgaagcagtagataatgggttgtcagcaggtcctgtggctctatggagaggaccatcagatcactgaagtgggaactatgaatctttttctttactggataaatgaagatggagaagaagaactggcaactcctccactagatggcatcattcttccaggagtgacaaggcggtgcattctggacctggcacatcagtggggtgaatttaaggtgtcagagagatacctcaccatggatgacttgacaacagccctggaggggaacagagtgagagagatgtttggctctggtacagcctgtgttgtttgcccagtttctgatatactgtacaaaggcgagacaatacacattccaactatggagaatggtcctaagctggcaagccgcatcttgagcaaattaactgatatccagtatggaagagaagagagcgactggacaattgtgctatcctgaatggaaaatagaggatacaatggaaaatagaggataccaactgtatgctactgggacagactgttgcatttgaattgtgatagatttctttggctacctgtgcataatgtagtttgtagtatcaatgtgttacaagagtgattgtttcttcatgccagagaaaataaattgcaatcatc

SEQ ID NO: 97480 - DNA, 815 bp, Homo Sapiens
tgggccagtaactataacggtcctaaggtagcgaggcctgggtggcgaattcggcacgagggcaggctgcctgcgtgggaggcgaagtcccaggacagcccagaggggggctacagagaggagtcggctgcagcagagggcaggagccccagcttagccctgagcgccagcgcgaggaccaggcctgccactaagcccgccccgctggccgccagctgcccgtccccagagccactgcagcaggagtcgggccctgcctccctcccagcagggaaaccccgcccgctgccaggccatcctctctgccagaggctttcatgagccccaaggctggggccacagctcctacccctgcccagcagccctgagctcagctgcaggaaggacatcccagaagccatggctcctggggcgcttccaggcattctgccctgccccgacaccagaaccctggtgctggtgggccactagcgtctgcagcctaagcaggtgctggctcagggttcatcgttctgccttgtccactgggggaccagccctgcagaccactctgacaagtcttcagcccacaccctgccagccccacagattttatttttgcacataagccataaccaatcctcaaggctggcacaggctttggggaagcctggagcctgtgaagaccctggaaacctcatgaggctgtggcaaaccctggccccttgcccaacagaccaggccttaaatgtcggtccaggcctgttgcaccttaccccagagacagactctttttgtacagatttttggttacatacaaacacgtgaaaactttc

SEQ ID NO: 97481 - DNA, 814 bp, Homo Sapiens
  misc_feature (770)..(770): n is a, c, g, or t
ggctaggtacgaggctggcgtgttgaattcggcacgaggtcgacatggcggtgcagccgaaggagacgctgcagttggagagcgcggccgaggtcggcttcgtgcgcttctttcaggccatgccggagaagccgaccaccacagtgcgccttttcgaccggggcgacttctatacggcgcacggcgaggacgcgctgctggccgcccgggaggtgttcaagacccaggggtgatcaagtacatggggccggcaggagcaaagaatctgcagagtgttgtgcttagtaaaatgaattttgaatcttttgtaaaagatcttcttctggttcgtcagtatagagttgaagtttataagaatagagctggaaataaggcatccaaggagaatgattggtatttggcatataaggcttctcctggcaatctctctcagtttgaagacattctctttggtaacaatgatatgtcagcttccattggtgttgtgggtgttaaaatgtccgcagttgatggccagagacaggttggagttgggtatgtggattccatacagaggaaactaggactgtgtgaattccctgataatgatcagttctccaatcttgaggctctcctcatccagattggaccaaaggaatgtgttttacccggaggagagactgctggagacatggggaaactgagacagataattcaaagaggaggaattctgatcacagaaagaaaaaaagctgacttttccacaaaagacatttatcaggacctcaacncggttgttgaaaggcaaaaagggagagcagatgaatagtgctga

SEQ ID NO: 97482 - DNA, 973 bp, Homo Sapiens
aagctagtacgaggctggggttgaaatcggcacgaggtaccgcagcacatagctcaagatttcctcacatggatggacctccaggccccccagatggtgccacagtgcccctggaggggttcagcttataccaggctgctgacctggctaaacaagggcccgaagtgggagaagagccatgccgaaattgcagaacaggccaagcatgaggccgagatcgagactcggattgctgagctgcggaaggagggtttctggtcactgaagaggctgcctaaggtgccagagccccctcgccccaaaggtcactggagactatttgtgcgaagagatgcagtggctctctgctgactttgctcaggagcgccgttggaaacggggtgtggcccggaaggtggtgcgcatggtgatccggcaccacgaggagcagcggcagaaagaggaacgggcccggagggaggagcaggccaagctgcgtcgaattgcttccaccatggccaaggatgtcaggcagttctggagcaatgtggagaaggtggtgcaattcaagcaacagtcccggcttgaggaaaagcgcaaaaaagccctggacctgcatttggacttcattgtggggcaaactgaaaagtactcggaccttctgtctcagagcctcaacaagccattaacctccagcaaagcaggctcttcccctttgcctcggcgtcttccatcagtctgccgtccagtcctccaccccctgcttctcgcctggatgatgaagatgggggactttcaagcccaagaggatgagggaacgaggatgatgaggaaacgaatgaagttgaagaacaacaggaagccatgatgcagagggccagagcgtgaaattgagctgttcggcgtgagggacatgccctggaagagctgtcgtcctttccctcaatgtgaagggttcaagctttaaaccttaatagataggacccgaaggcta

SEQ ID NO: 97483 - DNA, 1058 bp, Homo Sapiens
ggctagtacgaggcctgggctgttgaattcggcacgaggcacggaccggccctgcccaacgggccactcctggtacaaatggagccactgacgacagcaagaccaacctcatcgtcaactacctgccccagaacatgacccaggatgagttcaagagtctcttcggcagcattggcgacatcgagtcctgcaagttggttcgggacaagatcacagggcagagccttggctacgggtttgtgaactattctgaccccaatgatgcagacaaagccatcaacaccctcaacggcctcaaattacagacgaagaccatcaaggtgtcctatgccagacccagttcagcatccatccgggatgctaacctgtacgtcagcgggctccccaagaccatgagccagaaagagatggagcagctcttctcccagtacggccgcatcatcacgtcccgcatcctggtggaccaggtcacaggtgtctctcggggtgtgggattcatccgctttgacaagaggattgaggccgaagaggctatcaaaggactgaatgggcagaagccgctgggcgcagctgagcccatcacagtcaagttcgcgaacaacccaagtcagaagacggggcaggcgctgctcacccacctcttaccagtcatccgcccggcgctacgcaggccccctacaccatcagacccagcgtttccggctggacaaatttgctcaacatggcctacggcgtcaagagtcccctgtcgctcatcgccaggttctcgccgaatcgccatcgatggtatgagcggctgtcgggcgtggcctgtcgggggcgcggggggcgccggctggtgcatctcggtgtacaactgtcaccggaggccagacgaaaacgtgctgtggcacctgttcgggctcttgggagcaggcaccaacgtcaggtcatccgtgattcaccacaaacagtgcaaggttcggttcggaccttaccatattaacagcggcatgccatcgcggctgaacgttatcgcttgggaacgcttcctgaagtcccttcagaccgcaacgcag

SEQ ID NO: 97484 - DNA, 1437 bp, Homo Sapiens
  misc_feature (539)..(580): n is a, c, g, or t
ggggcctaagggcaaaccgggggaatgggaaacccttgcctggcacgcatagggtccccggcctcatggcgcctgaacaccctctgagcctccttggagctcttgggtgggcccctcggcctctataggtgacccaagagttcctcccacctggcgtggctaaagaagaaccccgatccacggccgggcacccgtgggctcacaccccataatgccccgcacctttggaaaggctgaaggcgggtgaaatcaccccgaggaatcacaggaagttcgaggagccacacgctgggcccaacacatggccaaagccccgtctcttatcgttaagaacacccacaaaatttgcccgggcacatggtggcacagaatgcccggaaatcccacgctaaccttgagagggcccaggccacggaggaaattgctctgaaaacctcgggagggcgcgagggttgcacggtgaggctcgaggagtcgcacactactgcacactccacggcctcgggggaacacgagagtaaagagccccaacttctccnnnnnnnnnnnnnnnnnnnnnnnnnnnnnnnnnnnnnnnnnncagattcatttgaaaaggtctaaagctgccctctggcccaggctggatggaggagcaacatggcaggatcccctctctaccacactcaggtttcctcgaaaggggacgggcaggacagcttcctgggagaccacactcgtcctgctgtgtattgttctgccacagttctggggtcaccagggggtgggagtagcctctcccaacatctcagaggctgagtccaggtcctaaggcccccccagggtgcagagacctcaccccctgggtcagaaatcgctgaggatgctgatgtcagcaaagtcagcccggtagcggtgggcatagaggctgagcaggaaggcccacttgaaggaaatgaagctccagacgctggagaggtagtagctggtggggtctgtgaggctctgatgccgggtgatggccagcacgaggaaggtgcagaaggcagcgatggagacggccgagaagaggacgcccacgaagaagaagccgcgcagccccttgagccaggtcctccaataatcttgcatgtacatcacgtgcgtcaccaggacccacagtgccagcacccctgcgagccctcccatggccgcggtccccggctgtcggtagaccaccgtccagacgaggaagatggagaagcccgccacggagctgatgccggagtaggcggcgcggaggccgagctgcagcctggacggggccatggggctgcggcgccgggcgggccgagggcgagcgcggccgagagtcacatggttccgacgcgtggtctactatatcccggtaatccgtagcgtaccagcctgctgtttaccatggttttttctcattgctttgtggtttgtgtttttttg

SEQ ID NO: 97485 - DNA, 941 bp, Homo Sapiens
ctaggcgaggcctggcgtgttatatcggacgagggcgggcgaaaatggcgtacatccagttggaaccattaaacgagggttttctttctagaatctctggtctgctgctgtgcagatggacctgccggcactgctgtcagaagtgctacgagtccagctgtgccagtcaagtgaggatgaagttgaaattctgggacctttccctgctcagacccctccctggctgatggccagccggagcagtgacaaggatggtgactctgtccacacggccagcgaagtcccgctgaccccacggaccaattccccggatggaagacgctcgtcctcagacacatccaagtctacatacagcctgacgcggaggatttcgagtcttgagtcaagacgtcccagctctccactcatcgatattaaacccatcgagtttggcgttctcagcgccaagaaggagcccatccaaccttcggtgctcagacggacctataaccccgacgactatttcaggaagttcgaaccccacctgtactccctcgactccaacagcgacgatgtggactctctgacagacgaggagatcctgtccaagtaccagctgggcatgctgcacttcagcactcagtacgaactgctgacaaacacctcaccgtgcgtgtgatcgaggccagggacctgccactcccatctcccacgatggtcgcgccaggacatggcgcatccaacgctacgtcagagatctgtctcctgccagaccagaagaactcaaagcagacgggtcaaacgcaagacccagaagcccggtttgaggagcgctacactttcgagatcccttcttggagcccagaggaggacctgttcctgacgtgggggattgtaagtctccgggactgtgtattgggagagtttgggcttgttaatgacggtaaaggcggcagggtaag

SEQ ID NO: 97486 - DNA, 916 bp, Homo Sapiens
tggctaggagaggtcgggggtgaatcggcacgaggggtgtctgagtcctgcctacagagtcgagtccacctcctaccaaaatctcatacaaaaacagcatctgctgccccgaagctggccagacattgcgaaagagggaagaatgataaagcagaattgcagatccaaaggaggtaaccatttctgaggcatctgagacacgttggaagtctgcactctggaaattatacacaaatgggcacactcatggacaagatgggaaaataaatgcctcaagaagctgcacagattgccccaagactctcaggaggtgctgctatcaccacagagcagcccgattgcggctggcgtgtgcctgagctggctgtccctctggccacatgtccggtgctacagggtcttcaagggtgtgtggggctgggcagcatccgccaggcccaggccccgggaactgaaggtgtttcctccacgtcagcctctgcacctcctaagcacacacctgctgcaggtgccgggagtcagtgcctgagacacctgaggacgcctcctccttgaaggctggagtcgactgactgcatcttgtactgattttgcggggatttctggtctttttttatccaatgcacgctggtccccgccgctgctggagtgaggctggttgtctctgagtgggctctgcaccctcacagcaggcatcctgacccctttctttcccactccaaggctcacatgctgggatcccgcaccacagacagccccgaggccggctcacaagaccagatggccagctcgccatttctactttcggtgtccaggagttttcctttgtcttaacttgttatgaggactgaagagtccatgaagactgatcagaactggcttgaagggtcctgggcaagaaaaagcaatcaagggg

SEQ ID NO: 97487 - DNA, 1275 bp, Homo Sapiens
ttacggctaggtagcgaggcctgggtggcgaattcggcacgaggggagaactgaaattctctggtgtatgttctagaagcaaagccatggcagaaatgtgtatggaatcggaggggaagaaaattgaaaggcagagaatgccagtcatgaactgtcattaccatgcccaacagcttgcagtctgcttgaggggaacatccaaaactatctgaagccccgggctgaaccaaggctctgctagacaatggtggtgtcctagaaggctcttgcatgaggtcttatgtctgaaaagaaaccctcggaaacccacattgagtctagtcttgcattgtcagcagtgaaacaaggcttcattctgcagaaaatatctgggaccttcaaagttcacaagtggatttgtctgctcaggggagagctaccaatcggttgcaaaggtatgttacagctctaagaagctgcatccatttgcctgtgaggatccatgagtttactggttactggttccagggaactccttcaaatgaactggtcgccatatgaattgatgctacacatttgagcgttgccgcagtcaggtgaattcaagctacagagaagaggcgattcacattgtttccttctggtcttgtattattcctccggctcaagaacctgccagagatggaatctccctatgttccccaggcatgatcttgaagtgtctgagctcaagcgatcctcctgccttgggcctcccaaagtgccaggattataggcgtgagccacgcatgcctgagcagagagcattttagtaagggataaaacagtgtaatgggcctcaaggctgaagtatgcaattatattccaaataaccaaagtgggtatatattgacgttgtcctgaagagacggacagaaaggttgactggttggctaccctaggagacacatggggggccgctaagggtaacctgggagcttacatgtaggcggggctggaacccatccttcttcgggacagaaggcacatttcccttacactggaaaacttacggtgcggcgagacatgtgaaaggagcgcaaaacagcgccaacacggacaggacatatcccgcacaacaagccgggcgaacaaacaagaggagcagagcgagctactcacaaggaggccagcaccacacacgaggtataagtaggacacacaagcaagaagcatacgggagtacaccacacgaagagcaaaacaattagcaacacaccacacgagttgtacatacaccagtcgcccatgccacga

SEQ ID NO: 97488 - DNA, 1016 bp, Homo Sapiens
atacgggctaggtacgaggctgggtggtgaattcggcacgaggctgagccccacagccaagctcttcaggatgttgaaaaggccatcatggtgtttgagcatacggggaacatcccagtcaccgtcatggaggccagcatattcaggaggccttactacgtgtcccacttcctccccgccctgctcacacctcgagtgctccccaaagtccctgactcccgtgtggcgtttatagagtctctgaagagagcagataaaatccccccatctctgtactccacctactgccaggcctgctctgctgctgaagagaagccagaagatgcagccctgggagtgagggcagaacccaactctgctgaggagcccctgggacagctcacagctgcactgggagagctgagagcctccatgacagaccccagccagcgtgatgttatatcggcacaggtggcagtgatttctgaaagactgagggctgtcctgggccacaatgaggatgacagcagcgttgagatatcaaagattcagctcagcatcaacacgccgagactggagccacgggaacacatggctgtggacctcctgctgacgtctttctgtcagaacctgatggctgcctccagtgtcgctcccccggagaggcagggtccctgggctgccctcttcgtgaggaccatgtgtggacgtgtgctccctgcagtgctcacccggctctgccagctgctccgtcaccaggcccgagcctgagtgccccacatgtgctggggttggtgcctggccgtgcacctgggtgagtccaggtctgcgctcccagaggtggatgtggtcctccttgaccggtgctggcttcctgtcctgcgcctctttgaaggctctgactgaggacaggggaatcctgttctctgctgaaattgcacgcgagcaatctaatcctctgcaggttctcccatagagaattggcagcggaatccggctataaaatacagtcacgtaaggttcagccacgccttggg

SEQ ID NO: 97489 - DNA, 783 bp, Homo Sapiens
catggccaccacggtgacctgcacccgcttcaccgacgagtaccagctctacgaggatattggcaagggggctttctctgtggtccgacgctgtgtcaagctctgcaccggccatgagtatgcagccaagatcatcaacaccaagaagctgtcagccagagatcaccagaagctggagagagaggctcggatctgccgccttctgaagcattccaacatcgtgcgtctccacgacagcatctccgaggagggcttccactacctggtcttcgatctggtcactgcgtggggagctctttgaagacattgtggcgagagagtactacagcgaggctgatgccagtcactgtatccagcagatcctggaggccgttctccattgtcaccaaatggcgggtcgtccacagagacctcaagccggagaacctgcgttctggccagcagagtgcaaaggggctgcagtgaagctggcagacttcggcctagctatcgaggtgcacgggggaccagcaggcatggtttggtttcgctggcacaccaggctacctgtcccctgaggtccttcgcaaagaggcgtatggcaagcctgtggacatctgggcactgtggggtgatccctgtccatcctgctcgtgggctacccaccctttctggggacgatgacccagcgccaagcttgtaccagcgatcaaggctggtgcctatgacttcccgtcccctgagtgggacaccggtcactcctgaaggccaaaactcttccaccacgatcttgaccatttaacc

SEQ ID NO: 97490 - DNA, 1006 bp, Homo Sapiens
gtgcccgcccgggcccccgcccctccggggcgccccgcccctcccctacgggacggccaagggaaacagtctcgaccagcagatcgattggcccaggagagaaggttcaatccggcttcagacccggggagaacagagtttgaatctgagggaactgggtcagccaggcttgaggtccatgggggaaccaggccgagtccagcgatggagattctggagccttggggactggctggggctctttcacaagtcacccagatccaagaagaggtcaagatcacagccatggacatcgaagctatttatggaagagccaaaagggtggaccacacagccagggaagaactctgtgaagacctcctgcatcagggccaccactaggctgcgaagctgccgctcggcctcggacaactccctcagccccacaagctttatcatttgtgcccccacgtctgcagcctcagctagcgctttggccagctggtgactgtcgggggccgctcctttgggggatttggaggccgggctctggaactccttctgctcccgtgggcggacacgcaggcgatgtcctcccaggctgtgctgggactgtgacaagacagcctctcgagcacccacgtcccccatctccacaatggcaaacactcccttgtccttgtccatgacaacactggccacaggtccaaatgctaggaagtactcagagagctgagcagaatccacatccctgggaaagccactgacaaacacacttcgaagtccctgggcctttctcgcagctcgtagttctaccaggtgccggtgctttctgcctcccaagtgggcatcaaggctgggtcggttggctgtagtaacgtggcagaggcagcagcggaaccccccacgcggcagcgattcgacatccgaatccaccgccgccatagcgactctcctgtaccgacaaaaacaccctcgtgccgattcaacaccaggcctcgtacctagccagtaggttgaacccctt

SEQ ID NO: 97491 - DNA, 1101 bp, Homo Sapiens
taggtcagtacgaggctgggtggtgaattcggcacgaggcaggccaggcaatggctttgacctgcatgagccactcttcatcctggaggagcatgagctgggagccatcacagaggagtcggccactgcctccccggaaagctcctctcccactgaggggcgcagcccggcccacctggcccgggagctgaaagagctggtgaaggagctgagcagcagtacccagggggagctggtggccccactgcacccccgcatcgtgcagctctcccacgtaatggacagccacgtgagcgagcgcgtcaagaacaaggtctaccagctggcccgccagtacagcctccggatcaagagcaacaagccagtgatggccaggccaccactgcagtgggaaaaggtggcccctgagagggatgggaagagccccactgtgccctgtctacaggaagaggctggagagccattaggtggcaaaggtaagaggaagccggtgctgtctctatttgactatgagcagctgatggcccaggagcacagccctcccaagccctcctcggctggggagatgtcaccacagcgtttcttcttcaacccgtctgctgtcagccagaggaccacctcgcctgggggccggccctccgcccggagccccctcagccccacagagaccttcagctggcccgacgtccgtgagctctgctccaagtatgcctcccgcgatgaggcacgccgagcagggggcggcggcccgcggccaccgtcaacaggagccactcggtgccggagaacatggtagagccacctctgtcgggcagggtggggccgatgccgaagctgagcaccaagaggggccggggcaggccggagagggtgccaatcccctgggctctgcccagagccaggcggatggaggcgagaccttgtatgtacttgagactcacctggaggaaacggggtgatggtctggggagggacccttccaaccatgcgggtggggaagcagggcaggaccactcacgggcccgtgggaggacgatcccagttgatcacaagaagtcggccgagaccggggaggactaaacgcgacacgggacggaaaag

SEQ ID NO: 97492 - DNA, 1477 bp, Homo Sapiens
gacaggcctgggtgttgaattcggcacgaggggaaactgagacccagaaaggtggaagcacttgtctaaggtcacgcctccaggaagcagtgtgtccacgactccagtccaagtggtcaggctccagagcccacagtcccagatcagcctgtcctcggggaccctgcttctgctgctgggtgtggcggctctgaccactggctatgcagtgccccccaagctggatgggcatcggtgagggtgagttcctggtgttggatcagcgggcagccgactacaaccaggccctgggcacctgtcgcctggcaggcacagcgctctgtgtggcagctggagttctgctcgccatctgcctcttctgggccatgataggctggctgagccaggacaccaaggcagagcccttggaccccgaagccgacagccacgtggaggtcttcggggatgagccagagcagcagttgtcacccattttccgcaatgccagtggccagtcatggttctcgccacccgccagcccctttgggcaatcttctgtgcagactatccagcccaagagggactcctgagctgcccacatggcctaagatgtgggtcctggatccttccccccttctcaccataaccccctctcagtgtttccccaacttctcccttttagcagggtccctttagagcccaactccaggtcaaatctggagctcaaatcccagtgctccctccccaggagtggggccccaactcttccaagataccagcattcctcaagtcctcccaaaacttcctacccacaccctcttcccaaggccctcaggggcagaaaaaatctccttcaacccgtccccaatccttcctctgcatgaccttgggcaaaacccttgccctttcaagccatcagctcctgcctctctgccatgagggcttggatcagattcctcttctcgccaggatgaggacacgcactgccctccatagacacagatgaaggggtgggggtcattcagctcgaatgggtcccagatgctcacttggcctttccctgcaggatgagtgaagacgtttgcctctcacagtgtgtcttctacctgcatttggcatcaggaagccccccagccacccacacaggcattactagccctagttgataggtgaggtgggtgaagaaggttggaggtgacatgtccgaggtcacacaacaaagcagcatgcagaactagaaaacacatcttcagcctctcctgggcagctcttgtgctacaggtggggggagccagcctcacttctggtcctgaggtctcaggtggagaagtggccgaagatagcagagctgaggccagggcgaaactggtagggaaagccaaaacggtaggcgaaggggtgcccaagccacaaaacccgtgggcgaaaaggctaaggccccccagggggcacgcaaggcaggacagagcccaacaaccaagggcgcgagggccaccag

SEQ ID NO: 97493 - DNA, 897 bp, Homo Sapiens
  misc_feature (809)..(809): n is a, c, g, or t
ggggaaaaccgggccagtaactataacggtcctaaggtagcgaggcctgggtggcgaattcggcacgaggcagcaggcagagagatgaggaaactgagacccagaaaggtggaagcacttgtctaaggtcacgcctccaggaagcagtgtgtccacgactccagtccaagtggtcaggctccagagcccacagtcccaggggtccatgatgccgagctgcaatcgttcctgcagctgcagccgcggccccagcgtggaggatggcaagtggtatggggtccgctcctacctgcacctcttctatgaggactgtgcaggcactgctctcagcgacgaccctgagggacctccggtcctgtgcccccgccggccctggccctcactgtgttggaagatcagcctgtcctcggggaccctgcttctgctgctgggtgtggcggctctgaccactggctatgcagtgccccccaagctggagggcatcggtgagggtgagttcctggtgttggatcagcgggcagccgactacaaccaggccctgggcacctgtcgcctggcaggcacagcgctctgtgtggcagctggagttctgctcgccatctgcctcttctgggccatgataggctggctgagccaggacaccaaggcagagcccttggaccccgaagccgacagccacggtggaggtcttcggggatgagccagagcagcagttgtcacccattttccgcaatgccagtggcaagtcatggttctcgccacccgccagcccctttggggcaatcttctgtgcagactatccagcccangagggactcctgagctgccacatggcctaagatgtgggtcctggatcttccccttctcaccatacccctctcagtgtttcccacttct

SEQ ID NO: 97494 - DNA, 985 bp, Homo Sapiens
ggtatctccccgcgggaccccacaaccctttccagcgccagcccccttgaggccattttcggttcttgtatacctaaaggccccgttcccacaacccgcagacacccccagttaacccccccgacccgactgggggactgaacactggcagggcccattaccatccagcccccacctgcttcctatcagccccggcagttcaagtctcccgcacagagactggctcatggaacctgctgagccatttcccatgtctaaatccacgtgggcctctgatttttggattcacgtcatccatgaattgcctgtgagtcagatatcaatgacctgtccagggcaacagccctgtggatggtggatggtaaagtcctgggctgccaagccccaggcctggctggcttcttgctggcatcagctgatagctggaaaccgaggctggggtccccgaaggacatcccttcgggtgctgtgaggttagctgctcccacagcagccaccgagagagaggattgccaacttttcgtgcggtgtaaccttggcaatgcttcagtggtgtttcaccatagctcttcagatcccgacacccttacagtggagcaggctcctagcgacaacgagcaacttccaacaccatcctaaagcaaagccagtcccagatgaattcttctcatctcaatcagttttcatggcttgtggctttctgccggcagcagacagaggtagcagcacccccggtctgcgatcagagcctccccagtccccagtgagcaagtgcaacaggggccccgccctccagccgagcccttctgaagctcctgtgggctccctgggtttgggggtatccctctgctccaggaaaactcgtgaggaaggaccatgagcagctgccctgtcctggcctgggcaacgtgggtcacaatgcccttctgtcaccagaaagttttctcctgggtcctcgtgccgaattcaccccggcctcgatctg

SEQ ID NO: 97495 - DNA, 908 bp, Homo Sapiens
  misc_feature (56)..(56): n is a, c, g, or t
  misc_feature (78)..(78): n is a, c, g, or t
cccgttgcggctgggggggctccggggcccggggcgcgttcgcggaggggctcccncgccgagggagggagactaaancggagggacagaaggcgagaaaggtcccaagcaggaaaacgaggatgggggccccaggaagaacacctttctcccattggacccccaactggagcggcaggtggagaccattcgcaacctggtggactcatacgtggccatcatcaacaagtccatccgcgacctcatgccaaagaccatcatgcacctcatgatcaacaatacgaaggccttcatccaccacgagctgctggcctacctatactcctcggcagaccagagcagcctcatggaggagtcggctgaccaggcacagcggcgggacgacatgctgcgcatgtaccatgccctcaaggaggcgctcaacatcatcggtgacatcagcaccagcactgtgtccacgcctgtacccccgcctgtcgatgacacctggctccagagcgccagcagccacagccccactccacagcgccgaccggtgtccagcatacacccccctggccggcccccagcagtgaggggccccactccagggccccccctgattcctgttcccgtgggggcagcagcctccttctcggcgcccccaatcccatcccggcctggaccccagagcgtgtttgccaacagtgacctcttcccagccccgcctcagatcccatctcggccagttcggatccccccagggattcccccaggagtgcccagcagaagaccccctgctgcgcccagccggcccaccattatccgcccagccgagccatccctgctcgactaggcctcgaggggggcgtgctctcgggggggcctcacgccctcgtgccgaattcgccacccaggcctcgctacct

SEQ ID NO: 97496 - DNA, 1461 bp, Homo Sapiens
  misc_feature (48)..(48): n is a, c, g, or t
  misc_feature (83)..(83): n is a, c, g, or t
  misc_feature (111)..(111): n is a, c, g, or t
  misc_feature (193)..(193): n is a, c, g, or t
  misc_feature (319)..(369): n is a, c, g, or t
tgcccccagacccattggaagcttcctgcccccgtgggttgcgtgagncccccctccgagagcaacgcccccccttgaagtcntagtcgagcagggatggctcggctggcnggataatggtggcccggctgggcgcagcagggggtcttctgctgggcactcctgggggaatccctggggggatccgaactgnccgagatgggatctgaggcggggctgggaagaggtcactgttggcaaacacgctctggggtccaggccgggatgggattgggggcgccgagaaggaggctgctgcccccacgggaacaggaatcannnnnnnnnnnnnnnnnnnnnnnnnnnnnnnnnnnnnnnnnnnnnnnnnnntgtatgctggacaccggtcggcgctgtggagtggggctgtggctgctggcgctctggagccaggtgtcatcgacaggcgggggtacaggcgtggacacagtgctggtgctgatgtcaccgatgatgttgagcgcctccttgagggcatggtacatgcgcagcatgtcgtcccgccgctgtgcctggtcagccgactcctccatgaggctgctctggtctgccgaggagtataggtaggccagcagctcgtggtggatgaaggcccttcgtattggttgatcatgagggtgcatgatggtctttggcatgaggtcgcggatggacttgttgatgatggccacgtatgagtccaccaggttgcgaatggtctccacctgccgctccagttgggggtccatggagaaggtgttctcctgggccccatcctcgttttctgcctggtccttctcggggtagacgccagctcggaggaacgaggccttccagctgtccacgtcttcctgggagtcacaggccagctcgatctgccgcaggtccttgtagacgtttctctgctccgtgttgaagatggcgaagacgtgcttgttggacatgaagcccttctccacatcacggatcttgaggttgtccagaggcagcatgtacttcttctctttctcctcctcatccttgtaccaggacagtgactcggcagtcagcacaaccagtactccttggagccgcctttcatcaggctgatgttgttgatggtcagccagcccctgcggatcaccaggatctccccctgattggggatggctctcttcttgttcagctgcgtgctcctctgctgggcattggcaacccgatgaagtcctcatggttcgtgttgatgtaggactgctcatgtcgatcagcagaagaatctggtccttcgttctcccctcccgttcccggatgtaagtggtgacgattcgctctgtctcctctcgcaaccgggggtaggaactgagcttctcggcacacttttttatgaccgtgccagctctgagaccaccgagatctacacacttcaaactcggctcttgatcccgtactccgagccgtaccagc

SEQ ID NO: 97497 - DNA, 974 bp, Homo Sapiens
  misc_feature (680)..(774): n is a, c, g, or t
ctcgcgaacgtgttatccaacacagaggtgtcttcccgaaatctaccagtgggtacgcgatgaactgaaacgagcaggaatctcccaggcggtatttgcacgtgtggcttttaacagaactcagggcttgctttcagaaatcctccgaaaggaagaggaccccaagactgcatcccagtctttgctggtaaaccttcgggctatgcagaatttcttgcagttaccggaagctgaaagagaccgaatataccaggacgaaagggaaaggagcttgaatgctgcctcggccatgggtcctgcccccctcatcagcacaccacccagccgtcctccccaggtgaaaacagctactattgccactgaaaggaatgggaaaccagagaacaataccatgaacattaatgcttccatttatgatgagattcagcaggaaatgaagcgtgctaaagtgtctcaagcactgtttgcaaaggttgcagcaaccaaaagccagggatggttgtgcgagctgttacgctggaaagaagatccttctccagaaaacagaaccctgtgggagaacctctccatgatccgaaggttcctcagtcttcctcagccagaacgtgatgccatttatgaacaggagagcaacgcggtgcatcaccatggcgacaggccgcccacattatccatgtccnnnnnnnnnnnnnnnnnnnnnnnnnnnnnnnnnnnnnnnnnnnnnnnnnnnnnnnnnnnnnnnnnnnnnnnnnnnnnnnnnnnnnnnnnnnnnnngcctcggtcccccagggaaccaggggcctctcagcagagcagatgaggaaaccgaagagaccggcagaaaaaatcagtggagctgggatcccggagtccacagaaggggcgcctgagaaaaggctcaacctgtgccaggtgactccagacactagtttaacacgggtatagccggaagagaacggagggggaaaaagggg

SEQ ID NO: 97498 - DNA, 899 bp, Homo Sapiens
ggggacgtgtaggaaatagctgtgctggcaagaaccctgtcttcagatagttgtagcatgccattcccgagagtggcagagacctgtatatgtgacctttgtcctcacatatgttatcactcgctgataataccctttcatacttccttgactttgttttcattactctgatttcacaaaaactctttcattcggctaattgtgagttatggagggtgattgggatttcttttcccttttttgggaaatgggctctcaagctaaagctataggatggcagattcagaagtttcacgggtctgtctctatacatttgcctatgttaaaggggtaaaagggctctcttcattagacatgtggaagatgaagcagccccttcctttagagctgtgcctgcatggcactcttctcacccctggtacaccctccttatagtgggtatagtgatttttaaccctagaaataaaacaaacaacctcaccatgagctttaggaccagaagaggaatgacaagtgaagcgatgaaccaagccattcttcacagagtagaaaagacatcggagagttggcagataactgtctgaaaagacactttgttcatttgaaactattctgtgatacagtcatgtgggaagggatgtttggctgtgattattttttcagttaatggataacaatttctttactgctcaaaaaccaaaatctttggaaaagaaagtggggatggttagtttcagaacaagttacagctgtaaacaaaagcacttagtatttgggatggcatgccaaaacctgtataaatgtccttgtatcacatcacttctcaagtattccttcattgggcttcatccttttagcagaactcttggtggtgggatagagacttagggagggtaggg

SEQ ID NO: 97499 - DNA, 1035 bp, Homo Sapiens
  misc_feature (638)..(638): n is a, c, g, or t
  misc_feature (668)..(668): n is a, c, g, or t
gggcctgcggctgctgctggtctgactgggaagcagtaagccaccactacgaactctcaagaggagtgggagtgcgggagtccagagctgactctgggaagtctgcagtagttgagcaaaggggtcctcacgttcctgagagctgggcaggcgggattttggaacctggggcagccaagaacgagcagccaagggtacgggagattagttgtgcacagagcagtgctggtcgggcttgggggtggctggtgggcactgcgtgggaaaccttggtttgtagttttcttggtttgcgttactcctgttgggtagaattaccctccgcgcctttgtacaagacacggtgtctcctggggcaaggaaggagccaggatggcctgggctctgaagctgcctctggccgacgaagtgattgaatccgggttggtgcaggactttgatgctagcctgtccgggatcggccaggaactgggtgctggtgcctatagcatgagtgatgtccttgcattgcccatttttaacgcaagaagagtcgagtttgcctcctgataatgagaaaaaaatcctgccttttcaatatgtgctttgtgctgctacctctccagcagtgaaactccaggatgaaaccctaacgtatnctcaatcaaggacagtcttatgaaattcgnaatgctagacaataggaaaactgggagaacttcccagaaaataatggcaaattgggtgaagagtatatttcccgttgtggtggtttccattgaacagaaaggctttcagtaaccactgagcattaaggcatgttaaagggcttgaagggtgaacactaccttggacgccagtagttcttgacgtagattatcccgatgtcggggggattaaccgatcctaggggtaaaccaatcacataaataccgtggagtcccgtgcgacctcgccaaggagcgctccggttatcagggcgtggatacgcgagtcactagacgccggggcaaacggtgtgttcgtaagaaacgttcacgggaacaggaaattaga

SEQ ID NO: 97500 - DNA, 955 bp, Homo Sapiens
gccacggtttgggccggaagggcccaacaacgaactcagagtggcttgacaccccccaggcgtgctccggttatttttttcggctccttcccgccctggacccggggttcatcctcgtcttctcgtcgtcatcgggccagcgcctcgattttcgtgcgtgatgtcaccacagccggtggaggcctgtgccttcggccgctgcgccgcgcccatcgtagctgcgcactgcggagccgacgtgggagctcatgctgcgcttgatgcggccgaagctgtcagtgagatccgcctcgcggatgcccacgccctccaggaagccctcgaagtagccgatgtcctggtccgggatgaagggccgcatcccaaggaggaggaacttgcgccggtctccgtagagcttcagcaggcctgtgcaatagtcctggatgggcagccccagccggtactcccgcagcagcatcgcaaactgctggatctcgaggggccccagcttactccgcaacgtgaccatgtaatcctgtaactgctccaagcccagactgctgtgatcgctgccgctgcagtgggagccatggaaagaaggtgtggacgtgccgctgtaacatgcttcaaaggtgtcctgggagccattaaaggagctgcagcagctgaagtcggcatcataggcatacgtcccatctgtgtggcagctctcactgcggctgcagagccatggccgttcaggtgtggatgtgtagtggtagccagcccggtccacacactcaatactctggtccccgtagatgatctggaagacctgacagatgagtgcgcaggactcctctgcagcgtccctgttggctacagccaggatgaccaggttgcagtaggcgtcggggctggggtcctgcggtcgagcggattgggccgggtgcctcgtgccgattcaaacaacccagcctcgtactagccgtaa

SEQ ID NO: 97501 - DNA, 1009 bp, Homo Sapiens
taggtgaggctgggtttattggcacgagggtcgcccttatactgtggcggccggtcgcgcggtgcgctctccctccctgcccgcagcctggagaggcgcttcgtgctgcacacccccgcgttcctgccggcaccgcgcctgccctctgccgcgctccgccctgccgtccgaccgcacgcccgccgcgggacatggcacacgcaccggcatcgctgccccagcgcccggggctccggggacggcgagatgggcaagcccaggaacgtggcgctcatcaccggtatcacaggccaggatggttcctacctggctgagttcctgctggagaaaggctatgacgtccatggaattgtacggcggtccagttcatttaatacgggtcgaattgagcatctgtataagaatccccaggctcacattgaaggaaacatgaagttgcactatggcgatctcactgacagtacctgccttgtgaagatcattaatgaagtaaagcccacagagatctacaaccttggagcccagagccacgtcaaaatttcctttgaccctcgctgagtacactgcggacgttgacggagttggcacttctacgaattctagacgcagttaagactggtggccttaatcaactctgtgaagttctaccaagcctcaacaagtgaactttatgggaaagtgcaggaaataccccagaaggagaccacccctttctatccccggtcaccctatgggggcagcaagaactctatgcctatggattgtggtgaacttccgtgaggcgtataatctctttggcagtgaacggattctcttcaatcatgagagtccagaagacgagctaatttcgtactcgaaaattagcggccagtagctagattcttggaactggacgttccgttggaacttggtccgaccaatttgcgccgccagacatatgagatgggtttagaaatacggggatcaaagggggcccgcggattgaaaacttcctggaacaccggggaaa

SEQ ID NO: 97502 - DNA, 832 bp, Homo Sapiens
  misc_feature (810)..(810): n is a, c, g, or t
aggagggggggcggagcagaaaaaaccaccattacggctaggtgcgaggcctgggtgttaattcggcacgaggcgctgacaaaccaatgatggcggcggcggcgctgaaggccgcggcgtttgggaggtaactgtggtggcgaaggctgcggtagtggggaggcaaccacacagtttggaagaaacggagcgggacgaagaggcggtagcagtagagtcagcctgagactctcagagcacgacggccacacgcccccttaggccctcggcgggcggcggctgccccgcttagggcctagcctccgagcattgcctcggcttcaaacagcggcggcgccatgagtccttaagggcggtccaagcctcccgatccctggcccagacctcgggcccaccatggagccggggtccgacgatttcctaccgccaccggagtgcccggtgttcgagcctagctgggccgagttccgagaccctcttggctacatcgcgaaaatcaggcccatcgcagagaaatcgggcatttgcaagatccgcccacccctgagtcccttgacttttgtattctgactccaaggtattgttcagacctcagctcctgggggccggcccctggagtcttccctccctggtagcctctaaccagcattcccagacacctgaggcagatagatggatgggctggtgggcagggggtggctggggctgggcatcaccattccagagacaaggccagtgtatatgcaaacttgggggactctcctcccttctctcccagttctggtcctggccaggccatgtaaaattaanccctgtcccaatcttcctcccc

SEQ ID NO: 97503 - DNA, 913 bp, Homo Sapiens
tctaagaggaggccgggtgttaagtcggcacgaggcagcagcgatagcatccacagtgtccgtgggaagcccgggctggtgaagcagcggacacaggagattgagacccggctccggctggcgggcctcaccgtctcttccccactgaagcgctcacactctcttgccaagctggggagtctcaccttctcaacggaagacctgtccagtgaggctgacccgtccaccgtcgctgactcccaggacaccactttgagtgaatcttccttcttgcatgagccccagggaaccccgagggacccagctgcaacctccaaaccatcagggaaacccgccccagaaaacttaaagagcccttcgtggatgagcaaaagctgacccgccttttgctgcgtcaggctgggcggatattttcatatgatccctccctcactttcactgtggatttggatcgaccccttacatcttgatttcccttaaacgagtgaagtcatcctaacttttcccctactcttgccatagagaggaggagaagaaactaaccaacatgcagcacaagaaggggagctgtcagtcgtgtggcctgggagaaccaggagccgccggccaggagacacaaaactccgctcccaccgtgtcttcaagaagaaccatgtatcaggaagaacgtgcacacataggcgcacacatccagacgtgttcccttcggcatcctgcagaagagtcctggtggtggcagccatccaccgcggcacacgttctagctcattcttcgcgctcgcagaaaactctcggatggacactttaagtcctaacctcggactcgatgcgctgtgtagttttaaaacacacgaatggaccagggcttggtcccagtggcataaaggccacggaccggaaaaggcgttgaggc

SEQ ID NO: 97504 - DNA, 1262 bp, Homo Sapiens
tttaggctaaggtacgaggcccgtggtgtataattcggcacgaggactccatggaagacctgaagactcagctgcagagggactacacctacatgacccagtgcctgcaggaggagcgctacaggtacgagcggctggaggagcagctcaacgacctgactgagcttcatcagaacgagatgacgaacctgaagcaggagctggccagcatggaggagaaggtggcctaccagtcctatgagagggcacgggacatccaggaggccgtggagtcctgcctgacccgggtcaccaagctggagctgcagcagcaacagcagcaggtggtacagctggagggcgtggagaatgccaacgcgcgggcgctgctgggcaagttcatcaacgtgatcctggcgctcatggccgtgctgctggtgttcgtgtccaccatcgccaacttcatcacgcccctcatgaagacacgcctgcgcatcaccagcaccaccctcctggtcctcgtcctgttcctcctctggaagcactgggactccctcacctacctcctggagcacgtgttgctgcccagctgagtggccagccacaccaaccctgtgctctctggcccccagctggccacacttctccaggagggacccttggacttctttgtgtgtccagtttggactcctgcccaaactgtccattccagcagctcctgccccttctctgtacttgcttctgtctgacaccttctccctgttggcctgaagggagccttagaatgcaggcctacctggagatagtgcgggcacctgtggccaagtggagccaaggtggacatgggtcggaatggccggatatttcataggttcccaaggacttttcccaggtgacctacaggatgcccaagtcaggaagaacacttacaacatggagcagaaggggctgcgccaagtttccataggaaaagccacccctgggagaaaagggacagggaaacccctggcggtggcaaacgggtcgaggagaaaaaggcggcagcacagtcagagcaggagacactagtgggcgagagaaaaacaaggagaggggcgccacaaccgggagcaccacggagaggcaaggccaacacaggcggtagacaacacagccaccgaccgagttagtaaaagagccaactggaggagcacgagcggagcaatcaacaagagcgaaagaagaaccagcagccgcaagaccgaggatatagaagtgaccgacgacgcctgcaacgcggcact

SEQ ID NO: 97505 - DNA, 882 bp, Homo Sapiens
gctaaggcctgctgccttggaccttccatatacagagagtcccacctccagcaagggttgcctggactctccaacccctgctgtgcccaggactcccccagggacaaggcaaccagaggcccagacccctccccagcaaagagaagcaccacgggagctgtctcccaagagcccttgacctggggcccagctggcctagggccgggccccggggctgttgtagagcagagtgtccatctgtgcacgctgtagccacaagcgccgctgggcgtcgccaagcagcacacgcagcgagtggcctggacggtcaggcgggcagggctgcacagtgggcagcatgcagctggcgacaggtgtcgcagcagagggtgggcagggcgccaggggacaggcagctgtgtgcctggtagcctggggggctccgagacagacctataggctgaggctggtaccccctctgcccgaatacgcctcgggctggccgctgcagagctttcaggggtggccaggtccccaggcctactcagctcacggcgcagagagaggaaggagaaggcggaaggttcaggttccagcccctcctccaaggccccatatggtgggctgctggcctgcggcagctcctcagctgggggctcccaggcctggcccccagtgccccacagtttggcactctgctcccagagtggtggcctctaggccagctccgccgggggcgagtcagggcctggtgacggctccccatacaggctggcgtcctccagacccctcgtcttcctgcaagtcccggtataagtccagtggggcccctgtaagcagcaggggagcctcggggagatcggggtggggctcctcatcctgggccagccgctgctgcagcca

SEQ ID NO: 97506 - DNA, 1010 bp, Homo Sapiens
  misc_feature (541)..(549): n is a, c, g, or t
ggttagaggccgcgtgtgtaaatcggcacgaggtgaatgtctccatgagaaaaccaaggcgagaagcccagagccatggcggggttgcttgacgtcctcatggagtcactctgccccacatgctcaaatcttccctctggccccacatccctaggagggcctgacccctgtaaagatacaggaggcagctccctggcctccaaatggcccatggagatggcagtcgggagacagggttctgtgtttgctgcggtgaagggaggagaaggcaggaggaaaaaggatggcttctagccctgaagaggactccagcatcccaggcaccgggtgcttctggctgcagttttccctatggaggcccctcagcctccagccctaacataaatgtcggttaaattcagttttcaagcctctctcccttttcagtgtcagagcagtagatggtccaggcattggaggcctcgaccactctgcattgcagattacagtgacttcctcggggttgccccatcttggtctcctgtggtttcttcaatcagcnnnnnnnnnaccagcatctctcaaataacaatgaagatagatatgcccattagtgtctgattaaggagcaaaggcttggatttctgggcaagggaagctggaatttttccttcttgtgcttacagcgggggtccgttaaacagtgtgaacgggggaaagatatgacgagcccacaggtaggagtgggtcgtccagggcgcaaataaagcgggtgcaacaatatcctcataaaaaccaccacaagagcatcgtcgcacgcagtgcatgagacgagacgcgagaacgagggagtggctcctgacggcggccgaatgctggatgactagatggacggaaggaggcgaggcaacgggctggcagagacggcagggatgagggcggcgcagtacaagccaggcgaacgcccagacagaggcggcgacgaccggcagcccagggacagaacgaagacagcaagaaggagcaaagag

SEQ ID NO: 97507 - DNA, 586 bp, Homo Sapiens
  misc_feature (67)..(189): n is a, c, g, or t
tgggttccagctattcttctacctcagcctcctgagtagctgggactacaggtgcgcgccaccacannnnnnnnnnnnnnnnnnnnnnnnnnnnnnnnnnnnnnnnnnnnnnnnnnnnnnnnnnnnnnnnnnnnnnnnnnnnnnnnnnnnnnnnnnnnnnnnnnnnnnnnnnnnnnnnnnnnnnnnnnntgagccaccgtacccagccacttttgtcatcttgtgttggctttggcagcgacaccattcactggggtgggaattcgggacagggtcttgcccctgtgcccgggatttgacatttgggaaacaaatgttaaaaccctaccatgtccctaaatgtcccagcctccccagggcaatgctgagacccagaggtgtcccgtcacagccggtggctccacaggaacctgcaggcataagcctgctcagaaaccccgtcttcctcatggcaggagctgctggcttttggggatgggactcgcgcaggacctgtcccacagggcaaatctttctgtatcactgcccctcagcactaaatacccaccagttcctgcctcgtgccgatttacccgagccttactgc

SEQ ID NO: 97508 - DNA, 1424 bp, Homo Sapiens
  misc_feature (1109)..(1149): n is a, c, g, or t
  misc_feature (1194)..(1215): n is a, c, g, or t
  misc_feature (1272)..(1272): n is a, c, g, or t
ggctaggtacgaggcctgggttgtgaattcggcacgaggggtgtgaggtgagcggggtgacatgtgcagatggaccctgcttcaacggcggcttgtgtgtcgggggtgcagaccctgagcgctgcctacatctgccactgcccacctggtttccaagggctccaactgtgagaagagggtggaccggtgcagcctgcagccatgccgcaatggcggactctgcctggacctgggccacgccctgcgctgccgctgccgcgccggcttcgcgggtcctcgctgcgagcacgacctggacgactgcgcgggccgcgcctgcgctaacggcggcacgtgtgttggagggcggcggcgcgcaccgctgctcctgcgcgctgggcttcggcggccgcgactgccgcgagcgcgcggacccgtgcgccgcgcgcccctgtgctcacggcggccgctgctacgcccacttctccggcctcgtctgcgcttgcgctcccggctacatgggagcgcggtgtgagttcccagtgcaccccgacggcgcaagcgccttgcccgcggccccgccgggcctcaggcccggggaccctcagcgctaccttttgcctccggctctgggactgctcgtggccgcgggcgtggccggcgctgcgctcttgctggtccacgtgcgccgccgtggccactcccaggatgctgggtctcgcttgctggctgggaccccggagccgtcagtccacgcactcccggatgcactcaacaacctaaggacgcaggagggttccggggatggtccgagctcgtccgtagattggaatcgccctgaagatgtagaccctcaagggatttatgtcatatctgctccttccatctacgctcgggaggcctgacgcgtctcctccatccgcacctggagtcagagcgtggatttttgtatttgctcggtggtgcccagtctctgccccagaggctttggagttcaatcttggaggggtggctgggcggaaactttcctggccgcaagtccgccataaacgggtaatccatatcccgacgtttgtcccaaccccattctcttcgtagaaacccccctatccacggctcatcattgctcnnnnnnnnnnnnnnnnnnnnnnnnnnnnnnnnnnnnnnnnngtgtcggccggctttggctccttcccaccaagcccgcccaagaannnnnnnnnnnnnnnnnnnnnngcgtcccgcccattcccacccgagaacctccccaatacccgcgcctttcccacccgnaaatccccccctaatagagccccaccggttttggcgcctcccttaccccgataccgatataccgcgcccggccgccgagacacgtaccgcataccctctaattggctgcccccgatttgcgcccccctccgagagtcaattcccccacacca

SEQ ID NO: 97509 - DNA, 1355 bp, Homo Sapiens
aactaggctaggtacgaggctgggttaatcggcacgaggcgtaactgctgcttaggtggccttccgctctggcggctgtcgcgacgggggttcacggaatatttactgggcctctccgctccctctgctcttggaggtgccatgaggtcagttagctacgtgcagcgcgtggcgctggagttcagcgggagcctcttcccgcacgcaatctgcctcggagacgttgataacgatacgttaaatgaactggtggtgggagacaccagcgggaaggtgtctgtgtataaaaatgatgacagtcggccatggctcacctgttcctgccagggaatgctgacttgcgttggggttggagacgtgtgtaataaaggaaagaacctgttggtggcagtgagtgctgaaggctggtttcatttgtttgacctgacacctgccaaggtgttggatgcttctgggcaccacgagacactaatcggagaggagcagcgtccagtcttcaagcagcacatccctgccaacaccaaggtcatgctgatcagcgacatcgatggagatgggtgtcgtgagctggtggtgggctacacagaccgtgtggtgcgagctttccgctgggaggagctaggtgagggtcctgaacatctgacagggcagctggtgtccctcaagaaatggatgctggagggtcaggtggacagcctctcagtgactctggggccactgggtcttcctgaactgatggtgtctcagccaaggatgtgcgtatgcaattctactgagtacctggaaaaaggacactgggtcccctcctgaactctgaagggcccacggatggtagtagggagaccccagctgcccgagacgtggttgctgacagacatcttggcgcggtatccacggacagaattgtctcccagtcacctaattggggacctcaacaagggcacggactgacaagtagtggggcttggccccctttgcgcggtggccctgggttgggacctcggaacgcttgtggaatatagtgcgacaacgcagaacaagtcttgattggtccacagacaggttgagtaaccgcaggtctttcgcctgtagaaacctggaatgttacccgggaacagggaataaagaggaagtatgacatcacctcctggattgcaccaacgatatatcgtatgtagtcaaccagggccgcgcactcgcacagccacagggggatagtaatttcgtcgccctgagagcagcagactaccgcatacaggagcgtaagacccgcaccgatattcgattgaatccgaaacaaatagtcagctgaagcagcacagagcgcagaggaagacaacgggaactcgagcacg

SEQ ID NO: 97510 - DNA, 1122 bp, Homo Sapiens
  misc_feature (101)..(115): n is a, c, g, or t
gagaaaataattcacagaaagagctagagtgtcgaggtagaggtagcaattttaaatggagatgttagggaaatcctcactgagaaggtaacatttggtgnnnnnnnnnnnnnnngtggcaagcaagggaaccatccagatagggggcttgtaggtggtgggagatacgtgggatgaattgggacactttgagttgcatgtttgagaagtaatatgaaggcagagagcggataggagctgcggaacagatggaccaaatggacgggcaagatgccgcaaacacaggcaggggcgggggcagactgagggtgaagtgagtagcaccgcagatcgggtgtgaagccgcactggctggaaggtgccactgttagcagaggagcgggggctgctcgtgggactccagagcccatcttgtctttcatgcccacagatggagatgggtgtcgtgagctggtggtgggctacacagaccgtgtggtgcgagctttccgctgggaggagctaggtgagggtcctgaacatctgacagggcagctggtgtccctcaagaaatggatgctggagggtcaggtggacagcctctcagtgactctggggccactgggtcttcctgaactgatggtgtctcagccaggttgtgcgtatgcaattctactgtgtacctggaaaaaggacactgggtcccctcctgcctctgaagggcccacgggatggtagtagggagaccccagctgcccgagacgtggtgctgcaccagacatctggccgtatccacaacaagaatgtctccactcacctaattggcaacatcaaacaaggccacggcactgagagtagtggctctggcctctttgccctgtgcaccctggatgggacactgaagctcatggaagaaatggaagaagcagacaagctgctgtggtcagtgcaggtggatcaccagctctttgccctggagaaactggatgtcaccggcaacgggcatgaggaggtagttgcatgcgccctgggatggacagacatatatcattgatcacaacccgcaccggtcgtccgctttccaagtggatggaaaatatcccgtggcctttctgttgcaggccctggtacgccctggcaaag

SEQ ID NO: 97511 - DNA, 1002 bp, Homo Sapiens
gggggatagagtatgaagtcgacggcgcgccgaattcggcacgagggcggactctccgggagactgtcctggaaagttcgcccatcctcaccctgctcaacgagagcttcatcagcacctggtccctggtgaaggagctggaggaactgcagaacaaacaggagaactcgtcccaccagaagctggctggcctgcacctggagaagtacagcttccccgtggagatgatgatctgcctgcccaatggcaccgtggtccatcacatcaatgccaactacttcttggacatcacctccgtgaagcccgaggaaatcgagagcaatctcttcagcttctcatccacctttgaagacccgtccacggccacctacatgcagttcctgaaggagggactccggcgtggcctgcccctcctccagccctagagtgcctggacgggatctgatgcacaggcccccacgcctcagagccagagtggtcctcagcccatttcagactgcagatgccgcccactcccaccccactcctaggctgccttggagggtacaagatccactgagggtggccaccacagccttggctccatggtggcgggtagacaagggatgcctgggctgactgggcagaggaacctctagctctgactgtcactcggctctccctacccatttggctctggaagctgcttggcccccccagatcagggcctgggtgaactccctggactttcctagccagcgcacagtctaggcccttgtggggtgaagaatggagggaggagcaggctaggaagacggggcacacctctccttgttcagccttccacaggaagatcaagaagccagcagagggccaggtgcaaggggtcctgttattagagcttcgttctgacatacccggatgcctctgtgcagatgtccagtgggtcagttcaaaggaacagatttgagcttggaaactccttaatggatcaacggcccgtctttctacagcatgactcgg

SEQ ID NO: 97512 - DNA, 648 bp, Homo Sapiens
  misc_feature (473)..(473): n is a, c, g, or t
  misc_feature (484)..(485): n is a, c, g, or t
aatacggtctaggtagcgaggcctgggtgtggaattcggcaccgaggggggggctgccacgatcatctccacgcagacgctcaacatcctggtggatacaggcagcagtaactttgcagtgggtgctgccccccaccccttcctgcatcgctactaccagaggcagctgtccagcacataccgggacctccggaagggtgtgtatgtgccctacacccagggcaagtgggaaggggagctgggcaccgacctggtaagcatcccccatggccccaacgtcactgtgcgtgccaacattgctgccatcactgaatcagacaagttcttcatcaacggctccaactgggaaggcatcctggggctggcctatgctgagattgccaggctttgtggtgctggcttccccctcaaccagtctgaagtgctggcctctgtcggagggagcatgatcattggaggtatcgaccactcgnctgtacacagnngcagtctctggtatacacccatccggcggcgagtggtattatgaggtcatcattgtgcgggtggagatcaatggacaggatctgaaaatggactgcaaggagtacaactatgacaagagcattgtggacagtggcaccaccaaccttcgtttgcccaagaaag

SEQ ID NO: 97513 - DNA, 729 bp, Homo Sapiens
ccagtccctaggccccaaaccgcagatcctgctgtgtgaccattaagcccctgactgttctaggctcaacttccaaccctttctgcaggtcctattacctctgcctcatcctcccaacatgataaccagagtcttccttcacattgtactgcctacccccttatgttcccaggctctcccttggttttattacctccttgcagtccattttcagatcctgtccattgatctccacccgcacaatgatgacctcataataccactcccgccggatgggtgtataccagagactgcctgtgtacagcgagtggtcgatacctccaatgatctagggaaaaaaagaggcaggtacccgtgtcctggcacagaaggagagtgagtcccccaaggaccaagcaataagatcagtgatttcttggggtggcaaggtcttctacaggctacccttttcatcttcctgcttctaaacaaatcatacccaaagtgatttctagtttcttaaatgtgttcaggagaaaagactttccgggatttttaattatttgtttcagaatcatacagcccttgatataaagttatttaaatctaaactgccacaataaatgttgaatgaatggttatttgtttatattataagttttattttctctgcttattggagaaccattcaccattgttctaattaattaataaatagacaaacttcttatatctctgccttctgaccat

SEQ ID NO: 97514 - DNA, 2001 bp, Homo Sapiens
  misc_feature (19)..(19): n is a, c, g, or t
  misc_feature (34)..(34): n is a, c, g, or t
  misc_feature (1975)..(1975): n is a, c, g, or t
gcggagagatgaagaatcnacggcgcgccgattncggccgaggggatgccgccttcttcgccgtcatgggcttcactgtgctggtcaacggtggctcaaaccccaagtccagtttctggaagctggtgcggcacctggaccgcgtggatgccgtgctggtgacccaccctggcgccgacagcctccccggcctcaacagcctgctgcggcgcaaactggcggagcgctccgaggtggctgctggtgggggctcctgggacgacaggctgcgcaggctcatctcccccaacctgggggtcgtgttcttcaacgcctgcgaggccgcgtcgcggctggcgcgcggcgaggatgaggcggagctggcgctgagcctcctggcgcagctgggcatcacgcctctgccactcagccgcggccccgtgccagccaaacccaccgtgctcttcgagaagatgggcgtgggccggctggacatgtatgtgctgcacccgcactccgccagcgcagagcgcacgctagcctctgtgtgcgccctgctggtgtggcaccccgccggccccggcgagaaggtggtgcgcgtgctgttccccggttgcaccccgcccgcctgcctcctggacggcctggtccgcctgcagcacttgaggttcctgcgagagcccgtggtgacgccccaggacctggaggggccggggcgagccgagagcaaagagagcgtgggctcccgggacagctcgaagagagagggcctcctggccaccaaccctagacctggccaggagcgccctggggtggcccgcaaggagccagcacgggctgaggccccacgcaagactgagaaagaagccaagaccccccgggagttcaagaaagaccccaaaccgagtgtctcccggacccagccgcgggaggtgcgccgggcagcctcttctgtgcccaacctcaagaagacgaatgcccaggcggcacccaagccccgcaaagcgcccagcacgtcccactctggcttcccgccggtggcaaatggaccccgcagcccgcccagcctccgatgtggagaagccagcccccccagtgcagcctgcggctctccggcctcccagctggtggccacgcccagcctggagctggggccgatcccagccggggaggagaaggcactggagctgcctttggccgccagctcaatcccaaggccacgcacaccctcccctgagtcccaccggagccccgcagagggcagcgagcggctgtcgctgagcccactgcggggcggggaggccgggccagacgcctcacccacagtgaccacacccacggtgaccacgccctcactacccgcagaggtgggctccccgcactcgaccgaggtggacgagtccctgtcggtgtcctttgagcaggtgctgccgccatccgcccccaccagtgaggctgggctgagcctcccgctgcgtggcccccgggcgcggcgctcggcttccccacacgatgtggacctgtgcctggtgtcaccctgtgaatttgagcatcgcaaggcggtgccaatggcaccggcacctgcgtcccccggcagctcgaatgacagcagtgcccggtcacaggaacgggcaggtgggctgggggccgaggagacgccacccacatcggtcagcgagtccctgcccaccctgtctgactcggatcccgtgcccctggcccccggtgcggcagactcagacgaagacacagagggctttggagtccctcgccacgaccctttgcctgaccccctcaaggtccccccaccactgcctgaaccatccagcatctgcatggaggaccccgaaatgctgcccccccaagacagcacgggcaaacagagaacgtcagccgcacccggaagcccctggtccggcccaaataaagcgctggctgcccccaaaagccactccagtggcctgcttgccaaaaccaagggggcttggctggaggngggaccgtggccaacccgaccacctc

SEQ ID NO: 97515 - DNA, 1042 bp, Homo Sapiens
  misc_feature (945)..(945): n is a, c, g, or t
atgtgaaagagtatgaagtcgaggcgcgccaattcggccgagggtggctggatctggggctgccgcggctccgagctcactgctcctcgtggtgggcagcgagttcgggagcccggggctcctcacctacgtcctggaggagctcgaaagaggcatccggtcttgggatgtcgatcctggcgtctgcaaccttgatgaacagctcaaggtctttgtgtcccgacactctgccaccttctccagcattgtgaaaggccagcggagcctgcaccaccgtggagacaacctggagaccctggtcctcctgaacccatcagacaagtccctgtatgatgagctccggaaccttctgttggaccctgcctctcacaagctactggtgttggctgggccctgcctggaggagacgggggagctgctgctacagacagggggcttctcgcctcaccacttcctccaggtcctgaaggacagagagatccgggacatcctggccaccacgcccccacctgtgcagccgcccatactcaccatcacctgccccaccttcggtgactgggctcagctggcacccgctgtgcctggccttcagggggcgctccggctccagctgcggctgaaccccccggcgcagctgcccaactctgagggcctgtgcgaattcctggagtacgtggctgagtctctggagccaccgtcccccttcgagctgctggagcccccgacctccgggggcttcctcaggctgggccggccctgctgctacatcttccctggagcctcggggatgccgccttcttccccgtcaatggcttcactgtgctggtcacgggggctcaaccccaatccagttctggagctggtgggcactggacgcgtgatgcgtgctgtgaccacctgcgcgacgctcctggctcacagctgctgcgcgcaatggcgacctcnagtgctctgtgggctctggacaagctccagtcttcccactgggctgtctacctcagcctcgctgccccagatacatgctacctgcctgtccctgctc

SEQ ID NO: 97516 - DNA, 1088 bp, Homo Sapiens
cgcagaggagcctggtcctcctgaacttatcagacaagtccctgtatgatgagctccggaaccttctgttggaccctgcctctcacaagctactggtgttggctgggccctgcctggaggagacgggggagctgctgctacagacagggggcttctcgcctcaccacttcctccaggtcctgaaggacagagagatccgggacatcctggccaccacgcccccacctgtgcagccgcccatactcaccatcacctgccccaccttcggtgactgggctcagctggcacccgctgtgcctggccttcagggggcgctccggctccagctgcggctgaaccccccggcgcagctgcccaactctgagggcctgtgcgaattcctggagtacgtggctgagtctctggagccaccgtcccccttcgagctgctggagcccccgacctccgggggcttcctcaggatgggccggccctgctgctacatcttccctggaggcctcggggatgccgccttcttcgccgccaatggcttcactgtgctggtcaaccgggggctccaaaccccaagtcccacgtttctgtgaagcttggtgccggccccccggcgacccgcggtggaatgccccttgcctggttgaaccccacccctgggggggcccgaacaagcccctccccacggggccttcaaaacaggccctgggctgggcggggcgccaataacttggggcgcggaagccgcccttcacgaaggctgggcccatgccttggatgtgggggggcttcccttgggggaaccgaaccaaggccttggcccccaaggggcttccattcttcaccccccattcctggggggggacccccttgtttcccttcccaaagccccctggccgaagagccccgcctctccccggggcttggcaggcccctgtggtccagacgaatgctaggggccgcgaagtcttgggctcccctgaaacccccttctatgggcctacacctgtgggggctatacacgcgccatctctggacaacgttgactcctggcgggctcctcgggggccaacgatctaatcccccgtcccttggct

SEQ ID NO: 97517 - DNA, 1123 bp, Homo Sapiens
  misc_feature (76)..(124): n is a, c, g, or t
aggaagtaagggaagaggagaggaaggggagccggaccgactacccagacagagccggtgaatgggtttgtggtgnnnnnnnnnnnnnnnnnnnnnnnnnnnnnnnnnnnnnnnnnnnnnnnnnatccccagttcgagccgccgcccgaaaggccgggccgtcgtcttaggaggagtcgccggcgccgccacctccgccatggagctgatcaccattctcgagaagaccgtgtctcccgatcggctggagctggaagcggagcataagttcctggagcgtgcggacgaggagaacctgcccactttccttgtggaactgtccagagtgctggcaaatccaggaaacagtcaggttgccagagttgcagctggcctacaaatcaagaactctttgacatctaaagatccagatatcaaggcacaatatcaccagaggtggcttgctattgatgctaatgctcgacgagaagtcaagaactatgttttgcagacattggggtacagaaacttaccgggcctagttctgcctcacagtgtgtggctggtattgcttgtgcagagatcccagtaaaccagtggccagaactcattcctcagctggtggccaatgtcacaaaccccaacagcacagagcacatgaaggagtcgacattggaagccatcggttatatttgccaagatatagacccagagcagctacaagataaatccaatgagattctgactgccataatccaggggatgaggaaagaagagcctagtaataatgtgaagctagctgctacgaatgcactcctgaactcattggagttcaccaaagcaaactttgataaagagtctgaaaggcactttattatgcaggtggtctgtgaagccacacagtgtccagatacgagggtacgagtggctgctttacagaatctggtgaagataatgtccttatattatcagtacatggagacatatatgggtcctgctctttttgcaatcacaatcgaaagcatgaaaagtgacattgatgaggtggctttacaagggatagaattctggtccaatgtctgtgatgaggaaatggatttggccattggagcttcagaggcagcagaacaaggacggccccctg

SEQ ID NO: 97518 - DNA, 902 bp, Homo Sapiens
  misc_feature (85)..(140): n is a, c, g, or t
atttggagggaggaagtaagggaagaggagaggaaggggagccggaccgactacccagacagagccggtgaatgggtttgtggtnnnnnnnnnnnnnnnnnnnnnnnnnnnnnnnnnnnnnnnnnnnnnnnnnnnnnnnnagttcgagccgccgcccgaaaggccgggccgtcgtcttaggaggagtcgccgccgccgccacctccgccatggagctgatcaccattctcgagaagaccgtgtctcccgatcggctggagctggaagcggcgcagaagttcctggagcgtgcggccgtggagaacctgcccactttccttgtggaactgtccagagtgctggcaaatccaggaaacagtcaggttgccagagttgcagctggtctacaaatcaagaactctttgacatctaaagatccagatatcaaggcacaatatcagcagaggtggcttgctattgatgctaatgctcgacgagaagtcaagaactatgttttgcagacattgggtacagaaacttaccggcctagttctgcctcacagtgtgtggctggtattgcttgtgcagagatcccagtaaaccagtggccagaactcattcctcagctggtggccaatgtcacaaacccccaacagcacagagcaccatgaaggagtcgacattggaagcccatcggttatatttgccaagatatagacccagagcagctacaagataaatcccaatgagaattcggactgccataaatcccagggggatgaaggaaaaaaagagccctaataaataaaggtggaagcctaagcttggctaccaaaatggcacctccctgaaaacttcaattggggaaggttcccccccaaaaggtcaaaaatcttttgtataatacaggaaggatcccggac

SEQ ID NO: 97519 - DNA, 1001 bp, Homo Sapiens
gcgaggcctgggtggcgaattcggcacgaggggaaccagagctcgctacgttgacgtcctgaacccaagcgggacccagcggagcgagccggctctcgctcctgcggactttgtcgctccactcgcgccactcccaattccttctaacttgttcgtgccaaccccagtgtcttcagtgagaccccagggacgttcgggacggaatgatggcctcctcgctctctcatccccagatgcagaagaaccacagcttccagacgggactggcagggaagggcctgcagcagctaggggcctggccaatccagagcctgccccagagcccaaggttttaagctctgcagcgtcactccctggctctgaactcccctcctccaggcctgagggttcccagggaggagaggctcctggcgacctccctgctgcagggggccctcccagcggggccatgcccttctacaaccctgctcagctggcacaggcctgcgccacctccgggagctcaaggctagggaggattggccagaggaagcacctggtgctgaactaggcttgccctgctgtgaacttgcacttggagccctgacgctgctgttctccccgaagaacccgaccgacctccgcgatctccgtcccgcccccagggagacacagcagtgactcagagctggtcgcacactgtgcctccctcctcaccgcccatcgtaatgaattattttgaaaattaattccaccatcctttcagattctggatggaaagactgaatctttgactcagaattgtttgccgaaaaaaatgatgtgactttcttagtcatttaggatgatttaaggatatagtattcctggtcatttaaagatggtcatccatggagcccggagctgtctctggcacaggagagcccccatggtcggtaagtaacagggcctcttccagccccagctgtgagtcactggcccatgagtccgcgccttcccttttaagggctggggaaccaaaa

SEQ ID NO: 97520 - DNA, 1310 bp, Homo Sapiens
aaaatatacgggtctaaggtagcgaggcctgggtgggtgaattcggcacgaggaggaatgcactcgctgtgagcagtcactgcttaaggagccacagaaggtgcagctcgtgagcgtcatgaaggaggccataggggctgttatccactacctgctgcaggtggggtcagagaagcagaaggagccctttgtgtttgcctcggtgcggatcctgggtgcctggctggccgaggagacctcatccttgcgtaaggaggtgtgccagctgctgcccttcctcgtccgctatgccaagaccctctacgaggaggccgaggaggccaatgacctttcccagcaggtggccaacctggccatctcccccaccaccccagggcccacctggccaggagacgctctccggctcctcctgcctggctggtgccacctgaccgttgaagatgggccccgggagatcctgatcaaggaaggggccccctcgcttctgtgcaagtatttcctgcagcagtgggaactcacatcccctggccacgacacctcgagtgctagcctgacagcgtggagattggcctgcagacctgctgccacactcttcctcaacctcgctggtcaccgcaccgggcgctgatcaacgcgtgacgcctgcttcacatctctaactgaacaccctcatgaccgctcgctaccagcactagctgcagcaaccagggcaaggcctgcttctggctgctaatgtggccaccctggggctcctcatggcccggctccttagcacctctccagctcttcagggaacaccagcatcccgagggttcttcgcagctgccatcctcttcctatcacagtcccacgtggccgcgggccaccccgggctcagaccaggcagtgctagcccctgtcccctgaagtatgagcggcatctgggccgacctgcaggagctctggttcctgggcatgcaggccttcaccggctgtgtgcctctgctgccctggctggcccccgctgccctgcgctcccgctggccgcaggagctgctccagctgctaggcagtgtcagccccaactctgtcaagcccgagatggtggccgcctatcagggtgtcctggtggagctggcgcgggccaaccggctgtgccgggaggccatgaggctgcaggcgggcgaggagacggccagccactaccgcatggctgccttggagcagtgcctgtcagagccctgaggggtgtccaccggggacagacccaggggcgggcagagagggaaggagggaggaggcatcttccctgaagagcccaaactggccca

SEQ ID NO: 97521 - DNA, 1069 bp, Homo Sapiens
ctaggctagtcgaggctggtttaatcggcacgagggtagcttttcggattgcggagcgctgccggaggggctcgcggaagaggccgagccgcagggcgccgctggagcggggacagtggcactgtttcccagagccacagcagcgcctcggggccgtgggaggacgagggcgcggaggacggcgcgccgggccgcgacctgccgctgcttcgccgcgccgctgcgggctacgccgcctgcctgctgcccggggccggggcgcggcccgaggtcgaggccctggacgcgagcctagaggacctgcttaccagagtggacgagttcgtgggcatgctggacatgcttcgctggcgactcgtcccacgtcgtcagcgatgggcgtgccgcgcatccacgcgaaggccgccgagatgcggcgcatctacagcaggatcgaccggctggaggccttcgtgaggatggtggggggccgcgtggccaggatggaggagcaggtcaccaaggccgaggccgagctgggcaccttccccagggcgttcaagaagctcctgcacacgatgaacgtgccctcgctctttagcaagtctgctccctcgaggccacagcaagccggctacgaagcccccgtcctgtttcggaccgaagactacttcccttgttgcagtgaaaggcctcagctctgacggcctgaccactgcggcaagaggaccccagctggggtgcttacctccagtatgaagtgaattgcaaaatcctgcttatggacatatatgatgtcggagtgtgggattttaaagtttactttctacaaactctccgtagtatattcatgattcagtgtagaatgtatagactttatgtcttccaagttttaaaaaaagagacagggtctgggtatgttgcccagactgttcggaaactcctgggctcaagttgatccttccaccctcagcttccccagtagctgggactacggggtcgccactgcacccagcctgtgtcttccagctctaatcagaaaagctgcttgtccgagggcattggggatcaacttgatgaactttctctg

SEQ ID NO: 97522 - DNA, 1001 bp, Homo Sapiens
aactatacggtctaaggtagcgaggcctgggtggtgaattcggcacgagggtcgcggggcggcggacggcggctgcgggcgcgaggttcccagcaggatgccccggctctgcaggaagctgaagtgagaggcccggagagggcccagcccgcccggggcaggatgaccaaggcccggctgttccggctgtggctggtgctggggtcggtgttcatgatcctgctgatcatcgtgtactgggacagcgcaggcgccgcgcacttctacttgcacacgtccttctctaggccgcacacggggccgccgctgcccacgcccgggccggacagggacagggagctcacggccgactccgatgtcgacgagtttctggacaagtttctcagtgctggcgtgaagcagagcgaccttcccagaaaggagacggagcagccgcctgcgccggggagcatggaggagagcgtgagaggctacgactggtccccgcgcgacgcccggcgcagcccagaccagggccggcagcaggcggagcggaggagcgtgctgcggggcttctgcgccaactccagcctggccttccccaccaaggagcgcgcattcgacgacatccccaactcggagctgagccacctgatcgtggacgaccggcacggggccatctactgctacgtgcccaaggtggcctgcaccaactggaagcgcgtgatgatcgtgctgagcggaagcctgctgcaccgcggtgcgccctaccgcgaccgctgcgcatcccgcgcgagcacgtgcacaacgccagcgcgcacctgaccttcaacaagttctggcgccgatacgggaagctctcccgcactcatgaaggtcagctcaaagagtacaccagtctcttcgttcgcgaaccttgtgcgctggtttccgctttctggcaagttgactgggaaggggtctacgcagttcgcgtccctgctgggtgaccaacaaccattggcgctgggggagcttcggta

SEQ ID NO: 97523 - DNA, 808 bp, Homo Sapiens
gagagagtatgaagtcgacggcgcgccgaattcggcacgaggcaggctgctgccccattggaagattactccccaggcttcccttgccccaagcagtgagctgactggaatggtaccccgggaggcccctgagtctgctcagtgcctgtgcccttccctcaccatcccaaatgccaaggatgtgcttcggaagaggcacaagagaaggagccgacagcaccagcggttcatggcccggaaggccttgctgcaggagcaggggctgctgagcatgcctccagaaccagggtcctccccactgcccacccctttcggggcagcgacagcaactgaagctgccagcagtgggaagcagtgtctgagggctggatctggcagtgccccatgcagcagaaggcctgctcccgggaaagcctcagggcccttgcccagcaagtgtgtggctatcgactgtgagatggtgggcacgggaccccgagggcgggtaagcgagctggcccgctgttccattgtgagctaccatggcgatgtcctctatgacaagtacatcaggcctgagatgcccatcgctgactaccgtacccgctggagtggcatcactcggcagcacatgcgcaaggctgtccccttccaggtggcccagaaagagatccttaagctcctgaaaggcaaagtggtggtggggcacgcgctgcacaacgacttccaggcgctcaagtatgtcaaccctcggagccagacccgggaataccactatgtccaaactttctcagcgagccgggcctccacaccgggcccggtctctcta

SEQ ID NO: 97524 - DNA, 851 bp, Homo Sapiens
agagtatgaagtgacggcgcgccgaattcggcacgagggctgccggctttccggacgccacgtgcagaccggaagagacacgcggggcttcaggctgctgccccattggaagattactccccaggcttcccttgccccaagcagtgagctgactggaatggtaccccgggaggcccctgagtctgctcagtgcctgtgcccttccctcaccatcccaaatgccaaggatgtgcttcggaagaggcacaagagaaggagccgacagcaccagcggttcatggcccggaaggccttgctgcaggagcaggggctgctgagcatgcctccagaaccatgggtcctccccactgcccacccctttcggggcagcgacagcaactgaatgctgccagcagtgggaagcagtgtctgagggctggatctggcagtgccccatgcagcagaaggcctgctcccgggaaagcctcagggcccttgcccagcaagtgtgtggctatcgactgtgagatggtgggcacgggaccccgagggcgggtaagcgagctgccccgctgttccattgtgagctaccatggcgatgtcctctatgacaagtacatcaagcctgagatgcccatcgctgactaccgtacccgccggagtggcatcactcggctagcacatgcgcaaggctgtccccttccaggtggcccagaaagaggtccttaagctcctgaagggcaaggtggtggtggggcactcgctgcacaacgacttccagtgcgcctcatgtatgtccacccatcggagccagacccgggataccacctatgtccctaacttcctcagcgagcccggcctccaacacccga

SEQ ID NO: 97525 - DNA, 1096 bp, Homo Sapiens
ataggctaggtacgaggctggtggtgaatcggcgaggggcccagctgggggctttcatcccgcctgacccggctccacgctggctttcatcctcctggcagcgtggagccgggtcaggccgggaggatgaaaggccccacgctggtgggctccttgccaccagtgctgtgtcttaagagctgccatcccggctggccgcccggatggcgaccccagcctcggccccagacacacgggctctggtggcagactttgtaggttataagctgaggcagaagggttatgtctgtggagctggccccggggagggcccagcagctgacccactgcaccaagccatgcgggcagctggagatgagttcgagacccgcttccggcgcaccttctctgatctggcggctcagctgcatgtgaccccaggctcagcccaacaacgcttcacccaggtctccgatgaactttttcaagggggccccaactggggccgccttgtagccttctttgtctttggggctgcactgtgttgctgagagtgtcaacaaggagatggaaccactggtgggacaagtgcaggagtggatggtggcctacctgggagacgcggctggctgactggatccacagcagtgggggctgggcggagttcacagctctatacgggggacggggccctggaggaggcgcggcgtctgcggggaggggaactgggcactcagtgaggacagttgctgacgggagccgtggcactggggggcctgggtaactgtaggggcctttttgctagcaagtgacagtccacggccagggtggggctaagtgtgctgggggcagagagcaggacagacagagaatgcgtggcaggagtggagttggggctgggtgggcatggaacggatggcacgcaggtatgtggtaggacgcacagcagctgccatgccaaaggcgcggcccacggggcggcaatttggcgctcggacgagatacccccggcggggggcagaccctaagtggcgtagcccgcgtcgccgagggcacacgcccgagtagggccccccgagacaggcaagggaaggatcacgggggaacacgaccttaa

SEQ ID NO: 97526 - DNA, 1220 bp, Homo Sapiens
  misc_feature (942)..(942): n is a, c, g, or t
ctcaaactaggcttcatgtcggcatttgtgaaggcctcagcctttgccttgcaggaacagcctgttgtaaatgcagtgattgacgacacaaccaaagaggtggtgtatagggattatattgacatcagtgttgcagtggccaccccacggggtctggtggttccagtcatcaggaatgtggaagctatgaattttgcagatattgaacggaccatcactgaactgggagagaaggcccgaaagaatgaacttgccattgaagatatggatggcggtaccttcaccattagcaatggaggcgttttggctcgctctttggaacacccattatcaacccccctcagtctgccatcctggggatgcatggcatctttgacaggccagtggctataggaggcaaggtagaggtgcggcccatgatgtacgtggcactgacctatgatcaccggctgattgatggcagagaggctgtgactttcctccgcaaaatcaaggcagcggtagaggatcccagagtcctcctcctggatctttaggaggaacccacacaccctacaagttgatcatgcaggaactgaaaaccagtcttctccctgtcccctcatgggtcccgggttagcctggtgacaggcagacacatgctgttggcctcaagcaaggaagcagagcactgtgtaaccagcagtcacaggtcttttcttggcgttcctgccaggctctccctctctgcacctgtctcatagcctcgaatatctttaattccttaggctttaagagagagagccttaatggatgctcattcatatttcctgcctttctttccatcagctctctgcaaagatgattttgcttttccctagtgctggtatactatagagaaacccctggggaacatgtgattaagttctatctttttgaagtttgttctgcagagacttctangaggatgctgtgcctcccaagctcaaaacagcctctgtcctggctgtgcaattctcccttgaattcacttgggtggaggggatgaacaacagcaagaagggctgctttcctctttaatggcaccttctttccccttggcattgacttcagaagcctcttcacctcttccaaaacccaagcccgggaatttggtttttaagggaaaaaaggcaaagcccccgaggtcctctttttatccttaaaagggacccggcccgcccaactctccataaggaaca

SEQ ID NO: 97527 - DNA, 1231 bp, Homo Sapiens
  misc_feature (1114)..(1123): n is a, c, g, or t
cgccagcgggggcgctgagctcagagctgccgcagcgccggagccggagccggagccggagcgcgcgagctcgcagggcgcgaggaacgagcggtggctggctacgcacccgagacccgggcactgctgcgctcctgctcaggacccgcgacccgagcgcctgatcccggccctatcccccctccggcccctggtccaccccggcctggcctagcggagcaccccgcgtccgcccgccgcagacagccgcgtccatcccgcagccccggacccgctatcacaggccgccaggatggacgtgtacatgaagggcctgtccatggccaaggagggcgtcgtggcagccgcggagaaaaccaagcagggggtcaccgaggcggcggagaagaccaaggagggcgtcctctacgtcggaagcaaagacccgacgaagagtgtggtaccaaggtgtggctttcaagttggctgaaaaaaccaacgggaacaggcctcacattctgggaggagctgtgttctctggggcagggaacatcgcagcagccacaggactggtgaagagggaggaattccctactgatctgaagccagaggaagtggcccaggaagctgctgaagaaccactgattgagcccctgatggagccagaaggggagagttatgaggacccaccccaggaggaatatcaggagtatgagccagaggcgtaggggcccaggagagcccccaccagcagcacaagttctgtccctgtccctgtcccgccccccagagccagggctgtccttagactccttctccccaatcacgagatcttccttccgctctgaggcaaccccctcggagcctgtgttagtgtctgtccatctgtctgtcctacccgcccgcgtccaaccccggggcatggacagggccagggttgcggtcgcggctgggagcctcgcccctccagtgttgcctcctcccatccagcgtctgcgcggatgtagcatgttctatgtgtttttaaacgaagatccgagcgacggctcctccccgatccccgacagtggctctccaagcggcccccgggcagccccagagcaccccgcccgactcccattaacctcgagaaccnnnnnnnnnnaaccaaaaccaggagccaggctgtgcatgtcccccgccccccatcccagccggcccggtccgaacgcgggcgtcgtgtgttgtgattgtggcatggagagtccccatc

SEQ ID NO: 97528 - DNA, 1049 bp, Homo Sapiens
ccctgggtgcctcccccgcccggcctccttgccgtacctgtccgtggaccgtgtctctccgtgcgcctccgcttacagtttagtaccgccgcggccggtcggcctgcctgccggggcttccatctcgcatccggcctgttggggccgccaccagcatcctgtgtccctagcacccggcagacgttctcagagcatctcttcggtgagtatcttattgaatgtttgctctggtcactttatttaaaggagcacagaccctccacgttccagctctttcaggatgcctcctgctgcctcacttggctgagctctcctcttcagtgtcctcttcctctgcccacatctccaagcttcctcgtgagatctggagtgcctatctgtcaaagcagccgtggggaacatgtggctcccactgaagtagctgcttccataggtgtcggcgaggcagtgcctgggctcagctgcaatggccatatgcatgtctaagggatgcagggacgggcacgggacacatatccaagggctgcagcggttggtacggggtgtggagggatgagcctgtactccccgagagcaggctccctgaacggtgggcctgcaaggagtcccgataggccaagcataggtcctgcacgggggtctggaactgtgccagggtggtcgctggctggccgagggccgggtaggctggtggctggaacagcacttgagtgggggtggggggtgtgccgggcaccattgccaaggcctggctcttgacggctacggcatccttgaggacgttgtcatacactaccagcaggatttcaatacacgtgctgaggtgctccagggaatagcttgagatcctctgcaggtctctggtccagtagggagaaagctgcaggcaaatcctggaggccccaacacaggccgcagcgaccacagaaggctggaatttgtagaatatgtgatcttgcagggtgacctctaggaagtaatgggcatactgccgtgaggcactccctcgtgccgaatttacacacccagcctcgtacctagcctaactt

SEQ ID NO: 97529 - DNA, 1228 bp, Homo Sapiens
  misc_feature (1016)..(1028): n is a, c, g, or t
taacggctaggtacgaggctgggtggtgaattcggcacgagggcatggccacctttgtgcttgagctcttctctgatcagaagctgcaggaggtgagccggatcttgaaacaggtcttccttatcttcccccacttctgcttgggccgggggctcattgacatggtgcggaaccaggccatggctgatgcctttgagcgcttgggagacaggcagttccagtcacccctgcgctgggaggtggtcggcaagaacctcttggccatggtgatacaggggcccctcttccttctcttcacactactgctgcagcaccgaagccaactcctgccacagcccaggtgaggtctctgccactcctgggagaggaggacgaggatgtagcccgtgaacgggagcgggtggtccaaggagccacccagggggatgtgttggtgctgaggaacttgaccaaggtataccgtgggcagaggatgccagctgttgaccgcttgtgcctggggattccccctggtgagtgttttgggctgctgggtgtgaatggagcagggaagacgtccacgtttcgcatggtgacgggggacacattggccagcaggggcgaggctgtgctggcaggccacagcgtggcccgggaacccagtgctgcgcacctcagcatgggatactgccctcaatccgatgccatctttgagctgctgacgggccgcgagcacctggagctgctttgcgcgcctgcgcggtgtcccggaggcccaggttggcccagaccgctggctcgggcctggcgcgtctgggactctcatggtacgcagaccggcctgcaggcacctacagcgggagggaacaaacgcaagctggcgacgggccctggcgctggttggggacccagccctgggtgttttctggacaagccgacccaccgggcttggaacccaagcgcgggggggcttttcctttggaaaaaaccctttttggcccgtggtttgccggaaagggcccctttcagtggattgnnnnnnnnnnnnnttaacctttggaagggaattgtaaaaaccgctttttggttttgggccttaaaccctttcttgggtggaaaatgtgggcgggtttccccccttttcccttggggaccaaccccgccgaaaacatttttcttaaggggcataaaatttctccgcccgggcgggggtcttaaaaaccccttgaaacccctcgggggggtggtg

SEQ ID NO: 97530 - DNA, 1059 bp, Homo Sapiens
  misc_feature (291)..(341): n is a, c, g, or t
ggagcgaggcctgggtggcgaattcggcacgaggggcgaccccagccggcgacgcgtgaaccacgccctcagccgccttgccagcgcccccagccgcgcgccccagcaccatgcggccgccctgcgcacggagccccgagggacaggggcacccgcaggcccggcccctagcaccgccggccggccccgaggtccgggacgccggcgccgccgcggagagggcaccgggccgacgcctccccccagggtcagctgcgggctcccaggcctaggcgcccatgacccctacgnnnnnnnnnnnnnnnnnnnnnnnnnnnnnnnnnnnnnnnnnnnnnnnnnnngccggggcccaatgccggtcatgcccattccgcggcgggtgcgctccttccacggcccgcacaccacctgcctgcatgcggcctgcgggcccgtgcgcgcctcccacctggcccgcaccaagtacaacaacttcgacgtgtacatcaagacgcgctggctgtacggcttcatccgcttcctactctactttagctgcagcctgttcactgcggcgctctggggtgcgctggccgccctcttctgcctacagtacctgggcgttcgcgtcctgctgcgcttccagcgcaagctgtcggtgctgctgctgctgctgggccgccggcgcgtggacttccgcctggtgaacgagctgatcgtctatggcatccacgtcacaatgatgctggtcgggggcctgggctggtgcttcatggtcttcgtggacatgtgagggccgtgggtgcgagcttgatgtatcgtcccggcctgtggctgtgttctctccatgggtggggtcggccagcgccttcccttcgcccatcccccaggcagtcgctgctgcccggcgcccacggagagaacaagaaagggctgagacttctgtgatgggggcgcggacaccagccctaggctggcttcctggacccaccctccccgttatgcactctcaggggcaagagcccacctgccggtggctcctgctcacatgtcttcgggtcgtactgcggggtgggcctc

SEQ ID NO: 97531 - DNA, 1446 bp, Homo Sapiens
tccgtgaatgtgctggtgcagaactgcaagatctacaatgatgccagctgtgacatttctgcagatggccagctcctggcagctttcatccccagcagccagaggggctttcctgatgaaggcatcctggcagtgtactccctggccccccataacctgggcgaaatgctctacaccaagcgatttggtcccaatgccatttcggtgagcctgtccccaatgggcagatatgtaatggtgggcttggcctcacgaaggatcctgctgcacccctccacagagcacatggtggcccaggtcttcaggctgcaacaggcccatggtggagagacctccatgaggagagttttcaacgtcctttatcccatgcctgccgaccagcggagacatgtcagtatcaactctgcccgttggctgcctgagccagggcttggcttggcctatggtactaacaaaggagacctggtgatctgccgaccagaggccttaaactctggtgttgagtactactgggaccagctgaacgagacggtcttcactgtccattccaacagcaggagcagcgagcggcctggaaccagcagagccacatggaggacagacagagacatggggctgatgaatgccattgggcttcagccccggaaccctgccacctcagtgacatctcagggcacccagactctggcccttcagctgcagaatgccgaaacacagactgagagggaggtgccggagccaaggacagccgcctcaggtcctggtgaaggtgagggttcagagtatggtgccagtggagaagatgcgctcagcaggatccagaggctgatggcggagggcggcatgacagccgtggtgcagcgggagcagagcaccaccatggcctccatgggcggcttcggcaacaacatcatcgtcagccaccgcattcaccgcagctctcagacgggcactgaacctggtgccgcccacacctcctcaccccagccctccacctctcggggactgctcccagaggccgggcaactggcagagcgaaggcctaagcccccggacagcttcctgggaccagcctggtacccctgggcgggagccaaaccagccaaccctgccctcttcctcccctgtccccattcctgtttccctttcccagcgctgagggaccaaccctaccactgcgagttgaacaataacaaccacctttctggatggtggcagcaacaggggggacgctgcacgcctagggaggaccacgcaaccggtagagacaaccgttgactgtgctccctcgaacgcgaggaaacggactcaccgtgacgggaaatgcctgtggaaacgctggtctccgaccggggcgaagggccgggaggagaagggaaaagcaaggggcgcggaaaccggttgccggaccggctgtataaaggtccgcctcaagggccgcgcgaa

SEQ ID NO: 97532 - DNA, 346 bp, Homo Sapiens
  misc_feature (124)..(124): n is a, c, g, or t
gtaccgggtcatacggatgtgcgggtgtgaggcaggcaacggagcgttgcaggcaacggcgagttagtcacgagtgggacagctcagctctcggcgtgtcatggtaggtaagggaggccagggncagtcaggacacttaaaggcaaagccaatcctgtagctttctgcaggcaggcaaggatcagtgggatggggcacacggctgtaaggaccacaccaaatgcccgccttcatcgtgcagaggcggcgcccaggtgcaggcagggaagggggcatgcagttggattaccggtgggccacactcagccccacgccacatctctgctctccgggcggaagctgccgt

SEQ ID NO: 97533 - DNA, 1300 bp, Homo Sapiens
  misc_feature (887)..(887): n is a, c, g, or t
  misc_feature (891)..(891): n is a, c, g, or t
  misc_feature (1075)..(1234): n is a, c, g, or t
ggcagtaactctaacgggttctaaggtagcgaggcctgggtggcgaattcggcacgaggcggagctgatcgggcgcctagccccgcgcctgggcctcgccgagcccgacatgctgaggaaagcagaggagtacttgcgcctgtcccgggtgaagtgtgtcggcctctccgcacgcaccacggagaccagcagtgcagtcatgtgcctggaccttgcagcttcctggatgaagtgccccttggacagggcttatttaattaaactttctggtttgaacaaggagacatatcagagctgtcttaaatcttttgagtgtttactgggcctgaattcaaatattggaataagagacctagctgtacagtttagctgtatagaagcagtgaacatggcttcaaagatactaaaaagctatgagtccagtcttccccagacacagcaagtggatcttgacttatccaggccacttttcacttctgctgcactgctttcagcatgcaagattctaaagctgaaagtggataaaaacaaaatggtagccacatccggtgtaaaaaaagctatatttgatcgactgtgtaaacaactagagaagattggacagcaggtcgacagagaacctggagatgtagctactccaccacggaagagaaagaagatagtggttgaagccccagcaaaggaaatggagaaggagagaggagatgccacataaaccacagaaagatgaagatctgacacaggattatgaagaatggggaaaagaaacaatttgggaaaactgctgccagtgctcaaaaggctacagcagagtgatttcagcttccaaactggtatacattccaaactgatagtacattgccatctccaggaagacttgacggctnttgngattttgtttaaacttttataataaggatcctaagactgttgcctttaaatagcaaagcagcctacctggaggctaagtctggggcagtgggctggccccctggtgtgagcattagaccagccacagtgccctgattggtatagcccttatgtgctttcctacaaatgggaaattggagggcgnnnnnnnnnnnnnnnnnnnnnnnnnnnnnnnnnnnnnnnnnnnnnnnnnnnnnnnnnnnnnnnnnnnnnnnnnnnnnnnnnnnnnnnnnnnnnnnnnnnnnnnnnnnnnnnnnnnnnnnnnnnnnnnnnnnnnnnnnnnnnnnnnnnnnnnnnnnnnnnngggcatggcctggaatccccacctccctcaattagggctgaaaccaggagcatcactttggaacgg

SEQ ID NO: 97534 - DNA, 1001 bp, Homo Sapiens
tgtcctgccgatgctgcggccgtagccctacgagttcttccgtcgtaaggttaccgcctcgaggataagggaccttcacactttcactagtcatgagttaaattttggagaggccccactgtgattggatgttaagagcaccaatcccattttacaaccttgagttataagtttcttgtaggtgcttcactacctcatgatatgccttgccagaaagtagcgcctggagatggaagattttgggttgcaggtgatttaattgacgatgtgttcttcaggaaaaatcacttttaggggaaaggcatggtttccaggatttcagctgtgtctttaagggctggaggtggatgtctgttgactcttgggatgctctgagacatgttaaatccttccatggcactgctggtccctgtggactagctgggacctgctgcctgggtcatcaaactccctctctaaatcctccaacagggtcacagcttcctcgccgctttctggatttatgttgctgaacccagatctgcagctcctcaggcagaatgctcaggaactgctccagtaccagcagttctaagatctgctcctttgtgtgcaactctggcattagccactgatagcaaagttcctggagtcggctcagagcctcccggggcccaggtgtctcctggtagcaaaattttctgaattgctgacgaaacaattcttggcaggattgagtactcccattctgcttaaatttctcatcccaggaaaagttatcttctactttcactagtattagttcttgttccggaggatcctgaggtatcagggttgaaatcactccagattccacagccattcttggctgaaacagcttagcaaaaagctcagtacaactggttctgtgcttgagaaggagtgtgagtaatctcttctatccgcgaagcccaggagcggccaggaaatgagccacccaccccgagctgcaagccacaaagaccggaagtgcgcgtacgcag

SEQ ID NO: 97535 - DNA, 875 bp, Homo Sapiens
aacatagctagtacgaggctgggtgtgtaatcggcacgagggccggagcccgagtactagcagcagccggagtcggcgtaaagcacccgggcgcagccggagccggtgccgcagctgcgatggccgtggccgtggggagaccgtctaatgaagagcttcgaaacttgtctttgtctggccatgtgggatttgacagcctccctgaccagctggtcaacaagtctacttctcaaggattctgtttcaacatcctttgtgttggtgagacaggcattggcaaatccacgttaatggacactttgttcaacaccaaatttgaaagtgacccagctactcacaatgaaccaggtgttcggttaaaagccagaagttatgagcttcaggaaagcaatgtacggctgaagttaaccattgttgacaccgtgggatttggagaccagataaataaagatgacagctataagccgatagtagaatatattgatgcccagttcgaggcctacctgcaagaggaattgaagattaaacgttctctcttcaactaccatgacacgaggatccatgcctgcctctactttattgcccctactggacattcactaaagtccctggatctggtcaccatgaaaaagctggacagtaaggtgaacatcattccaataattgcaaaagctgacaccattgccaagaatgaactgcacaaattcaagagtaagatcatgagtgaactggtcagcaatggggtccagatatatcagtttcccactgatgaagaaacggtggcagaaattaacgcaacaatgagtgtcatctccattgcagtggttgcagcaccgaaagtgaatggcacagatggaagccgcgaccggggttgg

SEQ ID NO: 97536 - DNA, 471 bp, Homo Sapiens
tttaaactctcataatcatgactaataaaaaatactgatgaattgaactgatgtctgagagacattgacacattctctgatttttcttttgtggttatgtaggtgagacaggcattggcaaatccacgttaatggacactttgttcaacaccaaatttgaaagtgacccagctactcacaatgaaccaggtgttcggttaaaagccagaagttatgagcttcaggaaagcaatgtacggctgaagttaaccattgttgacaccgtgggatttggagaccagataaataaagatgacaggtacatcttgggattttggggggacatgaatggatgaggagatagcaggatccatcccaggtaaatttaaaggccaaatgttttggggattttttagttgtggggcttggtcctctattgcctaaaaggtgtgatattcttgtcctctgagaatatttctgagaatattcttc

SEQ ID NO: 97537 - DNA, 912 bp, Homo Sapiens
tagcagtacgagctggtgttaatcggcacgagggggctgcgggcgctcgctggtggcggacccggaggctgctgcggcgccggggctccgtggcctggattgaatccgatcgggagccatgagcgtggacaaagctgagctatgcgggtctctgctcacctggttacagacgttccacgttccgtctccctgtgccagccctcaggacctgagcagcggccttgccgtagcctatgtgctgaaccagatagacccctcctggttcaacgaggcatggctccagggcatctcggaagatccaggtcccaactggaagctgaaggtcagcaatctgaagatggtcttacggagcctagtagagtactcccaggatgtcctggcgcatcctgtgtcagaagagcatctcccagatgtgagcctcattggagagttctcagacccggcagagctcggcaagctgcttcagctggtgctgggctgtgccatcagttgcgagaaaaagcaggaccacatccagagaatcatgacgctggaagaatcggttcagcatgtggtgatggaagccatccaagagctcatgaccaaagacactcctgactccctgtcaccagagacgtatggcaactttgacagccagtcccgcaggtactatttcctaagtgaggaggctgaggagggggacgaattacagcagcgctgtctggatctggagcggcagctgatgctcctgtcagaggagaagcagagcctggcgcaagagaatgcagggctgcgggagcggatgggcccggctgaaggcgaaggtacccaggtctcactgcaaagaagctgtggtgctggaatcccagtggagcagtgcggaggagaattcggtggaagtgcgggagggctggtgtgccatgaaggggttcg

SEQ ID NO: 97538 - DNA, 1051 bp, Homo Sapiens
  misc_feature (895)..(895): n is a, c, g, or t
gctcccagggctggagtctggaaaaccacgcgggaggaggttgtggggatatggacgagcatccgaggcccccgggtgcgtacggctgcgcatgagtgggctgtaatcgggtgtctggggttacagacgttccacgttccgtctccctgtgccagccctcaggacctgagcagcggccttgccgtagcctatgtgctgaaccagatagacccctcctggttcaacgaggcatggctccagggcatctcggaagatccaggtcccaactggaagctgaaggtgacaagtggactcctgattagaggacagactggtcagcaatctgaagatggtcttacggagcctagtagagtactcccaggatgtcctggcgcatcctgtgtcagaagagcatctcccagatgtgagcctcattggagagttctcagacccggcagagctcggcaagctgcttcagctggtgctgggctgtgccatcagttgcgagaaaaagcaggaccacatccagagaatcatgacgctggaagaatcggttcagcatgtggtgatggaagccatccaagagctcatgaccaaagacactcctgactccctgtcaccagagacgtatggcaactttgacagccagtcccgcaggtactatttcctaagtgaggaggctgaggagggggacgaattacagcagcgctgtctggatctggagcggcagctgatgctcctgtcagaggagaagcagagcctggcgcaagagaatgcagggctgcgggaacggatgggccggcctgaaggcgagggtaccccaggtctcactgccaagaagctgctgctgctggcatcccagctggagcagttgcaggaagagaacttcaggctggaaagtggcaggggagatgancgcctgcgctgtgcccaactggaaaagggaagtttgcggaactgccacaccgggaccaggcgctgactaacctgggcccaggagggacaaggccctggaaggattacgggcatggagccaacgcgccctggcccttctttcttttcctttacctgg

SEQ ID NO: 97539 - DNA, 867 bp, Homo Sapiens
aggctggaccggtccggattcccgggatcggacccggaggctgctgcggcgccggggctccgtggcctggattgaatccgatcgggagccatgagcgtggacaaagctgagctatgcgggtctctgctcacctggttacagacgttccacgttccgtctccctgtgccagccctcaggacctgagcagcggccttgccgtagcctatgtgctgaaccagatagacccctcctggttcaacgaggcatggctccagggcatctcggaagatccaggtcccaactggaagctgaaggtgacaagtggactcctgattagaggacagactggtgaagagatgaccagggacgggccagctaggcacatgtcctgggtgatgggcaggaagagggacagatgtctggtgatcaaccatttgttcatccattcatctatggagtactcaccctgtgccaggcctgggcattcagcaaggaataacacagacaaaaacctgccccacacagccatcattctagtgacaagcaacacatacacaaccataaaaattaacttacaggcatgagccaccgcgcctggccttctttcttttcttttacctgtctgctattgaagagatttgtattctagaaagatccctggctgctggatggagtgcttgagagtagaagaagctagcaagggaagatggtggctgaaccagcttgggagctgtgggatgggaagaagtggacagcaggggctgttccggggcatacctgctaagggtgcggaagggttgtggctctgacagctgtggagccggtgggaccagggcacacagcccccaggcatgaagggcaggcagagagggctctgtggccatgta

SEQ ID NO: 97540 - DNA, 963 bp, Homo Sapiens
ggggtggttgtggaggagcgggcgatgggaaggaatgggcgggtttagtggggcgggtgcctgtctggtgggtggcagagttcagctccctggaggggaaggagggacgtcccaaggaagggtctttgagaaaggggtaggggacgacatcaggagaaggctcccaggaactgtctcaggggagcgaaggttttgaggggacagctggggtctccagtagatagaccacggtgcaggctgagggaggtacttcttggcacaaggcctcgggtaggcagggggcgaagtcctcgaagaagtggggggaaggctagaggaagtggctgggcctgaactggcactgtgcctgccacaaggtcttgtgcatcccccagccctcagctttgccttctgaagccactcctcaggggcacagaccctcctcctcctccatctctaatgttctctgacccctggttacctgtggcctgggaacgaacaaggaccagtctctgagcctaggagtgaaacccaaacgctggtgatagaattcgtcttagtttctgggaattggatttatttctcttgtatccacgtagagggtagcactagactgctgttattatatccacccgtctttggattgctggctggggggtctgcctgccttccagactgactgctgacaaataattcctgaggttctccacaagttcttctggtggctgcaccctgcctggaccctgtaaccttagacaatttcgtttacagaaagttcaggagccctggaaagcgagcaaggcataagacggcaggaggaaagagagagagagggtacgaatggaagaatctcacttcaattctaacccgtacttctggcttttatccccaaagtcttcagtcagcatcgaaaccacatgttcatcaccaagaggcacgacagtgttggcaaacagggttgggtttggccactcaataaccact

SEQ ID NO: 97541 - DNA, 1009 bp, Homo Sapiens
aggctaggtgcgaggcctgggtggtgaatcggcacgagggcttggcagcgatcgcgagcgtgtggcgattgcttctgtctgttatttagatatggaagctgaggggatgcacagaggcagccagaacctaggtcagggtctcgctcggtgctgaccgcccccggggtcgagtaggcgatgggggagcccggcttcttcgtcacaggagaccgcgccggtggccggagctggtgcctgcggcgggtggggatgagcgccgggtggctgctgctggaagatgggtgcgaggtgactgtaggacgaggatttggtgtcacataccaactggtatcaaaaatctgccccctgatgatttctcgaaaccactgtgttttgaagcagaatcctgagggccaatggacaattatggacaacaagagtctaaatggtgtttggctgaacagagcgcgtctggaacctttaagggtctattccattcatcagggagactacatccaacttggagtgcctctggaaaataaggagaatgcggagtatgaatatgaagttactgaagaagactgggagacaatatatccttgtctttccccaaagaatgaccaaatgatagaaaaaaataaggaattgagaactaaaaggaaattcagtttggatgaattagcaggtcctggagctgaaggcccctcaaatttgaaatccaaaataaataaagtgtcttgtgaatcctggtcagcagtgaatcacaggggacaggtgaagtgggcgtacacctctgacattgggatctaagtgactgccttgaccagtagacacggggtccttaccggtcccaagttcgagttcatctgagagaaatcaaatcctaaatcgagagtcagagtttgggcacgccggttcgggcaaaaaaggggaaatgaactaaggaaaccaggacaatgggggggacgaaccgggagggcgaggaaaacagaacgtggaaaaaggcaaaaaacgtctgaaacgccaggtg

SEQ ID NO: 97542 - DNA, 1771 bp, Homo Sapiens
  misc_feature (161)..(216): n is a, c, g, or t
  misc_feature (1747)..(1747): n is a, c, g, or t
cggccccgcacacccgccaccccgcaccactcctaccacaacgccggtggtccggtccggattcctccatggggcggagggaggggattcggttgctccagttcagctcgctcggcgcacccacgcctcgctgccccgcttcctgccctcaacctgggcannnnnnnnnnnnnnnnnnnnnnnnnnnnnnnnnnnnnnnnnnnnnnnnnnnnnnnnagagctggccgcgcaggatgggcgccctcaggcccacgctgctgccgccttcgctgccgctgctgctgctgctaatgctaggaatgggatgctgggcccgggaggtgctggtccccgaggggcccttgtaccgcgtggctggcacagctgtctccatctcctgcaatgtgaccggctatgagggccctgcccagcagaacttcgagtggttcctgtataggcccgaggccccagatactgcactgggcattgtcagtaccaaggatacccagttctcctatgctgtcttcaagtcccgagtggtggcgggtgaggtgcaggtgcagcgcctacaaggtgatgccgtggtgctcaagattgcccgcctgcaggcccaggatgccggcatttatgagtgccacaccccctccactgatacccgctacctgggcagctacagcggcaaggtggagctgagagttcttccagatgtcctccaggtgtctgctgcccccccagggccccgaggccgccaggccccaacctcacccccacgcatgacggtgcatgaggggcaggagctggcactgggctgcctggcgaggacaagcacacagaagcacacacacctggcagtgtcctttgggcgatctgtgcccgaggcaccagttgggcggtcaactctgcaggaagtggtgggaatccggtcagacttggccgtggaggctggagctccctatgctgagcgattggctgcaggggagcttcgtctgggcaaggaagggaccgatcggtaccgcatggtagtagggggtgcccaggcaggggacgcaggcacctaccactgcactgccgctgagtggattcaggatcctgatggcagctgggcccagattgcagagaaaagggccgtcctggcccacgtggatgtgcagacgctgtccagccagctggcagtgacagtggggcctggtgaacgtcggatcggcccaggggagcccttggaactgctgtgcaatgtgtcaggggcacttcccccagcaggccgtcatgctgcatactctgtaggttgggagatggcacctgcgggggcacctgggcccggccgcctggtagcccagctggacacagagggtgtgggcagcctgggccctgcctatgagggaccacacattgccatggagaaggtggcatccagaacataccggctacggctagaggctgccaggcctggtgatgcggacacctaccgctgcctcgccaaagcctatgttcgagggtctgggacccggcttcgtgaagcagccagtgcccgttcccggcctctccctgtacatgtgcgggagggaaagtgtggtgcctggaaggctgtggcatggctagcaggaggcacagtgtaccgcgggggaaactgcctccctgctgtgcaacatctctgggcggggtggacccccaggaactgcggctgcccgccagtttggtggggtggaagccaccacaaggaacggagagcctcatctcttgtcccctggcccagctgggtggggtgggncgtaggcccacgaatgggctgtgg

SEQ ID NO: 97543 - DNA, 901 bp, Homo Sapiens
gatgaggccgcgtgtaaatcggcacgaggagcgggagaactcccggaacaccaccctgggttttgggctcaaaggccaaagtgagaagtccctgctgcaggagatggtgccggtggtgccaggccagacaggcagcgacgtgactgtgtcctggagccccgaggaggctgaggcctgggagagcgagaaccggccgagggcggccctgggcccagtggtgggcgcgcgacgggggcggccacccactcgccggcgccagttccgggacctggcagccgagaagccgcacagctgcgggcagtgtggaaagcgcttccgctggggctcggacctggcgcggcaccagcgcacgcacacgggcgagaagccacacaagtgccctgagtgcgacaagagcttccgcagctcctcggacctggtgcgccaccaaggcgtgcacacgggcgagaagcccttctcctgttccgagtgcggcaagagcttcagccgcagcgcctacctggccgaccaccagcgcatacacacgggcgagaagcctttcggctgcagcgactgcggcaagagcttctcgctgcgctcctacctgctggaccatcggcgtgtgcacaccggtgagcggcccttcggctgcggagagtgcgacaagagcttcaagcagcgcgcgcacctcatcgcgcatcagagcctgcacgccaagatggcccagcccgtgggggggagcagctggctttggccggaaacccgggggaggcccaggcacggcacatcctgctttgttcaccactgggactctccttccatctgtgggcacctcccgggctgtccgagggacccaggtacctcacactcggagctcgctgccctgcttggtctgaggactgccaggctcaaagggacggac

SEQ ID NO: 97544 - DNA, 1138 bp, Homo Sapiens
  misc_feature (1107)..(1107): n is a, c, g, or t
gtgcggctgcgtgtgtaatcggcacgagggtatgctgtcaccttacatccccgacaagactgggcgctatatgataggagtcacctacgggggtgacgacatcccactttctccttatcgcatccgagccacacagacgggtgatgccagcaagtgcctggccacgggtcctggaatcgcctccactgtgaaaactggcgaagaagtaggcttgtggttgatgccaagactgccgggaagggtaaagtgacctgcacggttctgaccccagatggcactgaggccgaggccgatgtcattgagaatgaagatggaacctatgacatcttctacacagctgccaagccgggcacatatgtgatctatgtgcgcttcggtggtgttgatattcctaacagccccttcactgtcatggtgaccgaagaggcctatgtcccagtgagtgacatgaacggcctgggatttaagccttttgacctggtcattccgtttgctgtcaggaaaggagaaatcactggagaggtccacatgccttctgggaagacagccacacctgagattgtggacaacaaggacggcacggtcactgttagatatgcccccactgaggtcgggctccatgagatgcacatcaaatacatgggcagccacatccctgagagcccactccagttctacgtgaactaccccaacagtggaagtgtttctgcatacggtccaggcctcgtgtatggagtggccaacaaaactgccaccttcaccatcgtcacagaggatgcaggagaaggtggtctggacttggctattgagggcccctcaaaagcagaaatcagctgcattgacaataaagatgggacatgcacagtgacctacctgccgactctgccaggcgactacagcattctggtcaagtacaatgacaagcacatccctggcagccccttcacagccaagatcacagatgacagcaggcggtgctcgccaggtgaagttgggctcagccgctgacttcctgcgtcgacatcagtgagactgacctcagcagcctgacggccagcattagggccccatctggccgagacgagccctgtctcctgaagaggctgnccacaaccacattggcatctccttcatcccc

SEQ ID NO: 97545 - DNA, 840 bp, Homo Sapiens
aataaggctaggtcgaggctgggttaatcggcacgaggagagaggctacggattcaggcgagaggcgacggcgagagctagagcgggcgcagcgttagggtggccgtgcaaggggagccgtggcccgggcccggggcgtgcgagacggcggaagcagcccagggccttgctgccgccatgactgaggaatcagaggagacagtcctgtacattgagcaccgctatgtctgctctgagtgcaaccagctgtatggatcactggaagaggtgcttatgcaccaaaactcccacgtgccccagcagcactttgagctggtgggcgtggctgatcccggagtcactgtggccacagacacagcttcaggcacgggcctctatcagacccttgtgcaggagagccagtaccagtgcctggagtgtggtcaactgctgatgtcacccagccagctcctggagcaccaggagctgcacctgaagatgatggcaccccaggaggcagtgccagctgagccatcacctaaggcaccacccctgagctccagcaccatccactacgagtgtgtggattgcaaggctctctttgccagccaggagctctggctgaaccaccggcagacgcacctccgggccacacccaccaaggctcctgcccctgttgtcctggggtccccagttgttctagggcctcctgtgggccaggcccgagtggctgtggagcactcataccgaaaggcagaagagggtggggaagggggcgactgtcccatctgccgctgcaccaacacatgaggtagtgacttgaggtggagctgctcctctacaagtgctctgaagtgctcc

SEQ ID NO: 97546 - DNA, 1010 bp, Homo Sapiens
aaaggctaggtacgaggctgggtggcgaatcggcacgagggaagtgacgatggtgatcgttgctgccgaggccgatatggaacccaagcagtggcgaagggaatcgcaaggctcttccctgaccattttctactgtccctgcgcgaggtgagggccccggctcggcctctgcaaaactttggggcgctggcgcggaggaggagacaggatttctcccgtgacttttgtaactgcgtcagggcaagatggcgctgggtctccttggggcgcggggggagaggcacgtccaccgccgcagcgcatgtgaccgggctgcattcctgtggggtttggctccgacccaggccggggcgggggacggggacagggcttgggcggaggagactgtggtgcggtcggcgttggctggcctgaagaggaagagatgactgttggaaagcgttcccctcccccatacggcagaacagctgcggctcccaggggaaagcccccgcaggacagtcctcgtggggtgtgacggctgttggtggagaaggtttggcgccctattttcttatctgcctttctccccgcaaagtatacttatgtaaggtggtagttccctgacgtgggactcggaatcaactaggagtccttgagggcctctgggaggcctagcgagggggtagaccagcttctgggggtacaaacgtcaaggaggatcgattactttctgaggaaacagtttctcagattgaacatagaaaagtatttccaaagtatggaaacaaatttaaaggtgtaaataacacccaggaacactttaattgcttcgaaaaggcataagcagccatctgaatttaagggcgccttttcagactttccttctccgtgatcctggtcttattcagttctgtctgtcatcctaagattagtttgggcggggatcgccttgtgccaggcgttgggagggaatcggccctgactccctccgggtggagatttgccccccgggggttgggcccccgttt

SEQ ID NO: 97547 - DNA, 886 bp, Homo Sapiens
  misc_feature (656)..(656): n is a, c, g, or t
  misc_feature (798)..(798): n is a, c, g, or t
ggagagacaccgagacgcagagacactcaggaggggagagacaccgagacgcagagacacccaggccggggagcgcgagggagcgaggcacagacctggctcagcgagcgcggggggcgagccccgagtcccgagagcctgggggcgcgcccagcccgggcgccgaccctcctcccgctcccgcgccctcccctcggcgggcacggtatttttatccgtgcgcgaacagccctcctcctcctctcgccgcacagcccgccgcctgcgcgggggagcccagcacagaccgccgccgggaccccgagtcgcgcaccccagccccaccgaccaacccgcgcgccatggaccccaaggaccgcaagaagatccagttctcggtgcccgcagccccctagccagctcgaccccgcgccaggtggagatgatccggcgcaggagaccaacgcctgccatgctgttccggctctcagagcactcctcaccagaggaggaagcctccccccagccagagagcctcaggagaggggcaccatctcaagtcgaaggagaaccaacccctggtgcctatcacagccagccttcgctgaaaggctgtgcagcgcattgctgagtctcacctgcagtctatcagcaatttgaatgagaacccagcctcnaaagaggaggatgagctgggggaacttccgggagctgggttatcccagaaaggaagatgagggggaaaaaggaggatgatgaacaagaaggaagaaagaagaggaccgcccaggctgaagccctgaagggtcatcaaggcantcctgcttgggcaaaaagacaacctgggggccaggggtctggaaaaggccccctgggaagggccccacccccttcgggaaggaggccc

SEQ ID NO: 97548 - DNA, 1634 bp, Homo Sapiens
ggctaggtacgaggcctgggtgtagaattcggcacgaggcgaagctacaatcttagtccgaagaggtggccccaactatcaggagggcttacgggtgatgggagaagtcgggaagaccactgggatccccatccatgtctttggcacagagactcacatgacggccattgtgggcatggccctgggccaccggcccatccccaaccagccacccacagcggcccacactgcaaacttcctcctcaacgccagcgggagcacatcgacgccagcccccagcaggacagcatctttttctgagtccaggccgatgaggtggcgcctgcaaagaaggccaagcctgccatgccacaagattcagtcccaagtccaagatccctgcaaggaaagagcaccaccctcttcagccgccacaccaaggccattgtgtggggcatgcagacccgggccgtgcaaggcatgctggactttgactatgtctgctcccgagacgagccctcagtggctgccatggtctaccctttcactggggaccacaagcagaagttttactgggggcacaaagagatcctgatccctgtcttcaagaacatggctgatgccatgaggaagcacccggaggtagatgtgctcatcaactttgcctctctccgctctgcctatgacagcaccatggagaccatgaactatgcccagatccggaccatcgccatcatagctgaaggcatccctgaggccctcaccgagaaagctgatcaagaaggcggaccagaagggagtgaccatcatcggacctgccactgttggaggcatcaagcctgggtgctttaagattggcaacacaggtgggatgctggacaacatcctggcctccaaactgtaccgcccaggcagcgtggcctatgtctcacgttccggaggcatgtccaacgagctcaacaatatcatctctcggaccacggatggcgtctatgaaggcgtggccattggggggggacaggtaccccgggctccacattcatggatcatggtgttacgctatcaggacactccaggagtcaaaatgattgtgggtcttggaaaaattgggggccacttgaggaatataagatttgccggggcatcaaggagggccgcctcactaagcccatcgtctgctggtgcatcgggacgtgtgccaccatgttctcctctgaggtccagttttggccatgctcgagcttgtgccaacccaggcttctgaaactgcagtagccaagaaccaggctttgaaggaaagcaggagtgtttgtgccccggagcttttgatgagcttgggagagatcatccagtctggataccaagatctcgtgggcaaatggagtcattgtaccttgcccaggaggtgccgccccccaaccggggcccatggaactactccctggggccaaggaactttgggtttgattccgccaaccctgccctcgttcatgaaccagcaatctgccaatgaacgaggaacaggaagctccatcttacggcgggcatggcccatcaccttaaggtctttcaagggaaaaagatgggccattggcgggggtcccccgcgcccccctctgggttccaaaaaaaggggggcctaaagaacttctgtg

SEQ ID NO: 97549 - DNA, 996 bp, Homo Sapiens
ggtaggtagcgaggcctgggtggcgaatcggcacgagggtacctgtggacacatgtaccagctcaccaaggcccccgcccacaccttctggagggaaagttgcggagcccggtgtgtgctgccctgggctgagtttgagtccctcctgggcacctgccaccctgtggaaccaggctgcacagccctggccttgcgcaccaccattgacctcacctgcagcgggcacgtgtccatcttcgagttcgacgtcttcaccaggctctttcagccatggccaacactcctcaagaactggcagctcctggcagtcaaccacccaggctacatggccttcctcacctatgatgaggtccaagagcgtctgcaggcctgcagggacaagccaggcagttacatcttccggcccagctgtactcgcctggggcagtgggccatcggctatgtgagctcagatggcagcatcctgcagaccatccctgccaacaaacccctgtcccaggtgctcctggagggacagaaggacggcttctacctctacccagatggaaagacccacaacccagacctgactgagctcggccaggcagaaccccagcagcgcatccacgtgtcagaggagcagctgcagctctactgggccatggactccacatttgagctctgcaagatctgtgctgagagcaacaaggattgtgaagattgagccgtgcgggcacctgctctgcagctgctgcctggctgcctggcagcactcggacagccagacctgccccttctgccgctgcgaaatcaaggcctgggaggccgtgagtatctaccagttccacggtcaggctactgctgaggactcagggaacagcagtgaccaggaaggcagggagttggagctggggcaggtgcccctttcggctcctccattgcccccacggccagatctgccccccatgaagcccagaaatgcccagccgaaagtgagactcctaaaggggaactccc

SEQ ID NO: 97550 - DNA, 735 bp, Homo Sapiens
  misc_feature (13)..(13): n is a, c, g, or t
ggctccacgttgntggagaaggtcaacatcctgaagctcaagtgcaagccatggttgggtgtcatttttacaggctgattggtggtacctataatatagggacatttatgatacttgcaggtgagggccccattgaccaactcactgatggagcctgcttcactcaggtcatccaatagaatcaccaggggcacatccccaattcctgtttcccggtctatctggttggctaggttggaaagatacagttgcagatccttgcaagactgctggtgcatgttgaaggtgctgacgatgccctctgtgacctcacggccagagcgctccaccaggtactcggccaagcgattggtcaggtaggtcttgcccgtgccgctggggcccgagaggacgaggcgccggtgcttcagcaggaggcttatgtagtgctgcatcatcggcttggggatcagcgtctcgaacaccaggctgtcgacgcatttctccttcagacctttgagggagactgatatgttattgacacctcgacggcaaggaggcatctcggggggctctgcatccaacactcgtttcacgtggctgatgctgtagccatggatggactcagtgcttagtcccagggtagaggctgggtccattttagaaatatagtccttgaacacttggaaaacagcttcatccagcatcttccagtcaacttttccactgaccttgctacagcccaggaagaagtcc

SEQ ID NO: 97551 - DNA, 792 bp, Homo Sapiens
taataagaaatatatgtttataaaattaggtttaaattatttaacctaaggtattttagttattttagtcccaatcatgatattaatatgacatgtcccttacaggtataatctaggaattgtaggtgttctaaagcaatcaatgacctcaagaagtcttcgtaagcttcatcactgtagcggttgacatagtcagggctgcccagtttcattgacatgatgttggcagctatgacttcaggatccacacagatggactcgacaaaaaaagtcttgtagccattctgttctccaaaaataaagatggtcgctctccgttctcgggtggtgtttgtggcatcaaaaaccgccacatgtcccccctcctcactaaggaaccgccggacgtcacggagggctgccagggcacactgcttcctgattttcaggccctcttcattgtcggggagaaaaaattcaaaagatttgtaggtcttgaccacgtcccggcgatactggccaacattgaactcccgagtgggcacaccaatccagttcaggtatcgagtcagcttcttggagatgtaggtcttgcccctggcgggcaggcccaccatgacaatgagagttgggcagttggtcatgcacacccgcctgctgctccccggccccaggtcggtcagggagctgcctcctaacgagcctctgtccatcctgcaaccaaactggccagggccactgccccctgcagctccagagtggggtaaccctcgtgccgaattcggcgcgccgtcgacttcatactctctcgcc

SEQ ID NO: 97552 - DNA, 972 bp, Homo Sapiens
aaaccataggcaggtcgaggctgggtgtgaattcggcacgaggctcagtagacgtgaaagatcaaaagatgccagccccatcaatagatggtctccaacccgaagaagaagtagatctcccattagaaggaggtctcgttccccactcagacgtagcaggtctccaagaagaagaagcagatctcctcggagaagggacagaggtcggaggagcagatcacgcttgcgaaggcggtctcgatcacgcggtggtcgtagacgaaggagcagaagcaaagtaaaggaagataaatttaaaggaagtctttctgaaggaatgaaagttgagcaggaatcttcgtctgatgataaccttgaagactttgatgtagaggaagaagatgaagaagccctaatagaacagagaagaatccaaaggcaggcaattgttcagaaatataaataccttgctgaagatagcaacatgtctgtgccatctgaaccaagcagcccccagagcagtacgagaacacgatcaccatctccagatgacattctggagcgagtagctgctgatgttaaagagtatgaaccgggaaaatgttgatacatttgaggcctcagtgaaagccaagcataatctaatgacagttgaacagaatactggttcatctcagaagaagtggttggcacctgaatatgtgttacagaactcctgatgattatggttgctggcgataatttgactaggtgctcgtcgtacgaggccggtggccattgcggacgcagatttccaaagagaattcccaaccttcagagaatacacttggaccgatgccagaaaggctaataatccggcgaaacctaggttgagtcctcacataacacgttacacccgtggttgggcaccacccggccaggggactcccagactcgtggccgagccaaacatagccgaagcaccagagggccgcaaacctgaaacagggcatg

SEQ ID NO: 97553 - DNA, 907 bp, Homo Sapiens
tagaggccgggttttaaatcggcacgaggcccgccgaggtgagcagaggctccaaccggtcactggctgggtcctggcactggcgggtcgcaacgctgtgggcgttccaggaggtggtcgtggcgaacctggcagctgcgggcatcatggtgggaggcttgaagaggaaacactctgatttggaagaggaggaggagaggtgggagtggagtccagcaggccttcagagctaccagcaagccctgctccgcatctccctagacaaagtccagcgcagcctgggcccccgagcacccagcctccgcaggcatgtcctcatccataacaccctccaacagctgcaggctgcacttcgcctggctcccgaccctgccctgacccccgagcccctcttcctgggcagaggaggatatctccctgtcagccaccattggctctatcctcagggagctggacaactccatggatgggactgagccccctcagaatccagcgacacccctcgggccaccagaaatgaagtgccacccccaccactgatccaatcttctatagaagctctcacctcccggtactatgaaccgactctgcacctggatcactactcactgcacaatacacacatctgacgcgacacaacaaggaacctgcacggcgccccacccagaccctcctcacaaccatcttctgtgccccaggaacctggccaatgccaatgacctggcatcacatcatggaaaaatcctacacggacagcccataaccaacacgccaacacgcagagggaaaccacacccccaacagacacaccccgagaaagacagggaaaccccatgaaactggaagcacacgaggaagaaaaagcacaagagaggcggcccacaaaccacacaaccaaacacgcccg

SEQ ID NO: 97554 - DNA, 852 bp, Homo Sapiens
ggctagtcgagctgggtgtgaatcggcacgaggagagtgtacagtacaggattattataatgaaagtttatatcaacaggctttcgttggctctgccatatattataagcaagaagagattggtaaagtgccacagtattccagataacttttcagttgcggcctttctgctcgttctttaatttgaaacctagatacatgcagtaaaaactaggagaatgacttttacccttggggacagccaagttttgttgataaacctatttcctagcatgccttcaggaagttgtgccagaccctagattgtgaaggacccactgttcttctgttgtacgagctccctgaaccattgttcagaggaccaatgtcacatcgcttcatgggcatggcccatggagcatctgggtgatatctgtctacagtattggctcttctgcgaggctgatacacaaggcctctcttccacatgatcatttgcaaacctcccccagcccctaccatccaatgtggaaggaaaacaagaactgcctgaagaagagtccaagctacagatacacagcgtgtgcattgcggctgtcaccttcctcctcccacttctgtatcctcagagatgctgcgtggatgtttccttaacctcagctgacttccctctgaatgtctaatgctagttcaaggcctccaggcattgatttcgtacagtggtaactcccaatgaggcttctgttcatcatttggtgtgctttcctctgtcattacaaagaaatgattttcccaaagtaaataaacaaatgaaaagaaaaacactctccgaggaattttaaggggcggaaaaaacgctcacgatggccatgc

SEQ ID NO: 97555 - DNA, 844 bp, Homo Sapiens
  misc_feature (610)..(610): n is a, c, g, or t
  misc_feature (826)..(826): n is a, c, g, or t
gtagaggcctgggtgtgcgaatcggcacgaggctgatatagagcctctgtggcaaagggaatttctcagttcctgccccagcccccttgtttatcattacacagctaagatttgtatttaacttagcattttagcaagttttcttatgaaaatacctttgtgctttctaagtataaagatttaaattatttttaatacggtttttagaaccacagactatccctctttttagagcatcctgatcaattgcaagtacttccacttcttccctaaatgcgctttgtgtgttttccacctcagtagccttgcacacatcattacttctgcatccttctttgtgaccaagtgaatacctacctacctcttaggactcagcttcagtgattctgttttcataggctttttaaagcccttttcagtcaaattagatgctcctttgttctggtcctttactcttcccctcccatgttgtcgcactgatcacactgctttgtaattattttctttattgttggtaaactccatattttaaaaatttacctgtatacatagtgcttaatgcatggtaggcccttagtaatgtttttgaattaatgaggcatgattctanatgccaaactttgcacaaaaagttgttgctattggattccaaactgctatgccctctataccagtggctgacaaggcatatagggatatatgccatcctgagaaggagtaagtgtttagattctgaacctgagaaaagagaacttttctcttagaaagttggaaacttcattttacccttcgtgaccctgggtaaaccacttggttctcactgggntggtacaatttatgaaga

SEQ ID NO: 97556 - DNA, 1041 bp, Homo Sapiens
tcggctagtacgaggctggtgtgtgaatccggcacgagggggagacggtgtccctgtacccagcatcagctcctacctcaggccctgctccaggactgggccctgcctcttggtgcctggaacccgggtctgtggcccaggctcccctgacccccagcagacccccagcaggatgggtagggaaggggaagggactcatagcagcctgggatgctcctccctcgggatggttgtcatcgcagacctgagcacagaccccactgagctggaagagagggctctggaggtggctgggcccgatgggcaggccagtgccatatcacctgcctctcccaggaggaaggccgctgatggaggccacaggagggccttgccaggctgcacctcgctcactggggaaaccacaggagaaagtggggaggcagggcaggatggcaagccccccggcgatgtcctagtgggccctacagcctccctggctctggcacctgggagcggagagtccatgatgggtgctggagattccggtcatgcatccccggacacaggtccatgtgtcaatcagaagcaggagccaggtcctgctcaagaggaagccgagttaggtggccagaacctcgaacgagacctcgaggggttccgtgtgtccccgcaagcctctgttgtgctggaacacagagaaatagcagacgaccctctccaggagcccgggggctcagcagggcattccagacaccacctcagagctggcagggcagcgagaccacctgcctcattctgcagaccagggcacctgggcagactcttaagctgtggaactcgacttctgctggacagcagatacggtgcctggacgcctctgatttgaagccccctgagaggtcttcttcggggacaagcgggcctggtggcgggcccctccttcctgggcctttgcctggccaggccgcggcttgggggccgcctggccggtggggccccgcggggcctctggccccgcgggtgcgccggcgggttccccctggagggggcccctccggg

SEQ ID NO: 97557 - DNA, 1029 bp, Homo Sapiens
aggacgccgagcaccgtggcgcgcgctcacgtccgcgtccccaagggctgcgctccctcaagcgcagtgcccagaactcggagccagcccggcccgggggaccctgctggccaaggaggtcgtcagtccggtcttgtcttccagacccggaggaccgaagcttccggacgacgaggaaccgcccaacatggcctcggagagtgggaagctttggggtggccggtttgtgggtgcagtggaccccatcatggagaagttcaacgcgtccattgcctacgaccggcacctttgggaggtggatgttcaaggcagcaaagcctacagcaggggcctggagaaggcagggctcctcaccaaggccgagatggaccagatactccatggcctagacaaggtggctgaggagtgggcccagggcaccttcaaactgaactccaatgatgaggacatccacacagccaatgagcgccgcctgaaggagctcattggtgcaacggcagggaagctgcacacgggacggagccggaatgaccaggtggtcacagacctcaggctgtggatgcggcagacctgctccacgctctcgggcctcctctgggagctcattaggaccatggtggatcgggcagaggcggaacgtgatgttctcttcccggggtacacccatttgcagagggcccagcccatccgctggagccactggattctgagccacgccgtggcactgacccgagactctgagcggctgctggaggtgcggaagcggatcaatgtcctgccccctggggagtgggggccattgcaggccaatcccctgggtgtggaccgagagctgtccgagcagaactcaactttggggccatcactctcaacagcatggattgcactagtgagcgggacttggtggccgagttcctggtccgggcttcgtgtgatgagccatttcaccagatggccaagacctatcttaatggccaagaattcacgtcggagtctcaatctaagacgggaacagctgtgccaaaaaac

SEQ ID NO: 97558 - DNA, 658 bp, Homo Sapiens
  misc_feature (64)..(118): n is a, c, g, or t
  misc_feature (288)..(288): n is a, c, g, or t
attaggctaggtacgaggctgggtggtgaatcggcacgaggctcgtgccggaatggtctcggtnnnnnnnnnnnnnnnnnnnnnnnnnnnnnnnnnnnnnnnnnnnnnnnnnnnnnnntgagccatggtgcctggccctttaattcccccaatatttttttatctgcattaatttattatttcaagtgaacttccatctcaaatacatggttctcagacgcttccatgaactctcaagtgtgacttattacagcctggggctccttggagcacagtgtgccagtgacnctagtggaaggccatgagaaagccaggttcactgttcactgtgcagcatctccctccatggtcttcctggagcctattcccactgcactgagcattccgtgtgtccagaggtagggttagcagggatagatggacttcctgcttattttatgttcacatttccactgaccttcaatcctgtagactgcaaagattgagccagctgagcccccaaagagactcagcagtgcagaatgtgggcctgagtgggaggactgcccagccgcacaccttccagctctgttcttcccgggccctggatgcttcttgccacgctgtcctctgaaatgacgctctgccccagcagacctgtggtaggtgagctagtgag

SEQ ID NO: 97559 - DNA, 941 bp, Homo Sapiens
gtcgggaccctttgtgccccgtgcttcagacacgcgggtttcggatcagatcccttttcgggactggtgctccaggatgagggatgacggcccaccccctggtggaaggatcagggccttggtcctggggcctgtcactctttgaggtggagcctgcaaccatgcggccggagctcttttgaaagcctcggttgatgtcacggaaccccgcagacgctctcggggcattgttggccaatcctcgcggctccttctcacgctctgccttctgctctggtgtcaggtcctcatcgtcattattgctagatcttgacctagtaattgatttgatatccttcttgtcgtcatctaatttcttgtcctccgaagatttcgtgtcttgcaggttctcatcaccctcgtcatcggatttgatctcagagctgccagaggagacactctgcccctgtagtcctggtggcatgcctctgtaagggtcctggggtgggttcaggtcaggggaagtcgcagactggacaggaagctgtggaaccggaacctggtttggcagaagagaatggctgcctctcagggccacgccatcttcacgatgggtccccaccatgagtgaatgtctgttggctgaaagaaggccagttccataccctgagcccagaccacccatggctccattatgagaaggtccaatgattccatgcatgtccccatgaccaccaggcatagctgtggatgggcccactgcatggttccggagaacatgaatagcatcatccagtctttctaaacgatcttcaattcggctttgcaaagagtgtaagggtccttcataattaggagacgatgaggcctgtcctccatttctagaccaaacagctgtgcctgctgagagagatggaggagagccaacaggggcctcgtgccgattcaaaccccaggctgac

SEQ ID NO: 97560 - DNA, 1282 bp, Homo Sapiens
tagaaaagaaaaagaaagaaaacaggacgtgcaggtacgagagcgggtggtgaacacggcacgagggggaggtggggtaggagcagcggcgagggggcccctcccttgcacctccccccaccggacttggtcgcgcccgaagtgtaacactttctcttagtcggaggagctcctctgtttcctgtgcagtagctcccgttgcggcggcacccgtggcagccctggcggacgcaggagcgatggcagcgaccgatatagctcgccaggtgggtgaaggttgccgaactgtccccctggctggacatgtggggtttgacagcttgcctgaccagctggtgaataagtccgtcagccagggcttctgcttcaacatcctgtgcgtgggagagacaggtttgggcaagtccaccctcatggacaccctgttcaacaccaaattcgaaggggagccagccacccacacacagccgggtgtccagctccagtctaatacctatgacctccaagagagcaacgtgaggctaaagctcacgatcgttagcacagttggctttggggaccagatcaacaaagaggacagctacaagcctatcgtggaattcatcgatgcacaattcgaggcctacctgcaggaagagctaaagatccgaagagtgctacacacctaccatgactcccgaatccatgtctgcttgtatttcattgcccccacgggtcattccctgaagtctctggacctagtgactatgaagaagctggacagtaaggtgaacatcatccccatcattgccaaagcagatgccatttcgaagagtgagctaacaaagttcaaaatcaaaatcaccagcgagcttgtcagcaaccggagtccagatctatcagtttcctacagatgatgagtccgtgggcagagatcaatgggacccatgaacgcccacctgccgtttgctgtcattggcagcacagaagaactgaagataggcaacaagatgatgaggggcgcggcagtatcccttggggcactgtgcaggttgaaaacgaagcccactgcgaactttgtgaaagctgcggggaaatgctgaattccggttcaaccatggaaggatcctgcggggaaccaaacccaccacccggggacttaatgaacctgtttccgccgcctgttaaactgggaagggaaaattgggctttcaaggggaacccggacacccctgtataagaaaaaaacacctttttaaggttttaaccggggaaaaacctttattggagggccccaaaaaat

SEQ ID NO: 97561 - DNA, 724 bp, Homo Sapiens
taggcagtagagctgggtggtgaatcggcacgaggcacctgcaaggccacaggaggcaagcaagctctcttgccgaggagccaggcaacttcagtcctgggagacccatgtaaataccagactgcaggttggaccccagagattcccaagccaaaaaccttagctccctcccgcacccagatgtggacctctactttccaggctagtcaggacccacctcaccccgttacagctccccaagtggtttccacatgatctgagaagaggagccctcatcttgaagggcccaggagggtctatggggagaggaactccttggcctagcccaccctcctgccttctgacggccctgcaatgtatcccttctcacagcacatgctggccagcctggggcctggcagggaggtcaggccctggaactctatctgggcctgggctaggggacatcagaggttctttgagggactgcctctgccacactctgacgcaaaaccactttccttttctattccttctggcctttcctctctcctgtttcccttcccttccactgcctctgccttagaggagcccacggctaagaggctgctgaaaaccatctggcctggcctggccctgccctgaggaaggaggggaagctgcagcttgggagagcccctggggcctagactctgtaacatcactatccatgcaccaactaataaaactttgacgagtcaccttc

SEQ ID NO: 97562 - DNA, 1081 bp, Homo Sapiens
  misc_feature (130)..(156): n is a, c, g, or t
  misc_feature (194)..(255): n is a, c, g, or t
cctaggtacaggctgggtgttaaatcggcacgaggcagaaagccaaccttgaccctgggggacctcggagagcccgggacccaccaccaagaagggcagtgtactagttctttgtgactgcagtaaaaannnnnnnnnnnnnnnnnnnnnnnnnnnggtagagatgcggtttcaccatgttagccaggatggtnnnnnnnnnnnnnnnnnnnnnnnnnnnnnnnnnnnnnnnnnnnnnnnnnnnnnnnnnnnnnntgagccaccgcgcccggcctgaccgcagtagcaaatttatacacactgcgtggcttcaaacaacagaaatttattcgttacaattctggaggccaaaagtcaaaaataaaggtgtgggcaggaccctgttcccttcacaggtgctaggggaggatccctcctgcctcttccagctcctggtggctccaggccctctgtggcttgtggccgcatcacaggagttcctgcctccgtcttcacatggccttctccccatgtctgtctccaatctccctgtttaatgtcgtaagaggtcggatcgtcgttcgaaggtaggacccgcctgaaacctaggataatctcatttcgatatccttagtttaattacatgtgaaaaggcccttttatcaagtgaggtcacattcacagattccagggcttagagggtggaggtatcattttgcgtgcccccatctggacatgcagtgtcctctcccctgtggggctgactacttcctagccgtcttcccaaacgtatgtgtctcaatccgtctgctgactgggcctggtgccttgggcagactgatggctatacttgatagtctatggcccgagagcataagtatttcttccgtgttgattatggcgggccatcccagatgccgaccaaaccggggtaaattggtgaggccagtccagtagaaccgagctccgcgtgtctagagagtcagggccacccagggggcgaaccggggaggcgaagagaaggtgccgcgaaaaaagcctgtggaaaagagagagacctgaagcagtgccgacaaccccacacgccgggctgatgcacgag

SEQ ID NO: 97563 - DNA, 1049 bp, Homo Sapiens
cagggagaagacctcgagggaaattgaaaaaggtcacgccctttgttgttccccccaacgttggcctaaatggcttgtcggcaagtaggctaataccggtgccgcaaaacaccatgcgaatcaagcccgttcgtgttttttcagcgcctgtatcatcatcggctttttcaggatattgcttatgttggaatcattgctcgggtgctgctcaacagtgtcacatccccagtgagacgatgtgtcgcctgctgacacaatagccgcccatgactgtttgctaccctgtctgctacgtagttagagaccaagctaggaccaaggctagaatcagcaccaccacacctgccaccaccatcacctcattacccacaccctcaatgagggtgacatcagagagctccatggcctggctgctggcagggtccacgctgcaggaacaaagggggacagcatcagcagagcctgaggggttgcaaccaggtctctagtttgtttaggttctaactgacccagccctcatgaggttgttttgaagatgacgtgaaatcatcgaagcaaaatacttggcacagtgcctggcacactgcaaattgcaattgcttaataacggtagtaattatttatcacaaccacaactaacccctgatggtaagaaggttaatgtcattaaccatgatttacaggaaaagaaactgcggcaaagaaagacgaaaacgattggcacagacacagggaactctcgtggggaggggcccggcaggaccccaggtgtccggcctcaggggtctttgctctgtccctcagcctgtgatctaccctgtccgtaccgtgaccgcacggtgaggaggggtcccgcaccctttttctgaggcgaaggttccgcttttggatggtcctattccctcggcgttggactggggtccatgggcccacccgaaccgaaggctgcctggccccagcctccgtgataagatctaattgtgacggccagtgaggattaggtcggctaagcctcgtccgattacacacccaggcctgctcttccactt

SEQ ID NO: 97564 - DNA, 1161 bp, Homo Sapiens
tggcgaggtacgaggctgggtggtcgaatcggcacgagggtgggtgaaaggtcggcggcgccggcactgcagctggggctgagaagccaggacggcccgagaactgacagacggagtgacagacggactgaccatggccgaccagccaaaacccatcagcccgctcaagaacctgctggccggcggctttggcggcgtgtgcctggtgttcgtcggtcaccctctggacacggtcaaggtccgactgcagacacagccaccgagtttgcctggacaacctcccatgtactctgggacctttgactgtttccggaagactctttttagagagggcatcacggggctatatcggggaatggctgcccctatcatcggggtcactcccatgtttgccgtgtgcttctttgggtttggtttggggaagaaactacaacagaaacacccagaagatgtgctcagctatccccagctttttgcagctgggatgttatctggcgtattcaccacaggaatcatgactcctggagaacggatcaagtgcttattacagattcaggcttcttcaggagaaagcaagtacactggtaccttggactgtgcaaagaagctgtaccaggagtttgggatccgaggcatctacaaagggactgtgcttacccttatgcgagatgtcccagctagtggaatgtatttcatgacatatgaatgggctgaaaaatatcttcactccggagggaaagagggtcagtggagctcagggcccctcggaatcttggtggctgggggcattgcagggatcttcaactgggctggtggaatcccccagatgtgtcaagtctcggatccagactgacctctgcgaaatatctaatggttcacgagatttgctgaggagtgatccggatgacaggggtacatcctggtccacagggtccacgccgggatgaatcgagacctccgacaatgggcccgttccgggggctggagatcgcgagaagcttaatgggcaccccattgtggggtcgaggcgcacacaccacgaggccgagacgcgcggacacacagagcgccacacacttggcgggaggagagcacccccagagtgagagatcgagagccgaacaggtgagaaacactgcgaagagaggacacgacgacgag

SEQ ID NO: 97565 - DNA, 1342 bp, Homo Sapiens
caaacatgggcccggtcccagttgaccaagaacccaggttcacatatccggccaattcctcgggaagcgccacgaatctggaaattggtcacggccaggtcggtcattgaggatcagcaagactttgttggctccccgacatcttggatatcctgaaactttcaagcttcagatccagtgtccggacattgagcaggatgcacaccagccactccagagggacgccgagatatgcaggatgaaccaatccttttcaaacaacattggtgtagcgggccaggagctaacgagtccggtacacctgtcccgggtgcaagaactcaaaccagcggactgaagagccaaagaaaatgaggtgaaccttctgatcattgtcgtcatttgcctggggctcgggcagcccccatccagtaccctccttcctctgggtgcccccaagccagctccccaacacatagaaactgagggcgggcttgggcacctctggacttgctcctggggggacacacaaaattacgcttcatgagggcctccttgtggcagagcaagaagagccggctctgtcctaggtggggtccctctggcccggtgggatctgtctgaggtgttgagggtgttgctgaatgaaggcagggtctgggcacaggcaggatcagggcatcagccagaaagaactggacatagactctggcctgctgcttctggatgaagcctggcatgctcagctccttccaggaagggaagctgcttcctcacgtccctctctacgactcaacgtgaaacctctctgcccgcaccaggcagcctatcaccccgtgggtcactgaggggttgagagtgcttggccaggagcaggcagggcagggaaccacttcggtcccgaagttgcagacaacctttatgagatgaagccaccagaaccccaagtaaaacctgggctgggcagaaggcagagggcagcagacagagccaggaccaagccaggcggcgattgagttggcagctgggcaggtaggaggcctccgggaggggcagaagggccttagggtcaaaggaggcccaggccttacgctgtccttcttctttcagggtggccagagtggggaaggaggagggagtctgcagccgagtgtatttctggaggggacagtgatgtggctcttcaaggatctcattgtgtgcattccgaacagggctgcctggcggagctagaagatccagggtaggagccaggagttgcagtcccaggctggggctcccaggagaggaatgttgcaggaactggtggtgtctcagcgcatggggacacagcttgcaggccagctgctccagggccttggta

SEQ ID NO: 97566 - DNA, 1052 bp, Homo Sapiens
ggaatgttcttgggcataaattgggccatgttctcaaaaaatttcacgttcattcaccaacaggagggtatgatgtcccaccatgttgtaggctttggttgattccaaagggacaaattgtgtcaagctcaggaaccagacgggtcactgggatcgtggcactcacggacgggaggccgggtcctgactgctcaggggcaggtagttgaagaaatcccggagattacacaaggcatcaacatcattttcaaaagctctgtgggccacacctgacatggtggtgtgggtcttggcaccaccgagctcctcctgggtaacatcctcattggtgacagacttcacaacatcagggccagtgatgaacaggtaggaggtgtcctttaccatgaacgtgaagtctgttagggctggggagtagacggccccaccagcacatgggcccatgatcagagaaatctgagggatgactccggatgccgtaacattcctcagaaagatgtctgcatagccagccaaagactccactccttcttggatccgtgctcccccagagtcattcagcccaatcactggagcccccaccgttatggcctggtccatgattttgcagatcttttgggcatgtgctcctgacagactgcctccaaaaactgtaaaatcctgactgaagacataaaccaatcttccattgattcggcctcgtccagtgaccacgctgtctccaggaaacttattcttatcagcagccattccaaaatctgcacatctgtgttccacaaacatgtcgctctcaacaaagctgccagggtccagcaagagactgatcctctccctggctgttagctttcctcgcttgtgctgcgcgtcaatacggcgttggccccctcccagcagcgcggtccggcgcttgttttcgatgcgttcgttaacagaggtggcctggctgcaaaggctgcggaccgcggcgcggagaccgctcgccagaacgctgagccttgccccgaccgccgccacccgtaatgccgccgccatttttgctgtgccggcgcgtc

SEQ ID NO: 97567 - DNA, 983 bp, Homo Sapiens
  misc_feature (891)..(891): n is a, c, g, or t
ttaggctaggtacgaggcctggtgttgaattcggcacgaggctcggccgggcggcggtgactgtgcaccgacgtcggcgcgggctgcaccggccgcgtccgcccgcccgccagcatggccaccaccgccacctgcacccgtttcaccgacgactaccagctcttcgaggagcttggcaagggtgctttctctgtggtccgcaggtgtgtgaagaaaacctccacgcaggagtacgcagcaaaaatcatcaataccaagaagttgtctgcccgggatcaccagaaactagaacgtgaggctcggatatgtcgacttctgaaacatccaaacatcgtgcgcctccatgacagtatttctgaagaagggtttcactacctcgtgtttgaccttggttaccggcggggagctgtttgaagacattgtggccagagagtactacagtgaagcagatgccagccactgtatacatcagattctggagagtgttaaccacatccaccagcatgacatcgtccacagggacctgaagcctgagaacctgctgctggcgagtaaatgcaagggtgccgccgtcaagctggctgattttggcctagccatcgaagtacagggagagcagcaggcttggtttggttttgctggcaccccaggttacttgtccccctgaggtcttgaggaaagatccctatggaaaacctgtggatatctgggcctgcggggtcatcctgtatatcctcctggtgggctatcctcccttctgggatgaggatcagcacaagctgtatcagcagatcaaggctggagcctatgatttcccatcaccagaatgggacacggtaactcctgaagccaagaacttgatcaaccagatgctgaccataaacccagcanagcgcatcacggctgaccaggctctcaagcacccgtgggtctgtcaacgatccacggtggcatccatgatgcatcgtcaggagactgtggag

SEQ ID NO: 97568 - DNA, 1033 bp, Homo Sapiens
cccacccccacaccccaaacccccataccgccgctaggcagccgaaggccgggcgtcgaatcggcacgagggagaacagacttctgtgtctacccaggaaatctggtttggcatttgggagccactgatttaaaagacatcccttagttggttttttgagggtaaaataaaagaatcaccaccttccattcagtcacgcactgtgtgtttgaagccagctgcttctcaagccccgggccaggaactggggcaccagtcccagccttcaccaagtctttcatggtagacaggccaatacagcaccctctgtggaccacatagtgccaagcatgtgacatgtcttggctcgagtaagccttctaacaagcctctgaagtgtgggtcctgttactcccccatttcacagatggtgggggctcagaaggtgagcagttcacagaacttggaagtggtagagctgcgaagcaggaggcagacctgggtgttctggccccagagcctgcacacactccccagaagcagattgctcaggacagaggcgctgagctggctgctggggccaggaaataggaggcatctgtgcagactttgggaagaggcaggctttgaactggagttctggaagaggaatagtggttgggcaggaaaatgaacttggtcctgcctcatggctctgctggggcttgctgggcctgtttgagtcctcaccgggactacactgaaaaacaacccggtctcccgtgtgcatgatggcggaggtcaggccctcacttcctggccagggcttcatggccacgctggccagtgggacaggtctgggactgtgtttgctgctgctcggtgggtctcgagggcagggcggctgagccgtggtaaggttgcactgctcgggtgcgcgtcactcaggctgtggagaaagggtgtccacgctttgctcgcggcgctccggagtgtgcctcgggcggcctcagggggtggtggctaagtggggggggcgtgggacgtcttcttcgtccgacgagtctttagggtg

SEQ ID NO: 97569 - DNA, 1012 bp, Homo Sapiens
taggctagtacgaggcctgggtgtgaatcggcagaggcagaccatggcagggtaattttgccaaggtgaagttggcccgacacatcctgactgggaaagaggtagctgtgaagatcattgacaagactcaactgaactcctccagcctccagaaactattccgcgaagtaagaataatgaaggttttgaatcatcccaacatagttaaattatttgaagtgattgagactgagaaaacgctctaccttgtcatggagtacgctagtggcggagaggtatttgattacctagtggctcatggcaggatgaaagaaaaagaggctcgagccaaattccgccagatagtgtctgctgtgcagtactgtcaccagaagtttattgtccatagagacttaaaggcagaaaacctgctcttggatgctgatatgaacatcaagattgcagactttggcttcagcaatgaattcacctttgggaacaagctggacaccttctgtggcagtcccccttatgctgccccagaactcttccagggcaaaaaaatatgatggacccgaggtggatgtgtggagcctaggagttatcctctatacactggtcagcggatccctgccttttgatggacagaacctcaaggagctgcgggaacgggtactgaggggaaaataccgtattccattctacatgtccacggactgtgaaaacctgcttaagaaatttctcattcttaatcccagcaagagagggcactttagagcaaatcatgaaagatcgatggatgaatgtgggtcacgaaagatgatgaactaaagcttagtggagccactccctgactacaagccccggggacagagtgatggtgtccggtactccgggaaagatccggatcgctgtgggcaaaataaaggggagggaccatttgccgggaaagaatcgatgagggaaactcctgaaccggtattgctaaaaagggcctccttcaggtacgggggaacccaaggacaaggtgtac

SEQ ID NO: 97570 - DNA, 1081 bp, Homo Sapiens
cggctagtacgaggcgtgggtgaatcggcacgagggcttcctgactcctggaatgaccactggttcattgaaaaatagttttctgactattggtcctggctctaacagtttgttgtgcatccagcaaatgtttatgagtgatgaccatgtgccagaaatgtcaggtatgtgtccttcccttggcgccacatagtagtttactaatgtttgggggattgtacttggactgtcatagcctctgcgtttgaccttaaaatagctcttcccagtaagattgtgcaatttttattcacagctcttccatgtagacttacctttcctcatagagctatcctggttaataacaggccaagattctcccattatcccctgttgtctcctgtagctttgataatgcctgggagattccttggtgtaagtgtcatggataccgactgtttttatgttggaatttgttccaacataattagaatctgtttggtgagttgacaaggtaagttggctcagagttgcacagtagggcattaaatgtttaagcaaagcatctgcccacactcccctttccaatctagtgccttccttgaactttttcctgagctgctacgtccctaatcccccttgttgggaggattttcgtatcacccttatgggacctgtccaccatgtcctgtactatttggaatcggttttccagtctttcaacaaccgttgtggctaacctatgttttagaagggctggaggtgtgggcctgtcttccgggtctcaggaaccgaaagcatccttaatccggtggaggggtcctcccagaacccagacatttatacaggatgggactccacagtccctaatagcagctttactccgtcccgaaccaagcgttggggatctaagtaaggcacccatattcgacaaactaagtaaaagcagtaaaagggagcgaggagaataaacgcctgaccgtccagacggttgggaaaacaaagtaaccagggggagaggagagtatagagaacacgacacgaagaaaaggcgagtgggtacaagaggtggagagcacgcagcgcaattcaccgctatctt

SEQ ID NO: 97571 - DNA, 903 bp, Homo Sapiens
  misc_feature (890)..(890): n is a, c, g, or t
caccccgccacggcagcgacggaccctgggttaatcggcacgagggcactgaacttgaccctgctgcatcagctactttactaaaggcgagtacatttgctggggggttcagacaagcaagtatctcttttcaccaaggatggagtgcggcttgggactgttggggagcagaactcctgggtgtggacgtgtcaagcgaaaccggattccaactatgtggtggtcggctgccaggacggcaccatttccttctaccagcttattttcagcacagtccatgggctttacaaggaccgctatgcctacagggatagcatgactgacgtcattgtgcagcacctgatcactgagcagaaagttcggattaaatgcaaagagcttgtcaagaagattgccatctacagaaatcgatggctatccaactgccagagaaaatcctcatctatgagttgtattcagaggacttatcagacatgcattaccgggtaaaggagaagattatcaagaagtttgagtgcaacctcctggtggtgtgtgccaatcacatcatcctgtgccaggagaaacggctgcagtgcctgtccttcagcggagtgaaggagcgggagtggcagatggagtctctcattcgttacatcaaggtgatcggtggccctcctggaagagaaggcctcttagtggggctgaagaatggacagatcctgaagatcttcgtggacaatctctttgctatcgtcctgctgaagcaggccacagctgtgcgctgcttggacatgagtgcctcccgtaagaagctggccgtggtacatcaaaataacacttgcctggtgtatgacatcgacaccaaggagctgctttttcaggaaccaaacggcaacagtgtagctttngaacacccatgtt

SEQ ID NO: 97572 - DNA, 1317 bp, Homo Sapiens
taaggtacgaggctgggtttaaatcaggcacgaggcagccctggacccagcattcagacctttgcctggccatggctgtccagaccccagtcccaacggcagccggagggtctggggacaggagcctggaggaggcactgggggccctaatggctgccctggatgactaccgtggccagtttcctgagctgcagggcctggagcaggaggtgacccgcctagaaagtctgctcatgcagagacaaggtctgactcgcagccgggcctccagtctcagcatcactgtggagcatgccttggagagcttcaggcttcctcaatgaagacgaagatgaagacaatgatgttcctggggacaggcctccaagcagcccggaggctggggctgaggacagcatagactcacccagtgcccgccccctcagcacggggtgtccagctctggatgctgccttggtccggcacctgtaccactgcagtcgcctcctgctgaaactgggcacatttgggcccctgcgctgccaggaggcatgggccctggagcggctgctgcgggaagcccgagtactggaggcagtatgcgagttcagcaggcggtgggagatcccggccagctctgcccaggaagtggtgcagttctcggcctctcggcctggcttcctgaccttctgggaccagtgcacagagagactcagctgcttcctctgcccggtggagcgggtgcttctcaccttctgcaaccagtatggtgcccgcctctccctgcgccagccaggcttggctgaggctgtgtgtgtgaagttcctggaggatgccctggggcagaagctgcccagaaggccccagccagggcctggagagcagctcacagtcttccagttctggagtttttgtggaaaccttggacagcccccaccatggaggcctacgtgactgagaccgctgaggaggtgctactggtgcggaatctgaactcggatgatcaggctgttgtgctgaagggcctgagattgggcccgaggggcgtctgcgaagggacgggctgcgggcctcagctccctgtgtcgctcatggacaacaacaaggtcatgggtgtgtcagcacccagtccggagcctgtactgggcctaccttccgggagagggcctctgtgcttcctggaacagctggaggatgacgacgtgcagaactcgagtgggtggctgccttggcctaggctgatcaaggtaccgaggcattgagccctgttgtacttctgccaaactgaccacgaagtgtgagggaagctgccgcggagagcctacagatgtgggaaca

SEQ ID NO: 97573 - DNA, 1122 bp, Homo Sapiens
  misc_feature (731)..(731): n is a, c, g, or t
  misc_feature (734)..(734): n is a, c, g, or t
  misc_feature (861)..(861): n is a, c, g, or t
ggaattctcgggatctccgctggtccgagggcagtgcagcagcggcgacagcggctgcggccgtggccgtggcgggaggagccggaagccccgcccccggggaggggccgtcctgcaggtcccccctctatcctccacggccccatccaagccagggatgaaatttaacggcaagaagggcgcagttgacgcggcgtcaatgaactgagactaagtcaaaagccgggttcctgtgccagcaagatgctggagcgaggcgcggagtccgcggccggggctaccgatcctagtcccactggcaaggaaccagtgaccaaagaagctccccaccagggcccaccgcagaagcccagccagtcagctccagggcccaccgcgtccgcgggctcgcctccccggcctcgccggcggcccccgccccagcgcccgcaccgctgccccgactgtgacaaggccttctcgtacccgtccaagctggccacgcaccgcttagcacacggaggcgcccgaccccacccatgcccagactgccccaaggccttctcctacccctccaagctggcagcccaccgcctcacgcacagcggcgcccgcccgcacccgtgcccacactgcccgaagtcctttggccaccgctccaagctggcggctcacctctggacccacgcacccacccgcccctacccgtgccccgactgccccaagtccttctgctacccttccaagctggnggnccaccgccacacgcaccacgccaccgacgcccgcccctatccttgcccgcattgccccaaggctttctcatttccctccaagctggccgccccatcgctatgtcacgacccccccaacgcgcccggnagccaggcgactgcctggcaccgatgctccagctgcgggcaggcctttgggccagagacgcttactgcctccttctcaacgcagcccccaccaggtgggagcaccaagggggaagaaaaactggagccccccccttgggtccatggcccccttctggcggcagcccataacacagtaaaaaggggggggatttcttaaaaaccgaccgtggtggaatctccccctccttccaaaaaaacttggcaaaaggggccaggggct

SEQ ID NO: 97574 - DNA, 1005 bp, Homo Sapiens
ggggcagcccgggtctcagggaacatggcggcgctggtgagacccgcgaggtttgtcgtgcgaccgttgctgcaggtggtccaggcttgggaccttgacgcgaggcgctgggtccgggcgctgcggcggagcccagtgaaagtggtgtttccttccggagaggtggtggaacagaagcgcgctcctgggaagcagccccgcaaggcaccatctgaggccagtgcccaggagcaacgagagaaacaaccgctcgaggagtccgcatcccgcgctcccagcacctgggaagagtctgggcttcgctacgataaagcttatcccggggacaggaggctgagcagtgtaatgacaatagtaaagtccaggccatttcgggaaaaacaagggaagatcctgctggaaggtcgcaggctcatttcagacgctctcaaggctggagctgtgccaaaaatgttcttctttagccgtctagaatacctaaaggagttgccagtcgataagctgaaaggtgtcagcctcattaaggtgaaatttgaggatatcaaggattggtccgacctcgtaacgccacaaggaataatggggatttttgccaagcctgaccatgttaagatgacatatccaaagactcagcttcagcattcactgcctttattattgatttgtgacaatctccgtgaccctgggaacctggggacaattctgagatctgcagctggggcaggctgcagcaaagtgttactcaccaaaggctgtgtgggatgcctggggagcccaaagtgctccgggcgggtatgggcgcacattttccggatgcccattatcaataatctggaatgggaaaaccgtgcccaattacctgccccctgacactcggggtctatgtgggctgacaactggtggcctttatgccccaggctgagatgtctaataaagctagtgacccatggcctgggtgtggtgatcaaacgagtggatggaagtttccccaagttatggagggaa

SEQ ID NO: 97575 - DNA, 1011 bp, Homo Sapiens
  misc_feature (137)..(239): n is a, c, g, or t
  misc_feature (904)..(924): n is a, c, g, or t
aagggggaggaaaataggctaggtacgaggctggtttgaatcggcacgaggcaatttcctgccctgaaggatgcatggcccggggtctcctgcacctgagggtgggcgggaggcggccccgcgggttgtgttactgnnnnnnnnnnnnnnnnnnnnnnnnnnnnnnnnnnnnnnnnnnnnnnnnnnnnnnnnnnnnnnnnnnnnnnnnnnnnnnnnnnnnnnnnnnnnnnnnnnnnnnnggaatctactccgttagagagtgcaagtcctcagactgcaggaggaggaactcccgtccttcggtagtgtcactacttagaggcaactgtgaggagctgtgattaatcgtggaatgtgctgatgtgcccactaaagatgcctggtaagcagtggctcctctaacaagtgggcagcttggaactgggaacgagagagccaccgaaacagaatgagggagacaaagaagtgggcatcacccttaactccacaagggcttcccaagggcgctgtaccgtacgcaggcccaggacgaactttatttctcgccccagcatcgctgtccttgtcggtgagaccctggctttagggcagacaggaccacgtttcataagttcatgctgtcccagcagaggaataacgccagaaagtgttccagtacaaccagagaaagagagtccatgagaaatctgcccttgtgaagttggaatcccctcaacctcaccccgctgacttgaatgaagcgactgagacgggctatgatggagcagatccggttgctcgaccttcttccctgccaccaacacatgtagttaatagttactggacatgcatattcagtgggttccagggaccaaacttgtattgaatggtatgtgccagacaccgtcttgagatttggagaatnnnnnnnnnnnnnnnnnnnnncgagacatccagagcccagtagccctgcggttttcctggaactaaagaaaattcagcccttttgctccttgggaagctatgtttggg

SEQ ID NO: 97576 - DNA, 579 bp, Homo Sapiens
  misc_feature (266)..(327): n is a, c, g, or t
tagctagtacgaggcctggtgttggaatcggcacgaggatccatcgggacgacctgctggaggtgctggacatgtaccctgagttctccgaccacttctggtccagcctggagatcaccttcaacctgcgagataccaacatgatcccgggctcccccggcagtacggagttagagggtggcttcagtcggcaacgcaagcgcaagttgtccttccgcaggcgcacggacaaggacacggagcagccaggggaggtgtcggccttnnnnnnnnnnnnnnnnnnnnnnnnnnnnnnnnnnnnnnnnnnnnnnnnnnnnnnnnnnnnnnagagcccgtccagtggcccctccagccctgagagcagtgaggatgagggcccaggccgcagctccagccccctccgcctggtgcccttctccagccccaggccccccggagagccgccgggtggggagcccctgatggaggactgcgagaagagcagcgacacttgcaaccccctgtcaggcgccttctcaggagtgtccaacattttcagcttctggggggacagtcggggccgccagtaccaggagctgc

SEQ ID NO: 97577 - DNA, 979 bp, Homo Sapiens
gggggagagggtatgaagtcgacggcgcgccgaattcggcacgaggggatgcggggtctttgactgaaggggtaggccaagtggaggtatcagggacgtcgcgcggcacagaagaggaccagcctggacgccggggacgctgtcatgtacggcgcgagcgggggccgcgccaaacccgagaggaaaagcggcgcgaaggaggaggccgggccaggcggtgccggcggtgggggcagccgagtggagctcttggttttcggctatgcctgcaagctgttccgggacgacgagcgggccctggctcaggaacagggacagcacctcatcccctggatgggggaccacaagatcctcatcgacagatatgatggacgtggtcacctgcatgacctttctgagtacgatgctgagtattccacgtggaacagagattatcagctgtctgaagaggaggcgcgaatagaggccctgtgtgatgaagagaggtatttagccttgcatacggacttgcttgaggaggaggcaaggcaagaggaagaatacaagcgattgagtgaagcactagcagaggatgggagctacaatgccgtggggttcacttacggtagcgactattacgacccgtcagagccgacggaggaggaggagccttccaaacagagagaaaaaaatgaggccgaaaatttagaggaaaatgaagagcccttcgttgcccccttaggattgagcgtcccgtctgacgtggagttgcccccaaccgctaaaatgcacgccatcatcgagcgcacggccagcttcgtgtgcaggcagggagcacagtttgagatcatgctgaaggccaaacaggccccgaaactcccagtttgactttcctgcgcctccgaacactacctcaaccccctactataagttcatcccagaaagccatggaaagagggacgcttaccctgtccctggcaagaaaaccaaaggtgacgag

SEQ ID NO: 97578 - DNA, 505 bp, Homo Sapiens
agaaatatataaagtttttctcagtaattttctatttttgttgataaaattctcatttttattcaagaggaagaatacaagcgattgagtgaagcactagcagaggatgggagctacaatgccgtggggttcacttacggtagcgactattacgacccgtcagagccgacggaggaggaggagccttccaaacagagagaaaaaaatgaggccgaaaatttagaggaaaatgaagagcccttcgttgcccccttaggattgagcgtcccgtctgacgtggagttgccaccaaccgctaaaatgcacgccatcatcgagcgcacggccagcttcgtgtgcaggcagggagcacagtttgagatcatgctgaaggccaagcaggcccggaactcccagtttgactttctgcgcttcgaccactacctcaacccctactataagttcatccagaaagccatgaaagagggacgctacactgtcctggcagaaaacaaaagtgaagaaa

SEQ ID NO: 97579 - DNA, 1081 bp, Homo Sapiens
gctaaggtacaggctggggtgtaatcggcacgaggctcgtgccggaggtaactggatggtagaatactggggtcccccagctcttagcaggatgcaggctatatgcttccacacccctgtgccgtgagaacgtggtatgtaggagagttggctgtagctttaggatttctggaagccaatttggcatggcctatttgatctctggcttgtgctcctgctacactgacagactgattgcgtggctctttcagaagacccaggaagggcagctccagccagaggaccttactggctatgcagtgtgcacagctctttaggcatcaagcaaagggtcagaccagtcagtagtagttgggaggaagccctttcctcctcttatgcaagcagctcgcagccagcccagaatctcttattgcagcccaaagggcttcttgaggtagagagccctccccagtgtcttccccaggattaagtagaaatatgatcacagagcaacggagcaaaggctttcgggagtgtgaggctgcatctgctggagcaaagggaaaccgtgggcttttccggccagatactcttgagctctgtgaccctgctcctgtcaccccaatttctccaagccagaggtagctttctcagagccccttggtggttctgtcctccaaatgctgctgttgggagcgggcttccagctctcagtgggcagtgcacctccttcctaaatgcaggcacttgctaggaagagtgtgagctgggcgtcttctgttcacctgctagcagtttgtcacatttcaccaagtgggattattaatggttgtgctgctgtccagctggtaagatccccttatctggacaagccctggtaaatattgggttgactgtttggctcatttaccttcaggccggcaattcatctttctctggggcaaataatggggggggtcatggcacggttattccccgaatagtttcgggctaggggggtccagtctaaaaccggtcttcccacattttttgagccccaaatctggaaggcgctctgggggaacgtggggtcctccgcgggatggagaaccgggccaag

SEQ ID NO: 97580 - DNA, 968 bp, Homo Sapiens
cggctaggtacgaggctgggtttgaatcggcacgaggcagcctcacgcctgtgtctggagcggcgcgacttcctgaaggtccgggattggccggagacgcccgccgctcacggtcaggggttgccggatcccgtccgcgggcgatgctgctgcggagggtggtcgagggaggccgggcggtagccgccgcggtccgtggctcggcaagtaccaggacgggtcttggcagcgccgaagggcacgtccgagaggccgctgtccgggggcccgcacgtaccgggaggagccccggcccctccacccgcatgtggggacggagccgggaggatcgcgcgctggccgccgccgaaggacccctcgctcctctcctccatcggctcttaccgagtccccgccccggaatctgtggaggggccgcttagccttgggagaggaagcagcccggtgaacggccactttcctgtttctcagtatctgccgagcgcctgtgtgcgagccctcctgggctctggggactggccgtggacatggagcggatgatgcccctcgcaggactagttaaataagtgaagttggtagcgtgtcagtccgtgatcctgggtagatagagcagggcagcgacggaagactgcctataggacattcacgctgggatgagaggggcctgagaggcctgggctttgtgacagggaaacttggcataacagggtggtgcgattcttccggttggtccctcagaggtggtggggcttggtaatactggtagaggtgctgggctggccaggagcttacagggttacacctctcgcatactggtgtccacagagcagccatcttagctggaggtgtcgagtgcctcccccatccgccaccatgtgcttgagtgcacacccggcgccaggcctgatcctggcacttctcgtgaatcacaccgtgtcatacccatgacttccattgcacagtgggga

SEQ ID NO: 97581 - DNA, 1306 bp, Homo Sapiens
tttatcccctccggcctggtttggtgtatacagcccgaggcggcccgccgatcttggtcacgccggtgcctgggttgccggcccctttttgctgcagcatgcttagggttccaggtctttccccccctttccgagaggcccccgcggggcactccaaatgtggccccgtccacagcctcaagcttgccttcccaagccgcccgcttgcgctcctcagcttccccgcagctccctccctccagtgcctgcagctcccggcactaccaggtccaactcgccacccccgcgctcggggacccagggcaggaaggtgggctgtgaggctgcagcaggcacctccggggcacaggtgcccaggaccgtgtccatccaccgccagaagaccagctcagagcgccgccacgccaggacagcctccaggccctggttctaacgcttccagagtccccaccaactgctggccttcccttctgggtcccctgagcatctctgcttcagtgaccagacagatggcctaaggctctggtcgctgtggcagccgcgtgtgtacagctggatcttgcttcaggagggcgcacctgctcctgctgactggacaccagctggcgccacccggaaccgcagctttcccatcagccactgcacatggcggacatccacaggaccctctgcttccatgtggggtgcaggtgggccagggctggccagggccttcacactggcacacagtcatctcgtcacccagaggcactcgggcctgggccagcatctgctcgggcacaggtcctcgggccaagagccaggacagagccagcagcagctcccgactgccctgcgagccatcctcaggtagttgtgccagtgccagcctcgggtagcctgggagcatagtgctgacttcaccaagcgggcttggacctccagggcgagcgatgccaaggcgttgcccgcagggagtggcgagagcacacggaagaggagctgccagagcgcggaggtcgcctccggacggtcgaacttggcgcggcggaagatctcggggctgggtcccgagggcagcgaccgactcaacgcggcgatggcctcaggcagggccccggcccgggccccagccgcggggtccacccgctgccgccgcctccccatgcagccagcaccagcctctttcggatcgcccgcctccgccgcggcccggggcctgcgtccaatcaccgcacgggccgggtttagtgcggcggctgggaccctcgtgccgaattcgccacccaggcctcgctaccttaagaccgtggtagttactgccgtc

SEQ ID NO: 97582 - DNA, 1239 bp, Homo Sapiens
ctgccctcgaggctggtgcagcagctccaggaggtctccctgcggcagggcatgagggccgacccaggtgtgctggccgccctctgtgagaaaactgacaatgacatccgggcctgcatcaacaccctgcagttcctgtacagccggggccagcgggagctgagcgtgcgggacgtgcaggccacacgcgtgggcctcaaggaccagcgcagagggctcttctcggtgtggcaggaggtcttccagctgcctcgagcccagaggcgccgtgtgggccaggaccccgccctgcctgctgacacactcctgctgggtgacggggacgcgggctccctcacctccgcctcacagcgattctaccgtgtcctgcatgccgctgcctctgcgggcgagcacgagaaggtggtccagggcttgtttgacaacttcctgcgtctgcggctgcgagactccagcctgggtgctgtgtgtgtggccctcgactggctggccttcgatgacctgctggcgggggctgctcatcacagccagagcttccagctgctgcgctacccacccttcctgcccgtggccttccatgtgctgtttgcttccagccacacacccaggatcaccttccccagcagccagcaggaggcccagaaccggatgagccagatgaggaacctgatccagacgctggtgtccggcatcgcgccagccacgcgcagccgggccacgccccaggccctgctcctcgatgccctctgcctgctcctggacattcttgcacccaagctccgccccgtgagcacacagctgtacagcacccgtgaaaagcaacagctggccagcctggtgggcacgatgctcgcttacagcctgacctaccgccaggagcgcacgcccgatggccagtacatctacaggctggagccggaacgttggaggaactctgccgttccctgagctggcctgccgcaagcccttcactacaagagaagcagtcatcgccgggagacgaggggagaaatcgggggcgaggtctgcgggtaaaaagcccagggtgggagcccaggtcgaggcggcgggggcatgggcaaaggggtccaacgccagaacagtgaacggtgacactgaggagccggggaaccgaaaccggggagagcggaaagccacgggacagcaacaaggcggaaggacaaggcacagaacaggacggaacagacacagaacaacacggcccactctcgtagaaca

SEQ ID NO: 97583 - DNA, 1057 bp, Homo Sapiens
  misc_feature (969)..(969): n is a, c, g, or t
aaggagcgaggcctgggtggcgaattcggcacgagggcgaggccggcagcgcccacccggtcgcaatggagcttcccctagggcggtgcgatgattcccgcacctgggacgatgactcggacccagagtcagagacagacccagacgcgcaggccaaggcctacgtggcccgcgttctcagtccgccaaaatccgggctggcgttctcgcgcccctcgcagctatccacacccgccgcgtccccgagcgcttcggagcctcgggccgcgtccagggtttcggccgtaagtgagccgggccttctgagccttcccccggagctgctgctcgagatctgctcctacctggacgcccgcctcgtgctccacgtcctgtcgcgggtgtgccacgcgctccgcgacctcgtgtctgaccatgtcacctggaggctacgcgcgctacgccgcgtacgcgcgccctacccagtggtggaagagaagaactttgactggccggcagcctgcattgcgctggagcagcacctgtcccgctgggcagaggatgggcgctgggtcgaatacttctgcctggccgaaggccacgtggcttccgttgactcagtgctgctgctccagggtgggtcactctgtctgtcgggctcccgagatcgcaacgtcaacttgtgggacctgcggcagctggggacggagtccaaccaggttctgatcaagaccttaggcactaagcgaaatagtacccatgaggggctgggtgtggtcactggcagcgcaggaccaccgcgtgtgctccggctcctgggacagcacagtgaagctctgggaaacatggcagcggatgggcagcagttcggcgagataaaagccagctcagccgtgctgtgcctctcctacctgctgacatcctggtgactggcacctattgacagaaagtgaccatctacgaacccagagccggcccagcccctgttgnagccacagcaactacactccagaccgggcgaaccccttgctgcgggatgaccggaacatcatctccaggaggagaaccaacaccccgt

SEQ ID NO: 97584 - DNA, 1509 bp, Homo Sapiens
tctagggcttcccccccggccattctccagagtatccaacaagtccccgcactcaaagtgcatggcgaccactagcgcacgctgcgctcggcctcctcctctgctggatctccctcgtgccgcacggttctcctcctcctccggcagcccctcgggttgctcctcttcctctgtcctcctgcagctcctgctccagctgttcgccgagcaggtcctcggtgatggagccaagcttgggcgcgctgcggctgcgctccaccggcggtttatagcagcagggtccgtgtaggagcagcttgcgcagcggcactagcgggatggtgtgtgcgcccaccagctcctgctgctggtgacgcgcgtcgtcccgccgcttgaggcgtttaaataccgccagcgcgttggccaaagtaaggtaaagcagcagggccatggcctgcgcatattcgggaattagacaccagcacggagtggcagcgcagcatcacggccaagagcttcagctcgtgccggtacacccaggagaagaccttgggcagccgcgcgtcggacacgcagtatggtgacgaggtgcagcaggtagaggtggcccgggcggagcagcgcgcgctcctcggcgtgcaccatgcggataccctgcgcactcaccgtcagcttcatcttggtgccctgacggcccgcctcgctcttgctccagatcttgcccacagcaaggtcggtgcagccgtcgccgcgcgcctggatggtggtggcattgcccaggtagagcacggtgtaagttgggtcctcgctagtgatgtgcagcttcttgcgcttggagcggaacatgctgcccacccggctaagcgcgccttcggggcacgcccgcgccagcgagctgagcgccgagtagtgcaggctcacagcgtagcccttgggcttggacgcctgccgcggcggcgcctcggccagcagctcgaacttgtgcttcttccacggcagcatctccggagggcgccccggcgcagctgggcggcggcggcggcggagcgccgggtgcgaggcccgctgagccaccggcccctgccaggctcggcccgggcaagatcgaagaataaaactactgggagcggccctccgaggggtgctggagacggaaagccccccggctgggctggtctcaagtcagcagctcgcccaaagtgcggtcggatgctgggtccggctggccgcggcgggccccgcgcagcagtcccgcggggactcactgcatcttcgctccgccggacgccggggactcgcgctcggcccgctcagtgtccgggctggcctggccgagacggcgctgggctccgagaacaggggacgggcatggccgggtccgggaaccgccgctacctcatttcttccctccgaggcggtgtccagctccgctcccgggctctccacggtctgctgcccgcctttgcagtgcgccctctccggtgctgcgagcggcgtccggctcgcctgccatcccgggaattccggacc

SEQ ID NO: 97585 - DNA, 885 bp, Homo Sapiens
  misc_feature (775)..(775): n is a, c, g, or t
agggggagagagtatgaagtcgaggcgcgccgaattcggcacgaggggcaggcgagccggacgccgctcgcagcaccggagagggcgcactgcaaaggcgggcagcagaccgtggagagcccgggagcggagctggacaccgcctcggagggaagaaatgaggtagcggcggttcccggacccggccatgcccgtcccctgttctcggagcccagcgccgtctcggccaggccagcccggacactgagcgggccgagcgcgagtccccggcgtccggcggagcgaagatgcagtgagtccccgcgggactgctgcgcggggcccgccgcggccagccggacccagcatccgaccgcactttgggcgagctgctgacttgagaccagcccaaacggggggctttccatctccagcacccctcagaggtggggagcaccggcccctaagcacactcgctgtacagtttccgcgggttttggacccagtcctgacggctgtgtgtgttaggggacccacctcacagtcgccgaggagatcctgcatattcatgcaccatcccgggtgctgttgctggggctctctttatttgcacgcgcgcttctagcttttttcctgacattttccactctacgctcgttctttctcccttgcattttgttgcttgcctgagactctttgctctcgccttgcccggctggggtattctgtgtgtcgcgtgtctccccgcacaacttttttgccactcgagctgatattttctttagagattaccgcnctctgcgggtctaacattcttgctcctccccactcctacaagcgcccatattattctattgccggccactgagacgtgtcctgcttcccgctccccccccttgctgcccg

SEQ ID NO: 97586 - DNA, 1478 bp, Homo Sapiens
  misc_feature (1002)..(1063): n is a, c, g, or t
cgcgtgggttcctgccggtgtcctgctcggcctgccgccgggcccggcccggctgcttggccccgggttttcgcgccccccgggttccgggtacgccagcgtaggcggcctgtctccgggatattcgggtctgtccaggaagacctggtttggttggtgaggcgagttctcccgcgcagctgcagtacacagggcatgctgttctccttcaccccgcgcactttcagccagaccgggtccctgccagggtggaaggcccatcagcttcttctgtagaacttccaccagcgtcatctcgatggcagaggagtcgtagggcgcctgacagttggagcagagccactgaggcaggaccgccccatcctctgagaaggaagagtctttacacaggtccagtcgcggcagaagttacagctgcggcagatgacctcaggaagcacgtaggagcggcaggggtctcggaactgggcctcctcggagaactcgccgacatccaccaggcgaagcaggtctcggttcagcttattcacctggtttgtgatgttggtgtccagggacagcaccttgcacacgtatttgatgaactccagggcagggttattgagcagcaagtgggaaccggggaggacaggaaacatctccgagagctcagtggagttccgagagcctgtgactttcttctgaatcttctgagtgatggtgaagaagctctgagtgagctcatttgcggacataatcctgagagaaaggtgatcattccgggaagggctcctgaccgccccctcggcctcctggggaaagctggctggcccccctgcctcctcacgggggttgctccctggagcactgcgcctcagcccgtccttcatgcagtggtacacggccacgatgtacgctgaaacaatcatgaggaagtagttctggcaggaggctgcctgtggcaaaaactgcaaaatgttccagttgttttcccagtaaatcctccacgttggattcctccgnnnnnnnnnnnnnnnnnnnnnnnnnnnnnnnnnnnnnnnnnnnnnnnnnnnnnnnnnnnnnngctccccctgctttctgggagtcttgcagtccacagtgaatacgagatgaaacttttcctttgattccgccatagttagatggatccatccagagaagaaattcccagcatcgagagaaagaaattgtcagagaatggaaggtctcctttgaatggatgctgctggtgatgtactccacgtaagcgatggcatcttccacacggcgcttctttgtacagaggatgatgcggttgaagttggcgtagatgactgatgaccccaggcgcttgaactcagcgatgagctgcaggaagagcttcttcatcatgttgtggagtgtgcggtgcagggcagggtcatgaagcagagagcctcgtgccgaattcgccacccaggcctcgctaccttagaaccgttagagttactgccccagtt

SEQ ID NO: 97587 - DNA, 1377 bp, Homo Sapiens
  misc_feature (1166)..(1216): n is a, c, g, or t
  misc_feature (1255)..(1311): n is a, c, g, or t
gaagaaaaaacaagagatggaaaggacagaggacgagattttgaacgacaaagagaaaagagagacaagccaaggtctacttccccagcaggacagcatcattctcctatatcttctagacatcactcatcttcctcacaatcaggatcatctattcaaagacattctccttctcctcttcgaaaaagaactccttcaccatcttatcagcggacactaactccacctttacgacgctctgcctctccttatccttcacattctttgtcgtctccccagagaaagcagagtcctccaagacatcgctctccaatgcgagagaaagggagacatgatcatgaacgaacttcacagtctcatgatcgacgccacgaaaggagggaagatactaggggcaaacgagacagagaaaaggactcaagagaagaacgagaatatgaacaggatcagagctcttctagagaccacagagatgacagagaacctcgagatggtcgggatcggagagatgccagagatactaggggaccgaagggaactaagagactccagagacatgcgggactcaagggagatgagagattatagcagagatacaaaagagagccgtgatcccagagattctcggtccactcgtgatgcccatgactacagggaccgtgaaggtcgagatactcatcgaaaggaggatacatatccagaagaatcccggagttatggccgaaaccatttgagagaagaaagttctcgtacggaaataaggaatgagtccagaaatgagtctcgaagggaaattagaaaggaccgaaggggccgaagtagggggagggttccgtgagtgacctgaaaagggaagtcgaggctcaagaggttctcaaattgatagtcacagtagtaatagcaactatcatgacagctgggaaactcgaagtagctatcctgaaagagatagatatcctgaaagagacaacagagatcaaggcaagggattcttccttggagagaagacatggagagcgagaccgtcgtgacaacagagagaggagatcaaagaccaaggctcaccaattcgaccatcagggaaggaatgagcgagcttgagcgtgatgaaagaagaaaggaacgaagagtagacagagtggatgatacggagagatgaaagggcnnnnnnnnnnnnnnnnnnnnnnnnnnnnnnnnnnnnnnnnnnnnnnnnnnnggaacgtgaacgggatcgggaaccgacgaaaaagagagnnnnnnnnnnnnnnnnnnnnnnnnnnnnnnnnnnnnnnnnnnnnnnnnnnnnnnnnntcgtgacagggatagagaccgagaccacgatcgagagcgggaaagagagagggaacgagacaggga

SEQ ID NO: 97588 - DNA, 1139 bp, Homo Sapiens
tttccgttctcttggcccggctgacagagttagccgaggccgccatattgaataagcgacccggcctcctagggggtcgtcgtggtccagacagtttagcagaacagcctccgcggctccggggagaagcaatatgttaaggatacctgtaagaaaggccttagtaggcctttctaagtctcctaaaggatgtgttcgaacaactgccacagcagcaagcaacttgattgaagtatttgttgatggtcagtctgtcatggtggaaccgggaacgaccgtcctccaagcttgtgagaaggttggcatgcagatccctcgattctgttatcatgaaaggttgtctgttgctggaaactgcaggatgtgccttgttgaaattgagaaagcccctaaggttgtagctgcttgtgccatgccagtaatgaagggttggaatatcctaacaaactcagaaaaatccaaaaaagccagggaaggtgtgatggagttcttattagcaaatcacccattggactgtcctatttgtgaccagggaggtgaatgtgatctgcaggaccagtccatgatgtttggaaatgataggagccgatttttagaggggaagcgtgctgtggaagacaagaacattgggccattggtaaagaccatcatgacaagatgtatacagtgtactcgctgcatcaggtttgcaagtgagattgcaggagtagatgatttgggaacaacaggcagaggaaatgatatgcaagttggcacatacattggaaaagattgttcatgtctgaactgtctgggaatatcattgatatctgccctggttaggtgccctaacctctaaaccctatgcctttaattgcccggcctggggaaacaagaaagacagaatccattgatgtaatggatgcggttggaagtaatattgtggttagcacaagaactggagaagtgatgaggattttgccacgtatgcatgaggacatcaatgaagagtggatctctgataaaaccagatttgcctatgatgggctaaaacgtcaaagacttaccgagccaatggtcagaaatgaaaaagggcttttaacctatacttcttgggaggatgctctctctcgcgtagctggaatgttgcagagttttca

SEQ ID NO: 97589 - DNA, 1021 bp, Homo Sapiens
aaatacggctaggtacgaggctgggtgttaatcggcacgagggttaggtgcgcgtgtcagcggtttaatactcctccccgaactgccaactcttcacgcacgcgaagtaggccccaccctggctgggtttacgcgtgcgcactaacgggcctggtcccggaagaccacacgcgtgcgtggtggggactacggtgacagtaccccgggtggggcgagggccagtcatggcggagtcctggtctgggcaggccttgcaggctctgccggccacggtgctgggcgcgctgggcagcgagttcttgcgggagtgggaggcgcaggacatgcgcgtgaccctcttcaagctgctgctgctgtggttggtgttaagtctcctgggcatccagctggcgtgggggttctacgggaatacagtgaccgggttgtatcaccgtccaggtctgggtggtcagaatggatccacgcctgatggctccacgcatttcccttcgtgggaaatggcagcaaacgaacctctcaaaacccacagagaataagggaaggcagcagagggtctccaagggcatcactgggtctgctggcttctacactgggttctgctactccccagacctcagggacaactgccgggggttcagggttggtagcagggagtacccagtgcctacagggctgggcctcttctgcctcttaagcctgctccctcacccaggcactgggcaagtgaagagtttgcctgtactcttatctgggtgccttaaggagagagattgtgttcttcctctctcaggggtgataactcaggaagcctctgggttgggaagaccatcagtctcttctgtctcaggttacttctacatgtccctcttacatacccaaaatgtgaacccataaaaaattttccttgaagtggagcaagcattgatggctcacgccctgtaaatcacaaacacttggaaagatgaggcagcgcagatcacgacgtcaagagtagaacacagctgacaacatggtgaaacgc

SEQ ID NO: 97590 - DNA, 1063 bp, Homo Sapiens
ggcctgggtggcgattcaagcacgaggggcacccctaagtcacttctctaaagagaaagctctcttcctgcctggcggagccctcccctccccccggatcttcctgctttcccgagaggggaggaccagagaccggcagatggctgcagcgctcctcactgcctggtcccagatgccagtgactttcgaggatgtggccttgtacctctcccgggaggagtggggacggctggaccacacgcagcagaacttctacagggatgtcctgcagaagaaaaatgggctgtcactgggctttcccttcagcaggcctttctgggcccctcaagcgcacggcaagggtgaggcctcgggctccagccggcaggcaggagatgagaaggagtggagaggcgcgtgcacaggagccgtcgaggtggggcagagggtgcagacctcatccgtggcagcccttgggaatgtgaagcccttcagaaccagggcagggagagtccagtggggcgtcccgcagtgcgcgcaggaagcagcctgcggccggagctcagggccggccaaagactccgggcagccggctgagccagatcgcaccccggatgcagctccgccagaccccagtcccacggagccccaggagtaccgcgtcccggagaagcccaacgaggaggagaagggcgccccggagagtggcgaggagggcctggcccctgacagtgaggtgggcaggaagagctaccggtgcgagcagtgcggcaagggcttcagctggcactcgcacctggtgacgcaccggcgcacgcacacgggcgagaagccctacgcctgcactgactgcgggaagcgcttcggccgcagctcgcacctcatccagcaccagatcatccacacgggcgaggaagccctacacctggccccgcctgcccggaagagcttcagccaccactccacgctgattcagcaccagcgcatccacaccgggagaaaagccctacgtggtgcgacccgctgcgccaaaaggctttcaccccaccgcttcggaattggtccccccaccagggcacccccc

SEQ ID NO: 97591 - DNA, 1143 bp, Homo Sapiens
aaaacttacggctaggtacgagggctgggtgttgaattcggcacgagggtcccggccggaggcaggccgggactctggtgggtctaggcgcggatcggacccaagcaggtctggcggcggcggcaggagagcggccgggcgtcagctcctcgacccccgtgtcgggctagtccatgcgatggcggacgggcggcgtgggcccatggccaggcccggcatggagcggtggcgctgaccggctggcgctgtgtgacgggggcctcggggtggcatctggctgcggccgtggccctgggccctggtccagcagggactgaaggtggtgggctgcgcccgcactgtgggcaacatcgaggagctggctgctgaatgtaagagtgcaggctaccccgggactttgatcccctacagatgtgacctatcaaatgaagaggacatcctctccatgttctcagctatccgttctcagcacagcggtgtagacatctgcatcaacaatgctggcttggcccggcctgacaaccctgctctcaggcagcaccagtggttggaaggacatgttcaattgtgaacgttgctggccctcagcatctgcacacgggaagcctaccagtccatgaaggagcggaatgtggacgatgggcacatcattaacatcaatagcattgtctggccaccgagtgttacccctgtctgtgacccaattctatagtgccaccaagtatgccgtcactgcactgacagagggacttgaggcaagagcttcgggaggccaagacccacatccgagccacgtgcaatctctccaggtgtgggggagacaacaattcgccttcaaactccacgacaaggaccctgagaagggcagtggcaactataagcaattgagtggtttaaacccgaagattttgcccgagggatggaattaagggtcatcagaaaccccgcaaagattccgaatgtgggaattcacaataatgccacggagagcgggacctacgaccgtggggaagccccatatatccaccaacactatgagggtgaccgcgccggaaaaagggggaaaccgtagacgcgaacacacacgtgtcgccgcacagaggagaacaagtgggagaaataacgaaacagaccagaacaaag

SEQ ID NO: 97592 - DNA, 1063 bp, Homo Sapiens
cctatagtactatgaaccagtttgttcaaaaaagcaggctggtacctggtccggaattcccgggatatcgtcgacccacgcgtcgagcctgggggacaggccggcgcggctgggagcgggtgggcggccgggaggccggagcagcacggccgcaggacctggagctccggctgcgtcttcccgcagcgctacccgccatgcgcctgccgcgccgggccgcgctggggctcctgccgcttctgctgctgctgccgcccgcgccggaggccgccaagaagccgacgccctgccaccggtgccgggggctggtggacaagtttaaccaggggatggtggacaccgcaaagaagaactttggcggcgggaacacggcttgggaggaaaagacgctgtccaagtacgagtccagcgagattcgcctgctggagatcctggaggggctgtgcgagagcagcgacttcgaatgcaatcagatgctagaggcgcaggaggagcacctggaggcctggtggctgcagctgaagagcgaatatcctgacttattcgagtggttttgtgtgaagacactgaaagtgtgctgctctccaggaacctacggtcccgactgtctcgcatgccagggcggatcccagaggccctgcagcgggaatggccactgcagcggagatgggagcagacagggcgacgggtcctgccggtgccacatggggtaccagggcccgctgtgcactgactgcatggacggctacttcagctcgctccggaacgagacccacagcatctgcacagcctgtgacgagtcctgcaagacgtgctcgggcctgaccaacagagactgcggcgagtgtgaagtgggctgggtgctggacgagggcgcctgtgtggatgtggaacaaatgtgccggcccaaccgcctccctgcaacgctgcccagttctgtaagaaaccccaacgggttcctacacgtgcgaaagagtgtgactcccacctcaagggggcttccacaggggaaagccccaggaaactggaaagcagggttatctcggggctagcccaggaaacc

SEQ ID NO: 97593 - DNA, 1154 bp, Homo Sapiens
  misc_feature (112)..(127): n is a, c, g, or t
aagagtatgaagtcgacggcgcgccgaattcggcacgagggatataattgctgcttatcaaagattctgttctcgacccccaaaaggatttgaaaaatactttcctaatggnnnnnnnnnnnnnnnngctagtgaacctaaagaagttatgggagagaaaaaagaatcaaagccagctgctaccacacgctcttctggaggaggaggtggtggcggtggaaaacgaggtggcaagaaagatgattctcactggtggtccaggtttcagaagggtgacattccatgggacgacaaggatttcaggatgttcttcctctggactgctctgttctggggtggagtcatgttttacttgctgctcaagagatccgggagagaaatcacttggaaggactttgtcaataactatctttcaaaaggagtagtagacagattggaagtcgtcaacaagcgttttgttcgagtgacctttacaccaggaaaaactcctgttgatgggcaatacgtttggtttaatattggcagtgtggacacctttgaacggaatctggaaactttacagcaggaattgggcatagaaggagaaaatcgggtgcctgttgtctacattgctgaaagtgatggctcttttctgctgagcatgctgcctacggtgctcatcatcgccttcttgctctacaccatcagaagagggcctgctggcattggccggacaggccgagggatgggcggactcttcagtgtcggagaaaccactgccaaggtcttaaaggatgaaattgatgtgaagttcaaagatgtggctggctgtgaggaggccaagctagagatcatggaatttgtgaatttcttgaaaaacccaaagcagtatcaagaccttaggagcaaaaatcccaaagggttgccatttctcacttggtcctccagggcactgggaaagacgctgctagcttaaggccacagccggagaaagccaatgtcccccttcatcaccgttagtgggatctgagtttttgggagattgttcggttggttgtgggccctggttataagtccgagacttattttgccttggtcgggaaaattgcctttggttctctttatccgatgaatcgatgcgcggcgaagggaaaaaggaaagggttgggggaata

SEQ ID NO: 97594 - DNA, 1070 bp, Homo Sapiens
cttaaagatgaaaattccgcgactttgagtagacgttttcgtgaggatttccagtgttgcccactccgatattgtgtgtccgtggtccccgtggccccgtgaccataggggcggaacgatgcaaccccgtggggaagcaagcccatttttttcggagaccccgcccggtaaaataaaatccagggcccagaatgtcacctcttcaccagggaccagtttaagggaagtacgcaaccgtgttgacaagaaaatgggtacctggaccgtccgtcttctctggaaagtccacaatgataccattctccatcattcactttcttcaaacagggcttttattttatagtacctgaccccatgtccaggaggaggtagaggtggccatctagcatctcaatagcaaagaagtccacctttatcatctgtgggtgcttggcatctttctgatgtcttggcttgccatggcttaaataagatgaggccatttggctctgttgttacggtaatatcaaactgatatggagtccagttttctttgcattccatttaggcaaagagatgaaagactctgggctttcaaaggtgattgggtctaagaggttgcacacattcgtcacatttaaatgccaccactccatggatccttcatcttaggatctcctcctgcttggcaagtcgagataattccagcctcacatcattatttttatatacaacctctttgagacagcccataaagttgttactgactggtgaccctggaaggtcggctgtgctgggactgcctccaacatagaaaaagtcatcagaccccagcatggtataatcttcttgcgtgtagcccgttgtggtaagaatcccatccactgatattgtcaccgaacaatgtagtttgtttaccatagcgtgtccaatgcctgagtgctgacgcagattcctggtgactttcacatcatgccaggcattatcattaaactttccattcacaggctccactaggtgcttcaaaggcccctcgtgccgaattcgccacccaggcctcgctaccttaaaccgtatgagtactgccagtt

SEQ ID NO: 97595 - DNA, 1108 bp, Homo Sapiens
tacgcaggtagaggcccgggtttaatcggcacgagggcgcaggcgaatccttggcactaagcaaatatggacctcgtcggcggcagcggagccgggcgccggcagccagcacctggaggtccgcgacgaggtggccgagaagtgccagaaactgttcctggacttcttggaggagtttcagagcagcgatggagaaattaaatacttgcaattagcagaggaactgattcgtcctgagagaaacacataggttgtgagttttgtggacctggaacaatttaaccagcaactttccaccaccattcaagaggagttctatagagtttacccttacctgtgtcgggccttgaaaacattcgtcaaagaccgtaaagagatccctcttgccaaggattcttatgttgcattccaagacctgcctaccagacacaagattcgagagctcacctcatccagaattggtttgctcactcgcatcagtgggcaggtggtgcggactcacccagttcacccagagcttgtgagcggaacttttctgtgcttggactgtcagacagtgatcagggatgtagaacagcagttcaaatacacacagacaaacatctgccgaaatccagttcgtgccaacaggaggagattcttactggatacaaataaatcacgatatgttgattttcaacaaggttcgtattcaagagagccaagctgagcttctcgagggagtatcccccgcagatagaaagtaatttaaggggctagagctgtggcactcaagcttcaagctggtgacagtgtgactttacagggaaacctgcatagcagtgcctgacgtctccaagcttaagcacaccaggcagcccgttccaggaaacttagttaccagagatcagcagggactgagcggatattagaccatgaagagtgctttgaaggacatcccggggccctgcgagtacaagggaccactaccacataagcgtgggcacaccttcgccgcacgctattgagcacaaccaacacccgttctgccgtgtaatgactcatacataggtactacagtgtagactatcaacacatcgagtggacataacgcgcatcgttgacagga

SEQ ID NO: 97596 - DNA, 1040 bp, Homo Sapiens
  misc_feature (813)..(985): n is a, c, g, or t
gttcttctcgcctgtgtgtgcttctgctgtcgcttgctcgtgctggcgagttctgtagatgtggctcttgtgtgttggtctgtgcgttgttcgctctgtgtggagtttcggcgcttgtcgttgtctcgtcgctgctctgcgcactcggcgtgcgctgtgtgtcgtcgttgctcttgcgtggggttgtgcgtggttggtgtatcatcggccttccgagggaaccaggggtcgacggttccgagatggtctgagagaggcccagactccttcggaccctacaagctagctcccacctctggggctccccagctggcttggttctcctctccggtcctcctgttgccaatcttggaaccacgagacctacaccaggctaacctggtggccacgcacagattcaggcaccagcaaagcaggagcaccaagacatgagaaaaatgtttgcaagaatttaacacttcaaatataagaatcaggacatggagaaactggaaccctcgttattgctagtgagaatgtaaaatggtgcagttgttaaggaaaatagtttggcagttcctcaggaagttcaacatagttaccgtatgacccagcaattccactcctaggtgtatgcccaacagaactgaaaacaggtctttaaacagatacttgtacccaaatgttcaaaacagcttattcagtcgccaaaaggtagaaacgacccaaatgtctaccaatgggtgaatggataaaccaaatgtggtccatccatacaatgaaatattatttaaccacaaaaaggaatgaaggctgggcatggtggctcacacnnnnnnnnnnnnnnnnnnnnnnnnnnnnnnnnnnnnnnnnnnnnnnnnnnnnnnnnnnnnnnnnnnnnnnnnnnnnnnnnnnnnnnnnnnnnnnnnnnnnnnnnnnnnnnnnnnnnnnnnnnnnnnnnnnnnnnnnnnnnnnnnnnnnnnnnnnnnnnnnnnnnnnnnnnnnnggcgcgaacccaggagtggagcttcagtgagcggatacgcaccgctgcaccctcg

SEQ ID NO: 97597 - DNA, 1079 bp, Homo Sapiens
tatgatgacatggcaggcgtgaggcacgcacaatggcctcccgtgtgtcgccatgtcggtcaccacgccgtccgtcaggatcagcaggatgtagtatagagaggctttcccggtgctctcctcgccgccgccacgcgtgccaccttggagatgatgggcgccacgttggtggggccgtagagctggacctgggcaggcagttctggtaggcctccaccacgccctggatgccttcacactcatcgtcctcagggttgaaattgatggcaaagtcatgggacacctcatacttgggagggatccgggctccaaaccccaaagcggaaaacctcttgtcactgtcatagtcctggcagatctcgcccacggacaccagtgccttcaggtactcgttcggctggtaggggttgatgtagtgcagggagcagctgtcccgcgggtctccattggaggcggtgaagtcaatggccacggtgaagtggatctggcagccgcccatgatatagtccaggaaggagtacaccctgtggaacttgaggtcagccaggacgaccactcctgagttcttataactgcgtctcttctgcttgtatttggggttcacacagtcccactgggcctgcccctcctcaaaggccttctgcatctcctcgaaggtggtagagaattctccgatgaagtcgtgctttcctcgagagtcgtaatcccagaccaggcactttagaggcctgtctcctcgcagctgcagagggaactcagagagactttgaaggcctcccacaccgggttcaggttgttcttcaccacctccgtcctgtacaccagctgcaagccctggtcgtcgttgaccctgtagagctccaggaaggggtcggacttgctgaagaggtccttgtcgtccagcttcctggcccggaaggagagctccacgtagccgttgttccccgagatgtcctcggcgatcaccgtgatggtggacttgccagcgttcctgccaaacttgagcagcagcgggcgggtcaccttcttctgggccacaatctgcccccagggtgcactcctatgcccccgcgaggaaa

SEQ ID NO: 97598 - DNA, 1100 bp, Homo Sapiens
aaactataggtctagtacgaggctgggtggttaatcggcacgagggttggagcgagtgttcgcgcacctgcggagagggctaccagttccgcgtcgtgcgctgctggaagatgctctcgcccggcttcgacagctccgtgcacagcgacctgtgcgaggcagccgaggccgtgcggcccgaggaacgcaagacctgccagaaccccgcctgcgggccccagtgggagatgtcggagtggtccgagtgcactgccaagtgtggggagcgcagtgtggtgaccagggacatccgctgctcagaggatgagaagctgtgtgaccccaacaccaggcctgtaggggagaagaactgcacgggcccgccctgtgaccggcagtggaccgtctccgactggggaccgtgcagtggaagctgcgggcaaggccgcaccatcaggcacgtgtactgcaagaccagcgacggacgggtagtacctgagtcccagtgccagatggagaccaagcctctggccatccacccctgtggggacaaaaactgtcccgcccactggctggcccaggactgggagcggtgcaacaccacctgcgggcgcggggtcaagaagcggctggtgctctgcatggagctggccaacgggaagccgcagacgcgcagtggccccgagtgcgggctcgccaagaagcctcccgaggagagcacgtgtttcgagaggccctgcttcaagtggtacaccagcccctggtcagagtgcaccaagacctgcggggtgggcgtgaggatgcgagacgtcaagtgctaccaggggaacgacatcgtccgtggttgcgatccgttggtgaagcccgttggcagacaggcctgtgatctgcagccctgccccacggagcccccagatgacagctgccaggaccagccaggcaccaactgtgccctggccatcaaagtgaacctctgcgggcactggtactacagcaatggctgtgctgccgctcctgcaggcccccccactcctaggcccggcagctgcagccccttccagatgaagaccaagcgccctcctgtggctgtgcagcttctggggcctccagagaccccctca

SEQ ID NO: 97599 - DNA, 1588 bp, Homo Sapiens
taggtagaggctcggggtttaatcggcacgagggcttagccacggccggttcccgttccctccaggacgcgagggtcgccttgggtggggaacccgcgaccgggcgaggacctatcccggtgtggggcttcccgatttcgaaagaatctcgctgcacccccgcccagagttcagaccaagcgaaaagttatttgagaggcctcgggggcgcggggtgaggagtcgtggcggaggccttggtcggggcgccgtggatatccccgagtcaccgcgtccctctcctgcagctcccgcgtcgctgggaggagcgagggagcgagcgggaaggggtctagctggcctttgctcggccctccccagcgcccggctttgaacccgccctgcactgctgtctgggcgggtccggggactcagcactcgacccaaaggtgcaggcgcgcgagcacaacccatggctgcgctgggctgcgcgaggctgaggtgggcgctgcgaggggccggccgtggcctctgcccccacggggccagagccaaggccgcgatccctgccgccctcccctcggacaaggccaccggagctcccggagccgggcctggtgtccggcggcggcaacggagcttagaggagattccacgtctaggacagctgcgcttcttctttcagctgttcgttcaaggctatgccctgcaactgcaccagttacaggtgctttacaaggccaagtacggtccaatgtggatgtcctacttagggcctcagatgcacgtgaacctggccagtgccccgctcttggagcaagtgatgcggcaagagggcaagtacccagtacggaacgacatggagctatggaaggagcaccgggaccagcacgacctgacctatgggccgttcaccacggaaggacaccactggtaccagctgcgccaggctctgaaccagcggttgctgaagccagcggaagcagcgctctatacggatgctttcaatgaggtgattgatgactttatgactcgactggaccagctgcgggcagagagtgcttcggggaaccaggtgtcggacatggctcaactcttctactactttgccttggaagctatttgctacatcctgttcgagaaacgcattggctgcctgcagcgatccatccccgaggacaccgtgaccttcgtcagatccatcgggttaatgttccagaactcactctatgccaccttcctccccaagtggactcgccccgtgctgcctttctggaagcgatacctggatggttggaatgccatcttttcctttgggaagaagctgattgatgagaagctcgaagatatggaggccaactgcaggcagcagggccagatggcatccaggtgtcttggctacctgcacttcttactggccagtggacagctcagtcctcgggaggccatgggcagcctgcctgagctgctcatggctggagtggaaacgaaattcaacacgctgacattgggccctgaaccaacctctcaaaggaccctgagatccaggagggccttgcaacgaggaaattggtgagatatgcagccagcaggccaatgccccaacaag

SEQ ID NO: 97600 - DNA, 577 bp, Homo Sapiens
cgttacgtgtatcgggcaacggagctgagaggagattccacgtctaggacagctgcgcttcttctttcagctgttcgttcaaggctatgccctgcaactgcaccagttacaggtaacccgcgggggcatcgcgtcctggggatgggagtgggcaccggaacagagaggctagaggtgagaagacgttggacagaaagtgaaggctgcaggaactcagctggggacccactgaggctatggtcataaactggaaatcagtagggagaatgggcaaagtgcagacagagccctttgagctgagataaacaggacgaggaagggcttaaatcaggacggcaccagtaagggggggatctggacgccggacttacagtgagcagaggttgaggagggagctgtcttgggaagagagtggcagatgcaaatgtgtaagctaacagatattatggaatcactaattctgggctgatattggctaccacagacttcttccaaacgaaataacttcaggaggattatagaaacctcttggttatttgcaaggtcaaattcctcttaggggatacacgttcgcgag

SEQ ID NO: 97601 - DNA, 1121 bp, Homo Sapiens
  misc_feature (886)..(886): n is a, c, g, or t
aggctacgtcgaggcctacggttaattcggcacgaggacaaacaacattgttaaaatgtatgaaagaatgtatgcagccttgggtgacccaaaggctccaggcctgggggcctttagaaggaagtttattcagacttttggaaaagaatttgataaacattttgggaaaggcaggttctaaactactgagaatgaagctcagtgacttcaacgacattaccaacatgctacttttaaaaatgaacaaagactcaaagccccctgggaatctgaaagaatgttcaccctggatgagcgacttcaaagtggagttcctgagaaatgagctggagattcccggtcagtatgacggtaggggaaagccattgccagagtaccacgtgcgaatcgccgggtttgatgagcgggtgacagtcatggcgtctctgcgaaggcccaagcgcatcatcatccgtggccatgacgagagggaacaccctttcctggtgaagggtggcgaggacctgcggcaggaccagcgcgtggagcagctcttccaggtcatgaatgggatcctggcccaagactccgactgcagccagagggccctgcagctgaggacctatagcgttgtgcccatgaactccaggttaggattaattgagtggcttgaaaatactgttaccttgaaggaccttcttttgaacaacatgtcccaagaggagacaggcggcttacctgcagtgatcccagggcaccgccgtgtgaatataacagatctggctgacaaaaatgtcaggaaaaaccatgcatgtacgcagcttcacatgctaatgtcataaggcgctaatcgtactgaaaccagcacgtattacagaaaacgaagcaaagtaaagtgcctggatgntctcttaacagcgagccttcgcgagagatgagtacaacggcctgcaggcaataccgggaccgccggatgccccatatgacgccagaaacaaacagcacaggaaaagggctcaagcacaggaactcatcccaaatgagcacaaaacaactcggcacacagatattgcgggccagtcaaaagtacgacgaatacagaacaacagagaagaacatataaacagaacaaaatagtaaga

SEQ ID NO: 97602 - DNA, 544 bp, Homo Sapiens
cgctgactacggcggaaggggaccccgagggcagctttggaggaatgcagccgttctgggacttcaggcccagggtggagccattcctggatatgggcacaccaatctcttcagtggtgtgcggcttcttcatcgtcccagagtcttgtcgctttccagtcagtggggaggaaataatcccattgccgatgttcttcttggagtgatctggaatcacactcgggcggccgggaagggaggaggagcctgtcctggagatgaggccctcgggacttttcttagagcctggaattcgcagatagaacagcacgtaggcctgctggttcagaaccaccttgacgttgctggaatggaccaaggaatcattcatctggtaccactgtccattgcttgccttcacgtagcagtaatagtgcccggcatggcagctgtagcccgagtgcaccaggacagcatagagtccatacatgacaggatcaccattattctgggacatatacggacgtatgttgaggaattccggatagcctacatccttggtgat

SEQ ID NO: 97603 - DNA, 994 bp, Homo Sapiens
cccgggttaaatggacgaggcttcaacgaccctggacagtgacgaggactctcccttggtgactctgtccttcgccctgtgcaccctggggaggagagctctgggaacagccgctcacaatatggccatcagcctggattctttcctgtatggcctccatgtcctcttcaaaggtgacttcagaataacagcacgtgacgagtgggtatttgctgacatggacctactgcataaagttgtagctccagctatcaggatgtccctgaaacttcaccaggaccagttcacttgccctgacgagtatgaagacccagcagtcctctacgaggccatccagtccttcgagaagaaggtggtcatctgccacgagggcgacccggcctggcggggcgcagtgctgtccaacaaggaagagctgctcaccctgcggcacgtggtggacgagggtgccgacgagtacaaggtcatcatgctccacagaagcttcctgagcttcaaggtgatcaaggttaacaaagaatgcgtccgaggactttgggccgggcagcagcaggagcttatatttcttcgcaaccgcaatccggagcgcggcagtatccagaacaataagcaggtcctgcggaacttgattaactcctcctgcgatcagcccctgggggtaccccatgtttggtttcccccaattaaaccacattcctaaccttaggggaccccacccagcgcggctggagaacctccggcgcgtggccccatcaacttttggacagacttcaggacctggtttcgggacccaacgtggctgtaaggatgcgcaagggtgtcgaagggcccgcagcacagtggcggcaacattgaagactgtgcacggaggagggcgcgaccacaggtggcacaatgcccgagtgtgcagccagaaaacaggaaaacaccaaaaaggcggccaccagggggcattccgcgcaggcacaaaacggcggagaaagcgaacactgcg

SEQ ID NO: 97604 - DNA, 1499 bp, Homo Sapiens
  misc_feature (1335)..(1363): n is a, c, g, or t
ccccgacgctgggcccgggagcggtccccgcgcacagcgcccggacgcgtaggtcccgaagtaggcccgcgctttgcttcgtaactggggatctctgaggacatcttagttctgaccttgtggaggccgcgtctctgctgcgtgttcgcgggccagtcgggccactttgtagaaatcatagccctctaaatcaagggacgaacgctgctggctggagtttgctggacactttcattccacctcctaacaaagagaattcctattccttgaggtcccttggggcagcagttaaagactacacgatccaggagcacctaggacctggggccaccttcctgcccgctttattggatggagcactgcctccccagtttctgggacaccttggggtgtggccttggtgagtgaaacttggggtgctgcctgctgggaaggaaatccggaaacgcagagaggactctctggtggtgacccaggccttgtcagatctgagattcttggaatctcagattgtgggggtgtggatggtgaatgaatttgggtatgcccccctttaccccagaactgaagaggaagcaaactacttgccacacttgaggctgcatgactattcagagaagggaggagccacttctgaattcagagtaggactgcatcaccaggcaaatacctgttctgagccagaaagactctggcttctgaggagatcctgagagtctgagtagtgccaggaagcagcctcagaatttgggggcccattacacaccccagccatgttcctgcgacggcttggtggctggctacctcgcccttggggccgccggaaaccaatgaggcctgacccgccttacccagaacccagacgggtggacagctcctcggagaattcaggaagtgactgggatagtgccccagaaaccatggaagatgtggggcatcccaagactaaggactcgggggcattgagggtttctagggctgcttccgaaccaagcaaggaggagccccaagttgagcagctagggagcaaaagaatggattccctcaagtgggaccagcctatctctagcactcaagagtctgggagactggaggctggaggggccagtcccaaactcagatgggatcatgtggattcaggtggcaccaggagaccaggggtgtcccctgaagggggactgagcgtccctgggccaggagccccattggagaaacctggtaggcgtgagaagctgttgggctggctgcggggggaaccaggagctccctcccggtacttggggggcccagaacgagtgtctgcagatctccaccaacctgaccctgcatcttctnnnnnnnnnnnnnnnnnnnnnnnnnnnnntgtgctcacgaacactgcgggcagccttggacacctggggcctgcgtgggaccgctgggcctctggctacttggcctactgtccttcctggctgccctgcatggggctcatggctgttctgaacttacttactgcc

SEQ ID NO: 97605 - DNA, 1066 bp, Homo Sapiens
aggtccaaatccagggcagactgggttggcccaggaggtcttaagggcagacctctcccgcctgctgcaactgcttccccacagcacttgctgggcacagcagaaacgccagcagagaaaatggacccgagagtccttagccctgggagctgaggctgcctctgggctgacccgctgctgtacgtggccagaactcggggttggcatcttggcatccatttgaggccagggtggaggaaagggagccaacagaggaaaacctattcctgctgtgacaacacagcccttgtcccacgcagcctaagtgcagggagcatgatgaagtcagcagccagtcggcacccatgccagccccctacgtcctccgaagacccgagggccaggccagtgtccctcatctacaaggtccagggtccatggtctgaatcaagggtcctggctgcccctgcgccgtagggtcaaaggtcatagtggggtgggggcagggagaagatgcagccaagagctcccggtggccacccactgtccgcctcacacacggatttcatcctcctcctcgctcatccatgaaggagaactccttgtctggctgtcttgaatgacatgcagcccgggccctgtccggcccccggaaggcagggctgcgctcctccaggatgcctgaggtgcagctggagagggagctgctgtcccgtgtggtgtggctgcccatgctgcgggctgagccggggctgggggccgctgctgcccacccctcatcctccagagcatgggaggggagggagggcaagtctgggccagccttgccttcctgccttgccaggggagggccgccacggcgtacgggggagcctgggtgatggtgccagcggcgccctcatcgccatggtaaccaccctccccctcctcggggtcccactcctccttgtccatgatgctgaggacgtcacccagcatggagggccccaggtcgatgtggaaggaccatgatggactccgcatgcttcagcccgtacgtggcccgacgcgtgggtcgacgatatcccgggaaatccggagcgtacca

SEQ ID NO: 97606 - DNA, 959 bp, Homo Sapiens
cggtccaaggtagcgaggcctgggtggcgatttcggcacgaggggaggatgaggggtgggcagcagcggcccccagccccggctcagcccgcagcatgggcagccacaccacacgggacagcagctccctctccagctgcacctcaggcatcctggaggagcgcagccctgccttccgggggccggacagggcccgggctgctgtctcaagacagccagacaaggagttctccttcatggatgaggaggaggaggatgaaatccgtgtgtgaggcggacagtgggtggccaccgggagctcttggctgcatcttctccctgcccccaccccactatgacctttgaccctacggcgcaggggcagccaggacccttgattcagaccatggaccctggaccttgtagatgagggacactggcctggccctcgggtcttcggaggacgtagggggctggcatgggtgccgactggctgcctgacttcatcatgctccctgcacttaggctgcgtgggacaagggctgtgttgtcacagcaggaataggttttcctctgttggcctccctttcctccaccctggcctcaaatggatgccagatgccaaccccagttctgaccacgtacagccagcgggtcagcccagaggcagcctcaactccagggctaaagactctccggctccaattttctctgctggcggtttctgctgtgcccagcaatggctgctggggaaacaactgcagcaggagggaaaccgtcttgcctctcagcccctccctgccccaccccaagctcctgccctgtaaatctggagcccccttggaactgacctggacggggggccaaccgcgaaacatggggcacttaacgccgccccttttcgggggaaaggagaacgggatgggaaaatggaaaggaaagccccccccggctttcctggaattgcaagaaagggacct

SEQ ID NO: 97607 - DNA, 1630 bp, Homo Sapiens
ttgcccctcttctgtgacacccctgtgcttgtatgcggagttcagcgctctgttccgccagttgtacttttctgctctgtttccacgcccctcctgacccttgccggtagtctgtcgtgccattttttccgagacccgttccgccgggtttctcctggccctctggaacggtgcctgggcctctccaccagggttttcctgctccagactggccatctggcgagatccacctctggttacttccaggatctcttgccagccggcgaagaaaggcccaactcggaagcagcagatgcgcaccactgactcctctaaggtctgagcaggggccgatccgtgtcaaagttaaagcgtctgtggccagctcggagcggggccagtttacgaagagccatgtcctctgggagcagaaggctagaggggagctcaggcagttcactaccttcaagaagatcttggacctcaggacacaaggccaggccagactcctggagttcaccagcagcaggcaacagattcagcaacacagacagccggttccacagactttgagagctctgcgcacacacgatgatgaggtcgggccttgcgtccgaatgccagtccaggaagactttcacagcaggaagcagaccttcggccatcaggacctgaagcttctcctggatgctgcgctcattccgacaggagcgtccactggactcactcccctccgaactcagagccctcctcagaggctggctctgaaggcttgcctacatccccattgacgcaaggcctgtggctgcgccgaggtatgagggttggtggtgggctggaggagcaggttgactaaaggtgggggccagtcggaagcagcgcttagtctggaacatctgggtggacatggcttgtagattgctggcaatgctagcctcactggggcccagtgggccattgagggaatcgggagcctcatgatctgccccgagggggctccagggttggtgaccgtgtcccctcctcttcctccatatcttccaagtctgatcgggactcctggctattcatttccgagtctgtttcagcatcaaaggccgttcccccaccttcaagactcttgtcagagccactgtctgagccctcactggcccgggctgagtcatggcttgagtccgattcaaagccttcactcaggtcactgtcatcaccaactttgggtgggtggcggcgacggcggagacaggagaggcgagagaacttacggctctttctgccctcacccacttggggtgttacaggaggaggctcaggatctggctcctcctctttctccacaggttccttggactctggttcatctgtgccatcactctggaatgccgggacgggattctcgccctcttccagctcagcctgcagccgtatgttgacatgattgacgaggtgggaaaagagggccagggtgaaggcaatggctgcactgtactgcttggatcctgctctctccaagctgtgcacacacataaggcagatgatgaccatttgaaagatgagaaggtccgggaggaaagcatatccactctcatactcctcctcatcctcacctcgtgccgaattcggcgcgccgtcgacttcatactctctcccc

SEQ ID NO: 97608 - DNA, 1080 bp, Homo Sapiens
aaataaggctaggtacgaggcctggggttgaatcggcacgaggccactgcagacccccagcccagcctgctctgcggcccctgcggctgtcagagagcggtgagacctggagcgaggtgtgggccgccatccccatgtcagatccccaggtgctgcacctgcagggaggcagccaggacggccggctgccccgcaccatccctctccccagctgcaaactgagtgtgccggaccctgaggagaggctggactcggggcatgtgtggaagctgcagtgggccaagcagtcctggtacctgagcgcctcctccgcagagctgcagcagcagtggctggaaaccctaagcactgctgcccatggggacacggcccaggacagcccgggggccctgcagcttcaggtccctatgggcgcagctgctccgtgagctgagtctcccactgccctgcacaccaccacattggacctgtgctgtcctgggaggtggtgttggaggccccatgaagagcgccctggactgctgagggtgggccaacagcccagagctcaggacacttggctttggggggaaggaaactgaggcccagagaggggcaaccactggccaagggtcacccagcaagttttggctaagagcctggcctccagccccagcagtgtggcccagagcaggggccgactgccaaagtaaccatcatccatatgggccgtgtggtgatgctggcccggaaggcagaaagaggcagcatgggcactgccagggacagccacatcctgctggtctgcagcgtggtccaccccgcctctgcccagcctgtctacaccgtgtgagctgaatcgtgacttgcttcccacctcctttctctgtcctctcctgaggttctgcctgcagcccccaggaggtgggcctgccccatcctagctggactcatggttcctaaataaccacgctcagaagctctgctaggacttaccccagccactgagtggcaggcgcatgagatttgtggctgttcctgatgctagtggcacacagtgcttatctgcataaataaacactggccaccagcagtgaaaaa

SEQ ID NO: 97609 - DNA, 1025 bp, Homo Sapiens
atacggctaggtacgaggctgggtgtgtgaatcggcacgaggatgaaatagaccaaaagctggaaggattcatgaaccagcgtggagccaggtgtcttctcccatcctcatcatttcctatgagaccttccgccttcatgttggagtcctccagaaaggaagtgttggtctggtcatatgtgacgagggacacaggctcaagaactctgagaatcagacttaccaagccctggacagcttgaacaccagccggcgggtgctcatctccggaactcccatccagaatgatctgcttgagtatttcagcttggtacattttgttaattccggcatcctagggactgcccatgaattcaagaagcattttgaattgccaattttgaagggtcgagacgctgctgctagtgaggcagacaggcagctaggagaggagcggctgcgggagctcaccagcattgtgaatagatgcctgatacggaggacttctgatatcctttctaaatatctgcctgtgaagattgagcaggtcgtttgtgtaggctgacaccccttcagactgagttatacaagaggtttctgagacaagccaaaccggcagaagaattgcttgagggcaagatgagtgtgtcttccctttcttccatcacctcgctaaagaagctttgtaatcatccagctctaatctatgataagtgtgtggaagaggaggatggcttgtgggtgccttggacctcttccctcctggttacagctctaaggccctggagccccagctgtcaggtaagatgctggtcctggattatattctggcggtgacccgaagccgtagcagtgacaaagtagtgctggtgtcgaattacacccagactttggatctctttgagaagctgtgccgtgcccgaaggtacttatacgtccgcctggatggcacgatgtccattaagaagcgagccaaggttgtagaacgcttcaatagtccaatcgagccctgactttgtcttcatgctgagcagcaaagctggggg

SEQ ID NO: 97610 - DNA, 812 bp, Homo Sapiens
  misc_feature (402)..(419): n is a, c, g, or t
  misc_feature (651)..(670): n is a, c, g, or t
ctgtctttggacctcagaccctgaagtcacagcagcacccgttcccacaccaggtctgcccagatcttcactgacccaccaccccctcatttccttgcccttgcacctggggcttcctgagctcaggggagctccagcccagctgctctgaagaatcctacgtgctaacagctccccactgatagtcggaacgcgggtgcagggcttcagactcaccttcctgccagatgcttttacgtttcacctcgacatttctctcttcctataaatgaactcaggtgacatccagctgtgtttagccctcagcctctctccatgcagaggctcatcagacgaaaggtgccccaggcctcaggactgatgcgcacaaggctgtccccacccctgagctctggcgacatnnnnnnnnnnnnnnnnnngatctctctcactgcctccctccttcccctccaggctccaccagcagctccctgacaagctcactccactcacctcccagcacttacccacaaactgcttccttgctgggactacgctttccccaaccacaatccttcagctcaggcatctcctcggggatcccccctgacctgggtgcctttcccgtgcatgctcacaaccctgggcaggcttccactccatctttctacnnnnnnnnnnnnnnnnnnnngaaacggagatgtcctttttggtggcccagattgggaggggcaataaggcatggctctgggtttattggaacctcggcctccggggtcaacgcaattctgtggcctcagcctataccaggaggggtcatggtcaagggcacg

SEQ ID NO: 97611 - DNA, 776 bp, Homo Sapiens
cccgtggtattccaccacaaagtcaccccgggagaactgcttggtggcaatcacacccctgcctttgccatcgatgaggtcaatcttcattccttcttccttcccactttcaatcaattcatctattcttttcctttcttcagactgcagctcggctttgctcttcctggagctccttcggacagggtagaaatccgtaagtttgcgattctgttgcgtttttccttgagctttttttcggggggcctgtttgcccttgatgggctttttcagggcttgcttggcgatggctgcattggtggaatcacaagatgagggtggagtttttggaggttctgctgcttcagatttttggtttggaaaaggtaccaggggacctttcctggcgtctttgatcttctgttcctcggacttcatggcgctccgtactgcgttcccagcatttcttttctcttctcgtttcctgtagattccggctaatggtttcccctggcatttgacttcgtgatgtgtaactgagttctcttcctgaagggggaaacgcattccagagcatttgttcgggctcatgtaggaatagatctttgactgcccggtaaatacgttctccccgtcggtgcggggcctccccgggcccctccgctccaccatctcacgggccacggggcctgtcgcttccaccgcgcggggcttggacatcttcctgcctctagccatggctccactctgtcaccgcctgggatctccacgggaaacccagctttcgaaaaaagtgc

SEQ ID NO: 97612 - DNA, 1266 bp, Homo Sapiens
  misc_feature (62)..(107): n is a, c, g, or t
agccggctgagccacagcaggtcgccgcggggtccctggggccgtgctcccctgcccctccnnnnnnnnnnnnnnnnnnnnnnnnnnnnnnnnnnnnnnnnnnnnnnagctgggccctcgcccctccctcgggcggtcacctgggcacgggcgctgcaggtgtcggggcctcaaccttgcggagccgacagccatcgatcctcgggtggcctcgaggtggtggcagggccgccccctgcagtcctggagacgaacgcacggaccgggcctccggaggcaggttcggctggaaggaaccgctctcgcttcgtcctacacttgcgcaaatgtctccgagcttactcacatagcatatttggtatatcaaaatgaatatgcaatggaaccaaaaataacataattgaaggcagtaaacagtgaaattacaataggaagatcatcagtcaaggaagacccactggagaggacagaaaactgaagcagtggtttatcactgttgtatttcagcaggtcttcttgaaatttaactaaacaatatgactgctctctcttcagagaactgctcttttcagtaccagttacgtcaaacaaaccagcccctagatgttaactatctgctattcttgatcataccttgggaaaatatttattaaatatccttacactagcgaattgacaagacaaaaacacctgtcaaaattttatggaatatttttgcattttcactagcaatccggtgatcctttcactttgggtaaaacaatttccattcatatggtatttcaggaattttgtacttttaaagcattaggttcaccaaagtaccaaatctgcctatttactcaaattatttccttaacttatggctttttgcattatccagttttcctgacagcttgtatagattattgcctgaatttctctaaaacaaccaagctttctttaagtgtccaaaattaattttatttctttacagtaatttttatttttggatctcagccctctgcttagggcttggggagacccaaccaatctaacccaagcctggaaggaaccgaaacgcttatttcctcgtcccgtgcccttttcttaggcgagcattccacaagttccccgggctgggcaccttcttcccagcggcgcggttccattgtccactttgccagggcccccccttaaccccgtgttgcgggcccccacagttccccgccactcgcccgaatcccacgggtaccccccctctctcccaacctcctttcccatcac

SEQ ID NO: 97613 - DNA, 759 bp, Homo Sapiens
cagggaacatccactatctcggcatgctggaccccatgagatatgagcgcaatgtactgggcctcatgcacctgccccctgaacgtcctgtgccagcagtccctgcaaggctgaagcccaggcctggagggctccccaacccagctgcccatcctggctgacatgctactctactactgccgctttgccgccagaccggtgctgctgcaagtctatcagaccgagctgaccttcatcactggggagaagacgacagagatcttcatccactccttggagctgggtcactccgctgccacacgtgccatcaaggcgtcaggtcctggcagcaagcggctgggcatcgatggcgaccgggaggctgttcctctaacactacagattatttacagcaagggggccatcagtggacgaagtcgctggagcaacctggagaaggtctgtacctccgtgaacctcaacaaggcctgccggaagcaggaggagctggattccagcatggaggccctgacgctaaacctgacagaagtggtgaaaaggcagaactccaaatccaagaagggctttaaccagattagcacatcgcagatcaaagtggacaaggtgcagatcatcggctccaacagctgcccctttgctgtgtgcctggaccaggatgagagaaagatcctgcagagtgtagtcagatgtgaggtctcaccgtgctacaagccagagaagagcgacctcacctcaccacccctgaacgcttaaactgta

SEQ ID NO: 97614 - DNA, 861 bp, Homo Sapiens
gcgtccattggacgtccctgccctcgcgcgcgcctctgcccctcgagggcctgtttgagtcctcaccgggacctacagctgaaaaaaacaagcagggtctcaccgtgtgcatgatggcggaggtcagggcctcacttctggcccagggccttccatggcccacgctgcgcccagtgggacaggccttgggactgtgtttgctgctgctcgggtggctctcgaggggcaggggcggcctggagccccgtgggtaaaggttctgcagacattgctcggtgtgcgcgtcacctcaaggggcccatggtgaagaagagggctgtcaccacagccatgtctgcgtttgaggggccggactcaggagcaagtgtgctggtctcttcagtgtgagctggggccagcttcttcatggtgcagcgctttggtctttctgtccttagactagtggttctggtagggcttggtggcagccttgtggtgaggactcagtgagtgatgtctgtatgtgattgcagcagtgtctggcacccgagaggccctagggacgtattcctctgtctttttctcccacagcgcctggcacagagtctctgtgacacgcagtgcaacagtgaatagaagttgacgttagaaagtgctcccctatcttcagtgcacactctgggatggcagtagctgtggggtctggtgggtgggtgacctggtgtgtcgtggtgcagtatgccctgcttcaggactgcctcatcccagcatgtgccgggtggtccgactgcgctatccggttgcacgagcgcccggctgggacctagctgatgcgggccgctctgtggccctggcctctccacgtgtccaggtgcacggtcc

SEQ ID NO: 97615 - DNA, 753 bp, Homo Sapiens
  misc_feature (380)..(417): n is a, c, g, or t
tggcacgaggtggagtttgtctttggaacaacatttgtttgtgacaatatggataatgccaaaaaagtggcctttgataagaggataactgacttagaactgtaactctcggaggtgatgtgtttgatcctcatgggacattgagtggaggtgctcgatcccaggcagcttccattttaaccaagtttcaagaactcaaagatgttcaggatgaactgagaatcaaagagaatgagctgcgggctctagaagaggaattagcaggtcttaaaaacactgctgaaaagtatcgccaactaaaacagcagtgggagatgaaaactgaagaggcagatttattacaaaccaagctccagcaaagctcatatcacaagcaacannnnnnnnnnnnnnnnnnnnnnnnnnnnnnnnnnnnnngtgaggagactttgaagaaacactaaagaaatccaaagaaaagcagaagaaaaactatgaacgtattggaaaataacacactgacacacaatgcagaagctgaccagcagagcgagaagctgaacagatgctcagaaaacaaactggattgtgccaaaacaaaggcagatgcatctagcaagaagatgaaagaaaaacaacaggaagttgaagctatcactctggaactggaagagctcaagagagagcatacatcttacaaacaagagttgaagctgtaaatgaagctatcaaatcctatgaaagtcagattgaagtaatggcagtgaggtggta

SEQ ID NO: 97616 - DNA, 869 bp, Homo Sapiens
cttgtcctaactcttatgtgctactgagtcacattcccttctgtgaccctgggttgtttcacattgccgagaggccaagtaaagtgaagtaagattgaggcttctagaagtgcctggatggtcttcgtcacgctcccgcttggccactcctcgtccacgccaccgtgcgcataaccgtcttccacgtcggccctggtggtagagcctgcagagctccactcagcgtggcccaccgtcctctgactgttccggagtcatagaacttccaaggtggggcatctgtggcctctgactccaggaagcacaattcgtcataggacatcccgccatttgctcgcaaaagttcctgccagtcggtcaccgttggctgacacggatccagctttatgcctgatcacgtgctagtaagtcctgatcattgagcaagtcacttatggtgggagcccggagcaagcaggaggaacaagtacagttttctgttgcaggagttgtccttgctgatctctggaagaggatctccagtgctactctggaaagccattttcttctcccggagttgttcatatcttgaatttcgtgggcagttcaaagtaacttgtatcaccattcttcagctttagggagttccgtatcttgaatgggataccccgtcatgacatattaaaggataaagtgctagggatctgtgtcgtccactggttcactttaccatatgatctgcgcgcagatgggtcgtccaggtgaagaccatggcggcagggtatagggccaaacgagcgtccgagcgggtctgtccgtcctccggggcgcagttgaggaccagtgggaccacaggggatgaaaagtcctgcggttcctacgcgttatat

SEQ ID NO: 97617 - DNA, 965 bp, Homo Sapiens
gccggatctccggcggaaggcctgataacctgtggccaccctccaggcggacagaccacatgaggcacactcagtaatcaaaaggaagtcacgagacgatggccttccggacatacatggcgcaggcatagtcccagtgtgagcagaagcagcactgcctcctgtttctgtctcgatggtgagcgtcgcaggcccagcgctcctcggggtcgggaagagcccagggcttggctgagaccagctccctcctcatcagacagcactgcgttggcatcgccattctgcttagagtctgcccgtttcctctcgatcataccctcttcccgggcaggggggctggtatcactgcaggtgctgtcccggggggaagtctcctcagacttgcagtacatgggtgactccagctgcgccggccgtggcacgtgcttcttccgtttcttgggcagcttctgcttggccatggccagggagtagtacatgccgaagttgttgacgatgacaggcaccggcatggcgatggtgagcacgccagccagtgcacacagtgcccctaccagcatgcctgaccacgtcttggggtacatgtctccgtagcccagtgtcgtcatggtgaccacagcccaccagaagccaatggggatgttcttgaagtcggtgtggtcattaccccgagggtcggagggcctggccccaatgcgctcagcgtagtagatcatggtggcaaagatgagcacacccagggccaggaagatgataagcagcaggaactcattggtgctggccctcagggtgtggcccagcacgcgtagccccacgaagtggccgtgtgagcttgaagatacgcaggatgcgcacgaagcgcaccacgcgcaggaagcccagcacgtcatccgggccgccttggatcctcgtgccgaattcgccacccaggcctcgctaccttaaaccgttagtagttactgccg

SEQ ID NO: 97618 - DNA, 889 bp, Homo Sapiens
agtatgaagtcgacggcgcgccgaattcggcacgagggagcttgaagaagtgggtattccccttcccaccccaggcactggaggagcggccccccggggattccaggacctgagctccgggagctggactcgcagcgaccgcggcagagcgagcgggcgccgggaagcgaggagacgcccgcgggaggcccagctgctcggagcaactggcatggcccgagccatggccgccgcgtggccgctgctgctggtggcgctactggtgctgtcctggccacccccaggaaccggggacgtcgtcgtgcaggcgcccacccaggtgcccggcttcttgggcgactccgtgacgctgccctgctacctacaggtgcccaacatggaggtgacgcatgtgtcacagctgacttgggcgcggcatggtgaatctggcagcatggccgtcttccaccaaacgcagggccccagctattcggagtccaaacggctggaattcgtggcagccagactgggcgcggagctgcggaatgcctcgctgaggatgttcgggttgcgcgtagaggatgaaggcaactacacctgcctgttcgtcacgttcccgcagggcagcaggagcgtggatatctggctccgagtgcttgccaagccccagaacacagctgaggttcagaaggtccagctcactggagagccagtgcccatggcccgctgcgtctcacagggggtcgcccgccagcccaatcacctggcactcagactgggccggatgccaatacgagccagtgccaggtcctgttggcaagtcatgtcacacctctgatttgtgcctcaagcagtgacgcagatgtactgcagtgacagaagcttagagctcacgcgatggactcacgga

SEQ ID NO: 97619 - DNA, 826 bp, Homo Sapiens
gttaagtttgtcctcgtacattgctcacggcggggccaatcaggctgtacagtggcagacagacctgcactgctgtatggcatcccccagtcgaggccagtatttggctgcggcgacacctgagagacgcagcggccagggcactgctctccagtgagcggacctctgaacctcagctgtgttctggggcttggcaagcactcggagccagatatccacgctcctgctgccctgcgggaacgtgacgaacaggcaggtgtagttgccttcatcctctacgcgcaacccgaacatcctcagcgaggcattccgcagctccgcgcccagtctggctgccacgaattccagccgtttggactccgaatagctggggccctgcgtttggtggaagacggccatgctgccagattcaccatgccgcgcccaagtcagctgtgacacatgcgtcacctccatgttgggcacctgtaggtagcagggcagcgtcacggagtcgcccaagaagccgggcacctgggtgggcgcctgcacgacgacgtccccggttcctgggggtggccaggacagcaccagtagcgccaccagcagcagcggccacgcggcggccatggctcgggccatgccagttgctccgagcagctgggcctcccgcgggcgtctcctcgcttcccggcgcccgctcgctctgccgcggtcgctgcgagtccagctcccggagctcaggtcctggaatccccggggggccgctcctccagtgcctgggggggaaggggaatacccacctcgtgccgaattcggcgcgccgtcgacttcatactcttcccac

SEQ ID NO: 97620 - DNA, 2228 bp, Homo Sapiens
  misc_feature (1641)..(1702): n is a, c, g, or t
agggcgagagagtatgaagtgacggcgcgccgaattcggcacgaggagtgggtattccccttcccaccccaggcactggaggagcggccccccggggattccaggacctgagctccgggagctggactcgcagcgaccgcggcagagcgagcgggcgccgggaagcgaggagacgcccgcgggaggcccagctgctcggagcaactggcatggcccgagccatggccgccgcgtggccgctgctgctggtggcgctactggtgctgtcctggccacccccaggaaccggggacgtcgtcgtgcaggcgcccacccaggtgcccggcttcttgggcgactccgtgacgctgccctgctacctacaggtgcccaacatggaggtgacgcatgtgtcacagctgacttgggcgcggcatggtgaatctggcagcatggccgtcttccaccaaacgcagggccccagctattcggagtccaaacggctggaattcgtggcagccagactgggcgcggagctgcggaatgcctcgctgaggatgttcgggttgcgcgtagaggatgaaggcaactacacctgcctgttcgtcacgttcccgcagggcagcaggagcgtggatatctggctccgagtgcttgccaagccccagaacacagctgaggttcagaaggtccagctcactggagagccagtgcccatggcccgctgcgtctccacagggggtcgcccgccagcccaaatcacctggcactcagacctgggcgggatgcccaatacgagccaggtgccagggttcctgtctggcacagtcactgtcaccagcctctggatattggtgccctcaagccaggtggacggcaagaatgtgacctgcaaggtggagcacgagagctttgagaagcctcagctgctgactgtgaacctcaccgtgtactaccccccagaggtatccatctctggctatgataacaactggtaccttggccagaatgaggccaccctgacctgcgatgctcgcagcaacccagagcccacaggctataattggagcacgaccatgggtcccctgccaccctttgctgtggcccagggcgcccagctcctgatccgtcctgtggacaaaccaatcaacacaactttaatctgcaacgtcaccaatgccctaggagctcgccaggcagaactgaccgtccaggtcaaagagggacctcccagtgagcactcaggcatgtcccgtaacgccatcatcttcctggttctgggaatcctggtttttctgatcctgctggggatcgggatttatttctattggtccaaatgttcccgtgaggtcctttggcactgtcatctgtgtccctcgagtacagagcatgccagcgcctcagctaatgggcatgtctcctattcagctgtgagcagagagaacagctcttcccaggatccacagacagagggcacaaggtgacagcgtcgggactgagaggggagagagactggagctggcaaggacgtgggcctccagagttggacccgaccccaatggatgaagaccccctccaaagagaccagcctccctccctgtgccagacctcaaaacgacgggggcaggtgcaagttcataggtctccaagaccaccctcctnnnnnnnnnnnnnnnnnnnnnnnnnnnnnnnnnnnnnnnnnnnnnnnnnnnnnnnnnnnnnntacagtaaaaggacagagattaagatcagcaaagggaggaggtgcacagcacacgttccacgacagatgaggcgacggcttccatctgccctctcccagtggagccatataggcagcacctgattctcacagcaacatgtgacaacatgcaagaagtactgccaatactgccaaccagagcagctcactcgagatctttgtgtccagagttttttgtttgtcttgagacagggtctggctctgttggcagactagagtacagtggtgagatcacagttcattgcagccttgacttctcaacgccaagtcatcctcccacctcagcctcctgagtagctatgactacaggtatgtgccaccacgtctgggctaatcttttattattggaaagtcgaagttccctgtggtgccaagctgggtctgactctggctcaagtgaactctgcctggctcccaatgctgattagcactacatcacacgctgactctctcagcatacgtgtgcagacccactatcctctactga

SEQ ID NO: 97621 - DNA, 858 bp, Homo Sapiens
ggggagagagtatgaagtcgacggcgcgccgaattcggcacgaggggagcttgaagaagtgggtattccccttcccaccccaggcactggaggagcggccccccggggattccaggacctgagctccgggagctggactcgcagcgaccgcggcagagcgagcgggcgccgggaagcgaggagacgcccgcgggaggcccagctgctcggagcaactggcatggcccgagccatggccgccgcgtggccgctgctgctggtggcgctactggtgctgtcctggccacccccaggaaccggggacgtcgtcgtgcaggcgcccacccaggtgcccggcttcttgggcgactccgtgacgctgccctgctacctacaggtgcccaacatggaggtgacgcatgtgtcacagctgacttgggcgcggcatggtgaatctggcagcatggccgtcttccaccaaacgcagggccccagctattcggagtccaaacggctggaattcgtggcagccagactgggcgcggagctgcggaatgcctcgctgaggatgttcgggttgcgcgtagaggatgaaggcaactacacctgcctgttcgtcacgttcccgcagggcagcaggagcgtggatatctggctccgagtgcttgccaagccccagaacacagctgaggttcagaaggtccagctcactggagagccagtgcccatggcccgctgcgtctcacagggggtcgcccgccagccaaatcactggcatcaaactgggcggatgccatacgagcagtgcagggtctgtctgcacatcctgcacagctcggatatgtgctcagcagtgacgcaatgactgcagggacccaa

SEQ ID NO: 97622 - DNA, 1360 bp, Homo Sapiens
  misc_feature (190)..(310): n is a, c, g, or t
cagagcagctcactcgagatctttgtgtccagagttttttgtttgtcttgagacagggtctggctctgttggcagactagagtacagtggtgagatcacagttcattgcagccttgacttctcaacgccaagtcatcctcccacctcagcctcctgagtagctatgactacaggtatgtgccaccacgtnnnnnnnnnnnnnnnnnnnnnnnnnnnnnnnnnnnnnnnnnnnnnnnnnnnnnnnnnnnnnnnnnnnnnnnnnnnnnnnnnnnnnnnnnnnnnnnnnnnnnnnnnnnnnnnnnnnnnnnnntcaccatccacacggctgacctcatacatcaagccaataccgtgtggcccaagacccccaccataaatcacatcattagcatgaaccacccagagtggcccaagactcccagatcagctaccaggcaggatattccaagggcttagagatgaatgcccaggagctgaggataaagggcccgatctttctttgggcaaggttaagcctttactgcatagcagaccacacagaagggtgtgggccaccagagaattttggtaaaaaattggcctctggccttgagcttctaaatctctgtatccgtcagatctctgtggttacaagaaacagccactgaccctggtcaccagaggctgcaattcaggccgcaagcagctgcctggggggtgtccaaggagcagagaaaactactagatgtgaacttgaagaaggttgtcagctgcagccactttctgccagcatctgcagccactttctgccagcatctgcagccagcaagctgggactggcaggaaataacccacaaaagaagcaaatgcaatttccaacacaagggggaagggatgcagggggaggcagcgctgcagttgctcaggacacgctcctataggaccaagatggatgcgacccaagacccaggaggcccagctgctcagtgcaactgacaagttaaaaaggtctatgatcttgagggcagacagcagaattcctcttataaagaaaactgtttgggaaaatacgttgagggagagaagaccttgggccaagatgctaaatgggaatgcaaagcttgagctgctctgcaagagaaaataagcaggacagaggatttgctctggacagagatggaagagccgggaacagagaagtgtggggaagagataggaaccagcaggatggcaggggcaaagggctcaagggtgaggaggccagtgggaccccacagagttggggagataaaggaacattggttgctttggtggcacgtaagctccttgtctgtctccagcacccagaatctcattaaagcttatttattgtacctccaaa

SEQ ID NO: 97623 - DNA, 1142 bp, Homo Sapiens
  misc_feature (1049)..(1075): n is a, c, g, or t
gtgagccggggtgaatcggacgaggaggtgaacccattggcttcattggctccttgatttaaaccacgcccggctttctgccctctttgctgctgctgggccaggttgcccagccatatcccagccccgtctgcagggagccggaggctgctgctgctgctattgtgtggatgccgcgcgtgtcttctcttctttccagagatggctaacaggggcccgagctatggcttaagccgagaggtgcaggagaagatcgagcagaagtatgatgcggacctggagaacaagctggtggactggatcatcctgcagtgcgccgaggacatagagcacccgccccccggcagggcccattttcagaaatggttaatggacgggacggtcctgtgcaagctgataaatagtttatacccaccaggacaagagcccatacccaagatctcagagtcaaagatggcttttaagcagatggagcaaatctcccagttcctaaaagctgcggagacctatggtgtcagaaccaccgacatctttcagacggtggatctatgggaagggaaggacatggcagctgtgcagaggaccctgatggctttaggcagcgttgcagtcaccaaggatgatggctgctatcggggagagccatcctggtttcacaggaaagcccagcagaatcggagaggcttttccgaggagcagcttcgccagggacagaacgtaataggcctgcagatgggcagcaacaagggagcctcccaggcgggcatgacagggtacgggatgcccaggcagatcatgtaggacgcggcatcctgcccctggtagagaggacgaatgttccacaccatggtctctacgaaaaagaaatagttagtcaccttctgaccttctcctctttctcaaagccttctgtccctggtttttgcaagtgctgcatttccgccgagaatccgcgttgcctactgctgccacctcctgttcatttagaactatgcaaagactccgcttccattttcctgagctcctcgggccccagagtctctgtttgnnnnnnnnnnnnnnnnnnnnnnnnnnngccaaaaattctcctcttcaacttatagaatgcacctaataaagtaattagtcttgtgtcaaaaaaa

SEQ ID NO: 97624 - DNA, 555 bp, Homo Sapiens
  misc_feature (470)..(496): n is a, c, g, or t
gagcctgtctaattgcatatcttgaaaaggattggaaaactgtcataatgacattattccctctcactttccttgtccaggaaagcccagcagaatcggagaggcttttccgaggagcagcttcgccagggacagaacgtaataggcctgcagatgggcagcaacaagggagcctcccaggcgggcatgacagggtacgggatgcccaggcagatcatgtaggacgcggcatcctgcccctggtagagaggacgaatgttccacaccatggtctctacgaaaaagaaatagttagtcaccttctgaccttctcctctttctcaaagccttctgtccctggtttttgcaagtgctgcatttccgccgagaatccgcgttgcctactgctgccacctcctgttcatttagaactatgcaaagactccgcttccattttcctgagctcctcgggccccagagtctctgtttgnnnnnnnnnnnnnnnnnnnnnnnnnnngccaaaaattctcctcttcaacttatagaatgcacctaataaagtaattagtcttgtgt

SEQ ID NO: 97625 - DNA, 994 bp, Homo Sapiens
cttgccagtgtgccaaccgtgggacggcctcgtccaagtttgctttatctcctatttccgtccctttactgtaagcagaacagtactttttgtgctgtacgtgtcgcccggaggcccagcccgttcaatctggggagtcgaccacctgaccaggaggtacgacagcctgggggtacttgcctctgctgggttcacttgtaacatactcatatccaaatggtgagggccataatagtggatgagaaacccaaaaaatgcttctagctttccgcaagccatatttgtccaagaagagaaatacaaaagtatctgcaatggtgatgagaacgccaccccacagaggaattcttcctacagacagaagattgatagcaatggctgagccaatgacttcttgcatgtctgagccgatgatagccaactccaccatcagccacaggatgactcgtgggaccttgggatactgacggtgacatacttcagcaagatgcagcccagtaaccactcccagtctagctgcaagccgctggagcagcagccccacaagggtggccaacagaaggatccagagcaacttaaatccagccactgctccagactgcaaatcggattcaatatttcctggatccaggtaggcaatgctcataagaaaacctggtccggtgaaagcccagagtttacgaaagctaaaacaagagtactcctcctcaggaatggagatcttctcattaaagtaagtggcgaagtactcctctgagtccccaggggactgtgaaagagagggattactataggcagggttgatgttaccaagactggcagactccccatgatctccagaaacactgtcatctgacatcttctgttcaggacccagcaccatggtggatacctgagtggctgagttcttagaatatgattcagctccgcaaccacctgacacgccgcccccgcgcccagggctccatattccggcctcgtgccgattaaaacc

SEQ ID NO: 97626 - DNA, 820 bp, Homo Sapiens
catcaggcccgtgcttcagcgttctagtgctgacagcagaactttggcctttgtttcaccatataattctacctcttcagacagcagaccaatttctcgagccagcttaaccaatgggcttcggtttacaagatcgtgatatatcaatgtcacttggaacaggtgtcttgaggttaaggttgttatactgaatcatccactttcctggcttaaatttctccaggaaacgcttggcactctctactgtgctctgcatgagcattgcaactgtcatgggccctacgccgccaggaacaggagtgatgaagctcgccctctctttggcctcgtcgtatgccacatcacccacaacttttctcccatttggttttttatcatctgggacataattgattccacagtcgatgactattgccccaggtttgatccactcccctttaaccatttcaggctgaccagttgcaaccaccaggatgtcacctttatttacctcctcatccagatgggcagtcttggagtggcaggtggtcactgtggcattgttccacagaagcaagtcatgcatcggggccccaactattttactgcgcccaaccaccacagcatgccttccggcaatcggcacccctgtctctttgatgagttccaagcatcccttaggcgtacaaggaatgaaacagtcattgaggtcacctctagcaagtctcccagcattgatgctagtcaatccatccacatccttctcgggtgcaatagcattgatcacttcttcagtgttaatggaattcatcccgggaaattccggaccggttaaccagcc

SEQ ID NO: 97627 - DNA, 1096 bp, Homo Sapiens
ggggccccggccagtccctaagcacgtgggttgggttgtcctgcttggctgcggagggagtggaacctcgatattggtggtgtccatcgtgggcagcggactaataaaggccatggcgccagcagaaatcctgaacgggaaggagatctccgcgcaaataagggcgagactgaaaaatcaagtcactcagttgaaggagcaagtacctggtttcacaccacgcctggcaatattacaggttggcaacagagatgattccaatctttatataaatgtgaagctgaaggctgctgaagagattgggatcaaagccactcacattaagttaccaagaacaaccacagaatctgaggtgatgaagtacattacatctttgaatgaagactctactgtacatgggttcttagtgcagctacctttagattcagagaattccattaacactgaagaagtgatcaatgctattgcacccgagaaggatgtggatggattgactagcatcaatgctgggagacttgctagaggtgacctcaatgactgtttcattccttgtacgcctaagggatgcttggaactcatcaaagagacaggggtgccgattgccggaaggcatgctgtggtggttgggcgcagtaaaatagttggggccccgatgcatgacttgcttctgtggaacaatgccacagtgaccacctgccactccaagactgcccatctggatgaggaggtaaataaaggtgacatcctggtggttgcaactggtcagcctgaaatggttaaagggggagtggatcaaacctgggggcaatagccatcgactgtggaatcaattatgtcccagatgataaaaaaaccaatgggagaaaagttgtgggtgatgtggcatacgacgaggccaaagagagggcgagcttcatcactccctggtctggcggcgtaggggcccatgacagttgccaatgctcatgcaaaccaccagtagagagtggccaggcgttttccttggagaaatttaagcccaggaaaagggggatgatttcaagtataaccaaccctttaacctcaagaacaccctgtttccaagggggaacattgt

SEQ ID NO: 97628 - DNA, 854 bp, Homo Sapiens
ctaggcagtgggcgcgggtcaatcggccgaggtgggctggcatgccccccagtctgcccccacctcccttgcagcctcctagtcttccattgtctatggggccagtactacctgatccgtttactcactatgcccccttgccatcctggccttgttatcctcatgtgtccccttctggctatccttgcctgccccccccaccaacggtgcccctagtgtctggtactcctggtgcctatgccgtgcctcccacttgcagtgtgccttgggcaccccctcctgccccagtctcaccttacagttccacatgtacctatgggcccttgggatggggcccagggcctcaacatgctccattctggtctactgttcccccacctcctttgcctccagcctccattgggagagctgttccccaacctaaaatggagtctaggggcactccagctggccctcctgaaaatgtacttcccttgtcgatggctcctcccctcagtcttgggctacctggccatggagctcctcagacagagcctaccaaggtggaggtcaagccagtgcctgcatctccccatccgaaacacaaggtgtctgccctggtgcaaaagtccccagatgaaggctctagcatgtgtgtctgctgaaggtgtgactgttgaggagcctgcatcaagaggaggctaaagcctgagacccaagagaccaggcccagggagaagccccccattgccttgctaacaaaggctgttcccacacaaggcagagcactctgtcccaaagctgctgcgggtcaacccagccgtctaacgaaagctggtccttcctgcttacccaaggtactcaggttctgaaaa

SEQ ID NO: 97629 - DNA, 1791 bp, Homo Sapiens
ggggagagagtatgaagtcgacggcgcgccgaattcggcacgagggctacgagaccccgtgtcccgctacctgagcgagtggcggcatgtgcagaggggtgccacgtggaagacgtcgttgcatatgtgtgatgggcgcacgcccacgcctgaggagctgccgccctgctacgagggcacggactggtcgggctgcacgctacaggagttcatggactgcccgtacaacctggccaacaaccgccaggtgcgcatgctggccgacctgagcctggtgggctgctacaacctgtccttcatccccgagggcaagcgggcccagctgctgctcgagagcgccaagaagaacctgcggggcatggccttcttcggcctgaccgagttccagcgcaagacgcagtacctgttcgagcggacgttcaacctcaagttcatccggcccttcatgcagtacaatagcacgcgggcgggcggcgtggaggtggatgaagacaccatccggcgcatcgaggagctcaacgacctggacatgcagctgtacgactacgccaaggacctcttccagcagcgctaccagtacaagcggcagctggagcgcagggagcagcgcctgaggagccgcgaggagcgtctgctgcaccgggccaaggaggcactgccgcgggaggatgccgacgagccgggccgcgtgcccaccgaggactacatgagccacatcattgagaagtggtagtggcggtggtggccacggggaggcctcttggggggtgtgggggataaaacaggacagacgacaggtccacccaagactgtcaagggatgagcatcccaaacctgctccacagaggtagctgcgtcctgaaaaaaaacagagcagggatgtagtggggctgggcaaggatgggggcttgagaaatcaacaggtgcagcccagtgggtcagaggaaagcgtgctcgaaggatgccatggtcagggcagggcctccagaccaggtgttgtgcctggagctgctctcctggcctccttggatttatcccaaaaactgaaggtttgcgcaagagacgaggacagcggaaagtggacctgccaggccgggagtgtgtccctcaccaactatgcacacagcactcgctcttagctcctctgtccgggctactaggagtgagaccagcttctggcaactgccccagctccaggccatcccatagcccctcctcttctggctgcccccaatgccccgaggcctggggagcccccagtcacccatctgtagctccctcaaagtcagggccaccccatctgaggcagagaagactcgagtccagcccccaggaagcctgctcccctctctggcccatggtcctgcttcatgctttgggtcaggaggccaaagctgatgttcaggccccacccactccctacagtcctcagacaaggaggggtttgggtagtaggcccgagctgattgcggcttcctcgggcaattgtagcccagagtggggagggttggcaggtatgtggcacttgtgcgtgagtacggggttggccttggaggtgacatcaggggggctggttagactgagggtgggacgaggtcccgctctgttcttcgccaatggattgtagaggtgccagcatacgaaatatcaaagtaatacctggtcaccagaggtattccggcacgggggaggacaactcgcgagcctgaagttttggagggaaaaacaccggaaggggcaaacacccggatacagggagagagagggaaaaggcctcgcgggcgctccggc

SEQ ID NO: 97630 - DNA, 1183 bp, Homo Sapiens
gaggcctgggtggcgaattcggcacgaggcttctcttctatcaaaaccaacacatcctcttctttctgccaatcctctcccccacgggacacctctctggttcgggaccaatccctccctggggacgtgccccacctgcgtgccggctgagctcaggaacccctgcctgccccccgggtggggctgcggctctggcctcccaggcccatcctcaacagctaccccagccaacaccaaggccacaaggggaccccggcctaggaggcaggaagccaaggtacagagagcagcctggccctcaccagtgcgcaagctggggcagcaaggctgacagttgctgcatgcccagggcagggtgtggtactggcacccaagttcagcatggcagagctggccaacagcttgtccccgatctgcctccagccccaagatgcctacagcccccaggccccttcggcagcactgcctctgcccacctgcctttaagagactccagggctgctcctgtcatgcagcgaaggttttgtctgtttcaaagttcgagactcaacttgagggactgtttttgacaatccccgctgacctccgctcctcgtggcgccctggccctacacccagcctggcccagggccggctttgcctggtgaggctggagggagcaccaggacctgctgtctgctgtcagcccctcctggtgctggtgccctgatgctgtgccttgtcacccattgagctgcaagagggaccaagagggggccacgcagccagccagatgcctggccctgtgctggggcagacaacgctgcagagcccagggagccttgggcgctaggacgtgcgtccttgtgacacttggactgtctgaactcacctggctgggaagcaccgtcttggcccggggccagccctgccctccagagtccagagccaggaaggcgctgcttgagggcgagcattctggtggggtctctggccaggccaacacttcaagggcggcggcctgttgagccctggactggggatcacgacgtggaaggcccccaatttccagaagcggactgggtacccggccacacaacgcactgggggcgagcggcctgagaacctaacccgagacgtagcgatggtcgccagggaccacccgacgcacgatagtgagcacaagcgaacacaacaaattcca

SEQ ID NO: 97631 - DNA, 998 bp, Homo Sapiens
  misc_feature (629)..(629): n is a, c, g, or t
  misc_feature (842)..(842): n is a, c, g, or t
gctagtgggccgcgcttcaatcggacgaggcgtgccatggtggtcgtcatcgcggtgtctgtctactgctactggaggaagagccagcaggccgaacgagagtatgagaagatcaagtcccagctggagggcctggaggagagcgtgcgggaccgctgcaagaaggaattcacagacctgatgatcgagatggaggaccagaccaacgacgtgcacgaggccggcatccccgtgctggactacaagacctacaccgaccgcgtcttcttcctgccctccaaggacggcgacaaggacgtgatgatcaccggcaagctggacatccctgagccgcggcggccggtggtggagcaggccctctaccagttctccaacctgctgaacagcaagtctttcctcatcaatttcatccacaccctggagaaccagcgggagttctcggcccgcgccaaggtctacttcgcgtcctgctgacggtggcgctgcacgggaaactggagtactacacggacatcatgcacacgctcttcctggagctcctggagcagtacgtggtggccaagaaccccaagctgatgctgcgcaggtctgagactgtggtggagaggatgctgtccaacgtggatgtnccatctgcctgtaccagtacctcaagggacagtgccggggagcccctgtacaagctcttcaaggcatcaaacatcaggtggaaaagggcccggggatgcggtacagaagaaagcagtacactctcaacgacacggggctgtggcgatgatgtgagtagccaccctgaggagcgtgatcgtgagacgaggagtgacgcatccggtgacgtctcnatggacacatcccaggaagggagacctgacaggttcgggagccgtccgggcaggcaagtgcgggagggcgcccacgacacggccgacgagacaggcgagaacacacactacaagcgtgggccactcaggcccacgaacacccgagaccaaaagaag

SEQ ID NO: 97632 - DNA, 922 bp, Homo Sapiens
ggaccggtccggaattccttgcatggaggctgaatccctgcagcccatgacggtggtgggtacagactacgtgttccacaatgacaccaaggtcgtcttcctgtccccggctgtgcctgaggagccagaggcctacaacctcacggtgctgatcgagatggacgggcaccgtgccctgctcagaacagaggccggggccttcgagtacgtgcctgaccccacctttgagaacttcacaggtggcgtcaagaagcaggtcaacaagctcatccacgcccggggcaccaatctgaacaaggcgatgacgctgcaggaggccgaggccttcgtgggtgccgagcgctgcaccatgaagacgctgacggagaccgacctgtactgtgagcccccggaggtgcagcccccgcccaagcggcggcagaaacgagacaccacacacaacctgcccgagttcattgtgaagttcggctctcgcgagtgggtgctgggccgcgtggagtacgacacacgggtgagcgacgtgccgctcagcctcatcttgccgctggtcatcgtgcccatggtggtcgtcatcgcggtgtctgtctactgctactggaggaagagccagcaggccgaacgagagtatgagaagatcaagtcccagctggagggcctggaggagagcgtgcgggaccgctgcaagaaggaattcacagacctgatgatcgagatggaggaccagaccaacgacgtgcacgaggccggcatccccgtgctggactacaagacctacaccgaccgcgtcttcttcctgccctccaaggacggcgacaaggacgtgatgatcaccggcaagctggacatccctgagccgcggcggccggtggtggagcaagccctctaccagttctccaaccgcatcacccgttcggggagcctc

SEQ ID NO: 97633 - DNA, 1389 bp, Homo Sapiens
  misc_feature (1175)..(1175): n is a, c, g, or t
  misc_feature (1193)..(1193): n is a, c, g, or t
  misc_feature (1219)..(1219): n is a, c, g, or t
  misc_feature (1295)..(1295): n is a, c, g, or t
  misc_feature (1318)..(1319): n is a, c, g, or t
  misc_feature (1322)..(1322): n is a, c, g, or t
tccaaggtagcgaggcctgggtggcgaattcggcacgagggatcctggaggccttctgcaagaatgtgccctactcccagtggccgctgtgcagaggacgtcgaccttgagtggttcgcctccagcacacagagctacatccttcgggacctggacgacacctcagtggtggaagacggccgcaagaagcttaacacgctggcccattacaagatccctgaaggtgcctccctggccatgagtctcatagacaagaaggacaacacactgggccgagtgaaagacttggacacagagaagtatttccatttggtgctgcctacggacgagctggcggagcccaagaagtctcaccggcagagccatcgcaagaaggtgctcccggaaatctacctgacccgcctgctctccaccaagggcacgttgcagaagtttctggatgacctgttcaaggccattctgagtatccgtgaagacaagcccccactggctgtcaagtactttttcgacttcctggaggagcaggctgagaagaggggaatctccgaccccgacaccctacacatctggaagaccaacagccttcctctccggttctgggtgaacatcctgaagaacccccagtttgtctttgacatcgacaagacagaccacatcgacgcctgcctttcagtcatcgcgcaggccttcatcgacgcctgctccatctctgacctgcagctgggcaaggattcgccaaccaacaagctcctctacgccaaggagattcctgagtaccggaagatcgtgcagcgctactacaagcagatccaggacatgacgccgctcagcgagcaagagatgaatgcccatctggccgaggagtcgaggaaataccagaatgagttcaacaccaatgtggccatggcagagatttataagtacgccaagaggtatcggccgcagatcatggccgcgctggaggccaaccccacggcccggaggacacaactgcagcacaagtttgagcaggtggtggctttgatggaggacaacatctacgagtgctacagtgaggcctgagacacatggagagttggtcaggctgctgctgggagaaatggacgcccactgggcctcaacttgatcttctaccccgtgcctgtgactcagactgggaaatactgagcagaacnggcttgggggcggggggnacgggaagaagggggctgctcctctngagacagggggcgccccccgcctttgaccccctggggcacctccatccccctcccacctgggtccccagatcaagnctcctgggggatgggagggccannaanaagcctggttccaggcttccccccaatcctggccccaagcaacggggccttggcaccttggggcccc

SEQ ID NO: 97634 - DNA, 1125 bp, Homo Sapiens
  misc_feature (30)..(62): n is a, c, g, or t
  misc_feature (66)..(82): n is a, c, g, or t
acggccgcccgtgcctggtctcctcacaannnnnnnnnnnnnnnnnnnnnnnnnnnnnnnnngtgnnnnnnnnnnnnnnnnntgggcgtcgcccgagttccgcaacccgtggtccgtggcgcacgccaccgacgtctgccttgtcgcaccgcccactctccgccggcatcccaagggccggcggcctcatatggccatggagaaacggcagctgcaatgctttcggaccagctgtcttagcaatttcctgaattctgtgcccagggatgagagtcctgaaaagggagtttcaggcatggtgatcaggcttttgcaccggggcctccaggagccaccggcctggagcgtcggcaaggagcctgcccccatgtgggtccgctggtgcttgtgcaggtcggtgccccggcggaagccccggccacaggccgggcaggtgtagggcttctcacctgtgtgcgtccggcggtgggcgctgaagtgcgagctgttgttgaagcgcttcccgcactgggtgcaggcatagggccgctccccgctgtgtgtcctgcggtggatgaccaggctggagctctggctgaagcgcttcccacactcggggcacgggtagggcttctcgcctgtgtgcaccctctggtgcgtgctgaagttggagcggtcgctaaagcccttcccacagactaggcacttgtaaggccgctcgcccgtgtgtgtgcgctggtgcttggtcaagtgggacgtcttgctgaagcctttgccacattcggggcaggtgtacggcttgtcagccccatgggaagcccgtcttcctggtggggggccgcctcttggctgatcaggcctgaccaagcccctgactggggctggcctctgacctgggagcgggtggccaggcccctggcatcgtgccgagagcactcggtaccactccattctcaacggggcatcctccctgccatcaccgccgtcctccaactggatcccaggtcctgagacagagaaagcacgatctctaggaactcacagcaagagggcaagggaaatccttctaataggaaaatgaaggcctcacagggctcctaaggttcccctacaaaacatttagcaggggctgggcactgtggctca

SEQ ID NO: 97635 - DNA, 888 bp, Homo Sapiens
  misc_feature (709)..(709): n is a, c, g, or t
ttcaggaagagggtctgccgcattagctgcggggaaagcggctcttgtgtgagggcctgtgggattctccggatatggccggagtgtttccttatcgagggccgggtaacccggtgcctggccctctagccccgctaccggactacatgtcggaggagaagctgcaggagaaagctcgaaaatggcagcaattgcaggccaagcgctatgcagaaaagcggaagtttgggtttgtggatgcccagaaggaagacatgcccccagaacatgtcaggaagatcattcgagaccatggagacatgaccaacaggaagttccgccatgacaaaagggtttacttgggtgccctaaagtacatgccccacgcagtcctcaaactcctggagaacatgcctatgccttgggagcagattcgggatgtgcctgtgctgtaccacatcactggagccatttccttcgtcaatgagattccctgggtcattgaacctgtctacatctcccagtgggggtcaatgtggattatgatgcgccgagaaaaaagagataggaggcatttcaagaggatgcgtattccccctttggatgatgaggagccgcccttggactatgctgacaacatcctagatgttgagccactggaggccattcagctagagctggaccctgaggaggacgcccctgtgtaggactggttctatgaccacccagncgctgaggggacagcaggaagtaatgtacaatggctccaacttaccagcgctggcagttcaaactaacctatgatgtcgactctctaccgcctggctaatcagctcctgacagacttggtggatgacaaactacttctaccctgtttgatttgaaggccttctttacgtccaaggcact

SEQ ID NO: 97636 - DNA, 1026 bp, Homo Sapiens
gcagtactctaacggtttaaggtagcgaggcctgggtggcgaattcggcacgaggggtgctgaaggctgtggcgcgcggctgtccccattcccacgtgaagcgctacgctagcatcgctcggctggcggctcccagctcgccgctggagcagtcccggcagcagcgggggaccggaagtggctcgcggaggctcagaagctagtcccggagcccggcgtgtggcgcctcggagcacggtgacggcgccatgtccctaatctgctccatctctaacgaagtgccggagcacccatgtgtatcccctgtctctaatcatgtttatgagcggcggctcatcgagaagtacattgcggagaatggtaccgaccccatcaacaaccagcctctctccgaggagcagctcatcgacatcaaagttgctcacccaatccggcccaagcctccctcagccaccagcatcccggccattctgaaagctttgcaggatgagtgggatgcagtcatgctgcacagcttcactctgcgccagcagctgcagacaacccgccaagagctgtcacacgctctgtaccagcacgatgccgcctgccgtgtcattgcccgtctcaccaaggaagtcactgctgcccgagaagctctggctaccctgaaaccacaggctggcctcattgtgccccaggctgtgccaagttcccaaccaagtgttgtgggtgcgggtgagccaatggatttgggtgagctggtgggaatgaccccagagattattcacaagcttcaagacaaagccactgtgctaaccacggagcgcaagaagagagggaagactgtgcctgaggagctggtgaagccagaagagctcagaaaataccggcaggtggcatcccacgtggggttgcacagtgccagcattcctgggatctggccctggaactctgcccgtccgacaccaacaagatcctcactggtggggcggataaacaatgtccgtgtgttcgaccaaacgttctgaccacttctggctacct

SEQ ID NO: 97637 - DNA, 1009 bp, Homo Sapiens
agcggctggtacggcccggagagttatggatccgccaggtggaacggcaggtgggttcaggtaccagcctggccgggacccggctgtgggaccaacgcttccggtgagcgacagaggcagctccccagggcctggagacccgtggggcggactctgggatctgagcctatcgccctggcctggagcccccctttgtacctattccccattcccctaccgagctgggcagttagccagcccactccaactctcggaaccatgtttgcagacttggattatgacatcgaagaggataaactcggaatcccgactgtgcctgggaaggtgaccctgcagaaggatgctcagaacctgatcgggatcagcattggaggaggggcccagtactgtccctgcctctatatcgtccaggtatttgacaacaccccagcagccttggacggcacagtggcagctggcgatgagatcaccggtgtcaatggcaggtcaatcaaagggaaaactaaggtggaggtggcgaagatgattcaggaggtgaagggggaggtgaccatccactacaacaagctgcaggcggaccccaagcagggcatgtccctggacattgtgttgaagaaagtcaagcaccggctggtggagaacatgagttcagggaccgccagatgctctgggcctgagccgggccatcctgtgcaatgatgggcttgtcaagaggctagaggagctggagcggaccgctgagctataccaaagggatgacggaacacaccaaagaacctcctacgggcctttttatgagctgtccgcaaaatcaccgggccttgggtgacgtgttctccgtgatcaggggtgcgggaagcccaggcaagctgacaaacgaagacttgggaaggtacggcgatgtgccacggaagatcgaagaagttcggattcggggtcctagaaccatcagccgatgattacaggtcttgaacagtactcacaaacctaccgaaaatggtaacacaac

SEQ ID NO: 97638 - DNA, 989 bp, Homo Sapiens
  misc_feature (932)..(942): n is a, c, g, or t
cgtgattcggacgagggctggcggacactttgtcgaagtggggacatgggattgaagcctgggcactgctgctgcatgagctgtgtgtcctgggtgtgccggcctttctgtgaagggggttggtggcagtgcccacctcactagatgcctctgacccagcctcccctgggggagtgggtggccacagaccctccctgccagagctcctggaaggctcctgcaggcctgacccatctattcctgtagacctggtttaggatgaagtctcggtgcgatttttgcagagttgggtttatctttcaactatagacccttctggctgttctcagccatatcatgtgactctgaatagttggatgaggaatggaaagaaagcaaggatgagagccggtcacgtggcagtctccgcccagcatcggctgtccgcacagaggcacagggcaggcctcctgtgcactccccacctagcactggcctgtcctgaatccccgccttccctggttggaggccagctgtggcatttgcaccctcttctcacctcaccatgcacatgctaactttaaagccttggggtctttcctgtaccccctcctcaaccctggtccaccccctctcaggatcttgtcaacgttatttttcctgtcccgtcttcctatcgctggccttcctttcccatcctaaaaattgcgaggcctatggtccctccctttctttccccaggcagcttcttatctgggctgtctgtacccctgcccttggacagaccacatgcccacgtaagctgaagctgctatccccattgtcaatctggcctcttcagctctgtagcacagacactggctctgaatgcctctggtctctgtccgaggccaggcgcgtttctgccttcccttgctgtagggctgggggtggtcccagccggatcctccccnnnnnnnnnnncgaccttctggcacagcggggggccacagaatgggccccgggggccg

SEQ ID NO: 97639 - DNA, 1199 bp, Homo Sapiens
cggcttgtattgttgatagcaataaagaaccacttgggtcaccactattcaggctgctcagtttcggccgcagttcacccgggggcccgggccttacttggccggcccgccttgcggggtcaagctccattggggattctctggaggaaccctgagcccgatctccctgcgccttcgcccaaccggtgggtccccaggcaccagcctccgaggtccccggcctcccagcgctgcacgccagagactccaggctgcgctcccccaaggcaaaggcacacaccggcgtgtccagcgcagcctcctcctccaggcggcgcgtgtgagtcaatggaaatgaccgtggcggtcggagcagccacctaggacatcgcggaagcctcctgaggggacttccaccgcttgtcccaggagcttctacaacagctggcattgagagttcagttataatattttccgccagtttttcccagcccggcccccaagcgtctgattttaaagttcccgcctcaggctccggggcgcctaccctgcaagggcgccagttctccgacacctgctagggaatgaatccccatcccaggaggaaggcgtggcggggacggaagaaacaaccacacgatctgtgacagcgaccaagctttagaggccccgcgtgcctgccaggcagcctgagcccacaccgtccacgcttccctgccccggcgggaaccacctgttctccttgcaccggcgagggcgcggggtcacccccgccgggccgaccccaggcgtgagctccagaaccccctcccaatcgccccgtcttgggagcgcagggagcctggctcttccctgccaataacgaaatcatcacggacattaggaaagcggggcgaggctgggaagggagcggcttaatccggggtccgcccccttcaattctccagcgtagcggtcccgaaagtggggtggggacggggattgaggctgagctcgcttcttccttgttttccgggtcttgcgcttctgaagcgaactaggcctggaggagtgctgggggtcgaggaaacagggttggggtgaccgagggacaggtggggcgggcacctgggccccggtcgaggcggattccgaggcggagccgctgcctgcctgcgcctcgcctgctcggtccacccaacagctccgccctagactcgcagctgcagagccacccaggc

SEQ ID NO: 97640 - DNA, 1101 bp, Homo Sapiens
cgggtgtgggtggcccccgccctattctgttccccaaacggtcctaagtaccgaggcctgggtggcgattccagcacgagggaaatcccagtgcccctgtatggagagacaggagcctgtggagttgactgtgcaccaaaaggagtttcacattgccaatgagctccggcaaactgagaaggcctacgtttccaggctccatctcctggatcaggtgttctgtgcccggctgctggaagaagctcggaaccgcagttccttcccggccgacgttgtccacggcatcttctctaacatctgctccatctattgcttccaccagcagttcctgctgcctgagctagagaagcgcatggaggaatgggaccgctatccacgcattggagacatcctgcagaaactggcccccttcctcaagatgtatggtgagtatgtgaagaactttgaccgggccgtggagctggtcaacacctggacagagcgctccacccagtttaaagtcatcatccatgaggcgcacaaggaggaagcctgtggcaacctgacattgcagacaccacatgctgcagcctgtgcaacgcatcccccgctatgagcttcttctcaaggactatctgtataaaactgccccatggcctccccggacaacaaggatgcccaaaactctcctggacctgatcgccacagcagcagagcactcgaatgctgccatccgcaaaatggagcgaatgcataagctgctgaaggtatatgagctgtagggggcgaggaggacattgtcagcccacaagagctcataaaagaggcacatccttagctgtcagcaaagatgagaccactcaagacgatactcatatattcaagaccgctccttaatgggtggccaggctgggcctggccgagttagcgtggggcccgctgtgtatgctggggccaagggagccacctcactggcgaactactgggtaggaagagccccgggccagcagataggaaaaaggtcggcaccccgcgaacgacacggataggacacaggggcaccccccaggtgggggcaccaagacggcgacactacgcacggggggggacacacaaggtggc

SEQ ID NO: 97641 - DNA, 1023 bp, Homo Sapiens
tggcacgagggagatctgaactgaggggcgacagcctttgccttaaatgcagtatgacaggcgcttcttggcagaccagtaaaaacaaaagcccatagaccttactcatcccaaggccgacaagccagctgtacagggcgagatgtagcaacacggggcatgagcggtgggcgtgctgggctatttgctgtggtactttaggctggaggtttggctcctgtgctgccggtggggggccctgtccctccccagatgtcctccctcttcttcacactcctcattgtcccttctacctcactaacctgtcttctccatctgatgtcacccagaaccacaccccacagaactgtgaggcacgtgggctggagagagcagaaaagctgccagcgcagcagacacgaacatccctctgcctggtgggccggctttgtgtgtctctccttttgtgagcgcaacacggacaaacagctgtgctctgcaaggcacacggatgtttcccttccacctgttcccaaagctccagcagctgtttcttttgcaggcagggcgtggtctcggggctccgagggtcttgtctttggtccgccttcctttctgtccagtcctgctcagctgttaagatccatcatggccattatccttgtcccggactgccccaaagttcccagctggctttggggaacactgtagctcttgggtgtctcttgtctctggcatggttttagcgtcactgcgaacactcctttgcaaacatcaaacatctcaaagacggaaaaggatagatggctccctccagcctacacgccccgtccacagtggcatcaccctcttatcccaaaagaatatgccagttcccatccagcaccgaagaaaatcagctcctggggctggtggttggaggtgggtctgtccactgtgggggccaaagtgttcccctgctggagacagtttgcaagtaagaacctaaggatggggacaacatcctgtgcttgggaaaagcaccgcaaagagatcctctagagt

SEQ ID NO: 97642 - DNA, 783 bp, Homo Sapiens
cccatcatcaataattccaatggtaacacctttccctgtgtatcccagctccaaggcttcagccacattcaaatcaaggccaggagtgccatcagcttgcccagtattgatcagataccactgctttgtaaaaagaggatcgttcatgttgatgtcgatctcattgatgtctctgtaacctcgcttttttcggtcaaatccttcctgctgcaaagccatctttaccctggggtctctctccagctgctgcttgtggtgtaggctgcgtcttctcttggcctttgcaaggccattgtgataaaagtggtacagaccttcagcaaagggaagctttcggactccaaagccgtgttctgctgcaacttggcgagctttgtcctctccccctttatgcaactccacaagaaaatgattcgtgaagaccggtcgctcagcagatgcaaaaaccatgacacagaagaggaacccggcggccgccttccactgggagacacaaccacccttcatccttctttgggagtgaaaagtggtgctaggaggcgcgcaggctggcggagcaggggactcggagggagggtgcaaataaagaattcttatatatagtttttaaaaaaatctttgtatagagaaagagactgaacagggtcttggaaagcagcgaatcagtgtgtgttctccaggccatctggctggaggggaagccgtgcagtccagcggcccggcgcgcgggcaggggtgagaattggggactgtgtgtaccgcctcgccgattcaacccagggg

SEQ ID NO: 97643 - DNA, 941 bp, Homo Sapiens
ggcagtaactctaacggttctaaggtagcgaggcctgggtggcgaattcggcacgagggtggactgggagcagtgacatggagcgctatccatatgtaggcatcctgcacgtgcgcgacagcttgatccctccacagagccggaggcgcatgaagcgtgtctgggaccgagctgtggagttcctggcctccaacgaatcccggatccagacggagtcccaccgcgttgcaggagaggacatgctggtgtggagatggactaagccctcttccttctctgactcagagcgataagccccgggcggggacttgttcctggtcagcctgtcccaggacagcccactccagaggcacaggagggtcaccaggcctgcggtgctgaattcacacttgccttgactttcagtctcgtcctgacacgattccaaaggtctgccatactcttcagaggagttcggctcgcaggaaaatgtgggcttcctttaaagggagggggagaagccagggtgatagcccagactctgccctgttgtgctggcagaaacggggagaagggttgagttttcatgaatagaaaacaagagcagcagctgtcaggcccagctgacaagcgtggggctggtgggctggggcatggccacgccagggagtctgtcacctgggaggtggggcaaggatggtgtttcgggtggcgggatggggagcagcttggtccatgtgccttcagggggttgttacctgagagctccagggtgaagggagaaagcctgtgctctggctggctgggcctctatcctgaagagggaaggtgctagaaattagaacaagtgactgtaggggggaccgtctagaaacaccaggcccagacacacggtccctcaaggtcaggaggcagtgagcagccggcacagcctcctgggaggatcccgaaggtaggactgg

SEQ ID NO: 97644 - DNA, 1449 bp, Homo Sapiens
ggcggcgctcgggaggaagtgccgatcggctgctggggcgaaaagggggcgccgggccgctctagccgccctggtccagcgcctccctctctcagcatggacgaggagagcctggagtcggccttgcagacctaccgtgcgcagctgcagcaggtggagctggccttgggcgccggcctggattcgtctgagcaggctgacctgcgccagctgcagggggacctgaaggagctcatcgagctcaccgaggccagcctggtgtctgtcaggaagagcaggttgttggccgcgctggacgaagagcgcccgggccgccaggaagatgctgagtaccaggctttccgggaggccatcactgaggcggtggaggcaccagcagcggcccgtgggtccggatcagagaccgttcctaaagcagaggcggggccagaatctgcggcaggtgggcaggaggaggaagagggagaggacgaggaagagctgagtgggacaaaggtgagcgcgccctactacagctcctggggcactctggagtatcacaacgccatggtggtgggaacggaagaggcggaggatggctcggcgggtgtccgtgtgctttacctgtaccccactcacaagtctctgaagccgtgcccgttcttcctggagggaaagtgccgctttaaggagaactgcaggttctcccatgggcaggtggtctctctggatgagctgcgccccttccaggacccagacctgagctccctgcaggccggctctgcgtgtctggccaagcaccaggatggcctctggcacgcagcacgcatcaccgatgtggacaacggctactacacagtcaagtttgactcgctgctgctgagggaggccgtggtggagggggacggcatcctgcccccactgcgcacagaggccacagagtccgactcagacagcgacggtacgggtgactccagctatgccagagtggtggggtcagatgctgtggactctgggacctgcagctctgcctttgctggctgggaggtgcacacgcgaggtataggctccagactcctcaccaagatgggctatgagtttggcaacgggtttgggccgacacgcggaaggccgggtggagcccatccatgctgtggtgttgcctcgagggaagtcgctggacccagtgtgtggagaccctgcagaagcagaccagggttcggcaaagctggcaccaacaagccccccaggtgccgggggaaaacgggccaggcctggggccgccagctctcggcatgtgtcgacttctcatgaacagctgaggtcacgctcctggggcctaaagcgggcgcccagcgggcgaggccacgcctgcccacgccccacatgcacggccggccccgctttcactcgggaaatccgacccgcacgactcggctccgaccgcgcctgtccaccgacggccccctg

SEQ ID NO: 97645 - DNA, 606 bp, Homo Sapiens
caggactcggggattgttccccaaacacaagtctctgaagccgtgcccgttcttcctggagggaaagtgccgctttaaggggaactgcaggttctcccatgggcaggtggtctctctggatgagctgcgccccttccaggacccagacctgagctccctgcaggccggctctgcgtgtctggccaagcaccaggatggcctctggcacgcagcacgcatcaccgatgtggacaacggctactacacagtcaagtttgactcgctgctgctgagggaggccgtggtggagggggacggcatcctgcccccactgcgcacagaggccacagagtccgactcagacagcgacggtacgggtgactccagctatgccagaggtatggcagcagctgcggagcccaggaaccaggaaggtggggtcaccctgagaggctcctggccggtgagggcaccaaccatctaaccaaaatattggagagtgtgtgactgcggcgagggtccacctgtgcctgaggaggccgtgtgcgtaggggtagatccgtggcggcctttatcttcaaggagtgtgggtgcacagctacagtctccattgatggaggccattgt

SEQ ID NO: 97646 - DNA, 1498 bp, Homo Sapiens
  misc_feature (914)..(915): n is a, c, g, or t
  misc_feature (1176)..(1219): n is a, c, g, or t
  misc_feature (1361)..(1371): n is a, c, g, or t
ttaggggcgagagagtatgaagtcacggcgcgccgaattcggcacgagggggacctcaatgtccggaggaaccagctcagtacgctgcccgaagagctgggggacctccctctggtccgcctggatttctcctgtaaccgcgtctcccgaatcccagtctccttctgccgcctgaggcacctgcaggtcattctgctggacagcaaccctctgcagagtccacctgcccaggtctgcctgaaggggaaacttcacatcttcaagtatttgtccacagaggccgggcagcgtgggtcggccctgggggacctggccccttctcggcccccgagtttcagtccctgccctgcagaggatctatttccgggacatcggtacgatggtgggctggactcaggcttccacagcgttgatagtggcagcaagaggtggtctggaaatgagtcaacagatgaattttcagagctgtcattccggatctcagagctggcccgggagccccgggggcccagagaacgcaaggaggatggctcagcggacggagaccctgtgcagattgacttcatcgacagccatgtccccggggaggatgaagagcgaggcactgtggaggagcagcgaccacccgaattaagccctggggcaggggacagggagagggcaccaagcagcaggcgggaggagccggcaggggaggagcggcggcgcccggacaccttgcagctgtggcaggagcgggaacggcggcagcagcagcagagcggggcgtggggggccccgaggaaggatagcctcttgaagccagggctcagggctgttgtgggaggggccgccgccgtgtccactcaagccatgcacaacggctcgcctaagtccagtgcctcccaagcaggggctgcagcggggcagaaaanntccattaccgaatctcttgcctatcaaaaagattcccaaggcggaacccccctggctcccctatccccaactgcacttttggcaccctccgaagcccgcctcctccccagggcgtgcatcgccccggccatcccccctgggtatggcggaatgacatcttcatttccaatcacctattgggtttaccgaactctcagaggcgcccccagacccatatggggggggccctgcgccctttcccgctcaccgcggaccaccctnnnnnnnnnnnnnnnnnnnnnnnnnnnnnnnnnnnnnnnnnnnngcgggcgggccagagcgccccctgacgaaaccctagtgcccgaagtgtgggcaaaaccccccccaaacactatgtggcctcccaccgcggacacctatggcaacccctccgggagggcctcgcccccagcacacctgggggnnnnnnnnnnnacctcggatctgggacgaaccgccatgggtggggtcgtggagccatacccctcggcggccatgtgagcacacgcgatatccaggcgcgcagcgccccctaagttgcttcccataagcggggccgggg

SEQ ID NO: 97647 - DNA, 1639 bp, Homo Sapiens
  misc_feature (112)..(182): n is a, c, g, or t
cgtgtggggggggcaaaccttacgtggggggaccgcgtaggccggttaggcgcatcggacctcggcgggtgaattggcgaggactgctcttccgcacgaagcgtaaatggcnnnnnnnnnnnnnnnnnnnnnnnnnnnnnnnnnnnnnnnnnnnnnnnnnnnnnnnnnnnnnnnnnnnnnnnaggtcggcccaggccagaggcagctagggcggggcaaagccggggcttgcctcaggggcccaccgtcggtttcaggcccttggctggccatgcaccacggcacaccgcaggcccgcggctgcctcaacacaggcagtgccagcagggcctcggccgtggcccgcagcttggggtctggctccagcatcatgtcaaggacagaacgcagctcggaagacagaccggcagtgaactcagggggcaggtagccctggcgcagctgctgccagccctccccaccgtggggcagctccatgttgcatgccacttccaggatggtgaggcccagactgaacacatccgctgctgtcccataggagcactgcaccagctcgggggccatgtaaccggggtctccctcctggacctcaccagctcctggctgtacccaagctccaccagcagtccgaagtcacccagcttgcagcggccccggggccccaggaagatgttggcaggcttgacatcaaggtgcaccaggccctggctgtgcagatgggccagggcaagcagcgtgtcccgcaggtagccccagacctgggcctcaggcaggctggcaccccaggcctcacagtgttgctgcaggctgggcccgcacagctccgtctgcaggtacaggatgccgccctcctcccaggcctgctccagccgcacgcagcatgggtgctgccccaccttctcgtggctgcccacctcggccaacttgcggggcccggtccttggggccccggaatggtgacatgaaaccctttaccgcatagagccggccgtcctccttggagcgcaccttgaagacctctccgtaggagccatggcccaggcggctgagcctctggaagctctgctggaagaaggactctggccggcttggatcatacccagggctctgcagagtctctgaggcctcgccccggaatgacacccgccggggctgcagcgtggtgccagcctggggtccgaggagggaagaggcggctgatgggaatgctgcccttggcagggggcggaggtgggaggctccggctgagccccctgggcctcttgagggagaatccaggttctgcgtggcggaagtaggctgggactgggataggggtgccactcagaggtggcggggtgccctccgtgggcatgggcatggccagtgcaggaggcccctctcaccaggcccgacacatctgctggccacctttcccggtagacggtaagttcctcccaggcagggccgcggctgacttcactccgtgggtgtggggaagccctggggcgactgggcggggcgcgggtccgcgagggcccagattccgggtccgcggaggccacgggacccctcgggtggctcagcgggccggagtctgccgtcgactgttccggacgcccgggcggaggagtaccgtgagggggaacggcccgatccc

SEQ ID NO: 97648 - DNA, 1043 bp, Homo Sapiens
  misc_feature (942)..(942): n is a, c, g, or t
  misc_feature (966)..(966): n is a, c, g, or t
  misc_feature (1019)..(1019): n is a, c, g, or t
tcccgggatatccatgtgtcacagtgagtgctgattccccagaatctgcagtcttaagctcccctgctgacgcacacagccagttctctggcttcatattcatgtgacccactgtgaagtgacaggcagctgccaattctgtcatataagaagcagctctgcccatgcaactttgaaagttcctgcacttctccatagactgctccttcatggaaataaacacatcatcacactgtgggtgcctaagctaagtttgtttgcagtttgatgatgcccagctccttttcaactcagccttaattggcactttaagggccaggatgaggtttctctcaggccaagtcgagatttccagatttccttttgtccaaggctgaccagtttagaagttattcacatccttgtattagttctttccttcttgtcctggtacctcttcctttccaggattatttgcagagtctgtgatggcttacttggtgaccagacatggggtgagctactggtatagtctgattactttgacatctattctgaactggtcattggctgtacatgagtttttgtgctggtaaaggaatatactgggaagattggaaggcacagactgggaactaattctgagaagagaactgctgagttactgaaagaccttttggaccacccctaaatggagcatcttgatagatggcaaatccaggtgttccttaaacttgtccatgctgcccagagcccactgccttttatcagatgtgagacttcactgccaacagtgtcatcccacagatttccttcctggacatttgataaagggaaaatcatttcttgtcctttaaagcagggactattattttttcactttttcacataccccacaacacctaacatttgattactcgtagtaggagtttcatactgttggaactctctaaaggcatttgnttcaggggcctaacttgggcttgnggaaggaccacagaagtcatttcctaaggacccccaaagaacacctggaaggnaaaaataattattaactgcctgtt

SEQ ID NO: 97649 - DNA, 1205 bp, Homo Sapiens
  misc_feature (806)..(868): n is a, c, g, or t
  misc_feature (878)..(893): n is a, c, g, or t
  misc_feature (931)..(931): n is a, c, g, or t
cggcacgaggacttactcaaggctcctcccaggtggcggaggagagcccggagctgctgaaccctgagcccaggagactgagcccaggtgagcccaggtggcgaccccggaagggctgggggatctggggtttgtgtggagcgcgggtggggcccaaggcttggcggtaggcgacaggccacgcgaacccacgggcctctgcgcccgcagagttgaggctactgccctatatgatcactctgggcgacgccgtgcacaacttcgccgacgggctggccgtgggcgccgccttcgcgtcctcctggaagaccgggctggccacctcgctggccgtgttctgccacgagttgccacacgagctgggggacttcgccgccttgctgcacgcggggctgtccgtgcgccaagcactgctgctgaacctggcctccgcgctcacggccttcgctggtctctacgtggcactcgcggttggagtcagcgaggagagcgaggcctggatcctggcagtggccaccggcctgttcctctacgtagcactctgcgacatgctcccggcgatgttgaaagtacgggacccgcggccctggctcctcttcctgctgcacaacgtgggcctgctgggcggctggaccgtcctgctgctgctgtccctgtacgaggatgacatcaccttctgataccctgccctagtcccccacctttgacttaagatcccacacctcacaaacctacagcccagaaaccagaagcccctatagaggccccagtcccaactccagtaaagacactcttgtccttggaannnnnnnnnnnnnnnnnnnnnnnnnnnnnnnnnnnnnnnnnnnnnnnnnnnnnnnnnnnnnnncctggccggnnnnnnnnnnnnnnnnagaagcttttcaaacccttccgtttgggccgggggccncccgagggaagggagactgggctcatacctggtttctatgaaaaacccttgggtccgtactaaagcggttggaattctcccccaaaataaaaaaggcccgcgcgggaaacccgagggtttttttcaacaatttcccggctggggtgctcttaggcgtcttttcctggtactcaggagcagaagcaaatattccccctgtcatcatgtgattacttcatgacacaaggaactatcggcactgctatcgagagtctcgacgaactcaccgccagag

SEQ ID NO: 97650 - DNA, 1012 bp, Homo Sapiens
tcttctgccccccctccggtatcttagcggtctgccgccctcaggccctcgcgacccggacccccccgggccgccctttgcgctcgcgctgcgtttagcccggactgccggtccttggccggtcagctctccgtgacctcatccggtagggcgctcccgaccaggtccagtcgacacagacggggaatccgaccccagacgcagcggtgctgcgctcctcaagttctcagagagaacagggccagacaccctggaagctgcctcctcgtcaatactgtagtccacaaaggtgtcgtaggagaacttgttgtcggtgaagcaggtgctgcaggaagttggcgctcttgtagctggggtccccccagggcattgccgagcagatggggcacaccacgcggttggggtcgctgcggtggctttccacacagtgcttcaccagctcctgctggtccaggttgcgggcaccacagtacgggcaggcgaaggtggacctgttggggatgttgctggggataggctgtgatgtgggcaccacggggacgaacttggggcagttggccatctgctcctggaccttcaggcaggacgaaatgtgcactctcatctttgccagggtcacctttttgttgcagcctcgacagggcgctttgtaggatgagagctgcttctccacgtgggtggccttgtccaccttcttggggtcgaagggcaggcggcacagtgggcacagcggggatggcacctgcaggcagggctggagacactccccgcagaacgtgtggccgcagctgccgatggccacgggccggtgatagacctccaggcagatggggcaggtgtactgcgcctccaggccgctgtcgccgcccgccggcccggccggcggctgccgctgctgagccgaggccaccaggctgcggaacatagccatcccggggccaggcccgcgccgcccgccgcccgctgtcctggcccgggccggcccgctagtcacaaccgctactgcgccgcg

SEQ ID NO: 97651 - DNA, 559 bp, Homo Sapiens
  misc_feature (198)..(495): n is a, c, g, or t
cagctgggctggtgttcttgcctgtagtcttatggaagaggtgaggtcctctggtgagatggcagtactgggatgggggatgaaaattccaagttttggcaagttgcagaataggaagtgagtgaagtactcaaaatttagggtgcaaaattttagggggtaccaaagacctcagtaatcgagacaaataattgtttnnnnnnnnnnnnnnnnnnnnnnnnnnnnnnnnnnnnnnnnnnnnnnnnnnnnnnnnnnnnnnnnnnnnnnnnnnnnnnnnnnnnnnnnnnnnnnnnnnnnnnnnnnnnnnnnnnnnnnnnnnnnnnnnnnnnnnnnnnnnnnnnnnnnnnnnnnnnnnnnnnnnnnnnnnnnnnnnnnnnnnnnnnnnnnnnnnnnnnnnnnnnnnnnnnnnnnnnnnnnnnnnnnnnnnnnnnnnnnnnnnnnnnnnnnnnnnnnnnnnnnnnnnnnnnnnnnnnnnnnnnnnnnnnnnnnnnnnnnaaacaaattcaaaattaatgcagaaaaattccatgatggacaaaatgtcaaaattttaaaccca

SEQ ID NO: 97652 - DNA, 1437 bp, Homo Sapiens
  misc_feature (1218)..(1277): n is a, c, g, or t
gccattagattggtacacagagagcttacacagccaagaagccagagcttggctgcccccaagggccccaggtctcacttggccaaggcccttgaggattgcatcgacttcctcctcccacggcgtccagggcaaattcaaactggtccttagaccggacaaggccaggccgctgctcacggacatgctcccagggtgccagcgatgtcaatctccttcactccttttgccatgcggttcaggaccatgtcgatgaggatgtaggtgccggtcctccccgcaccatcactgcagtgcacgatgatggggcaggagcggccccggtagcacttgttcaccttcctgcggaagtccagcaaggggccgcgtggaggccggtgtgccctctgccggccagctgaggaagtggaactgcgtgagcgtgcgcgtctcctgggtctgcacgttcttcaggtagaagctccgcaccagaaagtcctcgcaccagatgtgctccgacaccaggttcacctcatatacgtggtagagggaggcaccctcatctggccagtagcggtcacactgcttgacaccatcctccaccagcggggtcagcatgacgatgacggtgcagccgctctcccacaccatctgccagaagtctgcgatggtatgggacagcgggccctgcgtggctatgtaggctggcatccgagggtcatgctcaataatggggctggcgttgatgtaatcgctccgagaagggctgctctccaccttcagttttatgcgggcatggtcatagggcaggaagtcaggatgccggttctttttgatgttgccctccccctgcgcggtggcacaggtgtttggctctgcttggtaggcacagagggcctgccactccttggcaaggcggtcccggttccgaaggtgatcctccatgtatgccagaatcatgtgtcccgtggagatgtccatgttggcttggccggctcctcgcaccaggacggggtgctgctgtgggagctggggctggcctgggctgcgtcgctgaactgggaggacacactgctcacccgtgaaggctccggtggaccctctgcccggttgaacaaggacttcgtggccatgtgctggcggcacaggtcctggtactcaaaggtagtgtcaccatgggccccctcaggccccagggctgccaggcgctccttgtcttgctgccgcgcatgctgccgnnnnnnnnnnnnnnnnnnnnnnnnnnnnnnnnnnnnnnnnnnnnnnnnnnnnnnnnnnnnagtgagcagcactgagcgcatgggtgaggtgctgtgcgcagtttggggaaggactgcagctgcctcctccctctgtcccaccggacgcgtggtcgacgatatcccgggaaatccggccggtaccagcctgcttttttgacaactggttctatattccatt

SEQ ID NO: 97653 - DNA, 889 bp, Homo Sapiens
ctgttacgctccggattcccgggatatgtcgaacccacgcgttcgactcgaatggagctgctacagtcagcgcttggggctggcctcagctagtaaacccgagccctgcagaacaaccccccggggagcaggagagcagaagaaagggggccttgatgcccttttgagggaagcacacattctgcaaggaccgtggaaacaaagggaggaactgtttgtagccctcgtccagacgccccaagacaaacagagccaagattacaccctgtttaaccctgccttcaaagggacgactctgtaagattctctgctacttattcaagttgacacgatgcccttcacactccacctgaggtcccggccttccctctgccataaggagttggattctacaaaagaaaccaaacatcagaaatacatccagcatggctggagagctccgaccagccagcctggtggtcctgcccaggtcccttgctcgcagcttttgaacagattctgccaggtcaacactggtcctctacccctgctgggccagagtgagccagaaaacgtggatgctgccccctcaaggtgctatctcagagaccaggatgggccatccccagttctggaaatacgagttcggtgcctgcaccggcagcctggcttcgctggaagcagtactcggagcagctgaacggaccatggtggccttcttcctgggctgcaacttctccctggaggaggcttggagaaagcggggtccccagaagagaccccaccagggtcacgacagggggtgcttcagacacccgtgcttgtgtaccatggtggttttgtgcctttggtgtcccacgaggcatccccaggcactgaaggttgggggcttgtccctgaggacgcggac

SEQ ID NO: 97654 - DNA, 874 bp, Homo Sapiens
cccaggacaatggcaggcaaaaccagtgagcaaggcagaaaattcctgaaattctccactgaggcccagctgttcctctccttgaaaagtcaaggcttggttcaagccagatagcacctgaggacagaacatatcagatggagaaggaaaggcaagtgacttgtccagagccactctgtcaaaaggggacttgagtcctcagggctgttgactccaaagctgacaagcaggtggcattcttcttcagagcagggcaagtgtaattctggaccaatgtgtgattctgagaccagaccaaccaactgaaggagccaagttacaccctgtttaaccctgccttcaaagggacgactctgtaagattctctgctacttattcaagttgacacgatgcccttcacactccacctgaggtcccgccttccctctgccataaggagtttgattctacaaaagaaaccaaacatcagaaatacatccagcatggctggagagctccgaccagccagcctggtggtcctgcccaggtcccttgctccagcttttgacaagattctgccaggtcaacactggtcctctacccctgctgggccagagtgagccagaaaagtgggatgctgccccctcaaggttgctatctcagagaccaggatgggccatccccagttctggaaatacgagttcggtgcctgcaccggcagcctggcttcgctggagcagtactcggagcaagctgaaggacattggtggccttcttcctgggctgcagcttctccctggaggaggcccttggagaaagcgggggtcccaagaaggagaccaagccggtcacagcaggcgggtggttcaagacaacagtgccttggtgttaccat

SEQ ID NO: 97655 - DNA, 680 bp, Homo Sapiens
ttatcggacgaggcagccgcaggcgatgcatcccgggcttggccgcgaggccgcggagctcccaacggtccccgggggcccgggacacactgtggggccggggacaagcgggcctcgctgggcctggcgagccgcgccagttcatctgcaacgagtgcggcaagagcttctcgtggtggtcggcgctcaccatccaccagcgcatccacacgggtgagcggccctacccgtgccccgagtgcggccgccgcttcagccagaagcccaacctgacgcggcaccggcgcaaccacacaggcgagcggccctacctgtgtcccgcctgcggccgcggcttcagccagaagcagcacctgctcaagcaccagcgcgtgcaccgcgcggcccctgcgtgcagccccaaggaggaggcgcgctagtggactggacctcagcggacccgtggtggtgcgggggatgtttgcggggtgtgtgtggggagtgggggtggccaggattgctggctcctagaaccccttagagcgggaccggtggattccttaaggctctgaagggctgagaacagttctagaagcgtcccaaagggtgctgggaaaggtcccagcgtgggttgagggaggagggaagatccgagttcctcaccgcgggccgggatgtgaccaccctcttcagaggttgga

SEQ ID NO: 97656 - DNA, 1329 bp, Homo Sapiens
  misc_feature (1003)..(1045): n is a, c, g, or t
ttgcgtgtactggtcctcggagttatgcatggcagccgccggcggaaggaggtagcggtgcgaggtgccgtggcaggtatgagcgggcgcgggcggggcgaggatgggacccgagcgcgctcacttcgccgcaaaagtgccaacttcccctggagtgccgggtcgctgcaccgtccgggcgcgggggaatagaaaggcagcgggaatatgagatttatgggaagaaagtcggatttcccccgtccccttccccctgttactaatcctcattaaaaagaaaaacaacagtaactgcaaacttgctaccatcccgtacgtcccccactcctggcaccatgaaggcggcgtcgatctcaagccgactctcaccatcatcaagacggaaaaagtcgatctggagcttttcccctccccggatatggaatgtgcagatgtcccacatattaactccaagcagcaaagaaatgatgtctcaagcattaaaagctactttcagtggtttcactaaagaacagacaacgactggggatcccaaaagacccccggacagtggacagaaacccatgttcgggactgggtgatgtgggctgtgaatgaattcagcctgaaaggtgtagacttccagaagttctgtactgaatggagaagcctctgcgccctgagtaaagactgcttactcgagactggccccagactttgtaggggacatcttatgggaacatctagagatccttgcagaacagaggatgtaaaaccatatcaagtaaactggagtcaacccagctatccagaatcccggtatacctcggataacttcaatagctatgggaattgagcattgcaccaaggtgtagtaccagcaagtcggaagtctacacaaaggcccagcatcagatacacgaaggcctaataagagaggaccatcacaatcaaggagtagtaaaaagaccgatcaccataaggtaatagagatgaataaccctcaggaagattacgagaaacnnnnnnnnnnnnnnnnnnnnnnnnnnnnnnnnnnnnnnnnnnntagtatacaaaacaaggagttaagtcaaaccaggatataccaagtgtactattgcgaagaccaaacaatggagaagacagcgtggacgcaatgcactagtaagtaaaagaaatataaaaagcaataaaagtataaagagtgctacacaaactaggaaaaacagaacaaatcaaagtagacctaaagaatacacactatacatacacacgaaaggaatagaaggtacgatcaaacacaacacaaggacaaagacggaataagcataccaggtacactagaagaat

SEQ ID NO: 97657 - DNA, 913 bp, Homo Sapiens
agggattatccaagaccaggaagtcggtgtttattactaggaagctgacggtgtcagtcggggaaattgtgaacggagggccattgccccccgtccctcgtcatacccctgtgtgcagcttcaactcccagaacaagtacatcggggagagcctggccgcggagctgcccgtcagcacccagagacccggctccgacacagtgggcggagggagaggagaggagtgtggtgtagagccggatgcacccctgtccagtctcccacagtctctaccagcccctgcgccctcaccagtgcctctgcctcctgtcctggcactgaccccgtctgtggcgcccagcctcttccagctgtctgtgcagcctgaaccaccgcctccagagcccgtgcccatgtactctgacgaggacctggcgcaggtggtggacgagctcatccaggaggccctgcagagggactgtgaggaagttggctctgcgggtgctgcctacgcagctgccgccctgggtgtttctaatgctgctatggaggatttgttaacagctgcaaccacgggcattttgaggcacattgcagctgaagaagtgtctaaggaaagagagcgaagggagcaggagaggcagcgggctgaagaggaaaggttgaaacaagagagagagctgggtgttaagtgagctgagccagggcctggacgtggagctgatggacacgcgtgatgatggagtctgtgagggaaacctgctcccaggagttgaagaatgcagtagagacagaccagaagggtcccgtgtggccccttggctgtgaaggatgtctgtgccccacttaatgaacttggtttctcggggaggaaatctttccaaactgcaaaggaaaaacctcccaggagctttagtggtttctggcaagaatc

SEQ ID NO: 97658 - DNA, 1132 bp, Homo Sapiens
  misc_feature (1118)..(1118): n is a, c, g, or t
gaggatcactgaccagtactctgaccctccgtcccctcggtcaggaacaccatccacccgggcaccacccttcagcagcaccccccaagtctcgcaagacctgcggccctctgagctcagctcattgaagtagaggtgtagcagttccagggaagggtgctcccgggcagctctggccagggccagggccgctgtgtcaccagcaccgttgtacgccacagcttcagctcctgcagctgccggttgcggtccagctgggcagccagcagctccaggccttcgtccccaaggcccgtgtgcagcagggacaggtgcgtcactgaggtgtttcctgccagccccgtccattagcacggcaacacctgcctccgtcagcgggttgttggacagtccgcagtgtggtaatttggcactggtcatgcagcaacaggtctcggaggtccttgcaggcctcagggcccaggctgttgagttgcaagcccagcttccgggcacagcaggaagacaggcaggagtgtgcgcagccctagcaggatctagctggcaggaggccatagttcacctcatccagggcatgccttcacgctgcccagcacagctgccaccacgtgatgcacttgactggtgtcatgcgcacacctgccaggttgagctgacgcagggagctgagcacctcagcggagaagcgctggttctggaactcactagtggaagaagaggtgctcaaggagctctgatgggggcagcaccatgccggcccagcttgcccagcttcttcttgatggcctgggcattctccagggcatccaggttcttgatggggcagccaagctgagctagcacagctcggttgtgggcagagagaagcccccccatgaacatggggaagagctcgaagacttcatcctcagggggctcatctgggtggcgccgggggccctccacgcccaggatactggcgcccatctggtccagaacatcatcgttgtagtagtcctcctctcgaaacatctccagcaccatggcctggagccaccgcctcccggcttttacccaccatgcgcccaacactcgaggaccacctgatccctcgtccgatttaaaaaccgcgggggggncctccattcctatg

SEQ ID NO: 97659 - DNA, 1195 bp, Homo Sapiens
accggaattgtccctcatggccccaagctccattccctcggctgttttcccaatcactgccaatgaagccaacccgtgatggtgcctctttatgcccctctgcgctgcactcccgctcagtccttctctgtctcctgacccccggcctgagtctcgctgctgcgccagcgctctctgcagcagcacgcatgcctgcttcttctcctccacctccagcttcaccgcatcacagacgtgctcacctcggaccccagctccaggggccccggccccgcctccggcacccacccctcctgctgggagtccagctggtcctgcccagacttctccatctcgtccaagaagctcatgatgctttgtagcttggcctccgatagcagcgtcccatcctcaggaggttcggggaacgcactgagttttccaaatttctccaagttgtcagctgtcagagagctggcgtcatcctcctcgctggcccaggcgtatctgcccctgtgatgggtcctggggcggggcagcgcgtccggctccttctccagcagctgcagtgtgtgcagcagctcctccagtggccccctggacttggcgctccccctgctcggggccatcatctccaggttgtccccagctgcatcctgggcaagaacgtcctgcgtcctgtcctctggaggctgctgtggttctggggatgagtcggaggtgggcaggcagcggtctccggggcctgcagcagggaggccaccaccagcattgttggccttgagggcctggtgggcagtgccgcctggcgtgggggacagctcctgagcaggctgccgcattcctggcactctggtctccctgggattctcaggtggcccacgctcggcagtgctcgccttctgggctctcagggctcgtttctgttgcagctcctgaatggctgctcgcctggcttggcgtgccttctcctcccgggccttcctcctggctgcctctttctgctggtgcaggtccaagagggtcccctcgcctgaccgctgccgctgctcctcccgcttggcctgaagcaagtgctccaggcgggcagctcctgctccgcgccgctgcacctggtgccggtaccagcgctggatggtgacagcggcctggttcacctggtggataaacctctcagcctcctcctccgtcacctccttccgcctgggcaagcccg

SEQ ID NO: 97660 - DNA, 1743 bp, Homo Sapiens
  misc_feature (1212)..(1289): n is a, c, g, or t
aagcgaggcctgggtggcgaattcggcacgaggcctctttccctccctcctcctccgtccgcccgtccgtccgcgcgtctgtccgttcggcccggtccggcccgaagcatggccggcgtcagcttcagcggccaccgcctggagctgctggcggcttacgaggaggtgatccgagaggagagcgcggccgactgggctctgtacacatatgaagatggctccgatgacctcaagcttgcagcatcaggagaagggggcttgcaggagctttcgggacactttgagaaccagaaggtgatgtacggcttctgcagtgtcaaggactcccaagctgctctgccaaaatacgtgctcatcaactgggtgggcgaagatgtgcctgatgcccgcaagtgcgcttgtgccagccacgtggctaaggtggcagagttcttccagggtgtcgacgtgatcgtgaacgccagcagcgtggaagacatagacgcgggtgccatcgggcagcggctctctaacgggctggcgcgactctccagccctgtgctgcaccgactgcggctgcgagaggatgagaacgcagagcccgtgggcaccacctaccagaagacggatgcagctgtggaaatgaagcggattaaccgagagcagttctgggagcaggccaagaaggaagaagagctgcggaaggaggaggagcggaagaaggccctggatgagaggctcaggttcgagcaggagcggatggagcaggagcggcaggagcaagaggagcgcgagcggcgctaccgggagcgggagcagcagatcgaggagcacaggaggaaacagcagactttagaagcggaagaggccaagaggcggttgaaggagcagtctatctttggtgaccatcgggatgaggaggaagagacccacatgaagaagtcagagtcggaggtggaggaggcagcagctattattgcccagcggcctgacaacccaagggagttcttcaagcagcaggaaagagtcgcatcggcctctgcgggcagctgtgatgtaccctcgcccttcaaccatcgaccaggcagccacctggacagccaccggaggatggcgcccactcccatccccacgcggagcccgtctgactccagcaccgcctccacccctgtcgctgagcagatagagcgggccctggatgaggtcacctcctcgcagcctccaccacgccannnnnnnnnnnnnnnnnnnnnnnnnnnnnnnnnnnnnnnnnnnnnnnnnnnnnnnnnnnnnnnnnnnnnnnnnnnnnnaggcctgggccggccccatggaggagccccctcaggcacaggcgcctccccgggggccaggcagccctgcagaggacttgatgttcatggagtctgcagagcaggctgtcctggctgctcccgtggagcctgcacagctgacgccacggaggtccacgatgcagctgacaccattgaaactgacactgccactgtgacaccactgttgccaacaacgtaccccccgcgcaccagcctcattgacctatgggctggcaaacggggaagggggcctccacactccaagggtggagcccagggcccccagcaacctcggtactgaggtcacctggcagagtggccttgtgtgaagtggccggaacactgtgccacaggcgagggggccccttctaatttgtgaggtgctgagcgcacacttggcaagatgaggggcggggcccacatttgctctggg

SEQ ID NO: 97661 - DNA, 1654 bp, Homo Sapiens
cgcactgagggaccggcttcgggaatgtgacctttgaagatgtggccgtgtacttctcctgggaggaatgggatctccttgatgaggctcagaaacacctgtacttcgatgtgatgctggagaactttgcacttacgtcctccctgggttgttggtgtggagtggaacatgaggaaacaccttctgaacagagaatttctggagaaagagtgccacagttcaggacttccaaagaaggttcatcttcccagaatgccgactcctgtgaaatatgttgcctggtcttgagagatattttgcacttggctgaacaccaaggaacaaactgcgggcagaaactacacacatgtggaaaacaattctacatcagtgcaaatcttcaacagcaccagaggcagcacattacagaggcacctttcagaagttatgtggacacagcctcgtttacacagagttgcatagtccatgtgtcggagaaaccctttacctgcagggagatcaggaaagacttcctggccaacatgaggtttctccatcaagacgccactcaaacaggggagaagccaaataacagtaacaagtgtgcggtggccttttacagtggaaaaagtcatcacaactggggaaaatgcagtaaagcctttagccacatagacacacttgttcagggacagagaatcctcactagagaaggactttttgagtgcagtaaatgtgggaaagcatgtacgcgaagatgtaacctcattcagcaccagaaagtccacagtgaagaaaggccttatgaatgcaatgaatgtggaaaattctttacctactactccagtttcattatacatcagagagttcatactggagaaaggccttatgtgtgccctgaatgtgggaaatcctttagtcagatatacagcctcaatagccataggaaagttcacactggagaaaggccttatgaatgtggggaatgtgggaaatcttttagccaaaggtccaacctcatgcagcatcgcagagttcacactggagaaaggccttatgaatgcagcgaatgtgggaaatcttttagccaaaacttcagcctgatttaccaccagagagttcacactggagaaagacctcatgagtgcaatgaatgtggaaaatcctttagccgaagctccagcctcattcaccaccggagacttcacactggagaaagaccctatgagtgcagtaaatgtgggaagtcatttaagcaaagctccagcttcaagttcacatcggaaagtccacacaggggaaaggccttatgtgtctggggaatgtgggaaatcctttagccatagctccaaccttaagaaccaccagagagttcacactggagaaaagacctgttgagtgcagtgaatgtagcaaatcctttactgtaaatcttacctcattaaacagctgagagtcacactgagaaggctatgaatgcgtgaagtgggaaatcttagcaagttctagctcatcacatcggaagtcccggaaaaggcctatcaggcgcacggggaaacttggggaattgcctcttcaccaagttcatgggaaactagttggaatgcctcaggtatggggacgggaaaagcctgggcctcattgggccccgggtgtgtaacaagaaccagtcatg

SEQ ID NO: 97662 - DNA, 1176 bp, Homo Sapiens
tggggaaagcatgcacgtgtgggacctggttggtggcagttctcctgggccaccatccgcccccagctcgttcaaaggggcctggtataacaagggtggtgaacgtactttcttctggtaaccgtgggttgcctggagcacccatcactgccatccgtgatagacaggcgcgttattaggtggttcagcatgacgtgattgggctcaaggaagcaaagctggatcacaggaaaatcccccgtgtcttgttcaggatgacctggaggagatgtggggggagaatagggggtgcccgaaagcgctcttcgggtttgcagacgtagggctcctgatggtagggtcctgggggagaactggacagctcagacacatcggagcacttttgggaatccaccattaaagcatcaaatacttcaaagtcagttttcttcacttgaatgatgttgttaactgtgccaagctggctggttactatgggctcggaagggtcgtgcgtccactgaccatccacaaagaacttgtactgatgctctccttccggcagatccaggatggctacaaagttattgtggcttctggtgaggggaagtttactccagttgttgaaggacccagataagtaaacttcctttccgccccccgtccatcgaaacaccgttggccgagcctgggcgggagctttatcattcacttccagatcatgctgccaggccaggaattcctccttctctggtgccttgatttcctcggagtggaagaggtcggcgtcttcggggctgtccatcaggatcttgggcctgtccccgtccttggtgccccccgagctgtccctccggggcgtcttatggccaccatgccgctccagcgcggcgcgctcactgctggtattgcccatgatgggggtctgcggggacacagggaaggcggacggcgcctcactgcaggaaagggaccctgagcaagggactcccggaaccgcgggtcccaaggagcctgcggaaggagtcggagcaccaggacaccacgcccctcgggccgggagccggttccggctgagtcggcagggttgccgagctctcgcaatcgcgctttacctgcccaggcaagccgcggcaagaacgcaaggggcgcgaagataaaccgacactttcccaaccgcttcctcggccgattaac

SEQ ID NO: 97663 - DNA, 661 bp, Homo Sapiens
aaggctagtacgaggctgggtttgaaatcggccgaggctctcttggaagccatactttggatctttttcaggcaacactggactatggaatgtattctcgagaagaagaactattaagagaaagaaaacgcatggaacagtcggaattgcttcttacgattatcaccaaggaagtggaacatttctgtttcaagccggtagtggaatttatcacgtaaaagatggagggccacaaggatttacgcaacaacctttaaggcccaatctagtggaaactagttgtcccaacatacggatggatccaaaattatgccctgctgatccagactggattgcttttatacatagcaacgatatttggatatctaacatcgtaaccagagaagaaaggagactcacttatgtgcacaatgagctagccaacatggaagaagatgccagatcagctggagtcgctacctttgttctccaagaagaatttgatagatattctggctattggtggtgtccaaaagctgaaacaactcccagtggtggtaaaattcttagaattctatatgaagaaaatgatgaatctgaggtggaaattattcatgttacatcccctatgttggaaacaaggagggcagattcattccgttatcctaaaacaggtacagca

SEQ ID NO: 97664 - DNA, 1034 bp, Homo Sapiens
cgtggctgtggtgggggctgtcgttgtctgtggtttgtgcgtccggtttcctgtgtgttcgcttcggtcctgcgttgcgcctttgatgtccattctgggccgctgcgtcccggtccagtgcgcggcactcgcccttgtggcccctcggtggcctttccctgtaccggccgtgtgtccccatttggtcccccagtgtctgacctcgtgtccgtgcttttcggtgtactttccccaactgcgccccatttcccaaggcggcctagccctctgagtaggcccgtgttgtaattttcctccagctcctcgtagctgtgcaccaccttcatgcacgccctccacccccataggccgcttgaagatgatggggaaccgtagttgcttggagaactcggtggtcctcatgcagggacgtgatgggggcatctagtgccagggacaacgggaacacccgcagcaatggcgatggcccgggccgtccaccttgtctcccatcttgcggaccacttctgggcttggcccaataaaccggacccctgcatcctggcaggcctgggcgaagtccgctcgctcagagaggaacccgtagccagggtgcactgcatctacgttgttctccttggccaccttgatgatgtctgggatgtgcaggtaggcctgcacgggggccaggccgcggccgatgagataggcttcatctgctttctgccggtgcatctggcccgtgtcctgctcagagtagatggctacggtgcggatgcccagctccgtgcaggcccggaacacacggatggcaatctcacctctgcttggccaccatgactttcttgatgggcttatactccaggcgccggacatttggggaggcagcgggggcggtggaggttcggcggattcccaggagcctcaggcccccatggactgttcggaacttcagcatccttagtgtttggtcagctctccagaaggcaggacactatcttcctcgccgtcgccagtcctcgccgccgcctcataccgctgctgcctccactgac

SEQ ID NO: 97665 - DNA, 842 bp, Homo Sapiens
gacggccagtaactctaacggttctaaggtagcgaggcctgggtggcgaattcggcacgaggcagtaggcgagggcgcggctgcggggttcctggtgctgaggacggacgccattggagttcccgagaagcatggctgagggaagcttcagcgtgcaatcggaaagctacagtgttgaagacatggatgagggtagcgacgaagtcggggaggaagagatggttgaaggcaacgactatgaagaattcggtgcgtttggtggctatggcaccctcaccagctttgacatccatatcctcagagccttcggaagcttgggtccaggccttcgcatcttatcgaatgagccctgggaactggaaaaccctgtgctggcccagaccctggtggaggcattgcagctggatccggaaacacttgccaatgagacggccgcccgtgctgccaacgtagcccgcgccgccgcctccaaccgtgcggctcgggccgctgccgccgctgcccgtaccgccttcagtcaggtggtcgctagccaccgggtggccacgccgcaggtctcaggagaggatacccagcccacgacctacgccgccgaggctcagggggcccacccctgagccaccccattgctatctccgcagacctcccagatgtgagtcacacagtaagatggctgcaccccgagggctccggcaaactccggacagtcccaagacaggctcccaggccaggaggctgctactgagggccctagtagcgcctgtgcattctctcaggcatccgagtagccagggagggtggacgccaaacggcccagacagcctacctggggccaacatgag

SEQ ID NO: 97666 - DNA, 1506 bp, Homo Sapiens
cgaggggtaggttgttggttaaagattcagggaaattttcctcattttttggaaaaatccttcagcaattttgggggcttagggggatcttcttggagtccctaatcatcaggtatttcaccaaattatttgccctctcctgcaaaagggtcacgttgcggggggcaggcacagtacgggccttgagggtatctgggacctcggggccatcgggggccgaggggccaactgagcccgcaccgtcaatgagggctgtgatgctctccaggtgggtgggaccgcgggagtctctctctcctcctcgctgctctcatactcatcatccaggtgcttggacttcttggtcctcttgcctcccatcctggcccagggctcagcactgtgctgagcagtggcagcagctgcaccctccggctcagggatgctcgtggccatcttggccttggcagcagctgctgccacaacattctgaggctccacccaccgagtcttggccagcgccttccccgacttggtggtcttgggccgggtggctgccacctccctgccaggtcccgtctggggcacaccagaggcagcactggggccctctgtggcagcctcttgggctggggcaggtctcttggggcgcgggaaggccatgccactgacacctgccggctgagtgaaatcgaagacatcattctggcccaggaaggctgtgctgggccggttggcgtccacctccctggcacacggagcctgagagaaagcacaggcgctactagggccctcagtagcagcctcctgggccggggagcctgtctgggactgtgcggaggttgccggagcctcgggggcagccatcttactggtgactaacatctgggaggtctgcggagaagcaaggggtggctcaggggtgggcccctgagcctcggcggcgtaggtcgtgggctgggtatcctctcctgagacctgcggcgtggccacccggtggctagcgaccacctgactgaaggcggtacgggcagcggcggcagcggcccgagccgcacggttggaggcggcggcgcgggctacgttggcagcacgggcggccgtctcattggcaagtgtttccggatccagctgcaatgcctccaccagggtctgggccagcacagggttttccagttcccagggctcattcgataagatgcgaaggcctggacccaagcttccgaaggctctgaggatatggatgtcaaagctggtgagggtgccatagccaccaaacgcaccgaattcttcatagtcgttgccttcaaccatctcttcctccccgacttcgtcgctaccctcatccatgtcttcaacactgtagctttccgattgcacgctgaagcttccctcagccatgctgcgggtcccagggagatgagagctcagcctgagagggagggtgaagcagcttctcgggaactccaatggcgtccgtcctcagcaccaggaaccatcccgtaatccgggcgtaccagcaccttg

SEQ ID NO: 97667 - DNA, 505 bp, Homo Sapiens
ggcgcggctgcggggttcctggtgctgaggacggacgccattggagttcccgagaaggctgagctctcatctccctgggacccgcagcatggctgagggaagcttcagcgtgcaatcggaaagctacagtgttgaagacatggatgagggtagcgacgaagtcggggaggaagagatggttgaaggcaacgactatgaagaattcggtgcgtttggtggctatggcaccctcaccagctttgacatccatatcctcagagccttcggaagcttgggtccaggccttcgcatcttatcgaatgagccctgggaactggaaaaccctgtgctggcccagaccctggtggaggcattgcagctggatccggaaacacttgccaatgagacggccgcccgtgctgccaacgtagcccgcgccgccgcctccaaccgtgcggctcgggccgctgccgccgctgcccgtaccgccctcagtcaggtggtcgctagccaccgggtggccacg

SEQ ID NO: 97668 - DNA, 1037 bp, Homo Sapiens
agagggctggcctgcgggcgtgagaagtgctcaggagtctgagcgcaccgtgttgggcgctaatccggtggcggtgggcttgtgtttagactccagaactccccaacttgcccgcgttctcgccgccggaggctcccgggacgatagtgccctcttgcctgctgctgagcgcctggaacccggtggctggccggttggtccgggagcccccagtcggtcgcctcaggccggtccgtgggccggcgccagtaccttgcgtcgctgcttggtgcctcgacctatgcactaaccaggacgagcctgcgccagtgctgccatattctcggcaagaacttgtaagagacacctagttaggtagatagcctcaagctgccgatgaggaagcctctcttgtaatgatggcctagttccaaggaaaacagaacaattttgcaagagttttgaaaatgggattggaaaagaactgcatgagcagctggttgctctggacaaacagaataaacatacaagctacatttcgggaccctggtttgatatgtacctatctgctcgagactccgttgttctgaactttaatccatttatggctttcaatcctgacccaaaatctgagtataatgaccagctcacccgggcaaccaacatgactgtttctgccatccggtttctgaagacactccgggctggccttctggagccagaagtgttcacttgaaccctgcaaaaaagtgacactatcaacttcaagagactcatacgcgttgtgccttcctctcttgtcctggtattggggcctacctgggtcatgcgtattccctggatatttcccagtattttcggttttcactcaaatcgtttaccaaacccagttggatgactctcactgattaaaggccaaactcggtctaaggaaggaattaaaccttgaggccgggacaaagggaatgttgaccccggaacagggatttaagaattcttaaaaaccgccggatccggtcgacacgaccgaatgggacccacaaagaaaaaaagaactt

SEQ ID NO: 97669 - DNA, 1295 bp, Homo Sapiens
tgaactccttgagccggtcgtcctcatcgtcactggaggagtgtagtgatgggtgttcaccaggtccaccatgttcttcttgttggtctccgccaggggccccgatacgaaggcttcccactgctcctgctgctcgctgggcagctccttcagcagctgccgcagctgctctgcattgggccccttctccgtgttctgcaccagggcaccggccactcttgtcaggtgacccatgtagcctttccgagggcctcccgcacactgtacacggtcgttctcctcccaggacgtcaggatccgctccaccaggcggcactgctgcagcagatgtttcacaacagggttttggatgggcgtctcagggctgctgtcaggaggtggccccaagctcagcatggtgctcacgcatccctctacttgggcatgcaagaagttgttgaagacataatggaagaagaggtccagcatggtgttgggcacgtccagtgccaggagctcgtgcgtcagggctgcatcattggcgctcagggcactggccaggagcttgaccacgtgcagccgcgtgttgcccagaggcggagccagcatgccccatgtcatctgtagcggctccagcttgggaggctccagcaggagctggtggaagcagctgagccgcgggcgtagggcgtgcaaggcgcccacactggacacagtgctttccagggccccctgggccaggagctccagctgcccatccacactgctgaagaagctgttcacggtcacggactcggacctcggcctcctgggctccagcagggtcagcagcacctggatcccactgacgatgacagactggctctgctccccctcgaacatgttgcttaagagctgctcaatcgtctcctgcttctccagggtggccagcagttggtcaggctctgggctgtcctggacttggatcatctgctcccggctcaggcggatgatgtcacacagggactgggatgcgttggaatgttgattctcatccttcgacgggtggatctgctcaatcagccgctggacgatcttctcctcgttgagccaattgacaacatcctgcctcagctgaggccgctccacacaggtgagcaggcgcagcaggaggtccatgatggccgaggtgccaatgtgctgcagcagcaggtccacgaagtcatccttcttccgaagaaaggacacgagctggtctgtcttgcggttgatgaggatgcccatgaccttcctcgtgccgaattcggcgcgccgtcacttcatactctctcgcccat

SEQ ID NO: 97670 - DNA, 997 bp, Homo Sapiens
  misc_feature (41)..(41): n is a, c, g, or t
atacggctagtacgagcctgggtgttgaatcggccgagganaaagaagatggagatgtctttatgtggttgaagcatgaagctaccccgaggcaatgcagcagctcagcaacgattggcccagatgctgttctgggggcagcaaggtgtggccaagaatcccgaagcagcaattgagtggtacgccaagggcgccctggagacggaggatcctgcgttaatctatgactatgccattgtgctattcaagggtcaaggagtaaaaaagaacagacggcttgccttagagctgatgaagaaagcagcttccaagggattgcatcaggcagtcaatggcctgggatggtattaccacaaattcaagaaaaattacgccaaagcagcaaagtactggttaaaagcagaagaaatggggaacccagatgcgtcatacaatcttggagtcctgcatttggatggcatcttccctggagttcctggaaggaatcaaactttagctggtgaatatttccataaggctgcgcaaggtggacacatggaagggaccttgtggtgttctctctactatatcacaggcaacctggagacattccctagagatcctgagaaagctgttgtatgggcaaaacatgtagctgagaaaaatggctacttgggccatgtcatccgcaaaggcctcaatgcctacctggaaggttcatggcatgaagctttgctgtattatgttttagcagcagaaactggaattgaagtgtcacagacaaatttagcacacatctgtgaggagaggccagacctggccaggagatacttgggtgttaactgtgtttggagatactataatttctctgtttttcaaatcgatgctccttcctttgcatatttgaagatgggagacctttactactatggccaccaaaaccagtcacaagacctggagttgtctgtgcagatgtacgcccaagccgccctggatggagactcccagggcggccgca

SEQ ID NO: 97671 - DNA, 473 bp, Homo Sapiens
gtagtacgaggctggtgttgaatcggccgagggtggggcttgctgggatcatggcggggaatcactgcgagctcctgccgctggcccgtggcaggctcggggcggggttggggtggcttcttgtgcctcccttaaagcgcggggctcagcgtcctggcccagcgccccagcagcaggtccaagtgggtccggctctacagcggcggcacctacttcctcaccactgggcagacgccgctgtgtcaggacccgaaatccttcctgtacctcttgagccaggccgaccccgacccggactcggacaagacggagttttgttcttgttgccccagctggagtaccatggcacaattcttggctcacccacaccctcggcccaccgggggtttcaaggcgaagtccccccctcccttcaagtccctccctgaaataaacctgggggaaatttaccaggggcttgggcaccccaaccc

SEQ ID NO: 97672 - DNA, 944 bp, Homo Sapiens
ggcgtcgcccttcagcggggcgctgcagcttgacggacctggatgacttcatcgggccgtctcaggagtgcatcaagcctgtcaaagtggaaaaaagggcgggaagtggcgtggccaagattcgcattgaagatgacgggagctacttccaaattaaccaagacggcgggacccggaggctggagaaggccaaggtctcgctaaacgactgcctggcgtgcagcggctgcatcacctccgcagagaccgtgcttatcacccagcagagccacgaggagctgaagaaggttctagatgctaacaagatggcggcacccagtcagcagaggctggtctgtagttctcggtctcaccacagtctagagcatcgctggctgcacggttccacgctgaatcctacagatactgccaggaacattaaccctcattctttaaacaaaataggggtgcacttcgtcttcgacaccgccttctcaaggcacttcagcctcctggagagccagcgagagtttgtgcggcgattccgcaggacaggccgacctgcacacaggcactgcccctgctggcctctgcctgcccaggctggatctgctatgccgagaagactcacggaagcttcatcctccaccacatcagcaccgccggtccccgcagcaaggtcatgggctccctggtcaaggacttccttcgccccagcagcagcacctttgacccctgacaagatctaaccacgtcacaagtgatgccctgctatgacaaaaaagctggaaaccctccagaaccgacttttcaaccaaggaagcaccagacccgggatgtggaactgtgtcttcacaaccaggagaagttttcaggttgctgggacgaacgcggggggattcctccccgagctggaaccaggcccttggaacagctgtgcagggtgcttctgcaaaggacccacg

SEQ ID NO: 97673 - DNA, 832 bp, Homo Sapiens
tttcgaaagaggttccccccacttatgggggaggattagggcgcccgagtttccttccccccacatattttgggtcgcgccaaaaaatttggttccaaaaggcccgggagaagaccttgggccaacctctttgccttctggggaggtccctggtttgttttcaaggaatctcctttatgggagtcgggcttcttcccaagcgtttcattgccctggccaacggattattagcaaatccatagtcctgccaccttcaagctaatttggtccttcatgataccaggtttgctgatactcttctttggacttcttagacttctcatcatcctttttggtctttttcaaggcatcagtaccgacaactgagaggatatttcttaacctttctcttctttcagcaggaccctctccaaaaagtgtgatgggttcccccaaggctctaaggcaagctttgacctctgagtcatctgtggaaacattgatctgccgggctcgcttccttctctcaaactcagccaatacttctgcctgtcgctcgctgatatgctcttcaatttcaaacacttctccagaggttatattaatatttccagcttcgatccctgctttaagtccgtctttccccaaaatcccagactctcctttggccagacgctccctctccttctcttccaaacttccataatagatgtgtggtttcttcacgaccggagcaactaagtcgtcgggtgctttagttttggttgccgtggaagaggctcgcgaggaagccatgctgggctctggagccgcgaggccccagcgaaacccgaacactccctttcagaccccc

SEQ ID NO: 97674 - DNA, 1177 bp, Homo Sapiens
  misc_feature (657)..(657): n is a, c, g, or t
aaggctgggtggtcatcggccgagggcttcttcctcttcccccacccccactgtccctcatgtgccatgggcctgcctccccagtgacctgcgaaagtggagcatcgaggtaggagggaaacggcaaccaggagtcctcgagcctggggctgccctacctctacccattccccgaccagagctttgcccttgcttggctgcccgcctgcctctttggggaactgagctcagaggcaggtgcttcagagaaggaaacaaaatgaggggtggcacggataaaaagtcacctccattctctacctcccatgcagcatgaacacaatttctctccacctggctcccaaatttaaagatgtggaccaaggcctgtgggtactccaggggcaaggagagccctggggtcagtgacactgtcaggccaaccatgcactccacaaaggggagcatttggaaatgaaggactagctcctatgtatcaggttaagagcaagggagagctggccaggacagcagtttgcacagcagaggggaatgtagcaacagcagggcctcctaggccccatcttccatttcttaggtaagaagagcatttcctcagactcccaggcggaggactgagcctagccttcagcaaccaaggttctcctgggacccaanagtttatgggagacagggcaaagacttcatgggaagagagaaggaaggccctgggtagaaacgcttggtgctgttctctttggcctttaagacaaagcgctcatcttgccctctacctcctgataggcttgagggtttgccaaccaacactgtggctaacaggtggagggaacgaggactccttcctccagagtgctatgttcaggaagttcctttaacccatatggccaagagtagctcgtaggaggccctttaaagacggaacaagtaatttaccagttctactgagggtccctggccaccgtcccaaggtgggcgaggcctaggaagagggtcattcttaagccacacattagtgcactgcgttggctgcagccaaaacagagaactgggtgtcgagtattcatcaagtaagaacccaaatccagggcactcatatgtgaagggatacgaacctcaattccttatcctcccaaaagaagtggggaagaaacattaaacttactcctgattacaaagc

SEQ ID NO: 97675 - DNA, 1049 bp, Homo Sapiens
  misc_feature (37)..(37): n is a, c, g, or t
  misc_feature (99)..(99): n is a, c, g, or t
  misc_feature (102)..(102): n is a, c, g, or t
  misc_feature (112)..(112): n is a, c, g, or t
  misc_feature (118)..(119): n is a, c, g, or t
  misc_feature (152)..(152): n is a, c, g, or t
  misc_feature (166)..(166): n is a, c, g, or t
  misc_feature (213)..(213): n is a, c, g, or t
  misc_feature (224)..(224): n is a, c, g, or t
tagctgttgtcagttcacagtcgacagagtaagggantatgtcaagatctgcacttaatgacactctcggaagcctcattcacacttggtgtggatgtntangatggatttnaaactnntgatctgatgtggtctacatgacattttcatgnttgaactaatgctntaatgacatgaaatctggaaacctcaggggagagggtaaatgcactntgcagatgggngaatgtgagtgtcctactgtggtaaatggaatttctgaaatggtccccaaacatgccacacccttgtctctaaagcctcttaaggtgatgagacaccattcctgtgactatgttgttatatgccagttatatgactttaagatggtgaggttaccgcatgaactggatctaatcacatcactccatacatgacagagctttgtgtggctggttggagaagatgaagtcagagaaggtgggagcttgagaaggactccatgagttgttattggttgaaagatgaaacagacaggtaaggaggaaagcatgtggcctctggagtcagagtagactgtctccccgctgacagccagcacagaaaaagggccctcagtcccccacaaacaagaataggaactctttcattatctgtagtgaacctggaaaaatagcttgagctctaggaaaaaaacacagccagcccattcccggattttagcctcacatgactctgatcagagaacccggccacttcattccagacttctgtggtttcaaaccactggtttgtggtaatgtgataataggcagcaagagaaaactagtacaggtgcctgtctctcctcttgaatttcaatttcagataaatgtatgctaaccctctaagagaaaaaaatcaatcaaccaatcaatgaaagaactacagtaaaaatattgccctcacctttatgtggctgttccagagcccttgccacctgaagaagacaatgaggggtatttcaggcacttgaggagtgtggctttactgttatcaatcacatttctggaagaataaaaatggttcag

SEQ ID NO: 97676 - DNA, 1076 bp, Homo Sapiens
aaggcctgggtaaaatcggccgagggcggggctgaggcggcctcgatttgggaactgcctgaagatgccggcctaagcctggagtccaggcatggacttccccacaatttcccgatccccttcggggcctccagccatggacttggaggggcccagggacattcttgtgccttcggaggacctcacccctgacagccagtgggaccctatgccaggaggccccggcagcctcagtcggatggaacttgatgagtcaagccttcaggagctggtgcagcagtttgaagctctgccaggcgatctggtgggcccatccccaggtggagccccctgtcccctacacattgccacaggccatggcctggcctcccaggagattgctgatgcccacgggctcctgtctgccgaagctggccgggatgacctgctgggcctcttgcactgcgaggaatgcccgccttcccagactggtcctgaagagcctctagagcctgccccccgactgttgcagccccctgaggacccagatgaggattctgactccccagaatgggtggagggggcctctgctgagcaggagggcagcaggagctcaagcagttccccggaaccctggctggagacggtgcctctagtcacacctgaagagccacccgctggtgcccagagccccgagaccctggcttcctaccctgccccccaggaggtgcctggtccctgtgaccatgaagacctcctggacggtgtcatatttggggccaggtacctggggtccacccagctggtgtcggaacggaacccgcccaccagcacgcgcatggcccaagcccgggaggccatggaccgcgtcaaggcccccgatggggagacccagcccatgacgggaggtggacctgttcgtctccaccaagaggatcaaggtcttgacagcggactcccaggagggcatgatggaccacgccctgcataccattttctacacagccgacatcggctgcgtgctggggcttaaagcccccgccctcaccttgtaaccgaaagcccgccacccccaggaccacggtcgcccgcctctt

SEQ ID NO: 97677 - DNA, 221 bp, Homo Sapiens
ctcgagtgtgttgccaagtgctgcgtcctcctggtggcctctgtgtgtgccccgcccgtctgccgtctgttttgcccgcctgcccgcctgcccctcctgccgaccacacggagttcagtgcctgggtgtttggtgatggttattgacgacaatgtgtagcgcatgattgtttttataccaagaacatttctaataaaaataaacacatggttttgcaaaaa

SEQ ID NO: 97678 - DNA, 505 bp, Homo Sapiens
agggattctaaactttccttccgtcctcaatttctacctccatagaccggccagaatttagcttcacttgagagagatctggaatggtcgccatgattgaaaccacgcccccattacatcatcattacattaattacatcaacataaattatttcttcccccttcccttttccagcactcaaccaaggagcaaagctcatccacaccccacacccctcccaggtctgctcactgccaggctcctctcccctttgttcagtggagctggcttttctcccagcccctttccatgcctttcactccatttggcaagctctgagggggagcctggggacgggtttgggtccccaggaggagagccttgggtataatctatttttctaggagcctcttgccttgtcacttgcagctttcgccctctgctttgatggctgaggtgaactcatgttctttgggaaaagggaaggcgtgctgtggaaataaaatgtttatttgcttctcaaaa

SEQ ID NO: 97679 - DNA, 756 bp, Homo Sapiens
  misc_feature (678)..(695): n is a, c, g, or t
cctgcccccgcgtggaaggtaaacctttcccttccagggacccaggggctccgccggacattggaggcagctttttggcctctggtgctgtgtcccccagtccgcccagcccgcattaatgtcgtctggaataagagcctgtggatgaagcagagggccttctgggagagctctccaaggtctggaaggagggtcccccagaaggagctccggggtagccccactgtggcccccctggactcccaccagcttcatgcttctcagatgctacccaggggccggcccggggagaccagggcagatttctcccgcaccaggctgtggaggtttggagggctgcctgagcagacactgtgccattgctggggctggggaaagaatatctgagacgacgtttgggagcaatgctctttaccacgttcaccaaatcgtctggggcaggggttgtgagctgcagcagttgctggtgccttgtgggaaggtggggcagggaggaggctgcccgccacctctgcccccagtcacttcctgcttgacctgactcttcacatgtggctgcttaattcctgcccctctccccccagctgcttctcctttactaacacacctgctacattttacacatgtgttggtaagtgagaaacagaaacgaaaaataaattaaaatgcagaaatacnnnnnnnnnnnnnnnnnngaccgcgtatgcggccgcaagcttattccctgttagtgagggttaattttagcatggcact

SEQ ID NO: 97680 - DNA, 684 bp, Homo Sapiens
ttcatcctggccccgggctgtggcgagacagcccaactcccccagcccagctcccccagcccagagccagggaagaggaaggtggggccagtcccaccagtggggtggccacgcccatggggtcacatgctcaggggtcaccccctgcagggacctgatgccctcgggtgggagggaccgaggtccaccctcgggtcaaaggtcaacgtgcactttctccttgtcgcctgacagacattttattttactaagactgctgtaccgaacaagcatatttatcatcaggagacaggatgggtttaaagcaggatggtgtgtgtgtgaacgggcatgagcagaggtgagcgtgagcgagcgggtgtgtatgtacgagtgtgcacgtgtgtgcgtgtgcacagagggtgtggtgccagcttgagtgggagtgtgtgagtgtgagcaggcgggcgagtgcgtgagtgcacgccagcgcgtggcccatgtatgaggagtgaaggggcccaacgcaataaccacgtcccccacccgggccccccgccgcggctgaggccacatggcttcctgtgggagccccggccggcacccggctggtcccaccccaaatacctcagccatggagaccatgtcatgcagaattaacaaggtagcaccgagcatatcaataaatattattctgataaaaaa

SEQ ID NO: 97681 - DNA, 850 bp, Homo Sapiens
taactataacggtcctaaggtagcgaggcctgggtggcgaattcggcacgaggagacccagaagcaactacctctgaaattcagcaatacgcttgaactgaagttgaaaaaggaaaactggggcccctggagtgcagggggctcccggcaagtgcagttccaccaagggtttggggacctggctgtcctcaagcccagtaacaaagtgctgcaggtcagcatcggacctggactgcccaagaactcccgtcctaccagaaggaacactagccaaaatacaggttattccagtgggactcaaaatgccaagctacccagtgagagctgcccctcctcccccaggataccatcagaacggagtcatcagaaaccagtatgtgccatatccccatgctcctggaagccagaggtcaaatcagaaaagccgtgtacacctccatggcccagcccgcccttgcctcggcagcagtctaccagttcagaccgagtgtcacagacgccagagagcctggatttcctcaaggtcccggaccagggagctgcaggggtcaggagacaaacaaccagtcggcctcccccatgcagggggcaagacccaagccccagcccaagcccaagcctcaggtgccacagtgcaaggctgtgtatgcctatgacgctcaggacacagacgaactcagctttaatgccaatgacattatcgatattatcaaagaagatccttctggctggtggacgggtcgactacgaggcaagcagggcctgtgccccaacaactatgtgaccaagatctgaggtgcccgtgactctgacacatggggcagaggagctccagggcacagaccaggcg

SEQ ID NO: 97682 - DNA, 468 bp, Homo Sapiens
gactcctacccccaccgcagttgtactgatacataagtactaagtccctcagaaacttttaacctgctcattttccttgctgttgctttagtttgaaatgttccattctgaagaaagcgtgagccccagcaagcagaaggtgtactgattctcagcccccacatctgtgcacatgtttgcagcatttgctcgggagactcgggggagcggcggcagttctgcctgcagggcccgtggagcacttacgggagttcttgggcagtccaggtccgatgctgacctgcagcactttgttactgggcttgaggacagccaggtccccaaacccttggtggaactgcacttgccgggagccccctgcactccaggggccccagttttcctttttcaacttcagttcaagcctgcaaaaagcacagtggggttaacaggtcgaaggacgcagtgagaaaacggtgctcagagaac

SEQ ID NO: 97683 - DNA, 542 bp, Homo Sapiens
cgcaagattggtcaaatttggagtagacttcacctgcgcttggtgaaacttctacgtcaaggatgcaagaggcgccgaagtaacgcagctcccacctgtcgctctccgctgggcgccgagactatggccggagaatagctgcaccgggattggagaaaggaagccatcagtcttaggaaggctccaccttcctgccattgcctggttggaggagcgtagcgtcagtcactagagcagtcaccacctctgggacaggtgattttaatgggctcacctgaatgctgctgagcgctgccacccccatatacaggaagatgccatagagcacaggcattggaatgaactggtagaaagaagcagagagttatcaaagtttacctctgccaacctcccagatgccccaggatgcccagatgccctagatccctctagcatctagcatccaggtctgcccaggccttgcctttcctttcacatgtttcatgccgatcttattgaatcctcaaatcaattagatgaagtaaatgttattattgccttca

SEQ ID NO: 97684 - DNA, 796 bp, Homo Sapiens
aacggcagtaactctaacggttctaaggtagcgaggcctgggtggcgaacttcggcacgaggcccgttcagaccccacaatcagaccagagaatgagtgccactggctttgaagacgacagatctcacctaccaggtgtctgcgagtctgacagcagtggggagaccaaggacacactgaagccggcgttcactagtcaccaacctgccgtggtacatacctcgcacctatccagaacagcacctagcacctctaccaccatgcaagtcagcagcggcccctcctttcccatcaccaactacctggcaccagtgtctgctagtgtcagccccagtgctgtcagcagtgccaatgggactgtgctgaagagtacaggcagcggccctgtctcctctgggggccttatgcagctgcctaccagcttcaccctcatgcctggtggggcagtggcccagcaggtcccagtgcaggccattcaagtgcaccaggccccatagcaagcgtctccctcccgtgacagcagcacagacctcacgcagacctcctccaagctggtgacagtgacgctgcccgccaccatcatgacgtcatccgtgcccacaactgtgggtggccacatgatgtaccctagcccgcatgcggcgatgtatgccccacacctcgggcctggctgatggcagcctcaccgtgctgaatgccttctcccaggcaccatccaccatgcacgtgtcacacagccaggtccagcgagccatgtggcgtgcccaggtgtacctgacaccatcatccgcgacag

SEQ ID NO: 97685 - DNA, 1218 bp, Homo Sapiens
  misc_feature (342)..(357): n is a, c, g, or t
  misc_feature (770)..(817): n is a, c, g, or t
gtacctccaggtaggacctggccccgcctctctttctggcaaggtgagatcagaggtccctactgcagcctcaaaggctgggagccacagagtgttggaccagatccccgagggccaagacggtaacacagctctgccaggcagcacctgcctccggcccctcaagcacaggtaggaaaggggcagccccccttctcctcgcccaccttgaccggctgcagtcacccctcactggaccaacctgaccgagagccctgaggcagctccaccgtgcagttcacgcggtcatgccgcggaatgtccacaacacagacatggaacagaaccccatacatgctattnnnnnnnnnnnnnnnncagaagaccgtagctacactgctttaaatactgcatgctacgcacttcgtgggtcaagggtcgacagctgggtgggcgtggaggcaggaggggccccagcaaggccagggcaggcaggaggctgccctcccatctctgtgactacagttcatgattctaaggttggcgtggccaggcgccggctcctcctctgaccacagctcctcctggatttagttgaacccgtcagtgtggtagctggggtgggagtcggctgtgagctgggtggtctcggtggcggatgccgcgctgtatgacgatcggcgtgtctgtggcctccctcttcgtcagactgcagctgtgcctccagatcctcgggggacacgtagaactccgtctcctcgccttcaggcgccttgggcttacacttcccnnnnnnnnnnnnnnnnnnnnnnnnnnnnnnnnnnnnnnnnnnnnnnnncgtgaggaggccgcagaagacaaacagggccttggcccaccagctggacagcacgaagtaggtgttcacgttctcttccccaaactgctcggccacgtagagacccagcgagccgtacttgtcgtagatgttcctttttgtggcgtccgtgaggatggcgtgcgcgttgttgatctccttaaacttgtccgcggcctccgggttgtcggggttcttgtcggggtgatatttcaaggcaagcttccgataggactttttaatgtcatctgaggttgcgttcttgtccaacccaaggacgtggtacaatgactccccagaggtagacagtgagcgctgtctctggtctgccatgttaggctgcccgtccgcccgcccgcccgccctcccgccggctccgcggc

SEQ ID NO: 97686 - DNA, 1029 bp, Homo Sapiens
  misc_feature (894)..(894): n is a, c, g, or t
gggccagtactatcacggtccttaggtagcgaggcctgggtggcgaattcggcacgaggagtttctggaggatctgataatcaagtgattcactgggaaatacgaggataatcagcttttaaaagcagtgcatcttcaaggccatgaaggacctgtttatgcggtgcatgctgtttaccagaggaggacatcagatcctgcattatgtacactgatcgtttctgcagctgcagattctgctgtatcgactctggtctacacaagggtccagaagtaatgtgccttcagacttctaaactttggaaatggatttgctttggctctctgcttatcctttttgccaaatactgatgtaccaatattagcatgtggcaatgatgattgcagcaattcacatatttgctcaacaaaatgatcagtttcagaacagtgctttctctctgtggacatgaggattggattagaggagtggaatgggcagcctttggtagagatcttttcctagcaagctgttcacaagattgcctgataagaatatggaagctgtatataaagtcaacatctttagaaactcaggatgacgataacataagactgaaagaaaatacttttaccatagaaaatgaaagtgttaaaatagcatttgctgttactctggagacagtgctagccggtcatgaaaactgggtaaatgcagttcactggcaacctgtgttttacaaagggaggaagaaaaccatacacatatcccttactccagttaaatcttatggcacagtaagctgaccaaatcaagtggagaatttttttactgtgattagaaatctcaaatacatgacattttcaagttgacaaagtataatactgcatttcctggtctgctggacactcagntcccattgaacattggaactcctaaggggggaaaagtggtaattcccggcccatgatggcggaaacctaccaccccccccggtaaaattttttaatctaaaagagttcccaccttgattatttatggggaacttg

SEQ ID NO: 97687 - DNA, 906 bp, Homo Sapiens
cggcagtaactataacggtcctaaggtagcgaggcctgggtggcgaattcggcacgagggggattctcagatgaggacaacacatgggagccagaagagaacctggattgccccgacctcattgctgagtttctgcagtcacagaaaacagcacatgagacagataaatcagagggaggcaagcgcaaagctgattctgattctgaagataagggagaggagagcaaaccaaagaagaagaaagaagagtcagaaaagccacgaggctttgctcgaggtttggagccggagcggattattggagctacagactccagtggagagctcatgttcctgatgaaatggaaaaactctgatgaggctgacctggtccctgccaaggaagccaatgtcaagtgcccacaggttgtcatatccttctatgaggaaaggctgacgtggcattcctacccctcggaggatgatgacaaaaaagatgacaagaactaacgctcctgagtaccagcccctgtcacatctgactgtgggtttcaagtgggaagggaaggagttctacttgtcttgacaccatagaggtggcttgagaacgatgtcctttgaagagccagtatagtttctgtgccctgcagcagcccaagtgctttaaagccgtatcaagctgtatagtttgaacacccatcccagtggaggggaaaggcgcataagtgttcaaggcaaccttactgcactttgcttgcgaagagcaaaggggcctctatgaaggacaaaagtgggcgaatggggtgtgtggggagaaggacaaaaaatactgtagatctataagaagaatgttcaaagcgaaagagttgttaccaagtagtgtgatatctgcatagtaaaagagtaactgtgtgagttatggtatac

SEQ ID NO: 97688 - DNA, 918 bp, Homo Sapiens
  misc_feature (22)..(22): n is a, c, g, or t
  misc_feature (814)..(814): n is a, c, g, or t
  misc_feature (866)..(866): n is a, c, g, or t
tttttcttctccccctcctcgncgaggtggacccaatcattttctccgtagcgaggcctgggtggcgtattcggcacgaggatctggtaaagccgctaaaaccgaacgggataaagatggagaagtttgtgtttgatgtgttccggtttgctaagaactttgctgccttggaagtgctgcgggaggaggaattttccccactgaagaacgcagagccagccgacagggacagtccccgcaccgctcgccaggccctgctcacccagcactaccggtgggctctgcgggccggggcccgcttcctggatgcccatggggcctggctcccagagctgcccagcttgcccccaaatggagaccctccggccatctgtgagatatcgcccttggtgtcttactctggagagggtttagaagtgtacctgcaaggccgggagttccagtccccgctcatcctggatgaagaccaggccagggagccgcagctgcaggagtcctgacccgcccagactgcccccagactcccccgagacctgccagccccggcatcctggaagtcccgactccccccagacctgccagccccggcgtcctggagctgggggctacagcccagcctgagctctgggtgggaaagcagcctgccccatgcttccagcctgcagaacacagaatgaaacatgctggtagactccacgagggcagggcctctcctgtcgcctctggacacaagtggcgacagcctgctgggggctctgtggctccattcctggctgtggggtctagtccagaggcagagggacttgggacctgngagaatggggctgagaagaggcttccggttggggcccaaggggaaggggggntgtcatctgggggagaacaggaagggcatggtcccttttggagccccgcctt

SEQ ID NO: 97689 - DNA, 1056 bp, Homo Sapiens
ctggtaccggtccggaattcccgggatggacggacgccattatcgcatctccccgacaaacaccacgagaattccgcagcccacacggtgaccaaaagccagccccactgtgagttgaactctttcgtgttgaccggccactctccgtgctctggatgatgtcggaacacgacctggccgatgtggttcagattgcagtggaagacctgagccctgaccacccagttgttatggagaatcatgtagtgacagatgaagacgaacctgctttgaaacgccagcgactagaaatcaattgccaggatccatctataaagtcattcctgtattccatcaaccagacaatctgcttgcggttggatagcattgaagccaaattgcaagccctggaggctacttgtaaatccttagaagaaaagctggatctggtcacgaacaagcagcacagccccatccaggttcccatggtggccggctcccctctcggggcaacccagacgtgcaacaaagtgcgatgcgctgtgcctgggcgtcggccagaacaccattgtggtgacaggtgccgggccaagaagaacaagccaccacgaggaccggggagagcggctcggaggcccagcgactctgtgtccagctgtgggcaggcgggcagacagagcatcgggagcaacgtcacggctcatcaccctgaactcggaagaggactaccccaatggcacctggctgggcgacgagaacaaccccgagatgcgggtacgctgcgccatcatcccctccgacatgctgcacatcagcaccaactggcgcacggccgagaagatggcgctcacgctgctggactacctctttccaccgcaaggtgcaagctgtgtccaacctctccggggcaaggcaagccccgggaagaaagcagcttgaaccccgctcaccaatctacggggatcccggggtcaactctttccaattaaatttgggattccccgaaattcccaactgggtaccgcaatccaagccgaaacctttgggcttccaagtggcccccccgggcggggggct

SEQ ID NO: 97690 - DNA, 1144 bp, Homo Sapiens
  misc_feature (909)..(909): n is a, c, g, or t
ccggggcagtactactacggtcttaaggtagcgaggcctgggtggcgaattcggcacgaggcttgggcgccaactcgtagtccacgctccccggggtcagcagaggggcgctcacgctctcgccacccacctcgctttctcaccccgcgcttcccggcctgggtttttagtcttccttggagcgctctctggcctccgcctccgccagggagcggaacggcggagacagcgagactggccaggggggaggaaagaggacgcgtgtgggcaagggggacaacgggatgtccacgggctcggtgagtgatccggaggagatggagcttcgggggctgcagcgggagtacccggtccccgcctccaagaggccgcccctccgcggcgtagagcgcagctacgcctcgcccagtgacaactcgtcggcagaggaggaggcacccgacggcgaggaggagcgctgcgctctgggcacagccggcagcgcggaaggctgcaagaggaagcggccccgtgtggctgggggcggcggcgcaggtggtagcgcgggcggttggtggcaacgaagcccctcccggccaagggctcagccgcagagtgcaagcagcagcagcggaacgcggccaacgcccgtgagcgttgcccggatgcgcgtgctgagcaaagccttctccaggctcaagaccagcctgccctgggtgccccccgacactaagctctccaagctggacacgctccggctggcttccagttacatcgctcacctgcggcagctgttgcaggaggaccgctatgagaacggctacgtgcacccagtgaacctgacatggccattcgtggtctcgggaagaccggactctgacaccaaagaagtttccgcagccaacagactatgtggaaccacccgcttanatcggactggaactcacttgatgggattattccttaaatgcgagtgtttgggggcccccgaagagaagggagagctcgtgagatgggaaaaaaatttcccgctgggattctcctttgaccctttccccttttcctgggaactggtgatcgtggaccaggggggccggctggtggcttgggtccttgggcccaacgggcccccgcggttacccatttgcccccggaatctgggggt

SEQ ID NO: 97691 - DNA, 927 bp, Homo Sapiens
gagtgtccaggtagcagtaagagccggcaagatgttcgatgcggtgaaaggtgcttggtgctgttgagtagctgccagtggtcagaggggaatgggaagggggcgccatgtaagagcaagcacgggacgggcagggtcagcgctgtctgtctgccgggttggcagttcgtgccgggagggggaatgcccaggcggagtgtcgccgtattggcatgggaggtcgaggtcagggatggtcgaggtggtgggcctcgccaaaggtacacacgaccgtgaaaagggtgtaccagatgtaggaggcgttgaggtcgtggcgagtgacagcagggtgtgatgtcagggagttcttctacctgccatgggtatcgttccgttcaatggtttcacagcaaactgtaaggcgtgtagtgtcttccagacgccagacgtaaacctctccagtactgaccgccccgcaagtttgtgcttcatggtaatatcgtgttcgctccatttcccatttgtcgtggatgggggacacaccatagactgtaggcttattacacttgggtgctgggtagtgtaatgttgtcaccagcccatcagccactgtggagtgatggtgtacaagctctgccaaggtgctgaagcggctctcagcagtcacatacaccttgccatctgcagtggtattgatcctgtagtgatacacacgtccctcgtacctgagcgagatggacagctgcccagggctactctcactttctcgcaccaggaagctgccattgattagactgctgagcagatactcagctgcactgcgtgacacaggtccatggtaccaggagtgtttttccaggctgttcactggggtgatgtagttgcttcctcgtgccgaattcgccacccaggcctcgctaccttaagaccgttagtagttactgcccg

SEQ ID NO: 97692 - DNA, 992 bp, Homo Sapiens
  misc_feature (570)..(570): n is a, c, g, or t
  misc_feature (854)..(854): n is a, c, g, or t
  misc_feature (863)..(881): n is a, c, g, or t
tggaccggtccggaattcccgggatgccgggtcaccttgtcccggaggagaaatggcttccctgaggcaagtgtaacctacattcccagcccaccagcctgacgcccagccagggagagagtaccatggatggcatcattgaacagaagagcatgctggtgcacagtaaaatcagtgatgctggcaagaggaatggtttaattaacaccagaaacttgatggccgagagcagagatggtctggtgtctgtttacccagcgccccagtaccagagccaccgggtgggggccagcacagtgccggccagcctggacagcagcaggagtgagccgatgcagcagctgctggaccccaacaccctgcagcagtcagtggagtcccgctaccggcccaacatcatcctctattcagagggcgtgctgcgctcctggggggacggtgtggccgccgactgctgcgagaccaccttcatcgaggaccggtcgcccaccaaagacagcctcgagtacccggatgggaagttcattgacctctcagctgatgacataaaaatccacaccctgtcctacnatgtggaggagggaggaggagttccaggagctggagagcgactactcaagcgacacagagagtgaggacaatttcctcatgatgcccccgcgggaccacctggggcctcagtgtcttctccatgctctgctgcttctggcctctgggcatcgcagccttctacttgtcccatgagaccaacaaagccgtgggcccaaggggggacttgcaccaggccagcacaagctccccgggggcccttattccttgggcagtgctgtccatcacccattggggactggcgntccaatgtnnnnnnnnnnnnnnnnnnncccctcatcggcctaccctcttccaggaaacaacccacctgggaaccttccttgggcaaaagggagggggggagcaccctggggggccaaggtcccggtggtgggaacctc

SEQ ID NO: 97693 - DNA, 453 bp, Homo Sapiens
gtgaccgggcgaggtggagcggtcagtttctgctgaactggcatccagcactggctgttcagagacatcatatccatcctgcacttggcaagttccagctccacagcattcttctttgcaatggcctcgtcgcggtccctgatggccttctgaagctgctcctttggctccttgtcctcagaagtgactctgagtcggtctctctcctcttttagggcagtcatctccacactcagcagtgtcacctaacaggagaatgaatatggtatcactgctgctgtcctgggtggttttccctccaagagggaaaaaggaacaaagagaccccaggcaggaccaggttacatgtgtgggggtgcaagctggtagcattccactgccatcctgcttcaagagagggcctgtctctcttgaagaaagggtaccacatcacatgctatgctcgcactcgcc

SEQ ID NO: 97694 - DNA, 793 bp, Homo Sapiens
tttaagggctacctcaaaggcatacaagaaggtcacagcgtggtgtttcaccttcccaggactggtgttttctgttcccccgatgccactatcaggatttggtcggtccccaatgcctcttgtgtacaggtggttcgggcccatgagagtgctgtgacaggcctcagccttcatgccactggcgactatctcctgagctcctccgatgatcagtactgggctttctctgacatccagacagggcgtgtgctcaccaaggtgacagatgagacctccggctgctctctcacctgtgcacagttccaccctgacggactcatctttggaacaggaaccatggactctcagatcaagatctgggacttgaaggaacgtactaatgtggccaacttccctggccactcgggccccatcactagcatcgccttctctgagaatggttactacctggctacagcggctgatgactcctctgtcaagctctgggatctgcgcaagcttaagaactttaagactttgcagctggataacaactttgaggtaaagtcactgatctttgaccagagtggtacctacctggctcttgggggcacggatgtccagatctacatctgcaaacaatggacggagattcttcactttacagagcatagcggcctgaccacaggggtggccttcggcaatcacgccaagttcatcgcttcttcctggaatggaagacactctgccacagttcaccaagaacttctatcttcaacctctcttcttaatccagactccatttcgggaatct

SEQ ID NO: 97695 - DNA, 1128 bp, Homo Sapiens
cggccagtaactactaacggtttaaggtagcgaggcctgggtggcgaattcggcacgaggcctaccagagccacgagcgcacgcactcgggggagaagcccttcctgtgcccgcgctgcggccgcatgttctccgacccctcgagcttccgtcgccaccagcgcgcccatgaaggggtgaagccataccactgcgagaagtgcggcaaggacttccggcagccggcggacctggccatgcaccggcgtgtgcacacaggcgaccggccgttcaagtgcctgcaatgtgacaagacgttcgtggcgtcctgggacctcaagcggcacgcgctggtgcactctggccagcggcccttccgctgtgaggagtgcgggccagccttcgtccgagcgtgccagcctcacgaagcatagccgggtgcactcgggggagcgccccttccactgtaacgcatgtgggaaatcctttgtggtgtcgtcgagcctgaggaagcacgagcggacccatcgaagcagtgaggccgcgggtgtgccccctgcacaggagctggtggtggggttggcgctgcctgtgggcgtggcaggtgagagttcagccgccccggcagcaaggggcggggctgggggacccttccagcagggctgctagggctgaccccggagtccaggtggtgtgatggccacacagtggcaggtggtgggcctgacggttggagcatgtggcaatgccaaggatgctggtgtacggggaggctcctggtccctttggcaacgggaaggacgagggcggcgcgggttgcagaagggctggaacacgaaaggccccccaagttaggtgctgcacgagaagatgcacaaggcggaactttctccaaacaaaagccgcctgactgaccgtcaggagaacaaggcccataacagacccagagaattacaggaccattacacttggagaccccaagtgccggcacagagtttagtcttgaaccggcagatgggttagagcaaagacaagcgctgagatctacaagataagtgaggcactaaacgttcccaaattttgcacaggactatttgatagcaagcagcttggcgaacacttgagagttccccctggtgaccattgggg

SEQ ID NO: 97696 - DNA, 1275 bp, Homo Sapiens
  misc_feature (1153)..(1153): n is a, c, g, or t
tggaccggtccggaattcccgggatgcctgagagagtgaggacaggctgcgggaggagctgcaggactgaggtacagaggccaggggcccagggcaggacccagcctggacttgactccctgggatcccaggaagggcacaccctttcctcaccacccgagtgagcgctgccccctcacagagacctctttgccccctgggccaggcagagcaggcgctgcggtccgggaggccccatggaggtggcggtgcccgtgaagcaggaggccgagggcctggcgctggactccccgtggcaccgcttccgccgcttccacctgggcgacgcgccgggcccgcgggaggcgctggggctgctccgcgccctgtgccgggactggctgcggcccgaggtgcacaccaaggagcagatgttggagctgctggtgctggaacagttcctgagcgcgctgcccgccgacacgcaggcctgggtgtgcagccggcagccgcagagcggggaggaggcggtggccctgctggaggagctctgggggccagcagcctcccccgatgggtcgtcagcaacgagggtgcctcaggatgtgacgcagggccctggggccacaggtggaaaggaggacagtgggatgattcccttagcaggcaccgccccctggggctggaagggcccggcgcctggggactccccagctgggcgcccctacaagcaggaagcccaggaacccccccgcctgggcgcctggcactggcccgccttttcccaaacggacccccgggggaaaccacattccctgaccaccgaagagggcgggaaaaaaccgtttcccctggaaaaaccaagatctcacccctggcctggcggccccaccggcggccgaaggccaaccccccggcgtagaagaaaaaaccccgtagaagcacctggcacctttgaagagcccggcgtaatagtaccgccatttctcgctcacctcgagcgacatacctctcacaccagtcgtacccacaagtgccaatctccactcagctcacccccgacaatgttgtaccgaatctaatccccccacaactccacctccgcgcttgtgtaaatatcaaactcggcggaaacccgagaacgaaatggggagagaaagactctagtggaatntaagcggcgtcacgcctaagaatatgaggaccagacgccacctcaccccaacagatatacagccgccgctgtgtgagggagccagccttgcaatcgacaagtcgcacattccccccaaacag

SEQ ID NO: 97697 - DNA, 720 bp, Homo Sapiens
aaacggtgcagtactctcacggtgttaaggtagcgaggcctgggtggcgaattcggcacgagggttgctgcgacacgctgaccctgacttttatcaatacctgcaagaggcaggcgctgatgacctcttcttctgttaccgctggctgctgctggaactcaagcgtgagttcgccttcgacgatgccctccgcatgcttgaggtcacttggagttcgctgccccctgatcctcctgaacatgaggtagagctggttggaccccccagccaagtggcagacgctggttttggtggccacagggggtggcccgtgcgacagaggcacatgctgaggcctgctggtggaggaggtagtacctttgaagatgctgttgaccacactggccacaagccaagtcacggggccatggtggtggggggcgtctcctgagacaggccagcttggatggcctccagcaactcagggataacatgggctccaggagggaccctctggtccagctgccccacccagctgcccttatcagctccaagtccctctctgagcctttattgaactccccagacccactgctctcctccttttcccacactgattccccatcttcctcatctccaccatccacacaggagcctctcacactggtgatatggctgtaggatcccccatgatgcaagaggtagctccccgaaagacactggaagtcctccaccttacac

SEQ ID NO: 97698 - DNA, 800 bp, Homo Sapiens
gcagtaactctaacggttctaaggtagcgaggcctgggtggcgaattcggcacgaggcaaagagtatggggcctcgccagtgctgagtcaaggggtggatccacgaagtaccttctatgtcctgaaccctcacaataacctgtcaagcacagaggagcaatttcgagccaatttcagcagtgaagctggctggagaggagtggttggggaggtgccaagacctgaacaggtgcaggaagccctgacaaagcatgatttgtatatctatgcagggcatggggctggtgcccgcttccttgatgggcaggctgtcctgcggctgagctgtcgggcagtggccctgctgtttggctgtagcagtgcggccctggctgtgcatggaaacctggagggggctggcatcgtgctcaagtacatcatggctggttgccccttgtttctgggtaatctctgggatgtgactgaccgcgacattgaccgctacacggaagctctgctgcaaggctggcttggagcaggccaggggccccccttctctactatgtaaaccaggcccgccaagctccccgactcaagtatcttattggggctgcacctatagcctatggcttgcctgtctctctgcggtaaccccatggagctgtcttattgatgctagaagcctcataactgttctacctccaaggttagatttaatccttaggataactcttttaaagtgattttccccagtgttttatatgaaacatttccttttgatttaacctcagtataataaagatacatcatttaaacccctg

SEQ ID NO: 97699 - DNA, 1287 bp, Homo Sapiens
taggtagcgaggcctgggtggcgaattcggcacgagggccttctgcactatgcgggggaggtgacctacagcgtgaccgggtttctggacaaaaaaatgaccttctcttccggaaccttaaggagaccatgtgtagctcaaagaatcccattatgagccagtgcttcgaccggagcgagctcagtgacaagaagcggccagagacggtcgccacccagttcaagatgagcctcctgcagctggtggagatcctgcagtctaaggagcccgcctacgtccgctgcatcaaacccaatgatgccaaacagcccggccgctttgacgaggtgctgatccgccaccaggtgaagtacctggggctgttggaaaacctgcgcgtgcgcagagccggctttgcctatcgccgcaaatacgaagctttcctgcaaaggtacaagtcactgtgcccagagacgtggcccacgtgggcaggacggccgcaggatggggtggctgtgctggtccgacacctgggctacaagccagaagagtacaagatgggcaggaccaagatcttcatccgcttccccaagaccctgtttgccacagaggatgccctggaggtccggcggcagagcctggccacaaagatccaagctgcctggaggggctttcactggcggcagaaattcctccgggtgaagagatcagccatctgcatccagtcgtggtggcgtggaacactgggccggaggaaggcagccaagaggaagtgggcggcacagaccatccggcggctcatccgaggcttcatcctgcgccacgccccccgctgccccgagaacgccttcttcctggaccatgtgcgcacctcttttttgctaaacctgaggcggcagctgccccggaatgtcctggacacctcgtggcccacgcccccacctgccctgcgtgaggcctcagagcttctgcgggagttgtgcataaagaacatggtgtggaaatactgccggagtatcgccctgagtggaacagcagctgcagcagaaggccgtggctagtgagatcttcaagggcaagaaggataattaccctcagagtgtacccaggctcttcatcagcactcggcttggtacagatgagatcagcccccgagtgctgcaggccttgggctctgagcccattcagtatgcggtgcctgttgtgaaatacgaccgcaagggctacaagcctcgctcccggcagctgctgctcacgcccaacgccgtcgtcatcgtggaggacgccaaagtcaagcagaggattgat

SEQ ID NO: 97700 - DNA, 897 bp, Homo Sapiens
aggacgtaacctaacggtataaggtagcgagggctgggtggcgaattcggcacgagggtcagtttctgtgggttaagaatttgggagtagtttaacatgatggttctggcccatggtatcagtgaagttacagtcaagattgaacagggggctgcagtcagctggagctggagaaaccacttccaagcactctctttgtggccggtggcaggatgcctcagtttcttcccatgtgggtctctgcgtagggcagcatgagtgtcctcacaccatgacacctggctgctccctgagcagctgattccacgagatcatggggcagggccaggagaaagctgcacgtgccttttaaagacatagtcttgcaaaggacacaccgacacttcttatcctagttgttagaacgcaagccactaagttcagcctgcactcaaggagagaggcattacacagttcctctaccccaatggagcagtcacgccaagaatttatggacatatcttaaaagcaccacaccccaactggggatgaaagtaggtcaacaggaggtaggtttacatctacgcctcagcctgacaagatccgcatgcactccgacacccaggtccttccacagatgtgcactaccccgacgccgggcacacgcaagggcagaagcgcccacaaacgctaccagctggattccgcgaagggagcgaggaaccgccactcggccaccaccacggcagcacgtacaaacaccacaaagcctgaactacgaaacaaggccacggacaacctacattaggccacaccccgaacgaaccccactgccacgttaccacaaacaccaccaacccacaaatcacccagaacgctcccgcagcacagccacacacgaacccagaggcatacaca

SEQ ID NO: 97701 - DNA, 1068 bp, Homo Sapiens
  misc_feature (789)..(790): n is a, c, g, or t
gccaccatttgatggaacggtccggaattcccgggatgaaaatggcggccccggcaggcggcggaggctccgcggtgtcggtgctggccccgaacggccggcgccacacggtgaaggtgacgccgagcaccgtgctgcttcaggttctggaggacacgtgccggcggcaggacttcaacccctgtgaatatgatctgaagtttcagaggagcgtgctcgacctttctctccagtggagatttgccaacctgcccaacaatgccaagctggagatggtgcccgcttcccggagccgtgaggggcctgagaacatggttcgcatcgctttgcagctggacgatggctcgaggttgcaggactctttctgttcaggccagaccctctgggagcttctcagccattttccacagatcagggagtgcctgcagcaccccggcggggccaccccagtctgcgtgtacacgagggatgaggtgacgggtgaagctgccctgcggggcacgacgctgcagtcgctgggcctgaccgggggcagcgccaccatcaggtttgtcatgaagtgctacgaccccgtgggcaagaccccaggaagcctgggctcgtcagcgtcggctggccaggcagccgccagcgctccacttcccttggaatctggggagctcagccgcggcgacttgagccgtccggaggacgcggacacctcagggccctgctgcgagcacactcaggagaagcagagcacaagggcacccgcagctgccccctttgttcctttctcgggtggggaannaaaaaactgggggggccctcctgggcccacgaggcctctgacatcatcttcagcttaagttgccgaaagtccctcttccagcccctggaggccccctcccaagccaaaagaaagtcccaggtccgggccaggaatcccccaagcagggagccggggagccagggaaaccggggaatcggggaatccccccagcaggtaaccaaggaatcggggaactctggccccccttgggaaccgggggaacccccgtgggaacccgcggggaaaacccgtggggg

SEQ ID NO: 97702 - DNA, 1291 bp, Homo Sapiens
  misc_feature (309)..(429): n is a, c, g, or t
tggatagtgtcggtgctgtcggtagctggttgcggtggggctgtgcggatgggtgggggttttgtgtctgtgtgtgggtcttgctgtgcgtgtcggtattagtttcatgatctatgggttgtttgggcgttggggttttggccgcgctgttacctgcgggtcttctgggtgggttttctgttctgttcgtcgtttgtctgcgttctagttcggttctcgcccagtgtgtgagctggccggtttggtggtttaccgactatcgttcgtgcgctgttttgtgtgtggccatgggcgggggggcaggtgggnnnnnnnnnnnnnnnnnnnnnnnnnnnnnnnnnnnnnnnnnnnnnnnnnnnnnnnnnnnnnnnnnnnnnnnnnnnnnnnnnnnnnnnnnnnnnnnnnnnnnnnnnnnnnnnnnnnnnnnnnatgtgaatgatggtgtgttgtttgtgttgattctgtagtattggtgtagtggcgtggtgtgaggggtgcgtgggcgttgtttattaggtgggtgtaggttgtgtgcgatgggtgagccagtgtggtctggatggtctgtggtccggagcgctgcgctggtttgtgtgtcactgtgtcggtctggagggtctctacgagtgtgtgtccgcttcggttgggagcagagcagccagagtgatggcagcagcccacaaagatacgtcaggatcacctttccagcgggggctggaagcgggggtccgcggccttggtcatggacgccagtcacaggaagggccccccaccaacttgatccggagggagtgcatagactcattccattccgggtgctcagtacagctgcacgggcatcagcgtgtacagacaggcgggacctgcacagccagggagggaggtagaggagtcagcgcgctccgcaagcccagtcacatcttagttccggaagctgcaggcgctggaggctgacttttccagaagaaacagtatttcactactctgtggccattccgtactcccgtggcttaatgaattcccgactctagattcctgactctagcagtatctttgcttactttcattcggcaagacgtgaagtctttccacagcaaaattactccatctcccctgtcccagctggcaacgtgggaagctgagtgaggaaggaagttccatgcaggctggtgctctgtggtccctccgctgcggggctggctccggtgcccgcgatcggcggggcttggctgggcttggctgggcttggctgggctaacggccatcccgagaatccggaccggtccagccg

SEQ ID NO: 97703 - DNA, 742 bp, Homo Sapiens
aactgggcagtaactctaacggtttaaggtagcgaggcctgggtggcgaattcggcacgaggtcttgatctcgggcggccccgataagggaggcggagtgtgcggagaggaggcggggcaactgcgcggacgtgacgcaaggcgccgccatgtcttttgagggcggtgacggcgccgggccggccatgctggctacgggcacggcgcggatggcgtcggggcgccccgaggagctgtgggaggccgtggtgggggccgctgagcgcttccgggcccggactggcacggagctggtgctgctgaccgcggccccgccgccaccaccccgcccgggcccctgtgcctatgctgcccatggtcgaggagccctggcggaggcagcgcgccgttgcctccacgacatcgcactggcccacagggctgccactgctgctcggcctcctgctgcccccaccagcaccacagccacccagtcccacacccagcccagcccggtctaccctggccagagaggacaacgagggaggacgaggatgagcccacagagacagagacctccggggagcagctgggcattagtgataatggacgggctctgtgtgatggatgaggacgccaccctccaggagcttcccaccttctgtgagtcagaccccgagagtacagatgatggcaagcctgagcgaggagacacccggcggaccaacaaaactgatgaggacaaaagaaacaagactaacaa

SEQ ID NO: 97704 - DNA, 1034 bp, Homo Sapiens
  misc_feature (579)..(636): n is a, c, g, or t
aaaccggcgcagtaatcctaacggttctaaggtagcgaggcctgggtggcgaattcggcacgaggatgaccccaacatgccatctgagtgtcggtgctgaaatccagaggctgtttctgagctgccgcccggcccaaggctcgtggggaggcaggtggactccagaggacctcgtggctcaagtgtcggcctactttttctgcccctggttctccccgtccctatccctgtgttcctgactgcgtttagacgcttcttgtgcttccgctttgctgctacactgttaagaattgtctgacttttgaatcatgtctggctgttaatcgtaacaattcgtgagtgggacaggtttcagtaaaagcatccaatcctgtagcgcctgaagtggcttttccagcattcattactacatttctgtcggccctcagaggtaggcataggaggccccagctactctacagccacaaactgctgtgcatttggttgcagagaagacacaacagtggctgttgagttcgtctgagtttcaggaaagggtgtctgtatttctggcacctaaatcagttctccaggatacannnnnnnnnnnnnnnnnnnnnnnnnnnnnnnnnnnnnnnnnnnnnnnnnnnnnnnnnnatcacttgagatcgggagtagaggctaagctggcaacggtgaaccggcatctctcagttacacgaattagacaggagtgctgcaggtgccagctggccagtatcccaacttacaggcaagcgaaggggagatcgcctgcacaggagggcactggcggagcgagagcgccacgccaccagacgggcgaacgagcagaaccaccagcaaaacgagcgaagagaaaccactactggaacgccgggataccacacgtaccacacggcaagggacccacgaggaccgcacccaagcgcggaccgccgcaggacgcacgggccacagccgatacaccagaccacggggccgccaccaaggttccactaacacgtgagagcacaaagaccgggcggacctccacc

SEQ ID NO: 97705 - DNA, 962 bp, Homo Sapiens
gacggcagtactcataacggttctaaggtagcgaggcctgggtggcgaattcggcacgaggcggcgcacctgggctgggcaggtaagggctggtgcgggacggggagaggaacctgcagtccctacttgggtagagccaggcgccccttggctaagacgtcgaggagcgtggtagcgacgggtgatcttcgctgcggacttggttcggagggacgtccgcttctggtggacagattgagcaaagaatctttgagcggtcaagggaaagacaagccgactcttcagatccctgtggacacactgcctgctcttccatatcatggccctccacccccgcagagtccggctaaagccctggctggtggcccaggtggatagtggcctctaccctgggctcatctggctacacagggactctaaacgcttccagattccctggaaacatgccacccggcatagccctcaacaagaagaggaaaataccatttttaaggcctgggctgtagagacagggaagtaccaggaaggggtggatgaccctgacccagctaaatggaaggcccagctgcgctgtgctctcaataagagcagagaattcaacctgatgtatgatggcaccaaggaggtgcccatgaacccagtgaagatatatcaagtgtgtgacatccctcagccccagggctcgatcattaacccaggatccacagggtctgctccctgggatgagaaggataatgatgtggatgaagaagatgaggaagatgagctgggatcagtcgcagcaccatgttcccatccaggacaaccttccccttcctgaacatcaatggttctcccatggctgccagccagtgtgggcaattgcagtgtgggccaactgcagcccggaggcagtggtggcccaaaactgaaccctggagatggaagtacccaggcactatacagcccttctataggtctcc

SEQ ID NO: 97706 - DNA, 1048 bp, Homo Sapiens
ggcagtaactctaacggtttaaggtagcgaggcctgggtggcgaattcggcacgaggggcaagtggctgccccaccccaaggcgtgaccaggaggaacagcctgcagctcactccatgccacacgggtgggccaccagcctgctgtcagaagtctctgggctccaactggtcttgtaaccactgagcactgaaggagagaggtcttggtcagggctggacagcatgcccgggaggaccagcagaggattaaagcgtgactgggaggaccagcggaggataaaagacactgctcagggcagggcttctaccctgcatccctggccaagaaaagggcagtccccatgtgggcttgcagggtcactctcaggggcctctttcagctggggctggcaacttgcgtctgggggacacctccaggtgtgtggggtgaggatttcctataaccagggctcccagaagctttgcttatgtaaggaggtctgggagccagcccattggaggccaccagccattttggcttcaaaggaccccacctcacccaggtctcagcggcagtgggcacagctatgtcttcaggagctcccgtcaaacctcatagctggggcgctcccagacaggccagtccagacaggaccacgctgggcccctggcatccagaggaaggagccaggagtgtgggaaggcccacagtggggggctgtgggcttctgacactcaggtcatagcctcaagaggtctgaggtcagcccgccacagacccatccggcccgcaccccaaagtccctgcagagcagcacttacgagttatggcccaggccctggtccacccttcccctgtgcacctccgggtgggtttgccaagtcagggagcagggctggccgcaggaactcccaaaccttggctttgaatattggtgggggaggtgtgctcgtccctttctggacgtggcagggtacctgtcccagcagggcagatggggggcagctgaggcgctcccccaggcaggaaggggcagccttcacatccggggggaaaaaggggaggaa

SEQ ID NO: 97707 - DNA, 955 bp, Homo Sapiens
  misc_feature (939)..(939): n is a, c, g, or t
actgctcagttgcaaacgcggttataaagacggcagtactataacggttctaaggtagcgaggcctgggtggcgaattcggcacgagggtggaggccgggcctggagaccagcagggcgactcctacctcagggtgtcctccgacagcccaaaggaccagagcccgcctgaggactcgggggagtcagaggccgacctggagtgcagcttcgcagccatccactccccagctccgcctcctgaccctgcccctcggtttgccagcgtcgctgccccatttcccaggatgcgcaggtcccacagaagatgagctgtccctgcccgagggacccagcgtccccagcagctccctaccccagactccggagcaggagaagttcctccgccaccactttgagacactgactgagtccccctgcagagagctcttccccgcagctctgggagacgtggaggcctctgaagctgaagaccacttcttcaacccacgcctgagtatctccacgcagttcctctcaagcctccagaaggcatccaggttcacccataccttccctccccgggcaacccagtgccttgtgaagtctccagaggtcaagctcatggaccgaggcggaagccagcccagagcaggtactggctacgcctccccagacaggacccacgtcctcgctgcagggaaggctgaagagaccctggaggcctggcgcccaccacctccctgccttacgagcctggcgtcctgtgtccctgcttcctccgtgctgcccacagacaggaatctcccaacgcccacatctacacccaacccaggcctggctcaggggtgtccatgcccccttccacctgttcctacatggaggccactgccagctcccgtgccaggatatcaccgcagcatctcccttcggtgacagtgagggccctatcgtgggcccnctgggccaggcctccg

SEQ ID NO: 97708 - DNA, 1151 bp, Homo Sapiens
tcacgctctggtatcaagaactgcgcctgcccttgcccacttggacctctgtcctcgcacttcagggatcctggcaagccgaggtagcgttcaggggggcccctggggccgatgctgaaaccagctatttagcgactcggtaccatctctgtcagcaggggcagtcctggattggaggtccagaagacattgtagctgccatacttgggggctgtatcccctggactggttggtggcaaaagtgtaaagcggaagtcaccaagttcactggtgtgcccactgataaacttcaactgccccttggccccaacctctggtagtaggacttccttgccatctgtcaccacatagaagaacagggagaccaaagggagggcagaagtacctgagtcctgaggctctacagtcactctccagctccagtcccctccgtgctgacccccaggcctcttgacgaactcagtggtgagccttaaggccccatcctggatgtgttggcgcccgaaggagaggccgtcgtggaactcccagccatagggacccacaccgtccccctgctcacacgtgtgcctgagcttaggagtccccggggtggtgccctgctgcgcccacatcagtccggtgaggaggggcttcgggctgcgggtcttcatgccgaagtagacgtgagggcggtaggttccccagaagaggtccggggccacggcggggctggaggagtcggcaggcaacacaggaggcgcggagtgcagcgtgaccgcccgccgcgcacggtaccacgccagcacccagcgccccgacatacccagggccaaagacaggaccacgacggccagagccactcctccagccgtgctacgcggcccgccgccccggccgtcccgtcgcccggggcctccccgagccgccctctcggctgtccgcactccctctgccggcactgcgcggcgccgccgctcgccccgagccatcctggcactgaggtccgcgtcacaagagctcggagaggcggcagtggagcccgggtcctgcctcacctctccggctcccgcctctcgccctggcgaccaccgtccggttagcgacacctgccagccagcgcctgcgcctccgcctccgcctccccctcgtgccggaatcgccacccaggc

SEQ ID NO: 97709 - DNA, 861 bp, Homo Sapiens
aagaggaagagggtccttatagacatcaccagttgcatcacctgtcgtgagagcattcaccagagcgtgaggcagctgaccaaactgtcgcagagtcagccttctcatcagctgaaggtttctcaagcgctctctaagcattcagcatgctctccaggcctgggtcagtagactgcctgccagtctggcagggcttgatttcctcctgcctgggcactgcctgattcaaacacaaactctatggaaatgggaattttcagggtcacctgctgtatcaagaactgcccctgccctgccccacttggacctctgtcctcccacttcagggatcctggcaagccgaggtagcgttcagggggggcccctgggggccgatgctgaaaccagctatttaggcgactctttaccatctctgtcagcaggggcagtcctgggttggaggtccagaagacattgtagctgccatacttgggggctgtatcccctggactggttggtggcaaaagtgtaaagcggaagtcaccaagttcactggtgtgcccactgataaacttcaactgccccttggccccaacctctggtagtaggacttccttgccatctgtcaccacatagaagaacagggagaccaaagggagggcagaagtacctgagtcctgaggctctacagtcactctccagctccagtcccctccgtgctgacccccaggcctcttgacgaactcagtggtgagccttaaggccccatcctggatgtgttggcgcccgaaggagaggccgtcgtggaactcccagccatagggacccacaccgtcctcgtgccgaattcggcgcgccgtcgacttcatactctcccccctt

SEQ ID NO: 97710 - DNA, 942 bp, Homo Sapiens
  misc_feature (724)..(724): n is a, c, g, or t
tggcagtaactctaacggttctaaggtagcgaggcctgggtggcgaattcggcacgaggattgcacgtggagggccgcccgaagggcactctcggacattaacccgcattctgtaccatggggcgcaagttggaccctacgaaggagaagcgggggccaggccgaaaggcccggaagcagaagggtgccgagacagaactcgtcagattcttgcctgcagtaagtgacgaaaattccaagaggctgtctagtcgtgctcgaaagagggcagccaagaggagattgggctctgttgaagcccctaagacaaataagtctcctgaggccaaaccattgcctggaaagctaccaaaagggatctctgcaggagctgtccagacagctggtaagaagggaccccagtccctatttaatgctcctcgaggcaagaagcgcccagacacctggcagtgatgaggaagaggaggaggaagactctgaagaagatggtatggtgaaccacggggacctctggggctccgaggacgatgctgatacggtagatgactatggagctgactccaactctgaggatgaggaggaaggtgaagcgttgcagcccattgaaagagctgctcggaagcaagaaggcccgggaagctcctgactgggatccagtggagtgaagaggataccgaggacgaggaggaagataaagaagtgacccctgagtcaagccccccanaggtggaagaggcagatgaggggcctgcagatcaatgtggatgaggaaacatttgggctgccccctgctgggggagatggagcaggatgcccaaggctccagtccctgcaaacgagtttcactaggcggatcctaggatattggggggaatttctgcgtggattttgggggctccaccgggaagggaagggcggttcctcggttctgaataccctgaa

SEQ ID NO: 97711 - DNA, 732 bp, Homo Sapiens
  misc_feature (572)..(572): n is a, c, g, or t
ggcgaagagtatgaagtcgacggcgcgccgaattcggcacgagggcgagtgccggccgaaagctaggtccggattgcacgtggagggccgcccgaagggcactctcggacattaacccgcattctggtgggtctagaggaaattgggggacgaagagtggcagcactgacctggtctgggacgtggggagaaggtaccatggggcgcaagttggaccctacgaaggagaagcgggggccaggccgaaaggcccggaagcagaagggtgccgagacagaactcgtcagattcttgcctgcagtaagtgacgaaaattccaagaggctgtctagtcgtgctcgaaagagggcagccaagaggagattgggctctgttgaagcccctaagacaaataagtctcctgaggccaaaccattgcctggaaagctaccaaaaggagctgtccagacagctggtaagaaaggacccccagtccctatttaatgctcctcgaggcaagaagcgcccagcacctggcagtgatgaggaagaagaggaggaagactctgaagaagatggtatggtgaaccacngggacctctgggctccaagacgtgctgattcgtaatgatatggactgactcactctgagataggagaagtaaactttctcccatgaaaactctcgaacaaagccgggactcgctgatcctggatgaagaccagccagggaaaaaaatgccttatggccca

SEQ ID NO: 97712 - DNA, 706 bp, Homo Sapiens
ggcagtaactctaacggttctaaggtagcgaggcctgggtggcgaattcggcacgagggggagttggggggtgcccaacgcaatccttgggggtgcaggtggagcagaaagtgaaggagggacacgtgcaagagtggtgtgcatggtggtgtgacatgaggaccgttcctaggatgggacagtgggtcaggcaggacaaggagaaagcagggcagaatgatgcctagaggaccacatcaggcatggctgacagcttgtgcccatgggctgtggcgtatgtcagatcgcagggtaggaacgagtctggcctggtgccggcccagtgtttcctcagctcatccgccctctgttgctccctagcattccaggagccatcttggactctcctccccaggtttgaaaggccatcagattagcagggacggggtgtagggcatcacccaaggttccttctcttaaactaagggtgggggatctgaatgtttttatgttgactgttcttgactaaattttcaagagtttcagaagcaacaggacagaccagacgtttcattctaccctggggcgaacagaacttcttcctcccaaacaatgacttcctgccatgtttgatggggacagctaccactgtcctctgcccccattcccctttcagctcccatgagcatgcatagttcaccagacaagtagagccgaggtaccgaca

SEQ ID NO: 97713 - DNA, 1001 bp, Homo Sapiens
  misc_feature (948)..(948): n is a, c, g, or t
gcagtaactataacggttctaaggtagcgaggcctgggtggcgaattcggcacgaggctcacagtttcctctggcggcatgtaaaggctccacaaaggagttgggagttcaaatgaggctgctgcggacggcctgaggatggaccccaagccctggacctgccgacgcgtggcactgaggcagcggctgacgctactgtgagggaaagaaggttgtgagcagccccgcaggacccctggccagccctggccccagcctctgccggagccctctgtggaggcagagccagtggagcccagtgaggcagggctgcttggcagccaccggcctgcaactcaggaacccctccagaggccatggacaggctgccccgctgacggccagggtgaagcatgtgaggagccgccccggagccaagcaggagggaagaggctttcatagattctattcacaaagaataaccaccattttgcaaggaccatgaggccactgtgcgtgacatgctggtggctcggactgctggctgccatgggagctgttgcaggccaggaggacggttttgagggcactgaggagggctcgccaagagagttcatttacctaaacaggtacaagcgggcgggcgagtcccaggacaagtgcacctacaccttcattgtgccccagcagcgggtcacgggtgccatctgcgtcaactccaaggagcctgaggtgcttctggagaaccgagtgcataagcaggagctagagctgctcaacaatgagctgctcaagcagaagcggcagatcgagacgctgcagcagctggtggaggtggacggcggcattgtgagcgaggtgaagctgctgcgcaaggagagccgcaacatgaactcgcgggtcacgcagctctacatgcagctcctgcacgagatcatccgcaagcgggacaacgcgttggagctctcncagctggagaacaggatcctgaaccagacagccgacatgctgcagctggccag

SEQ ID NO: 97714 - DNA, 962 bp, Homo Sapiens
  misc_feature (231)..(231): n is a, c, g, or t
gtggactttccccgttaaagggcttattccaccttgaatgtgcttgtatgggtggggggcttgcgctcgctctccctgtgtttctcgggctttccctctgaagcttaatttcacgaaaacgagcttcagcttcttgccagtgcgttttttgaagactcttcccgatcccctctgacccccctggtaggcggctgccccggtccccctccatgtacgggaacactcgcgccntgatgcgtccagtaataatctttagacccaaagaaaaacacagggaattctccaatctcgtgcttcattttctgaatatttgggggaacatttttgggatggcaaacttctgccggccaccatctgtagttcccaagtttcacccaaatgatatcctggaagtgcagcttcttcccagccctgcagtcattgcagaaccagctgccgtcaggcatctcgatgttcaggcagtcagggtggaaggccgctgggcaggactcacagcacagaaggctcccccctttggagcacacgaagcaccagctcacgttgacgtgggcgtggtgtcgcttccccttccgagcagtgaagtgggcagtgcagatgatgctgttggaggcgatcactgagcatcctgctgccagacaagcatccccgctgtgataggcaacggggcagcggacacaccgcatcattttaccttttgacggccttgggtttgaagggttggaagcatggcagctcacacagctgtggagggggcagcggaaacctcggctctcaaatacagtcagagggtattttttcacacaagcctcatggtaaaattttccacactgagttaccacacagcgcttaacatctgtcttgctctctttacacacgaaacatgagtgaatcccttgctcactagtccaagcattctccagcaaaaagatccagccatcaaggattaccttgctgcgatctga

SEQ ID NO: 97715 - DNA, 696 bp, Homo Sapiens
catctgcttgggtccccggtctggctgagacatgctggacagagaggtggtgaaatgctgccttttgctgatggaattgtttatgtaactggcgatcaaaagagtgatttcaagaatcttgggttttgccatggcaaaagtaatttctctgttggtttgtcctttgaatgtgtattgttaatgactaccataaaatcatcttgatagcctccaaaggtcattagactcttgtacacatagctgactattaacctcatggagttgtattctaagaggcttaaaccatcctcatgtacagccagccacaagaaagtacttccaagtgatgatggagttatgggttttgcaagaaacaacttggcaccaaagaatggccacttcctggctactgtcaaataaatgcgcacacagtcagcagcactgtgtccccggagggccatccatctggttgaaagtcgctggcaaagctgccttaactgctcttcagaacagccatctctataccttttaggataaaatttctctatgacttgctttagagtttgattcactttgcactgattggtaacatgccctgctggagttgagaaaggtctttcaaaatctccaatctctacctgagataaaagagctgccatttctaatgcccggccgtaatggccgaattcccgggcatatgtccggtaccgtcgactg

SEQ ID NO: 97716 - DNA, 835 bp, Homo Sapiens
gggggagaaaatggttaaaaaggtgtcaagatttggaatacgtacaggcacatttaactgttccagtgatcccagatattgcaggagaagaggctgggtccgatccacactcattatgtctgttccacaaacaagtacttcaaaagggaaagtcatgcttaaagaatacagtggacgcaagattgaagtagagcacatttttaaatggataactgctcatgcagcttctcggatcaaaaccatttataatgctgaacacttgaaagaagaatggaataaaagtgatcagtattggttaaaaatatacctatttgcaaaccttgaccagcctccagctttcttctctgcactaagtataaagtttactggaagagttgagtttatttttgttaatgtagaaaattgggacaacaagagttatatgacagatattggcatatataatatgccatcatacatacttagaactcctgaaggaatttacaggtatggaaaccacacaggcgaatttatatcccttcaggccatggattcatttttgcgctcattacaacccgaggtaaatgatctgtttgttttgagcttggttctagttaatcttatggcttggatggacttatttattacacaaggagctaccataaagcgatttgtggttctcataagcactttaaggacatataattctcctattaattatttccctgcctacctgtgttgggcctttttacagctacctaacctagaatagctttaatgaatatagcttaaaatggttgagatattcccatacaacccccctggctttcatgggaagggccaaactggaatggtt

SEQ ID NO: 97717 - DNA, 829 bp, Homo Sapiens
ggggcaggtggattcttgggcatttgctattaacttccttccaaaatgtcaccattcctgtatctggttctcttggtacttgggcttcatgctacaatccactgtgcatcacctgaaggcaaagtaacagcctgccattcatcccaaccaaatgccactctctacaagatgtcatccattaatgctgactttgcattcaatctgtaccggaggttcactgtggagaccccagataagaacatcttcttttcccctgtgagcatttctgcagctttggttatgctttcctttggggcctgctgcagcacccaaactgagattgtggagaccttggggttcaacctcacagacactccaatggtagagatccagcatggcttccagcatctgatctgttcactgaattttccaaagaaggaactggaattgcagataggaaatgccctcttcattggcaagcatctgaaaccactggcaaagttcttgaatgatgtcaagaccctctatgagactgaagtcttttctaccgacttctccaacatttctgcagccaagcaggagattaacagtcatgtggagatgcaaaccaagggaaagttgtgggtctaattcaagacctcaagccaacaccatcatggtcttagtgaactatattcactttaaagcccagtgggcaaatcctttttgatccatcccaagacagaagacaggttccagcttcttaatagacaagaccaccactggtccaagtgcccatggatggcaccagatggaacaatactatcaccctaatggaaaatggaaatggaactggcccagtttctgcaaa

SEQ ID NO: 97718 - DNA, 833 bp, Homo Sapiens
  misc_feature (153)..(153): n is a, c, g, or t
caggactcaaatttcgccgtgcagcccacgggtaccaactagaagcgcctttctatgggcgtcggtcttcgttataaagctgtggtcggggcctccatttcattgaagccgacagcgctcttatccactcggtccttcgggattccatacggngccaccaaaagccctttggcataatctctctgggactcgggtttcttccgtctctcccttgtagtcatatcccagagctgcttggtcccatgttatccttctccacccccgtaccggccaccaaagccacgagagtaatctttctgagatgtgtgcttctccacttctcctttataatcaaagccgactgctgacttgtctgccctgtccctctcaactccgtacttgcccccaaagcctttggcagcatccgtctgagaagagtgcttctccacctcggcaacatactcatggcccactgcactcttgtccattcggtctctttctactccaaaccgacctccatagccatgggatgctttgggccctgactccatctctttcttcctgagaacatcatgctcctctgatactttgttcctcagctggtggatgttgatgtgttctgtgcgtccagacccctcgatggtcttggctccccatcgttgctccttttcagagatgtcattcacaaagtcaggatctgtgtcccaatcatcaccctgggtctccacggaaacagacacatcatggcccactacagacttccacatctccacctgtgcaagcctctgttctaagcgcccggctcctcgcgtccacaccgactccctctctggctgctgccacttcggagtccc

SEQ ID NO: 97719 - DNA, 722 bp, Homo Sapiens
  misc_feature (379)..(625): n is a, c, g, or t
cagtcgacggtaccggacatatgcccgggaattcggccattacggccgggaagagcggcatactttgaagagcaatatgtaacctgatttcttggcctcggggaagctccggcgagtattacttagtctgtatctaggcctgccctcatgaaaaccaacttaatgcctagaatataaataattaataccatctcgatgtggtgtttgctgtagagtgaaattcctgccttgtggaaatctccatctcagtggttgatctttagatctagtgtctgtgtagtagacccaataccagatatagaccctgggtcttctttaggaatgatgttttgactggataatgtgttttttgtagtagtttgagagggagtcttgcccnnnnnnnnnnnnnnnnnnnnnnnnnnnnnnnnnnnnnnnnnnnnnnnnnnnnnnnnnnnnnnnnnnnnnnnnnnnnnnnnnnnnnnnnnnnnnnnnnnnnnnnnnnnnnnnnnnnnnnnnnnnnnnnnnnnnnnnnnnnnnnnnnnnnnnnnnnnnnnnnnnnnnnnnnnnnnnnnnnnnnnnnnnnnnnnnnnnnnnnnnnnnnnnnnnnnnnnnnnnnnnnnnnnnnnnnnnnnnnnnnnnnnnnggtgtgagccacacgttcagcctagataatggttgctatgaaatctgattacatttaggagtctaagcagagcttggtaggtagcctatcctataaa

SEQ ID NO: 97720 - DNA, 1050 bp, Homo Sapiens
  misc_feature (353)..(353): n is a, c, g, or t
gccgggttgtaccctcccccaggaatcgcgcctcgggcccccgagggttacccccggaccagtcctaaagtggcctagcctttgggctttacccgccttaacggtgccggtcgccccttgcgtgtcccgccaccttgcatgaaggaccaccaccttgcttgatcctcactgacttattaggcccacctcacatgtagctgaaggtcccagccacacctctcccagtgtcagggagaacagtctcaggaatgtctttgctctgaaggtcacttgcccctcttgctggcggcccttcctggagggcaacttcccctgccccccgaagagccagggctcgaggccgaggccatgcngatgttgatctgtccctcctggatttcctgccgggtctcggcaggcagatggttgatcttctgctgtgtctccaggtagaacatgacgtcacgcagctgctcctggatctcggtgatctgcagatctttttggtcacaggtctccttcagcaccctctcctcctcttttagcttgttctgcaggaggacttggttggctcgcaaacacttgttcatttcctgctcctctttgagctcgttggtgagtttggccacttttgtgtttagctgagtgcactttctttccacagactgcttttcttttaggagatcatttagtttgtgctctagattatcacacttctcaattgtttctttaaacttggtcttcatgttgttaatttcctctgctgtgtccttctctatccgaactatcttgttttcccagtagattcgctgagattccagctggcttgttagtaaatatgaatactctaactgtaaggcatctattttctcttcctggcaagtatccccctcacattcatactgtactatttttccatctgttttacttgcaaccagtcgatgaacatagttatctccagcatagtcccagactcgatggttggtaagctgcatggcatacgtgtgctgcgtttcctcaaaagtgcttataagcatgtcgactgacataccgtccacatcctatgtggcc

SEQ ID NO: 97721 - DNA, 425 bp, Homo Sapiens
  misc_feature (415)..(415): n is a, c, g, or t
cacgaggggcaggggcactagagtataacaaaatgttttagaacaagttttgatgtgtttgccattctgatttattaaatttaaggcatgtgaaatatgagacgaggtgtgtctcatgtctgtatttgaagcctgcattgacattattcatttcctgtgtttaaggagctggaatatcagaagtctcagcccccacagcccggagataagtttgtgtctgttgtcagccagttcatcacagtagccagcttcagcttctctgatgttgaagaccttctagcagaagctaaagacctgtttactaaagcagtgaagcactttggggaagaggctggcaaaatacaaccagatgagttctttggcatttttgatcaatttcttcaagctgtgtcagaagccaaacaagaaaaacganaaatatgaga

SEQ ID NO: 97722 - DNA, 1039 bp, Homo Sapiens
  misc_feature (42)..(73): n is a, c, g, or t
  misc_feature (77)..(111): n is a, c, g, or t
aagacttgatgatatataggcgctacctgtagtagcgaagannnnnnnnnnnnnnnnnnnnnnnnnnnnnnnnccgnnnnnnnnnnnnnnnnnnnnnnnnnnnnnnnnnnncagtcgacggtaccggacatatgcccgggaattcggccattacggtccgggggggacccgcgaggagtcgcgcggaggacggaggccacgatacctgcgtggctggggctgcgggctccggggtcaccaccctgggcgacccggaggtggcgcctccgccggccgcagctggagaggagcgtgtccccaagccgggggagcaggacttgagcaggcacgcggggtcaccgccgggcagcgtggaggagccatctcctggaggagaaaactcacctggtggcggaggctccccttgtttgtcctcccggagcctggcgtggggttcttctgcgggaagagagagtgcgcgcggagatagcagtgtggaaacacgcgaggagtcggagggcacgggcggccagcgctcagcctgcgccatgggtggtcccgggaccaagagcggggagcctttgtgtcctccgttactgtgtaatcaggacaaagaaaccttgactctgctcattcaggtgcctcggatccagccgcaaagtcttcaaggagatttgaatcccctctggtacaaattacgcttctccgcacaagacttagtttattccttctttttgcaatttgctccagagaataaattgagtaccacagaacctgtgattagcatttcttcaaacaatgcagtgatagaactggcaaaatctccagagagccatggacattggcagagagtggtactcatggtgtaaacaacgattcttaggacgcacaggtaatatggcaatgaagaaaatgttaatgaggttcttgcaagcaggtcctgagctctccaatcaaacagtctatgtccttgaccccaacataattgaagttcttccaggtaactgatactcaagatccaattactggcaagttgcaaggatgttgtacttcatgatcg

SEQ ID NO: 97723 - DNA, 839 bp, Homo Sapiens
  misc_feature (32)..(32): n is a, c, g, or t
  misc_feature (581)..(581): n is a, c, g, or t
  misc_feature (736)..(770): n is a, c, g, or t
aatgaagcaagcagtataccattcagtaatgntgacagataatggtgctccgtggctacatacagaaatcaaggaagtacaactagatctcaggactaaaatagacacgacatccacaccacaccgtcatacaacatgtcagtgtctcttgtttttagcttgtttgttttcaaatacggccaacagttaaggggcattaacccttaagatgtgactttccactggaaaatatcattgctcacaatgaagtatcctggcaattgctgcctttttaaattcttgttcgtttttgacaatagatactgtgactcttctacaacctttaattttggaaaaactcaaatgtgaaagttgtccctcaaacactctgttatcaagagcacagggccaaaaacagcaggttctttgaaacctccatttaaccggtaatacattcaggacatctaagtagctgtgctcgggtacaaccctgcagggaccaggctatgaacttaagtgaataacacaggcctgggaagcgaaaaaatatatgaactgctacagcagtactgtcctgggctaatgaaggctcagtatgaagnagatctccaaaaattcttcaagagaagctaggaaaactggattaatacgtgaaaaattctgatctgtaaaaactagcaaagagtccaagattttaaacaacggacccggccgtaatggccgaattcccgggcatatgtccggtaccgtcgactgnnnnnnnnnnnnnnnnnnnnnnnnnnnnnnnnnnncgccgcttcctcgctcactactcctgcgctcgtcttcgctgctaactaggctatatgatatcaagttcg

SEQ ID NO: 97724 - DNA, 1025 bp, Homo Sapiens
  misc_feature (578)..(579): n is a, c, g, or t
ggaacccgtctcgatagagcccaataccttctggatacttaaaatatctgggccattttgcaaggttaaaccccccaagttaatacccacagggtgccctgtgtgttctttgctggtttcttctttgcctagtcgctacagcttaccaggtaaacactttaggaactgcttttgtatgcccagggtctccaaggactacctccagggttccatgatttgctaggagaatttcacaagactcagcatatcatcacacagctatgatttagttacagcaaaagcatatgaagcaaaacagcaaagagaaaaggtacagaggcaaagtctgggggaaaccaggtataagcttccagagtcctctttaacagtggagtcacacatatctgttgtttcatgccaccagcaactgaattgtgacaacatgtgagataatgttgtttaccagggaaacttgttagagattacagtgcccagggtcttttactggggggctgtgtcacgtaggtaccattcgtacgcgtaccattgtacctagaatgtcttagagctcccatggatagataaccagtgtgtttgcnnagcacaatagccacagtgattagcgtacccactgtactgagctccttatgtcaggtgaagtggagcacctcctgatgtaaggggtgttaaactagtgtcccgccaaagtctcaagctgcttggaaactttacacttgacacttgtaaaagtgcttatgagacctcttaaaagtaattaggtaaggagggctttgccctcacttaatgaattagtgctgctatcttgggagtgggctcatgataaaaggactaagtttagaccacatatatctttctcatgctcacttgaccatgtggtgccttctgccatggcaagaccctcactagatgctggcaccatgttcttggactgcctagcatccacacctgtcaaccaaataaacttctgttcattatcaaatacttagtgttgtgtaattctgttagtgacagcagtacagactaag

SEQ ID NO: 97725 - DNA, 773 bp, Homo Sapiens
cagtcgacggtaccggacatatgcccgggaattcggccattacggccggggagtttcgtgggaggcctggcatccccgagagggaggggaaaggtaaccactcctttgtggaggtcgccagggtcattgtcgtggatttgcacagtcggctgggcggtgcaatggcggaaagaaaaggaacagccaaagtggactttttgaagaagattgagaaagaaatccaacagaaatgggatactgagagagtgtttgaggtcaatgcatctaatttagagaaacagaccagcaagggcaagtattttgtaaccttcccatatccatatatgaatggacgccttcatttgggacacacgttttctttatccaaatgtgagtttgctgtagggtaccagcgattgaaaggaaaatgttgtctgtttccctttggcctgcactgtactggaatgcctattaaggcatgtgctgataagttgaaaagagaaatagagctgtatggttgcccccctgattttccagatgaagaagaggaagaggaagaaaccaggtgttaaaaccagaagatataataattaaggataaagctaaaggaaaacacagagtaaagctgatgtaaagctgcgatcttctaaataccaggtgggggcattatgaaattcccttggctgtctgatgaagagatagtaaaaatttttctgaaggcagaaacatgtgggttgattaattttccggcaaggggtattcggattttacacgaatgggtttgaacgttgacg

SEQ ID NO: 97726 - DNA, 525 bp, Homo Sapiens
gcttgagtaaggtgccaggtacctctgaagcctgaaaacacaggcaataaaattcacctatttatcttctttaccaaagagaaagcatttctgaatactatctatagtgctaaactaatgtgaactgactatcattgcgataaaagtttttccttatgatgacaataaagaatgttgctgaaagactttaatcttgagagagcagaggtaatgtgatgaatgtaatttgctcccagagcctctagaaaataaagcagtgtgcaaaatacatatggcattattattccagctaggttttttgcgaaaataaggttccaatgaatgaagaaaacaaatttgatgcgctaggttccttaacttgctattggacacatgggtatttcaaaaaatccaccgtgcctacatacttgttaaagtaccaaaaagcactgatactgaaacacattctttcatgggtacttaacgattacagattaacgtggcaatcagaatacaaaaatccctaacttccggtccgtaccagcc

SEQ ID NO: 97727 - DNA, 1258 bp, Homo Sapiens
  misc_feature (83)..(117): n is a, c, g, or t
aaaagactgtatagatcactatagggcgctagctttagtagccgaacgacgagcgcaggagtcagtgagcgaggaagcggcgnnnnnnnnnnnnnnnnnnnnnnnnnnnnnnnnnnncagtcgacggtaccggacatatgcccgggaattcggccattacggccgggggacggcggaagttccgggagtgccaagtacccgcgtgcatacggctgccggcatggcacattacaacttcaagaaaattacggtggtgccgtccgccaaggacttcatagacctcacgttgtcgaagactcaacgaaagactccaaccgttattcataaacattaccaaatacatcgcattagacatttttacatgagaaaagtcaaatttactcaacagaattaccatgatagactttcacaaattctaacagatttccccaaattggatgatattcatccgttctatgctgatttgatgaatattctctacgacaaggatcattacaagttggctctggggcaaataaatattgccaaaaatttagtggacaatgttgctaaagattatgtgcgactgatgaagtatggcgactctctctaccgctgcaaacagctgaagcgtgcggccctgggacggatgtgcacagtgatcaagaggcagaagcagagtttggagtatttggagcaagtgcgtcagcatttatcccgtttgccaaccattgatccgaataccaggaccctgcttttgtgtgggtacccaaatgttgggaagtccagcttcatcaacaaggtgacgagagcagacgtggatgtccagccctatgcgttcacaaccaagtctctgtttgttgggcacatggattataagtatctacgttggcaggttgtaaacactcctgggatcctggaccaccctctggaggataggaacacccatcgagatgcaggccatcactgccctggcccacctccgtgctgcagtcctggatgtgatggatttgtctgagcagtgtggggcatgggctgaaggacgcagctagaactcttccagaacatcagaacttctcttcatcaacaagccctctcatagtgggagccaacaaatggtgatgtgaagagaatagctgaactttctgaagatgatcagaaaatatttacagatttgcagtctgaaggattccctgtaatagagaccagcaccctgactgaggaaggtgttattaaagttaaaacagaggcttgcgataggcttttggctcatcgagtg

SEQ ID NO: 97728 - DNA, 821 bp, Homo Sapiens
  misc_feature (515)..(542): n is a, c, g, or t
cagtcgacggtaccggacatatgcccgggaattcggccattacggccgggctatgcagctttagtcatttgttttgtctaagtctgtattttatgtgttgtcttcttaagatctataattttggcatttatgtcatttgtgacatagtctgaaaatagagacattgttggcctttaaaatctcagaaatgaatgacttaatttagtgtcctgaaagagcttttaaaagaggattttgtggcaatgtttctcttactacgtactcacaggtttgcaaatggcgaacaaaagtttacatttcagtttaggggcatatctaagctatgctattccctttagaaaattagcctccaaaatcttttgtttcaaaatattatattatttcataaataatttcaagcaaatacagacatccacaatgtagaacatgagagaccccctccctcaatttccacctcccaagggaagtttatgtatttttctaggcccttttctatgtctttacatctctgtctnnnnnnnnnnnnnnnnnnnnnnnnnnnngttatttttaataaaataggatttataccacacacatcctgtcacttgctttttgcttaagagtatatctaagagaatctttgtgtcagtgaagctgaagctacctcattcttttaactggcttgcgtggcgttccatttgagtgtctgtcatcatgtgtttaagccgagtggatggatagtctgctggtaccaggtaatggtcttacaaccacttgctgcagccagatcctggcacagatcctctgattactggactaaaatcctggaaatccgcgag

SEQ ID NO: 97729 - DNA, 1040 bp, Homo Sapiens
  misc_feature (351)..(351): n is a, c, g, or t
  misc_feature (360)..(360): n is a, c, g, or t
  misc_feature (379)..(379): n is a, c, g, or t
  misc_feature (960)..(960): n is a, c, g, or t
cagtcgacggtaccggacatatgcccgggaattcggccattacggccggggtatattgatctggaattgtaatgtaaaaagcaatgcaaacttaggcgagtacttcttgaaatgtctatttaagctgctttaagttaatagaaaagattaaagcaaaatattcatttttactttttcttatttttaaaattaggctgaatgtacttcatgtgatttgtcaaccatagtttatcagagattatggacttaattgattggtatattagtgacatcaacttgacacaagattagacaaaaaattccttacaaaaatactgtgtaactatttctcaaacttgtgggatttttcanaaagctcangtatatgaatcatcatacntgtttgacaattgcttaatgacagagtaagtaacactaatattggtcattgatcttcgttcatgaattagtctacagaaaaaaaatgttctgtaaaattagtctgttgaaaatgttttccaaacaatgttactttgaaaattgagtttatgtttgacctaaatgggctaaaattacattagataaactaaaattctgtccgtgtaactataaattttgtgaatgcattttcctggtgtttgaaaaagaagggggggagaattccaggtgccttaatataaagtttgaagcttcatccaccaaagttaaatagagctatttaaaaatgcactttatttgtactctgtgtggcttttggtttagaaatttgttcaaattatagcagaatttaagccaaaaataaaacagacatgtattttttgtttcgctgaattggatgaaaaccattgcattccttgtacacctggatttgaaaatgctgtacaatatggtcccaattttggaattgaattctcctgtaaaatataaaaatggtaaattaaaaatatttcccccacaacaccacaacaccccacaccatanattaaaacttggtgggggccggcctctggggcccccccggaaaaaggtttttttccaaaaccgcttttcggtttgggcgc

SEQ ID NO: 97730 - DNA, 864 bp, Homo Sapiens
  misc_feature (46)..(80): n is a, c, g, or t
  misc_feature (310)..(356): n is a, c, g, or t
aattaaccggacgagcgcaggagtcggtgagcgaggaagcggccgnnnnnnnnnnnnnnnnnnnnnnnnnnnnnnnnnnncagtcgacggtaccggacatatgcccgggaattcggccattacggccggggacatcatctttaaggaccattttctaccttccaaaatgggtcacggccaaatgttggcaggaaatgattcaaaggttttagccaggtcttccaggcccattcctgaaaggtaatgtaagaaacagaaatagattagctacaatgtttgtaccttcctagacactgagtcatcacaaatnnnnnnnnnnnnnnnnnnnnnnnnnnnnnnnnnnnnnnnnnnnnnnnccataagctgttggctaaggaacaaggacttcccttatggaatttgaggcattgtgcaatctggttgcccagagcgacactcagatactagccaactaagtgctatatattagcagcatgacttgtctaacaacaagcaaaaaataggtttcagaggaaatgaaagcttccagaaaagttaaattctgacttcacctcactttctcctgttccttgcctatacacacacaaaatacgtacacacccaaaaaatactcctagggcagagggtacttcggtttcctcatttataaatcaataaagtacaactatgttccagaattgtacatttctacataaagataatcctaatgtatatgaattggtttgcctcgatacatgggtttcggggctatgcagagaactgtacttgccatctaaatgtcacccctgaagtttcaagatccctttttatatttacacaaaaatggagggtcattccagctccttgaagggcaggactttcttg

SEQ ID NO: 97731 - DNA, 929 bp, Homo Sapiens
  misc_feature (48)..(82): n is a, c, g, or t
aattaaccgaccgagcgcagcgaagtcagatgagcgaggaagcggcgnnnnnnnnnnnnnnnnnnnnnnnnnnnnnnnnnnncagtcgacggtaccggacatatgcccgggaattcggccattacggccgggtataacatgtgtcatgtcctttggaaacctggtcacctggtgaaaacccttgggattcttccctgggcatgactgatgacaatttccatttcatcagtttgttttgttttcctttttctttaaatcttggactttaaaccctacctgtgtgattcagtagggtttgagacttacgtgtgatactgacaggtaagcaacagtgctagcattctagattcctgcctttttttaaaaagaaattattctcattgctgtattatattggaaaagttttaaacaaccaagctaaagctatgtgaaagttgagctcaaagtagaggaaaagttactggtggtaccttgctgcctgctctgctggtagaattctgtgctccccgtgacacttagtacattaagaatgactacactgttcctcgtatgtgaaggaggcagtgctgactccgtgagtgtgagacacgtgctttgaactgcttttctattcatggagcactccatagtctcaaactgtcccccttatgaccaacagcacatttgtgaagaggttcgcagggataaggggtgcactttatagctatggaaacatgagattctcctctattggaagctaattagcccacaaaggtggtaaacctgtagattgggccttaattagcattgtactctaatcaaaggactctttctaaaccatatttatagctttcttaacctacacatagtctatacatagatgcatattttacccccagctggctagagatttatttgttggtaatgctgtatagatttgcgtttccttt

SEQ ID NO: 97732 - DNA, 1080 bp, Homo Sapiens
  misc_feature (88)..(122): n is a, c, g, or t
  misc_feature (790)..(790): n is a, c, g, or t
  misc_feature (809)..(809): n is a, c, g, or t
  misc_feature (818)..(922): n is a, c, g, or t
  misc_feature (969)..(969): n is a, c, g, or t
  misc_feature (1000)..(1000): n is a, c, g, or t
  misc_feature (1003)..(1003): n is a, c, g, or t
  misc_feature (1049)..(1049): n is a, c, g, or t
  misc_feature (1061)..(1061): n is a, c, g, or t
agcatctatcgactcactatagggcgctagcgtcgttgatagccgaacgacgagcgcagcgagtcagtgagcccgaggaagcggccgnnnnnnnnnnnnnnnnnnnnnnnnnnnnnnnnnnncagtcgacggtaccggacatatgcccgggaattcggccattacggccggggccggcccactgaagccgtggggacgcgcccagcggagctaatcagattacctggctggtgtttgcttgttctggagtgatcttctgactggaaaagaactatgtcatggatcaaggaaggagagctgtcactttgggagcggttctgtgccaacatcataaaggcaggcccaatgccgaaacacattgcattcataatggacgggaaccgtcgctatgccaagaagtgccaggtggagcggcaggaaggccactcacagggcttcaacaagctagctgagactctgcggtggtgtttgaacctgggcatcctagaggtgacagtctacgcattcagcattgagaacttcaaacgctccaagagtgaggtagacgggcttatggatctggcccggcagaagttcagccgcttgatggaacgaaaaggagaaactgcagaagcatggggtgtgtatccgggtcctgggcgatctgcacttgtttgcccttggatctccaggagctgattgcacaagctgtacaggccaccgaagaactacaacaaatgtttcctgaatgtctgttttgcatacacatcccgtcatgagatcagcaatgctgtgagagagatggcctggnggggtggagcaaggcctgntggatcccnnnnnnnnnnnnnnnnnnnnnnnnnnnnnnnnnnnnnnnnnnnnnnnnnnnnnnnnnnnnnnnnnnnnnnnnnnnnnnnnnnnnnnnnnnnnnnnnnnnnnnnnnaccatggccagccggatttcagggatttttcaaaaagaaaataattnaattatttggtcacataatggaaatcctaantantaaaaggtggaagagactttttgaagccattttaaatatttggggncccccctcaggngtaattaattttaggtacc

SEQ ID NO: 97733 - DNA, 738 bp, Homo Sapiens
  misc_feature (343)..(343): n is a, c, g, or t
  misc_feature (664)..(698): n is a, c, g, or t
ccggatgcactgcacagctgtcttggacttattacaggtccatagtctctcaatcacaaatgttgaaaccaaaaaatcccaaacccaattttttttccgctgaacttaatgccaaaagtaatttagcaacataagctgaccttgaaactgatggtaaagctatttacagtctcatttgatcccacttagatatattttgctgaaaagtaccaatgtagtaactagtggtattaataatatatgtaccatattatctaaaatttgaaatagcctgaatccaaagcacagcgtgggttaacatacataaatactagcactgaccactgaaaccctagtataacanaaccccagtaacaataagtccaccaagtgtctgcatgttggattctatataccatcctctaacaaagaaaccagggctctctggaggaggagtcgattccagggcagggacagggataatacaagagcctggtggtgctaggaaggaaggaagtgctcaaacaaaagccaggatggagaatgttgatggggcacaagaatccactgaaggattggccacagctggaagaactggagcacaaaataaatggtgataatattgatcataatccccggccgtaatggccgaattcccgggcatatgtccggtaccgtcgactgnnnnnnnnnnnnnnnnnnnnnnnnnnnnnnnnnnncggccgcttcctcgctcacctgacttcgctgcgctcggtc

SEQ ID NO: 97734 - DNA, 343 bp, Homo Sapiens
cagtcgacggtaccggacatatgcccgggaattcggccattacggccggggaatggaagtggctggatgggacatctccagactacaaaaattggaaagctggacagccggataactggggtcatggccatgggccaggagaagactgtgctgggttgatttatgctgggcagtggaacgatttccaatgtgaagacgtcaataacttcatttgcgaaaaagacagggagacagtactgtcatctgcattataacggactgtgatgggatcacatgagcaaattttcagctctcaaaggcaaaggacactcctttctaattgcatcaccttctcatcagattg

SEQ ID NO: 97735 - DNA, 1005 bp, Homo Sapiens
ggcctgaggtggcgaattcggcacgaggggcgcgagagagcctagaagccatgtagccgcgaatcccgcagccccagtacacctccctccgtgcctccccgccttttctgcagagctccgccctggagtgaaggaggagccgtcacctggagctccgaaaaaagcagaagaaggcgctttttatttagccagtgtgaccccgccagggccttctcggttgggtgagcactctctctgaccaggccatgaaaagaaaaatctggtggcgatgcctccccacattgtcacgggactctgactttgcctttgtcgtcaaagtttgcaaaactttgggggaacctgaaaggggagtgccccctggaacgggccacggcttgtctgtggcttaagggcttttggaagggcggagagagggaaacggcgtcctaggggcctgcttcagggccacccacgggccctcccccaacctctctctgatccaacttgtttttccagcctagttggaaacttgtggatgctgtgacctcaagaagacttggcattttatttggaagatagacatctatttgcaactgtcctgagcccctattttcctcccacctttcttggggaaacttgtttttaaggggtgccactgtttttgtaacatgttgctcctagctcttagcattcatggtactgttggaaccgtccagtgggttcactttgtctgctaaatagagcccgatttatccaagacggggattacaatggaagaaaagagtaattccacgcaaaagccggctttgcagataaaactctgcaaagacaatgtctagcacttatatcctcagtaactcctgtcaagggttattgttgcctggttcatcattgcaatccctgactacaaaggggaatggccctttctattgtttttgccaaaaatttcctgaaaagaaaacaaaggccctttctgaaccatgggattggcgctttaaaagaagaatcaatcccattccccatttg

SEQ ID NO: 97736 - DNA, 385 bp, Homo Sapiens
gtggcccgtccaactggtggaatcgtagatatggccagtagtaccttccaaggcattcagagggcagcagaatcaactgaggaagtatctagcctccgtccccctcgcctgatccatgaagatggcatcattcgtccttatgacagacaggaatctgagggctctgacttacttgagcaagaactggaaatacaggaataaatgtttcctaaactactacttgatttcatccttaaaaatcaaaacaaactgtggtgttaattgactgtgtgtgaattccattgtcaattttaatgaaattttctttaaaactctcacctccatctgaacttttcatagtagtgggattgactacaaataaaaacttgtggtattcctggtaaaa

SEQ ID NO: 97737 - DNA, 843 bp, Homo Sapiens
  misc_feature (42)..(76): n is a, c, g, or t
aacgaccgagcgcagctgagtagtgagcgaggaagcggccgnnnnnnnnnnnnnnnnnnnnnnnnnnnnnnnnnnncagtcgacggtaccggacatatgcccgggaattcggccattacggccggggaaaaccaccaccttagatcatctaggttttacttttaggataagacacttgagggaaaggctgtgaaactgaacctctgttagaagcaacacacagtatcactgcaaaaagactaaaagaaataggtgattcggaaagaggaggcccaggattaaaatatgtttccaagaaagtcaaatcttacaggagactcttgacttcacatctgctgatccctttacccgataggacctagagcagccattataaatctctgtacctgcttgctgcttttctacctcattgttagccacacccagtttgaaacagatgaggtatgctatttcataactagtacatcttttaataagcatttcttattgtgattaaatatgcatatcgtaaaattcaccactttaaccagttttaagtgttcaattctgtggcattaagtatattcatactattgtgcaaccaccaccaccatccgtctacagaactcttcatcttcccaaactgaaattatgtattcattaaacaataaccacccattacctcctctctcctcagcctctggtaaccagcattcagtctctatgcattgactactctagatatctaaatggattcattcttattttcatttaccataatgtcttcaaagttcattcatgtgtgtagcatgtattagaatttctttcctcttaaaggccaaatatgccgtatattgtaaatac

SEQ ID NO: 97738 - DNA, 1005 bp, Homo Sapiens
tcattcagtcccagaaacgagccgcatatctccgtggggagactgataatttaaaaggttggtagtgtcatgaaacattcccagtcttctatcacgcaaccctttccttccacgctctgcccactggagaccacttacatcccgagagcggagcgcggcagctgaagtcaggaaaccatggcatcacattaggcaggagccaactgcagactttaatactccggtgcaacatgtggatgcggcagagaaatgaccgtgtccagacaagccggggcagcttcataaactggttcatctgctccctgtgcgtcccgcgggtgcgtaagctctggagcagcccgcgtccaaggacccggagaaaccttctgctgggcactgcgtgtgccatctacttgggcttcctggtgagccaggtggggagggcctctctccagcatggacaggcggctgagaaggggccacatcgcagccgcgacaccgccgagccatccttccctgagatacccctggatggtaccctggcccctccagagtcccagggcaatgggtccactctgcagcccaatgtggtgtacataaccctacgctccaaagcgcagcaagccagccaatatccgtggcaccgtgaagcccaagcgcaggaaaaagcatgcagtggcatcggctgacccaggacaggaggcttaggtcggaccatcccttcacgccgcaggaagcgggcaagggaaggctgatgctgtagcacctgggtacgctcagggagcaaacctggttaagaatggagagcgaccctggaggttggtgcgggtccgggagtgcgagccggggggccagaattcctgcagcccagcctccagggagagcaacattaggatctacagcgagagcgccccctcctggggtgagcaagatgactccgaagaatgggactctggcggacagcgcagggcggggctccggcctgggtcctcaaggaaggggggcccgtggcggtactcgaagggg

SEQ ID NO: 97739 - DNA, 1784 bp, Homo Sapiens
  misc_feature (74)..(108): n is a, c, g, or t
aactaagtcactataggggctaggcgttatgcgaacgacgagcgcagcgagtcgagtgagcgaggaagcggcgnnnnnnnnnnnnnnnnnnnnnnnnnnnnnnnnnnncagtcgacggtaccggacatatgcccgggaattcggccattacggccggggttcacataaacagatggccctggagagtgaatttgtttcctgccagcttcaccaatggattgatctcatttttggctataaacagcaaggaccagaagctgtccgagccctcaatgtgttctattacttgacctatgaaggagctgtcaatctgaattcaataactgatcctgtgtcgagagaggctgttgaagctcaaatccgaagtttcggacagactccttctcaactactcatagagccccatcctcccagaggttctgccatgcacagtgagtccattgatgttcacagacacaagcccagcaggatgtcatcatggtcctcaagtttccctccaactcccctgttactcacgtggcagccaacacccagcctggtttggcaactcccgctgtgatcacagtcacttgctaaccaggttatttgcggtgaacaaatggcacaaccttcctgctcatcaaggtgcttgtacaagaccagacataccagctgccagtggaacatcgatcctctcatagccagcaatacaggaatgcacaggaggcaaatcactgaccttttagaccaaagtattcaagtgcattcccagtgctttgtcatcacttcagacaaccgctatattctcgtctgtggcttctgggataaaagtttcagagtctattctacagacacaggaagattgatccaagtggtgtttggccattgggatgtcgtcacttgccttgctcgttctgagtcatatattgggggaaattgctacattctctcagggtcacgtgatgcaactcttttgctgtggtattggaatggaaaatgcagtgggattggagataacccaggcagtgagactgctgctcctcgggccattttgaccggccatgactatgaggtcacatgtgctgcggtgtgtgcggagctaggcctggtgttgagtggttcacaagaaggaccatgtctcatacattccatgaatggagacttgttgaggaccttggagggtcctgaaaactgcctgaaaccaaaactcattcaggcttcaagagagggtcattgtgtcatattctatgaaaacggcctcttctgtacattcagtgtgaatggaaaactccaggccacgatggaaacagatgataacataagagccatccagctgagccgagatgggcagtacctgctcacaggaggagacagaggaattggtcgtggtccggcaggtgtcggacctcaagcagctctttgcctatccaggatgtgacgctggaatccgggccatggcgctgtcttacgaccagaggtgcatcatttctggcatggcttcaggaagcattgtgctattttacaacgactttaaccggtggcatcatgaataccaaacccgctactgatggtgacagctgtacatcaactctgccccctaggatgagcagaagtacctgggagcatcatttctcttctaccacatctgaatgtaacttaaatttgctcaaagaagcaaaatattttttaaagttattaataattgcctatttttgtagtctttgccttgactttttttggggggggattaagcaaagcagaaaacctggcttgctggggtttctggtaagtttttaaaaaaatct

SEQ ID NO: 97740 - DNA, 885 bp, Homo Sapiens
  misc_feature (450)..(510): n is a, c, g, or t
  misc_feature (586)..(587): n is a, c, g, or t
cagtcgacggtaccggacatatgcccgggaattcggccattacggccgggctctttttttgctatgatgattccaacttatcagagacctcccatttgccttttcattacggtgaaagcttgccctcatctactaaagtacaaaggaattctttggaagcagattattctagtcttatgctagagatgaatttgatcattttaatgtgtgatctttttgctctatcaggtataattgttttcctttcctttataatgggtaagttttctcacctttgagtaacagtaaagttcatttatatgtccatacctagaagaccagtgcaaatactttgagagcacctgggtctacaggacataattggcatctaaatcctcatttcttgctattagtaggaaaacagatatagtattgtaatacccttattctttttgaatcctaattactcannnnnnnnnnnnnnnnnnnnnnnnnnnnnnnnnnnnnnnnnnnnnnnnnnnnnnnnnnnnnaacaatcccaaccaacaatacatttgatttatttttttctgtctaacctgacaacctttttcttgtgcttcttgtnngtggttagttttggtgaacaggaatcatggtttaagatcactgttttcatacttgtttttacacttcacgtattttgaagtacatttatttactaagcatttgtgacttgaataatttcaccaaatgaatacatgtgggtagtttgtaatgagttcttctaattgttacactttgctgggtacttaacaataaatatgtaaaggtaaaagaaataattttctgtattctgccaatcttaattttatataataaatcatccatttttttcttaaaatagtatggattgactgtttctaa

SEQ ID NO: 97741 - DNA, 982 bp, Homo Sapiens
  misc_feature (52)..(83): n is a, c, g, or t
  misc_feature (87)..(121): n is a, c, g, or t
  misc_feature (225)..(286): n is a, c, g, or t
  misc_feature (517)..(517): n is a, c, g, or t
  misc_feature (707)..(749): n is a, c, g, or t
tagaatacgactcactcatatgggcgctagctcgctctgttatcgaatcgannnnnnnnnnnnnnnnnnnnnnnnnnnnnnnnccgnnnnnnnnnnnnnnnnnnnnnnnnnnnnnnnnnnncagtcgacggtaccggacatatgcccgggaattcggccattacggccgggggcttggctcttgacgtggacaaaattgataacagaaggggcaacggggcaaannnnnnnnnnnnnnnnnnnnnnnnnnnnnnnnnnnnnnnnnnnnnnnnnnnnnnnnnnnnnngggaagaagatcaaaacccaccatgccccaggtgactttcagcaattgtggatgcttaattctgtgttaacacctggaggcaacagattcagggaaaccagagtgtgtttgatgacatgttttcaacgaaggctgaattactccatactgtcattgctgttggttttcattgcagtagatgtttaggtttccatttcttcctccccttatcatttactaacgtaccatagngttgaccatacctcaaaagctgtactctcatggcaactgcatcgaatcttgagcaaatttcatggaaaactattgagcccactctttttcatgatcactgtacgctgtgtgtcacgagggcactaactcagagtgtcctttgactcccttaccagtattgtcacctggccaattcactagggtcacttannnnnnnnnnnnnnnnnnnnnnnnnnnnnnnnnnnnnnnnnnntactcttttccatatgttctatctggcccttgttctatccccaacataaaggcaactacaatactaaaattcactccataactgggtataaatacctatattactcttaataaaacaacttccttagtgtaagcatcatgaacatctaggcagagcctgatgagtgtactgattaccctgagatgcctcttaaagatcgggagtacatatacagaggacaaagaagtactgag

SEQ ID NO: 97742 - DNA, 1059 bp, Homo Sapiens
  misc_feature (43)..(81): n is a, c, g, or t
  misc_feature (85)..(119): n is a, c, g, or t
tagatgtatagactcactatagggcgctagctcgtcttttgtnnnnnnnnnnnnnnnnnnnnnnnnnnnnnnnnnnnnnnnccgnnnnnnnnnnnnnnnnnnnnnnnnnnnnnnnnnnncagtcgacggtaccggacatatgcccgggaattcggccattacggccggggcattcttaaataaaggtgacaccaggagttctttactgtcagcaaccaggaagttcaaaacatctgtttccttcatagttaccatgggggctaatggtaaccgaaactcaaagttaacggagccaaatttaataaaggactggcaacacatgcaatcaaaaggttgcttcttcttagaagaagatggtgaaatcattagtcatcagtacaggatgcaaatagctcagaggtccatggtttatctaacaattaagccattaaacctgagtcaagttgaaggaaaaccatccccttggttatccgttgatactgccttgtatattctcaaggacaaatgagagtcaagcaaatctacagcttgtgtgttttaccgaactacgagatagagaagtgtttggatggactggtgaactaggacctggaatttactggttaattccttccacaactggctgtaagctgaggaaaaaaataaaaccagtaacagatgaagcccaacttgtatatagagatgaaacaggggaattattccttacaaaggaatttaagtctactttatcagatatatttgaagtaattgatttagatggaaatggtcttcttagccttgaagaatataatttttttgaattgagaacaagtggtgagaaatgtgatgaagatgcttgggctgtctgcagagagaattttgatacaaagaggaatgaactaacaagacaaggatttatggatttgaatctaatggaagctaatgatcgagaaggagatccttgtgacctttgggtaactctacactctatgggctacaataaagctctggagttgacagaggcatgtccatttgtcattgatatctatgcagaaaaatgcaagccaaaaattaaagctg

SEQ ID NO: 97743 - DNA, 1231 bp, Homo Sapiens
  misc_feature (44)..(56): n is a, c, g, or t
  misc_feature (118)..(160): n is a, c, g, or t
  misc_feature (240)..(248): n is a, c, g, or t
  misc_feature (443)..(463): n is a, c, g, or t
tatggaaaaagggaaggatggtggcgctcgaatatagaacttannnnnnnnnnnnnttaaagcggcgcgggggtaaagggtggggagaggtaaatgtttgtaggacgccgggggaacnnnnnnnnnnnnnnnnnnnnnnnnnnnnnnnnnnnnnnnnnnntgtgacgggcgcgatgaagttacaaggggcgcagcggccgaagaacggtgggggtccgtggcggataaaaccgaggtccnnnnnnnnncgatagacaagctccgggagcaaggcacagcggggagagagggccacgggtagaaggcgccggccggcacgcgtgggcgccgcccgcggatcacggccaggggtgccttgggcccccggggcccgccttgaccctcgtgactcccctggggacaggagggcacggtggggactgcggctggggctgggccatggnnnnnnnnnnnnnnnnnnnnncttgtccgggcctcacctgactgcctcggcggcggaggcgcgatctcggaggcccaggacgcacatggtgatggccacgttcacgtcctgcacgtccagctcccgccgcagggagccgaagaagccgtccagcgcaaacttggccgccgagtagggagtggagaacgacgtgggcacgcggccgagcagcgaggacaccaccaccagggagcccttgctgtccgtcaggctgggcagcgcccgcgacgtcagttgcacgtagctcacaaagtttacctgcatgagccagcgagttgcctgggggctgcgggctcgcgtgccggccggggcgccgccgatgtggttcagcacgaggtagtccagcccgcctgggtcgaagttgtcatcccaataataggcgaagaacagggcccccagccctgtgaggagaagcaccttcatggtcctgtgtgggcccgctcaggcctcagtttcccccactgtccagcgggggtggggtcccgggctgggagccacgcgaacgcccccacggtcctctcttctcggccgcctcctgccgggtccccgaccgcaccccctcccgtagggcacgggtcacgtgactcgaagcccacctcctcccggggaggggccgggcctcggggacccagcgccggagcgtcgccgggcaacagtgcccgccaagtcttcgcctcccagccctcgtgccgaaaaagccacccaggctcgtacttagacctaaggaccgagcgggcgggggggcgagga

SEQ ID NO: 97744 - DNA, 1121 bp, Homo Sapiens
  misc_feature (719)..(728): n is a, c, g, or t
  misc_feature (799)..(799): n is a, c, g, or t
  misc_feature (1043)..(1053): n is a, c, g, or t
cagtcgacggtaccggacatatgcccgggaattcggccattacggccgggcaacatcatggtcaaaaaaactggccagctcttccacattgactttggacatattcttggaaatttcaaatctaagtttggcattaaacagggagcgagtgccttttattcttacctatgatttcatccatgtcattcaacaaggaaaaacaggaaatacagaaaagtttggccggttccgccagtgttgtgaggatgcatatctgattttacgacggcatgggaatctcttcatcactctctttgcgctgatgttgactgcagggcttcctgaactcacatcagtcaaagatatacagtatcttaaggactctcttgcattagggaagagtgaagaagaagcactcaaacagtttaagcaaaaatttgatgaggcgctcagggaaagctggactactaaagtgaactggatggcccacacagttcggaaagactacagatcttaacgatcagccttcgctcctaatgtatttgtctggcttcattttcattcttcatttttgaactttgcacctaaaattgaaacattgaccccgggttagaagatgtttattaaaggggaaatggaaaatccctgggaaacctccaggaggtttaaaatttaaaagaaaaccaggggccatttcccccccactggaaaccccctaaaatccctgcgagccacaattnnnnnnnnnnggattggaattttcccccccttctccgggcctttttcttttagacactgggcctcttccccaaacacacantctgtccttccactgggataaaaaacctggggccccaatgggggcaaataaaacccccgtgttctccccctggcttgcgaaagtttttgggcgcacccgcccccccggggggagatggccctacagcgtaaacgggggctcctgggtttgctccccccgcccccgttcggcggccgcgggcctgcgtttgctccgccacaataaatttttgcggcggaaaaactttgtcccccaccaaaaaaannnnnnnnnnntagaaaaaataacagttgccgctttcgatcagacaatgggggggcgcggggcagcgcgccaggaggtc

SEQ ID NO: 97745 - DNA, 1201 bp, Homo Sapiens
  misc_feature (81)..(115): n is a, c, g, or t
actgatcgactcactatagggcgctaggtcgtctatagccgaacgacgagcgcagcgagtagtgagcgaggaagcggccgnnnnnnnnnnnnnnnnnnnnnnnnnnnnnnnnnnncagtcgacggtaccggacatatgcccgggaattcggccattacggccgggggctctgcgcaagcgcgaccgaccgagcagctccgaaggagtccgaccgggaaacaaacattcacccagggtcaatgtcacgacttgggtctgcccgaggagccagtcagaaacgagtttacgtagatgagtgctaaggcccgcgttaagaaagtatgataggttggaggcgaagatattctcagctttgccatataatcaaatagctccggtcgcgtttgtgaccatctggtgtgctaacagtaacggagaaactgccatttgatatgtgcaccgatccgggtacagacgaagcttaagaatgggacccctgcgagaagtgtgtcttccctggtaggtaagacgtggagactactaagacatggcatgattgcaaggccagcgagctctcctgcggaagacccaggagagaacgctgtgcgttctccgttccctcacacaacgatgggagacgtatcgtcatggcatgcgctgtggttgaccaatggtgcttttaattcggcattgcacagggatagcatttggattaaacttccaattacgaaggggttttacatatgacccaggaagcttccacggccccagcccgacatccctgcctgaaagttcacaggatgttattccagtggtgccatcctggaccctattaatccctgcaatccacaaagggttcccatgaaccaaggcatcttacgttccacaacagtcactgggtcaacgcgttctgacacttaacatcactactcttttagaaggtaacacacaagacctcttgaaaggaccgggtggtccctttcatccaagactcacagggcgaacctggagcgtgccatcacctttggccaagttgttaggcgtgcgcccttatcaactcattctgtgggccacaccacagcaccgagacccttttggacgggttccagatttagtccttcaatcggatcgtattcaagccatcctctctgacaagaagtctctccctggacagcgtccatccacagcgcgcgtaaaagccaggttctagattctactacga

SEQ ID NO: 97746 - DNA, 722 bp, Homo Sapiens
  misc_feature (44)..(74): n is a, c, g, or t
ccgaacgacgagcgcagcgagttcagtgagcgaggaagcggcgnnnnnnnnnnnnnnnnnnnnnnnnnnnnnnngttatcagtcgacggtaccggacatatgcccgggaattcggccattacggccggggggtctttctgctctccaagtaatcgggtgatgtatgagccgatagtacaccttgttggcagaggcgaaaatcattcaggcaatgcaaatattgtcacgggaacaaatgttttccctgttaataaaaattaatgaattctacccaggagctagttaaggaagctgtggcgaaggaaatccaaacacaaataacttcttactgttaaaaatcacttatgtattttttctagatatagaaaaagaccatcattgctgcatatttccataagagatgaaataatgacaaactatagaaatgcactatgttgtttttaaattatctttttcaggttcttgagtttatttaaaattgtgaactttggcatcttatttgttttaaccttggttaaactacaggcttcccatactgtactagcctaatgaatacattcctcttttcatagcctagttaggaccaagaattatagtggtcagggtttataactataaaatgatgtaatgaagtttaaatttgagaaactccttgtaacacatcataaaagattgatggaaacagactggagattaataagtggttcaaatagttctgagag

SEQ ID NO: 97747 - DNA, 1054 bp, Homo Sapiens
gggaccgcccatcagctgagaattgcagctgagggctccggggtaggtgggtgacggcggtcggaggtgtaggagggagccgtggaggtccaggtgactgcttagaaaactgcacagcatctgatgaaattagcgaataagaacatcaaccatgtcttacactccaggagttggtggtgaccccgcccagttggcccagaggatctcttctaacatccagaagatcacacagtgttctgtggaaatacaaagaactctgaatcaacttggaacacctcaagattcacctgaattgaggcaacagttgcaacagaagcagcagtatactaaccagcttgccaaagaaacagataagtacattaaagagtttggatctctgcccaccacccccagtgaacagcgtcaaaggaaaatacagaaggatcgcttagtggcagagttcacaacatcactgacaaacttccagaaggtccagaggcaggctgctgagcgagagaaagagtttgttgctcgagtaagagccagttccagagtgtctggcagttttcctgaggacagctcaaaagaaaggaatcttgtatcctgggaaagccaaactcaacctcaagtgcaggtgcaggatgaagaaattacagaggatgacctccgtcttattcatgagagagaatcttctatcaggcaacttgaagctgatattatggatattaatgaaatatttaaagatttgggaatgatgattcatgaacaaggagatgtaatagatagcatagaagccaatgtggaaaaatgcagagggtgcacgttcaaggcaagcaaatcagcagctgtcaagggcagcagattatcagcgcaaaatccagaaaaaccctgtgcatcatcattcttatccttgtcattggagttgcgattatcagtctcatcatatggggattgaaccactgaagttataaaggagcacactgtcgcactacattgtctaaattatgtaggaagattcctgtaatcatgtttttttaattattattttaaagctattgtataaaggatggttccc

SEQ ID NO: 97748 - DNA, 762 bp, Homo Sapiens
gggagcttgtgcagcgtcggatccttgagtgataaagaagtagagactcccgagaaaaagcagaatgaccagcgaaatcggaaaagaaaagctgaaccatatgaaactagccaagcgacgagtagaacagcccctctatggtttagatggcagtgctgcaaaggaggcaacagaggagcagtctgctctgccaatcctcacgtcagtgatgctagcaaaacctcggcttgacacagagcagctggcgtaaaggagagctggcctctgcttcacttttgtttcagctcagcaaaacagtccctcatctacgggatctggcaacacagagcattcctgcagctcccaaaaacagatctccatccagcacagacagacccagtccaacctcacaatagaaaaaatatctgcactagagaacagtaagaattctgacctagataagagggagggaagaatagatgatttattaagagccaactgtgatttgagacggcagattgatgaacagcaaaagatgctagagaaatacaaggaacgatttaatagatgtgtgacaatgagcaagaaactccttatagaaaagtcaaaacaagagaagatgggcgtgtagagataagagcatgcaagaccgctttgagactgggcccactttactactgtcccgacacggagccctcctttactgaaccgtgggacagaagggttatgctttttccaaatcctcattccagcaaccgggaaaggataaatttcccccaaggg

SEQ ID NO: 97749 - DNA, 844 bp, Homo Sapiens
  misc_feature (212)..(440): n is a, c, g, or t
  misc_feature (444)..(725): n is a, c, g, or t
  misc_feature (766)..(768): n is a, c, g, or t
  misc_feature (770)..(773): n is a, c, g, or t
  misc_feature (777)..(778): n is a, c, g, or t
  misc_feature (781)..(782): n is a, c, g, or t
  misc_feature (784)..(784): n is a, c, g, or t
  misc_feature (790)..(791): n is a, c, g, or t
  misc_feature (793)..(793): n is a, c, g, or t
  misc_feature (795)..(798): n is a, c, g, or t
ctcagtcgacggtaccggacatatgcccgggaattcggccattacggccggggactaatgaccgaagcttcaagactttgacatgtgtgaaaacatgaaatgacccttggctcttattgttcttgctggtgtggtatgttcacggctgaaaagatggtcagaaggggaaaggaggaagtgagaagaaagaaacagggaaatgacagagtgtnnnnnnnnnnnnnnnnnnnnnnnnnnnnnnnnnnnnnnnnnnnnnnnnnnnnnnnnnnnnnnnnnnnnnnnnnnnnnnnnnnnnnnnnnnnnnnnnnnnnnnnnnnnnnnnnnnnnnnnnnnnnnnnnnnnnnnnnnnnnnnnnnnnnnnnnnnnnnnnnnnnnnnnnnnnnnnnnnnnnnnnnnnnnnnnnnnnnnnnnnnnnnnnnnnnnnnnnnnnnnnnnnnnnncccnnnnnnnnnnnnnnnnnnnnnnnnnnnnnnnnnnnnnnnnnnnnnnnnnnnnnnnnnnnnnnnnnnnnnnnnnnnnnnnnnnnnnnnnnnnnnnnnnnnnnnnnnnnnnnnnnnnnnnnnnnnnnnnnnnnnnnnnnnnnnnnnnnnnnnnnnnnnnnnnnnnnnnnnnnnnnnnnnnnnnnnnnnnnnnnnnnnnnnnnnnnnnnnnnnnnnnnnnnnnnnnnnnnnnnnnnnnnnnnnnnnnnnnnnnnnnnnnnnnnnnnnnnnnnnnnnnnnnnnnnngatttgagataataattaaaacccctgttcctccctaccannnannnnaaannaannanaccccnnanannnnccccttggtcgggcccgcccttccgggcccctccagaaaaaagttt

SEQ ID NO: 97750 - DNA, 1112 bp, Homo Sapiens
cagtcgacggtaccggacatatgcccgggaattcggccattacggccggcaccaggcactgacaagcccacgactgatgagaaaactaccaaaatagcctgcaaatctccacaaccagacccagtggacaccccagcaagcacaaagcaacggcccaagagaagcctcaggaaagcagacgtagaggaagaatttttagcactcaggaaacgaacaccatcagcaggcaaagccatggacacaccaaaaccagcagtaagtgatgagaaaaatatcaacacatttgtggaaactccagtgcagaaactggacctgctaggaaatttacctggcagcaagagacagccacagactcctaaggaaaaggctgaggctctagaggacctggttggcttcaaagaactcttccagacaccaggtcacactgaggaatcaatgactgatgacaaaatcacagaagtatcctgtaaatctccacagccagagtcattcaaaacctcaagaagctccaagcaaaggctcaagatacccctggtgaaagtggacatgaaagaagagcccctagcagtcagcaagctcacacggacatcaggggagactacgcaaacacacacagagccaacaggagatagtaagagcatcaaagcgtttaaggagtctccaaagcagatcctggacccagcagcaagtgtaactggtagcaggaggcagctgagaactcgtaaggaaaaggcccgtgctctagaagacctggttgacttcaaagagctcttctcagcacccaggtcacactggaagagtcaatgactattgacaaaaacacaaaaattccctgcaaatctcccccaccagaactaacagacactgccacgagcacaaagagatgccccaagacacgtctcaggaaagaagtaaaagaggagctctcagcagttgagaggctcacgcaaacatcagggcaaagcacacccacccacaaagaaccagccagcggtgatgagggcatcaaagtattgaaagcaacgtgcaaaagaaaaaaccaaccccggtagaagaggaaccccagcaggagaaaggccagagcaccctaagaaaaaggccaaccccctgga

SEQ ID NO: 97751 - DNA, 1574 bp, Homo Sapiens
  misc_feature (57)..(108): n is a, c, g, or t
  misc_feature (112)..(146): n is a, c, g, or t
  misc_feature (185)..(350): n is a, c, g, or t
  misc_feature (954)..(954): n is a, c, g, or t
  misc_feature (1138)..(1138): n is a, c, g, or t
  misc_feature (1529)..(1529): n is a, c, g, or t
cccctcctccccgcttcccaccacccgcccacacacaccaatcacttagggcgctannnnnnnnnnnnnnnnnnnnnnnnnnnnnnnnnnnnnnnnnnnnnnnnnnnnccgnnnnnnnnnnnnnnnnnnnnnnnnnnnnnnnnnnncagtcgacggtaccggacatatgcccgggaattcggccnnnnnnnnnnnnnnnnnnnnnnnnnnnnnnnnnnnnnnnnnnnnnnnnnnnnnnnnnnnnnnnnnnnnnnnnnnnnnnnnnnnnnnnnnnnnnnnnnnnnnnnnnnnnnnnnnnnnnnnnnnnnnnnnnnnnnnnnnnnnnnnnnnnnnnnnnnnnnnnnnnnnnnccaaagggaaacactaaaaattccctatagatatattccacgaaatatttcaattgggctgattttaattaggctgtatcattgatgcattactggaatcgatcttatgtcttttgcattttaatcacttgagttaatcaaccactggcaaatcccatttgacaaagattaccattgtaaaaaacagatactgtggtacatccctagaaattcattcacatttaacacttctaaaatcgcaacaatagccctctttgttttccatgaccacattccccaccccctatatgaattaccgcactttaaagcttccaactcccgtaaacctttctcatcctccgaaactgcacacctattacacccgccacacccaaacaaacgctattcttccttgaaacacactcatctcaacggcttcaacctacgaactaataggcaaccttccccccaagggcttgtttccgccccctgcaaacgtggtaaattgtgccgcctttaggaaagcccccgcgccccctcccaattttcggtcggctcggacaaatggccgtttaaaccctcttctggtctatattgggaaaacaggttgctcttctttacaccngaccacctataccctctttgtatggcttcaacacttggcattccactcccccccctcacacttccccacacagagaatggggttttcacacaaaatccccctccttttcccacacgaaaaatcccattacgcctcttccgtacaaacagtaagaggagtacatccttccaaacagattacacancaggggggtctatataaaacaccacgccacattatttgttcccccaccatattattttagaattcttgtgggcccaacaagtgaagacccctctctaattcaaccaccttcgccgcattttcctttccctttattttgtacacccccgccgcaaaaatacccccccgaattacacagagcattcccctttctcatctgaacccaattcatacacctcgttttgaagcaacaaaaaaacctcgggaaagccgccgctccggggggattcatttctaccaaacacaaattgcgctctatctttattacaaacccccggccacaacgccacactcttatttttctttcccccacaaaaggtggggcacgcacccggccgcctatttcgtgtaanacttacgtgctatttcccccccgcccctttcacacccatttctcg

SEQ ID NO: 97752 - DNA, 856 bp, Homo Sapiens
ggagaaatcacataaccttacaaaggactatattaatcaccttcttagtaatcccttcacagtcccaggtttagtgaaaaactgctgtaaacacaggggacacagcttaacaatgcaacttttaattactgttttctttgttcttaacctactaatagtttgttgatctgataagcaagagtgggcgggtgagaaaaaccgaattgggtttagtcaatcactgcactgcatgcaaacaaggaaacgtgtcacacttgtgacgtcgggcattcatataggaagaacgcggtgtgtaacactgtgtacacctcaaataccagcccaagccacatccctgtagtgaatcctctgatttagaacaccaaagataaggactagatactactttctctttattcgtataatcttgtagacacttacttgatgatttggaacgttgtaattgctaaatgagacgaaatgctgatgtatcctttcattcagctaacaaactagaaaaggttatgtagcattatgcaaaaagggaagtaagcaaacaaatattgccaactcttctataatggatatcacacagtatcagcaggagtaataaatttactcacagcacttgtaaacaggacaacacttcatggcaggaaatctacttcctacagagacaaagatgccatgtagcacgtacataacactggtcagcctcagagcataaagggaaaacgagacaacgtaaggaatcctcaaggaaataaatgaaaaggaacaaacagagtaattgacatgagtgaacacacctaactgaagaggatgagaaggaacaaaccctaaggtcctagacataagaatagaacaagagagagag

SEQ ID NO: 97753 - DNA, 947 bp, Homo Sapiens
gggaccagaggagtcccgcgttcggggagtatgtcaaggccgtgacccgtgtattattgtccgagtggccggaacgggagccaacatggcagcggggttcgggcgatgctgcagggtcctgagaagtatttctcgttttcattggagatcacagcatacaaaagccaatcgacaacgtgaaccaggattaggatttagttttgagttcaccgaacagcagaaagaatttcaagctactgctcgtaaatttgccagagaggaaatcatcccagtggctgcagaatatgataaaactggtgaatatccagtccccctaattagaagagcctgggaacttggtttaatgaacacacacattccagagaactgtggaggtcttggacttggaacttttgatgcttgtttaattagtgaagaattggcttatggatgtacaggggttcagactgctattgaaggaaattctttggggcaaatgcctattattattgctggaaatgatcaacaaaagaagaagtatttggggagaatgactgaggagccattgatgtgtgcttattgtgtaacagaacctggagcaggctctgatgtagctggtataaagaccaaagcagaaaagaaaggagatgagtatattattaatggtcagaagatgtggataaccaacggaggaaaagctaattggtattttttattggcacgttctgatccagatcctaaagctcctgctaataaagcctttactggattcattgtggaaagcagataccccaggaatttcagattgggagaaaaggattaaacatggggcagcgatgttcagatactagaggaatttgtcctccaaggatgtgaaaagtgccctaaagaaaaatggttttaattgggttgaccggacctgggttttcaaagtttgccaatggggaagctttttggaataaaaacca

SEQ ID NO: 97754 - DNA, 792 bp, Homo Sapiens; identical to SEQ ID NO: 3915

SEQ ID NO: 97755 - DNA, 992 bp, Homo Sapiens
ggaacatgagattttatgctgctcttcctggtcagcagcactgctatttcctcaacaaggatgctcctcttccagatggccgaagtctacagggaacccttgttagcaaaatcacctttcagcaccctggccgagttcctcttatcctaaatctgatcagacaccaagtggcctataacaccctcattggaagctgtgtcaaaagaactattctgaaagaagattctcctgggcttctccaatttgaagtgtgtcctctctcagagtctcgtttcagcgtatcttttcagcaccccgtgaatgactccctggtgtgtgtggtaatggatgtgcaggactcaacacatgtgagctgtaaactctacaaagggctgtcggatgcactgatctgcacagatgacttcattgccaaagttgttcaaagatgtatgtccatccctgtgacgatgagggctattcggaggaaagctgaaaccattcaagccgacaccccagcactgtccctcattgcagagacagttgaagacatggtgaaaaagaacctgcccccggctagcagcccagggtatggcatgaccacaggcaacaacccaatgagtggtaccactacaccaaccaacacctttccggggggtcccattaccaccttgtttaatatgagcatgagcatcaaagatcggcatgagtcggtgggccatggggaggacttcagcaaggtgtctcagaacccaattcttaccagtttgttgcaaatcacagggaacggggggtctaccattggctcgagtccaacccctcctcatcacaacgcgccacctgtctcttcgatggccggccacaaccagaaccaccccgatgctcatgaaccttccttaagaaaatcccgcccaagaatttctcaaccctttatgaaaccagccctttagaaagggcagaactcctctttccggctccccccgcatggaaaatatgctcgggaagcaacaaaacca

SEQ ID NO: 97756 - DNA, 538 bp, Homo Sapiens; identical to SEQ ID NO: 14493
  misc_feature (504)..(504): n is a, c, g, or t

SEQ ID NO: 97757 - DNA, 756 bp, Homo Sapiens
caggcaagaagcttccttaataatatagtttctacagagctttcttacttatttttctaataatggatataacagtgtgataaagtttaaatgctccgtgagcaaaactcttatcaaacaactgaagaaatacactgctgattaaccttttccttggtcttgaattgtctccagcatatttgctagtgactaaaccattaatggatcttattagtataaacacatgtctgtgtggttatcaacagtgttgtattattgtcacatttatttacatttttggtcaaaaatataaacatgcgtgtgtgaagcagtctgttttatagagtgagcatatatgtaatcgttttcatataattgaaaatgtgctgtgtgttgcattttattctcatgtcgacttttctactatgtatacaccgattgtctcggtgcctttttccttttgtataattgtattacatacagaaattgctgacctctgtgaaaacagtgtaaaaaaagttaaaattattattccgatgagattttaatggcagtttaattttccagagaataaattttgtgggggttaaaagttatttttcttcacctttatgtaaaaaatctgtttacgttttagtactcacatggaatgggtaaacatctgacttcattgatgatgatacataaacatcagtcctaattcttgtcattgacaaataaatgttaatatgactgttacacaaaataaaataatgtcaattacataaggaaatatcg

SEQ ID NO: 97758 - DNA, 836 bp, Homo Sapiens
  misc_feature (326)..(355): n is a, c, g, or t
ggtgattcctgagcaaattccctcaaagtgaactcttgttcttaaattttgaattttatggtgagattgtaaagatagaggcaattgaaacattgttccttatttatgaactgcttgaagtgaatacttaatttaagtttgcactttaataccaaacttaaaaccaaacactcatttaaaagtaggttaagtgatcatggatcattgttattagctttgtggctttgtgaaattctaaaggaatcaaataattcatcatgatttaaattttctagagattttgatttttttataatgtttctttcctgtagattgtgttcttgttnnnnnnnnnnnnnnnnnnnnnnnnnnnnnnaaaattacagtgttcattgtcattgacctcagcagcaaatttgacttgaattcacttaggatcgcaggaatcaggggaaagtgattttaaaggtggtttctccagcacattttaagaaaagggaccaaaagttattttagcttcctcaatagattgcatgttgcttattaggataataaattaatattaaatgcaatatatgtcttgtctttattatggcatctatttaggagttgttcaaatcactgcagtagggctctgcaaataaaataatgtaacctattatcatggatctaatgtactgtaactttatcagtgaaaggtaaaatctcaaataacaagtacaaacattgaacaattacctataaagatttgtaaaagtaaaatttttccaatagatttcattcttgtcattttgtaagacgaccctgcagtccacctgtttgtaacttttttaataaaatagacatctgtattaaaa

SEQ ID NO: 97759 - DNA, 1097 bp, Homo Sapiens
  misc_feature (806)..(806): n is a, c, g, or t
cacttgagatctttaaaaggcttgacaaattcttatggtgggaagtaattatagaccatcatttcttcaggataatgagctcagacatttaatccttaagactgcagaaggcttcttatttgtggttggatgtgaaagaggaaaaattctcttcgtttctaagtcagtctccaaaatacttaattatgatcaggctagtttgactggacaaagcttatttgacttcttacatccaaaagatgttgccaaagtaaaggaacaactttcttcttttgatatttcaccaagagaaaagctaatagatgccaaaactggtttgcaagttcacagtaatctccacgctggaaggacacgtgtgtattctggctcaagacgatcttttttctgtcggataaagagttgtaaaatctctgtcaaagaagagcatggatgcttacccaactcaaagaagaaagagcacagaaaattctatactatccattgcactggttacttgagaagctggcctccaaatattgttggaatggaagaagaaaggaacagtaagaaagacaacagtaattttacctgccttgtggccattggaagattacagccatatattgttccacagaacagtggagagattaatgtgaaaccaactgaatttataaccccggattgcagtgaatggaaaatttgtctatgtagatcaaagggcaacagcgattttaggatatctgcctcaggaacttttggggaacttcctgttatgaatattttcatcaagatgaccacaataatttgactgacaagcacaaagcagnttctacagagtaaggagaaaataacttacagattccctacaaattcaaagcaaaagatggctcttttgtaactttaaaaaagcaaagggtttagtttcaccaatccttgggacaaaagaactggaaatatattgaatctgtcaacacttttaattttggggactataaggaagcctgggagaaaccttcaattttttacccttggtaactcctccaatccttccgaaagaatccctctaagaaaggtcccgggtaagaagggggacccaggggaatggtccaactgggaaa

SEQ ID NO: 97760 - DNA, 879 bp, Homo Sapiens; identical to SEQ ID NO: 4059
  misc_feature (444)..(444): n is a, c, g, or t
  misc_feature (626)..(626): n is a, c, g, or t
  misc_feature (629)..(629): n is a, c, g, or t

SEQ ID NO: 97761 - DNA, 967 bp, Homo Sapiens
gggggaggggtggggaatactggaaataatcagggcaatttttttctttcccataattggactagataccttggtactgttgaccttctcagcatctcccttttgccttagatggcaacaccctccagtctgtagcagagcagtccaacccagattagtgcagcccggaggcttagggtgcagcctccctggtcttcctccacacagttgttcaccaacagaccagacctcctctaaccacagtgtcaacatagtatcggaaagagagccatttcttaggggaataaaacagtttcgcttctttagctcatctgtggtgtcagaatcctgggagctgaagagagaaatcaaaagagcatgatgatggctgcctggtttcaggtggaacttaatgcattgatctttagaagctccttctgttggaagttgagtacctgtgatctaaaatgtcctggaggcagatgacatctaaaatatgtgctttccaaccagcacagctggcgctcttagctcctgattggttgtgtgttttattaaggatcagtgcagttaagtcgtattttaaagtgttacctcccctcctaacccttccccttcttggacactgaaggaaaaggccaactagggtgttagccctctgggcaccaaggaaactaacagctttctcaaagcggtgaccactcaggccagcccagacaaatctgagggatggccagtgcactccaatgatgggacaggcctaacaacacatgtaagcttccccgagagctttcagctggttcacctctttgttctctagactcttaagtactgactgctttgacttttgtgattatgttatggtgatgtgtagtcagtgtaccaatatgttcacaacctaggatcatgataatggagtgtgttttgggttttttttaactgttcagaaaaaaagtaaattacaaatataagattaaagtgaatttta

SEQ ID NO: 97762 - DNA, 769 bp, Homo Sapiens
aggtacattggccatagaggctaagaaccgcgtacgagggttaacatatggggaacaggtcatgaaagaaacatgcatgcttggcttccatgtaatacataatgtataagttgcacatttcatcactagacgtgccaccaatgtgtgtggcttctgtcattccttcaccagtgaatacacatcttgcagccagtaggtcaccaaaacttacatcaactggatgccccacagggtagaaagcctgtggcagctgagggctctgccgtccaatcagtgtccactgtccatttcttactctgtatccacttactaccttacctaaatggtgagtgtgaactctataggcaaagacatgcattggataatttttataatggcatgaaatgtcagaattcaccactttttctcctgctgggataacagtgtcaacagacatcataaggtacatgccagcaattaaaggctgtggcagacgtgtgaggtgtaaggacacaccagaacagtccttgttattatctctaaaagcactaatatccccatagtgtacctgtagtacaaagtatttacttccagtctctcctccaactctgaatccaacacctttggggagccgggtagggggagcatttctcgcccaggcatacagaatattggctttatctgtacaggttccttcatcacaaaaccagtaacttccagtggatgaaggcatattgcatccaaaaagtaacatgtgatggacagtatccatgctggctcgaggcttgcc

SEQ ID NO: 97763 - DNA, 821 bp, Homo Sapiens
tggtcagctccaagaaagaagcactcaggaaggcatagtaggatgcctgggtctacctctatatttgatggacacatgtattacctaatgcaattctgcgtgctgttgcactccggggaggtttttctggctcaagtaccccaggtcttctcatcgagtttcatccatgaacatgcccagaatgcctttagtgattctattgctgccaaaaactgactataaatgcttattaaggagctctgaggtgtccaggaggcacaaaatggaacaggaaaatccacaaaataatctggtgattctgcaggatactttgccttcaacttgagagtgattaaatgctctctaccagaagcatcttctgcttttaacttgatggtactgaagcaggtatccgcatacacaagtttatcccaaccaagagttcctatctcttcaataaggcttgagtagaactggggaggaggaggtagtgcatacagctcttgtctattctttaaggcaacttccaaaagcatcttcaactccatcataaagctcattagatcaggagagtgctgcattctctgttgtactattcgatggtatccactaagtattgttctcagctgccaactacataataatcttgcattcttcagttgtaaatcttcaggcaacactatcctaaggtggaagtctcttccctgagccgagatgaatccctcatacacggttttcgaccggttctggggcagaagcagggggcactggcgcaacaggctcgcttccgtcaccgccatggctcgaagtccggagaaacacagaaaagctctagacctgct

SEQ ID NO: 97764 - DNA, 454 bp, Homo Sapiens
  misc_feature (188)..(234): n is a, c, g, or t
  misc_feature (252)..(275): n is a, c, g, or t
ccttggcccaagacccctttgattctctaaggagcacgaaagggggaatgccccctcccaggagtttatgggagaagggactgggccggctgcctcccagcgatgcacttgacctgacactccccatgtcctggtgcgcacagcccttgtcggtgccccggcccctcccgcagcgttactgcctgtgnnnnnnnnnnnnnnnnnnnnnnnnnnnnnnnnnnnnnnnnnnnnnnnggctccacaaatatatcnnnnnnnnnnnnnnnnnnnnnnnncggtgaagggcggtccccatcctgggcccccactctagacccccccaccacctggttaagtctcgagtgaatccagtggccccgtggcaccctcctttatgacatccatccatctgtggtgaaccaagtgaaggtggtgacttctggtgacatagtaataaagtgaagactcagaaccc

SEQ ID NO: 97765 - DNA, 1199 bp, Homo Sapiens
  misc_feature (64)..(72): n is a, c, g, or t
tcaacgacatggcgtacagaaccttgtatgaaacacagacaaacagaaatctagtaagttaacnnnnnnnnnaattaaaataatgccagatacaaagttaactattttctgatgagataacgcaggatggagtctttgcaataaacagctggaccacaagtcgtggtgacgtgatgctgctcaatctcactgaggcttacacgcctggcattataacttccactgtttgaaagtattacacctttcttttttcgcacatccctcacagttctaaaaagctctgaactcatttcattcttcttttcttcccttgtcttttctctcttcaaagatatttcatgatgattctgcttttcagaactttagctgagagtaatgaaatatcaatcttttgcacaatggcaactacatcccttttctgctctcttgggatagtcagaatagcaagctgcccagcgtgaacaataggacttcttctcagttctgagagattggctgttgctgaacagcagtgcatagaaataagtccttggcaatcccatgggtgacattgtctctttccttatcacccagtgctgcacacagccggaacttgataagacacccagaaagaagataatggctgctatcaagctgtctagcgtagaaactacataataataatctgtttatggaagagcagctgtcctatagttttgcaatttcatgaaatctcagagtcagaacccatctcttccatgccagccccataccccattcctcatagccaatcacaatccacctttagggcgttgtaagtgactcgaggacattattagtgcccccagaatctataagataacagatagaccagaagtactaccgtgttaaaatcttgcccataaatcatatcaccgttcaccaggaatggctgcgtaagagaagaaagcttgcaggaaagaagggcagttggtatttgggcagcactttgtgaaaatcctgtcgcgaggaacgttgatacatgaagcatatcggtcaagaccccgggtctatcccattagattaaagatatttgtcccacaaaaaccgggagatttcgtgccaaatgaaaataggtacaagagatactcaagtccaggtctgtggaaagggcttatgtccccccagggaattaagggacaggtgaaggctatcagtcgctgaaatgtgagcccaaagaa

SEQ ID NO: 97766 - DNA, 838 bp, Homo Sapiens
  misc_feature (173)..(182): n is a, c, g, or t
  misc_feature (373)..(378): n is a, c, g, or t
  misc_feature (380)..(381): n is a, c, g, or t
  misc_feature (383)..(398): n is a, c, g, or t
ggggtataggcaaaatttggaagtttggttttcagaaagtcttgacttcctcttatctctaagtaattggcatgtcctctaattcatattttcccccctcatctgttgggtgaaatactgtttatcctttagtactaaaattaaaagttacctcattcttctagctagctgannnnnnnnnnaatctaggctaaatcatgaatacatttacatttaaataaaatattacagttgaaagtaaagggtcctttcattatctccacttccaattccagtaccctgtgtaaaggaaaacatatacatcttgcagacattttttaatgtgtttgtaatataggtacataaaaatatatgtgcttgttttaagcaaaannnnnnannannnnnnnnnnnnnnnntaggtcgccggctccggcccccaaaaactttccaaaaccttcctttgggggcgcggccccagaaggaaagggaactgggccttacttgttcccaagaaaacccgggcaaggactagggttggaatcctcacaataaaaaaaggcccggggggaaccgaggggttcggaccaatcccaaatgggagtcttggaggcctttccgggatcctatcaaacgggagtcccagcgaagcttcaatatcaatttacgcccccgccctgcccattcatgggaagaacgggggggaaattcaataaagcaattcggccccgaactgggaaaccccttccaaacggggatgtgatggaacccttgaattccgccagacgggaaattcaaacccccttggtccccccctgtggggatataaaatttttggcccccctggggggggaaaaac

SEQ ID NO: 97767 - DNA, 793 bp, Homo Sapiens
  misc_feature (198)..(452): n is a, c, g, or t
  misc_feature (469)..(484): n is a, c, g, or t
tatccttactggggccgcgtgaggccaaaaagaaaagggttttaaaaaagtttcctcgaagagccaaagcgggccaaccaagggccgctatggctggaaaactctgtgccgcccggaaggaaaaggttataaaatttattaacctttcttaaaaaaattaaattaatcattgatgggcccggggcatggtgggctcannnnnnnnnnnnnnnnnnnnnnnnnnnnnnnnnnnnnnnnnnnnnnnnnnnnnnnnnnnnnnnnnnnnnnnnnnnnnnnnnnnnnnnnnnnnnnnnnnnnnnnnnnnnnnnnnnnnnnnnnnnnnnnnnnnnnnnnnnnnnnnnnnnnnnnnnnnnnnnnnnnnnnnnnnnnnnnnnnnnnnnnnnnnnnnnnnnnnnnnnnnnnnnnnnnnnnnnnnnnnnnnnnnnnnnnnnnnnnnnnnnnnnnnnnnnnnnagcaaaactccatctcnnnnnnnnnnnnnnnngatggaacagaacacagctactgaatatgatatagttccttatttacaagttttactatgggagggacattttcctcagcatttcaaataatcagaggagtagaatttttttctagaaatatcagtatttcactctccaggtcgaagattaatgaaaacattaagtgactgcaccagttagaagaagataaactaataccttaaaaatatataaaaaaagaaagggtagttgctacttaaacatgaattttcacaaaattattctgtgactaattcagacaatctatttgcttagaaaagctggcaacc

SEQ ID NO: 97768 - DNA, 890 bp, Homo Sapiens
attaaaagcaggaaactttatccacttttttggaaactaaaggatttaccattttaggttttaccaatagaaacccttccctatcctggaaggtaacttttctcagaattactggttccggactttggcggtttcttttccttttgcaagggggtggccaccaatggatgaaagaggcaaggagatcttactttataggaatttctccaagttacagcgagcaactggccaaatcatattcaactacaggtgtgaggagagagagtacctgacttcagcccactggggaagcacaatgcttagttaacaagaatatctggattaagcagtgccgaagtggccgcacaccgagtcaggccaaggaagctcttctgtcattgccgcccaactctgttccactttgcatgcagacatatcaaagactgtgatgaagatcatggtggacaaggaagaatgaaaaactttgtgatgggatctgggcctctacattagagaaagaacctaacaaaccccagttctttggattcgtaaggtgaggctgaggagggcttactggagttggagacagggagagctgtgtttctgggctcaaagccaagaaacggttaagaaagaggggcttgcatcagtcatatagattaaaaagagcaaggcatgataattactaaatttatagtttcatgttttaacacagaagagtcagagggaaaactgacaatttaaaacggggcatgggatgagaaaaagtctaggagttactgagatgcctggtacttatctacaaaacttccatcactagacccttttgacctacgagaatagcagtttctatggttcaacctaatacactgtatgggctcaaatatataacaattagaattgagagtaat

SEQ ID NO: 97769 - DNA, 687 bp, Homo Sapiens
ggggtgacatcaccgggcagggaggggtgctggtggtggttcatacggagtaagctgctctgcctgtgtgagtggctcctgggccctaaacaggcacctttaggccatgggtcactcaccgtgagccatcaatgtgctctggtctgacatggtttctctctgtcttctagtctagacctagtttttttgttctgttccccacgtatggatatagtagagattgttgtctgtgaaatttctcttttgtagattttgagttttcccttgtagtgtaaagaatgatcactttctgtaacaataacaagaccactttttaagatttatcctgtttgttctttgctgattgaaacataataattgtctaaaattcctctacagccttctttttcttccatagctaatcttccttctaatagcttttgctttctgttttgcctgttgttgctttgcaaagctttcccctccatagcccgtaactgttatcaatataaaataatcttcctgttgaatgcttcatgacttgaattttactttgataaaaacattgccatactgctttttatcttgatgaattcatctggcattgctttgccttatcatctcatctggagtttttaaatgccatttgtttcagctgtctttacaacctaattaatagactttgccatttaccaggcaactaccgcg

SEQ ID NO: 97770 - DNA, 864 bp, Homo Sapiens; identical to SEQ ID NO: 15533
  misc_feature (638)..(638): n is a, c, g, or t
  misc_feature (772)..(772): n is a, c, g, or t
  misc_feature (778)..(778): n is a, c, g, or t

SEQ ID NO: 97771 - DNA, 455 bp, Homo Sapiens
ggcaaggcgataatcttgatttatttggtttctacaccaaatacattctcctgaccactaatgggagccaattcacaattcactaagtgactaaagtaagttaaacttgtgtagactaagcatgtaatttttaagttttattttaatgaattaaaatatttgttaaccaactttaaagtcagtcctgtgtatacctagatattagtcagttggtgccagatagaagacaggttgtgtttttatcctgtggcttgtgtagtgtcctgggattctctgccccctctgagtagagtgttgtgggataaaggaatctctcagggcaaggagcttcttaagttaaatcactaaaaatttagggggtgatcctggggccttcttatggtgtgaagaaagcccttttcatttttaatttccccaccggaaatttttccccccaaccgtcgggggttgaatgg

SEQ ID NO: 97772 - DNA, 1308 bp, Homo Sapiens
ttgcttctcgtgcaataagtccggccagggtctactatgcctgtcgacaactccagtaaccaacactggacaagatgatggattccagtctatagaaggcgttgcaaacactcagcaactcgacacctatcactgatcttctgcaatatggactcgagcataaggggagtctagcaaggtatgtaagcctgcaggcatgctgtaacatgttcaatgggctcctcaggtctaggggaacaaagaaactgtatactcacacctaaaatcagatgcattctgtctttgttaatttctggcaaagatttagcactacccacgtgctcctgatgcctggtttaaattgacagatgtagaacgtttttgtaaaccagatattgctgctgcttctgtagactctgagcacgtaaatcctgtgctatttaaccaaagtgccaccgcatggagaattggggcccaggaattccgatagtgaagtctagctgtatcaatagtttcaggggtataaaatgctccaccatctggaggaagctgactagaaaattcggctggtaaagtcaagagtgcataatcttttaatgctgctaaccacagggcgaattgagtgttggtagttcaggttgtaccagtgttattaaactatctggtggcagttcatcgatggtaccacagtcgtcatcatcatcgtcagtatttttaattgctctttttggttttgactctgcttcctttttaatattcatagcgaccacatatacctctgcccaagctttgagaacagccagtttttccatggtcgtggcactctctcggtacagctggctggaagatccttttccagcctgaactttgtccagagaagaaacaagaagattgtgtactcgacggagatcattgagatcactgacaactccacttcctatccatgtactacatacctggcaagctttcgctattatatctgatggtgtatcttgtgaaaaggctggtcttagagcagctcccacattagcctgatactgctccagtatcacatgacctggaaattctggctcaggcacagacgcaaacttcttgataatgtcttcaagcgcctggagcccagccattcgcagctggttgctatgatcagttgcagccatgaatgccatgcgaatgaggtcagagagatgaagtaccaagaggtcatttgtagggtttcgaagtttagcagaacgtgccaaggcaagatcaaagtgagcctggtctgcattctcacacaaattgatgattcgacacaggcaatcggcagcaaatactcgagtggccccc

SEQ ID NO: 97773 - DNA, 765 bp, Homo Sapiens
  misc_feature (615)..(615): n is a, c, g, or t
ggggcctgctcttgaaaaaaccaacggtgccaccgcagtctttaacactggtattttccaataccaacaggctctagccaacatgcagttacaacagcatacagcatttctcccaccagttcccatggtgcacggtgctacgccagccactgtgtccgcagcaacaacatctgccacaagtgttcccttcgctgcaacagccacagccaaccagatacccataatatctgccgaacatctgactagccacaagtatgttacccagatgtagaattttcatcactaaacaatcatgctaaagaggaaaggacagtgtgcttggttagagtaaaggacgaggtcattagccatattgtatatatcgtcaagcaacacacacaaaagttcctcagccacaagacatccacatattgcatgttaaccagaagaaaagacaacattttccggaaatccactgcacactgttgcctatacactttgtacatttaattgatatttgtgctgaggtgatattcctgtctaaaagaacaacattgtctttcttttctagcacagagttatgcattcaaagatgcatacctagttagtttcctatatattcatgccatcttgaanagacagactatggtgtaaccatgattctattatgtattggtacgtctgtagaccaagatataattttttaaaaataggttatttctttcaagtttacaaataacaaggtgcaccttgtattttaaaatgccattatagatgagagcgtgc

SEQ ID NO: 97774 - DNA, 737 bp, Homo Sapiens
ggttcctcaccataagctttggggaaaattcttggcttttttgctgggggagagagcagtgcccagggaagattggctgatctcagagctggagggtttatgcgggactggccagccccttcagctgagtgggacagcaacacagtgggtggtaaggggcttcataagatgtacaaggtgagggagaggcccctccagccaaccctgtgtttaaagagtcaggtaacgaagaactttccagagacagctgtgagtccgtctggcttaaggggttgtacaggtgtctgagaatggggcctgaaggtgcagggcctgcaggctgccctgtttggaaggttcctgtccttctgtcttggtagaaaatggcagctagccttgtaaagggcctccttgtgtagcgagatagaccatgtagccccagatgcccccatggcttcacttccctcttgggggtctctcagtatatgtctagtgccaccactattggtggagagtttccttttggaataaccttggggtggtggatgggttttattttaataaaagaagaatgtctcaaccgacaaaacaacaaaggccaaaacgccatagagacaacagaacaacgacacgaaccaagaaaactgggggggccgccccggccctaaaaaacctttctaaaaaccatcttttggcgccccgggcccccctaggaaacagaaaaatgggcacaaaccctgtccccaaaggaaaatcga

SEQ ID NO: 97775 - DNA, 785 bp, Homo Sapiens
tgaaacctacacaaagaggaagaggaatgaggcatgaagacccgtacctaaccatacccctctttgcgactgcagcaaaactgatggcaacatctcggggagtggctgcccaccaaagaggaccctgagaaagaaaagagcataacctgggaaatgggctacatgggggcaagggacatggtgagcgggcaaagttgagatggtgttttccttgagtgaatgtctttcaaaactaacaacatactgtgtagttgtctaacatgctgatggaggaacactgctgggccctgaaatcctagctttgaatccattttttccctttagtattgtgagtagagggagaaaatgaccttatgttttcccccacgacacaagtcaccgtcattatggctttcatatcaagtatctgtttccctttgttccaattatttgaccaaatttatgttcagaggttagacttgcaaacatcaaagcaccacaaatgtgtgtgacatctagtgacactgggttgaaaaatgccaatataaataccatatatcaaattaccattgtttcacaccaggataaaaagaggggtggtggcagtggtgttggggtgggaaagagttgttctggaaagaaatgaagaaaagagcagaaccaatctcaagcagccaagtggtgaagttggatgtatgtgaccctacgatctctcgggtaggtggccagagggccgtccgctaatacaccttggcaaagaaaatgggaaccaagcgcagtggctggcatatgcaacagtgcgttcc

SEQ ID NO: 97776 - DNA, 621 bp, Homo Sapiens
ggcaggcactgtgcaggggagggaggggctggaccgccactgctgcgagggaagaatcagaagagctgcctgcggctggctagagaagggcaaggtggatggctcttcattcctggaaggctgaagcagccagaggcagtgattcacctctataatgtctaatcagggagagatacaggagtgaggtgggttttattttcatttttgttttaacaagttcccactcttatcttaattctcaaaaatgatctggcctcatctatagaactggctgagttggggaatcatttaaaatttgggattttctgtacaagtcaagaacatatgtgaaagctaaaaaagtaatggaggcagggggactgctcccagctcccttctgccatttacacaaaatatttgaaaacatgtctgtaaataacgttgtggaactgagatattgagtatctaatcatgtaaaggaccctcagatgggacaggctattggacaactttcctggttcatgaagtggaatttcctttttgagtagtttcttgcatggtgtattccaataggtcaaacccagacctactgtttgcaaacaggccatctgtagagaatacaatctctggactgccccccga

SEQ ID NO: 97777 - DNA, 548 bp, Homo Sapiens
cgctcctcctcccggctcagggcaggctgggctggcttccccatgttcctgttctgaatgatgttcagagccaggaaggagagaaggtactgaactggtaggagagcaaggctaggaaccgccgtcggaaatctttccagaaggctgcaagccagcctccctggtcagcctcatcctcatcagtgagcgtcttcagcatgatgcacgagtgctctccggtcaggtcattctgggcaacacagaggtttaactggcaccaagaaccccctttttttgaataacccatcattgatgaagggtaaacactcagagaagaaaggcttagtgcttccgcaggcctctccttctttccaggctgggggtaggcgcccttctcaaacagccctcgccttcaccttcctcatatcacctcagttcacacacaacagctgcaaagatcactgtcctgcaatctcctcaaaagtgtcacagacacagagaagagctgctggctcttctgggcctgcctcttgctcgggacgtgcgggagggaaatatgtgctcctctc

SEQ ID NO: 97778 - DNA, 997 bp, Homo Sapiens
  misc_feature (62)..(70): n is a, c, g, or t
  misc_feature (237)..(246): n is a, c, g, or t
  misc_feature (357)..(370): n is a, c, g, or t
  misc_feature (378)..(453): n is a, c, g, or t
  misc_feature (757)..(831): n is a, c, g, or t
agggcggccaagggggttataaccccgcgtgggaaattaagggttccaccacagccggtttnnnnnnnnnttccccagcccggcaaaattcttaaaagaaattccccccctttccccaaggaggccccggggggggcttaatttaaattggattcccctgggccccctgttataaaccccaataagccccccaaaaccccctggggtttttttaaaacccttggtttccccccgggnnnnnnnnnngggggggatccccaccctttttcttccccgggttttcttggaaaccagttagcccccttttcctttcctttggggcccccgcccccaaagaaatgtttaaaaaattttttnnnnnnnnnnnnnncccaacannnnnnnnnnnnnnnnnnnnnnnnnnnnnnnnnnnnnnnnnnnnnnnnnnnnnnnnnnnnnnnnnnnnnnnnnnnngatgatcattgtgggaaactttaatatctgtgtctcagccactgaaaaataaacaaacatcagtaagcacatagaatctttaaaggatgcatttaacacactggacctaactgagatacgtggtacactacgctcaacatgcagaatacatatccttttcaagtgcagaagcaatatttataaaaattaatcatattttcaatcattgagaagacacaaattccacagagttttagttatacaaatatttaatcacagtggaactataagtttggaaattaagcaaaacattttcagtatggtnnnnnnnnnnnnnnnnnnnnnnnnnnnnnnnnnnnnnnnnnnnnnnnnnnnnnnnnnnnnnnnnnnnnnnnnnnncaaaacagacaaaaggcacaaactctaaccggagactttataagtattaaaaagataaatgaataatagaataactttgaaattttcgataaaatgaacaaattgattcagcaaacacaggttaccaaaatgaatatttatatatatgtaattgaacctgtagtta

SEQ ID NO: 97779 - DNA, 720 bp, Homo Sapiens
ggcacgagggggaaactttaatatctgtgtctcagccactgaaaaataaacaaacatcagtaagcacatagaatctttaaaggatgcatttaacacactggacctaactgagatacgtggtacactacgctcaacatgcagaatacatatccttttcaagtgcagaagcaatatttataaaaattaatcatattttcaatcattgagaagacacaaattccacagagttttagttatacaaatatttaatcacagtggaactataagtttggaaattaagcaaaacattttcagtatggtaaagggatgaataaaatcaaagtttgcttttttgaaacactaataaaattgatggcctccagcaagattgattaacaaaacagacaaaaggcacaaactctaaccggagactttataagtattaaaaagataaatgaataatagaataactttgaaattttcgataaaatgaacaaattgattcagcaaacacaggttaccaaaatgaatatttatatatatgtaattgaacctgtagttaaacaccttataaagaaaactacagtctcacatggcttaataagtgaattctttccaaatgcttaaggaagaaatagcacacatcttacataaactctgtcagaaataggagaagaaacattttccaaattgtctaaccagcatagctttaatacttcatattaaaacctcacaagtctg

SEQ ID NO: 97780 - DNA, 814 bp, Homo Sapiens
  misc_feature (747)..(747): n is a, c, g, or t
  misc_feature (770)..(770): n is a, c, g, or t
ggtggaagcagcacaaccagtgcaccttcatttggttttggcacaaataccagtgggaatagtatttttggaagtaaaccagcacctgggactcttggaactgggcttggtgcaggatttggaacagctcttggtgctggacaggcatctttgtttgggaacaaccaacctaagattggagggcctcttggtacaggagcctttggggcccctggatttaatactacgacagccactttgggctttggagccccccaggccccagtagctttgacagatccaaatgcttctgctgcccagcaggctgttctccagcagcacatcaatagtctaacatactcaccttttggagactctcctctcttccggaatccgatgtcagaccctaagaagaaggaagagagatggaaaccaacaaatccagcagcccagaaggctcttactacacctactcattataaactgacaccccgccctgccactagagtccgaccaaaggctttacaaacaacaggcacagccaagtcacatctctttgatgggctggatgacgatgaaccatccctagccaatggagcattcatgcccaagaagagcattaagaagttggttttgaagaaccttaataatagcaatctcttttctcctgttaatcgtgattcagaaaaatctagctcaccatctgaatatccagaaaaatgggagagagatttagtttttcctaagccaaaccctggtttgatgganaaatcacccagccaaggaatggnagaattggaagaatttccccctttggttttcacaatttttttaa

SEQ ID NO: 97781 - DNA, 827 bp, Homo Sapiens
  misc_feature (112)..(112): n is a, c, g, or t
tccaaaaaaattccctttaggaaattgcatttggggatggtacccagtaaggtttttcttttagggtacaccctggttctttttccagtttgctataaaattgccaaagaancggaaataactgctccatttcaaagtcatggaaactgacattttttctaaaggaattccatcaaaaaagaattttggtatcttccacagtgtcaatagcaactccagccattccaacatcaccacgaaactcgagggttgtctgaatcatagccacgatgtgtcgccagatcaaaggcaactgataatccctgctgaccagccttaatgttgtccttatagaacttattgctttcttccacagtactaaaaccagcatactggcggatggtccagggcctaaaggtatacatggtaggatatggtccacgtgtgaatggcttcactcctggaagttcttcaggtaagtccatagtatctctcttggaaatacaagggttttatagagatcccttccggggtgtgccatattaggtcttctgggtttttgcctttcagctgctttttagccagggcagcccattctgggtgaaggggctgttgctggtgtagaagtcgttgctgtatgagcctggagcctgatgattcttttacctgcctcaggtaatgaggtgaaagtaaaaaaagctgattcttagctcttaacatggtggagcatggaaacacccaatagaaataagaactgactggtaggcctgttttggactccgctgtgggagagggcggctgcacttctgcgtcccccgcctcacctgtcagacatccacacagccagg

SEQ ID NO: 97782 - DNA, 470 bp, Homo Sapiens; identical to SEQ ID NO: 2959

SEQ ID NO: 97783 - DNA, 849 bp, Homo Sapiens
  misc_feature (526)..(526): n is a, c, g, or t
  misc_feature (779)..(779): n is a, c, g, or t
ggaattctggtgttctgcagcttagtcagcctgttgtgtcgggagttcttcctgtgggccagccagtgaggcctggggtcttgcaactcaaccagactgtgggcaccaacattctgcctgtgaatcagccagtgagacctggtgcttcgcagaacaccaccttcctgacatcaggctctattctcagacagctcatccctacagggaaacaagtgaatgggattccaacctacacgctggcccccgtgtctgtcactctgccggttccccctggaggccttgcgactgtcgctccgccccagatgcccatccagctcctgccgtcaggtgcagctgcaccaatggccggttccatgcccggcatgccctctcctccagtgctggtgaatgctgctcagagcgtgtttgttcaggcctcctcctctgcagcagacacaaaccaggtgctcaaacaggccaagcagtggaagacctgccctgtctgcaacgagctctttccgtccaacgtctaccaggtccacatggnaggtagcgcataagcacagcgagtccaagtctggtgagaaacttgagcctgaaaaactggcagcgtgtgcaccatttctaaagtggatgagagagaaaacggtgcgatgtctgtccttgtaagggcttggtctctgaggaagagcttatacaccacttgctgatgcatgggcttggggttgcttgttctgtccatgcacccttccatgatatccaaaggtctttcaaagcacagccaggaataggccacctgngggaagaaaaaaattgcccttatggattaatagccaccagagggtttcccacttaaaatgtcccatggca

SEQ ID NO: 97784 - DNA, 823 bp, Homo Sapiens; identical to SEQ ID NO: 4621
  misc_feature (669)..(670): n is a, c, g, or t
  misc_feature (676)..(677): n is a, c, g, or t
  misc_feature (679)..(680): n is a, c, g, or t
  misc_feature (687)..(687): n is a, c, g, or t

SEQ ID NO: 97785 - DNA, 1381 bp, Homo Sapiens
catctttgagcaagatgggtctctaccgcatccgcgtgtccactggggcctcgctctatgccggttccaacaaccaggtgcagctgtggctggtcggccagcacggggagtgcggcgctcgggaagcgactgtggcccgcacggggcaaggagacagaactcaaggtggaagtaccggagtatctggggccgctgctgtttgtgaaactgcgcaaacggcacctccttaaggacgacgcctggttctgcaactggatctctgtgcagggccccggagccggggacgaggtcaggttcccttgttaccgctgggtggagggcaacggcgtcctgagcctgcctgaaggcaccggccgcactgtgggcgaggaccctcagggcctgttccagaaacaccgggaagaagagctggaagagagaaggaagttgtaccggtggggaaactggaaggacgggttaattctgaatatggctggggccaaactatatgacctccctgtggatgagcgatttctggaagacaagagagttgactttgaggtttcgctggccaaggggctggccgacctcgctatcaaagactctctaaatgttctgacttgctggaaggatctagatgacttcaaccggattttctggtgtggtcagagcaagctggctgagcgcgtgcgggactcctggaaggaagatgccttatttgggtaccagtttcttaatggcgccaaccccgtggtgctgaggcgctctgctcaccttcctgctcgcctagtgtttcctccaggcatggaggaactgcaggcccagctggagaaggagctggagggaggcacactgttcgaagctgacttctccctgctggatggggatcaaggccaacgtcattctctgtagccagcagcacctggctgccccctctagtcatgctgaaaattgcacgctgatggggaaactccttgcccatgggtcattcagcttccagcctgccccgcacaaggatcccccaccacccttcccctttttccttggcctacggaatccccccaatgggcctgggcttcctggcccaaatggctgggggggcgccaacttctgaactttccagcctccctggaaactgggcagttcttcttctttctggaaggggaacacctttgatgggcctgaaaggccattgtgttgggggcccccccatggaggggcgcccggcccgccaaaaacattcccaattctttaaaggcttttaaaattccccacccctggggatataccccccggggaaaattaacccccccgggcgccacaaaaaggtgggcttgggaccctctgtaaaagggggaaaatattttcccccaccaaaattgtgtcccccctggtggggggg

SEQ ID NO: 97786 - DNA, 829 bp, Homo Sapiens
atcccctaaaatgtttgtgctcccagggggccttttcaagaagcttggtacttttgccccacaggtgggcttcaggtccattgctcaaaagggatttgggtgccaggcatcccaggcgtgtaaggctttcagcccccttcatgggaattggccataaaagggcttcgtagattggtagctctggcctggagggacctcaaagagctgcggtttcccttcacactgttgctgcaggagaaccagcttgtgctccagtctggagtcgtgaccctgaagggaaagacgttcctcccggaaatgcaagacctcttgctgcttctccctcaagtcttccaaaagctgctgcctttccaccttctggtgctccagctcccttttccagctcttgaaggtgggatcgagaggacagcagagcctccctcaggctttctgtttcctgggagtgctctctggaaacatgactcagttgagcctgaagtcttcgattgtcttccctgaggactctgttctcattgcagagctgaggtatggactccaggccctgactgtagaagttagaagtggatccccttccacgagcagtagaggtcagccggtgttccagttgctcccgtaggcggtcattgatgcagatggattcctccaggcgctggcgcaggttccggatttcaccaagatgctcttccagcaggtcagcccctgcggccaaaccaccaggacatgaagagaggtgggagatggagaatcctggttactgatgggggtggggctcggctaggggacctgcagcaagacctgtaaatatcactagccttctgccaactgtccc

SEQ ID NO: 97787 - DNA, 1121 bp, Homo Sapiens; identical to SEQ ID NO: 2836
  misc_feature (92)..(92): n is a, c, g, or t
  misc_feature (109)..(109): n is a, c, g, or t
  misc_feature (148)..(148): n is a, c, g, or t
  misc_feature (340)..(348): n is a, c, g, or t
  misc_feature (614)..(614): n is a, c, g, or t
  misc_feature (626)..(626): n is a, c, g, or t
  misc_feature (650)..(651): n is a, c, g, or t
  misc_feature (658)..(688): n is a, c, g, or t
  misc_feature (691)..(721): n is a, c, g, or t
  misc_feature (724)..(743): n is a, c, g, or t
  misc_feature (745)..(747): n is a, c, g, or t

SEQ ID NO: 97788 - DNA, 383 bp, Homo Sapiens
ggacaagatttaggttaagttggccgggggttgcgtggaaagtattttacttcagattgaaaaatgaacagcttccacactgttcactgcaagatacacagtattcacgaatacaatgctggtcatttgaggaaatgtatacacacctcaatttctccttcatgcttttttcttttagaaagatactgtttaccaaaaagaaacttcagcagtacaggaaaaactattttcccaataaatttacgaaaacctaagattcccaatggaatcagaattatcttcccgctaccaccaccttaatataatcacatgcttattggaacactaatattcgcaccctaagagtacatttactttcaacaatgagggtgattctttaaaaa

SEQ ID NO: 97789 - DNA, 1591 bp, Homo Sapiens
agcggccgcgccgctgggcaggtgctgagcgcccctagagcctcccttgccgcctccctcctctgcccggccgcagcagtgcacatggggtgttggaggtagatgggctcccggcccgggaggcggcggtggatgcggcgctgggcaaaagcagccgccgattccagctgccccgcgcgccccgggcgcccctgcgagtccccggttcagccatggggacctctccgagcagcaacaccgccctcgcctcctgcagccgcatcgcccgccgagccacagccacgatgatcgacggctcccttctcctgcttgcattccttaccaccacatcagctcaaccagaacagaaggcctcgaatctcattggcacataccgccatgttgaccgtgccaccggccaggtgctaacctgtgacaagtgtccagcaggaacctatgtctctgagcattgtaccaacacaagcctgcgcgtctgcagcagttgccctgtggggacctttaccaggcatgagaatggcatagagaaatgccatgactgtagtcagccatgcccatggacaatgattgagaaattaccttgtgctgccttgactgaccgagaatgcacttgcccacctggcatgttccagtctaacgctacctgtgccccccatacggtgtgtcctgtgggttggggtgtgcggaagaaagggacagagactgaggatgtgcggtgtaagcagtgtgctcggggtaccttctcagatgtgccttctagtgtgatgaaatgcaaagcatacacagactgtctgagtcagaacctggtggtgatcaagccggggaccaaggagacagacaacgtctgtggcacactcccgtccttctccagctccacctcaccttcccctggcacagccatctttccacgccctgagcacatggaaacccatgaagtcccttcctccacttatgttcccaaaggcatgaactcaacagaatccaactcttctgcctctggtagaccaaaggtactgagtagcatccaggaaagggaccagtccctgacaacacaagctcagcaaagggggaaggaagacgtgaaacaagaccctcccaaaccttcaggtagtcaaccaccagcaaggcccccaccacagacacatcctgaagctgctgccgtccatggaggccactgggggcgagaagtccagcacgcccatcaagggccccaagaggggacatcctagacagaacctacacaagcattttgacatcaatgagcatttgccctggatgattgtgcttttcctgctgctggtgcttgtggtgattgtggtgtgcagtatccggaaaagctcgaggactctgaaaaaggggccccggcaggaatccagtgccctttgtggaaaggcaaggcctgaagaaatccatggactccaaacccaaaacggggagaaatggatctactactgcaatgggccagggtatcgatatccctgaagcttgtaacaaccccaagtgggaaacccagtgggaaaagaaatctatcccgtttccttttcaatgcccattgaaaagggaggttggctgcttttccccatggggaaacccg

SEQ ID NO: 97790 - DNA, 834 bp, Homo Sapiens
ggggactgattacgtagcgggcggggccggaagtgccgctccttggtgggggctgttcatggcggttccggggtctccaacatttttcccggctgtggtcctaaatctgtccaaagcagaggcagtggagcttgaggttcttgctggtgtgaaatgactgagtacaaactggtggtggttggagcaggtggtgttgggaaaagcgcactgacaatccagctaatccagaaccactttgtagatgaatatgatcccaccatagaggattcttacagaaaacaagtggttatagatggtgaaacctgtttgttggacatactggatacagctggacaagaagagtacagtgccatgagagaccaatacatgaggacaggcgaaggcttcctctgtgtatttgccatcaataatagcaagtcatttgcggatattaacctctacagggagcagattaagcgagtaaaagactcggatgatgtacctatggtgctagtgggaaacaagtgtgatttgccaacaaggacagttgatacaaaacaagcccacgaactggccaagagttacgggattccattcattgaaacctcagccaagaccagacaggggtgttgaaagatgcttttttacacactgggtaagaagaaataccgccagtaccgaaaatgaaaaaaactcaacagcaagtgatggatgggaactcaaggttttgtatggggaatgccaatggtgtggctgaatggaacaagaaaactttttaaaagtttttgtccagaaaaagaccaactttttcaaagcttgcacctggaccacccctgggtccctgaactttcccct

SEQ ID NO: 97791 - DNA, 785 bp, Homo Sapiens
aaggtagcgaggcctgggtggcgaattcggcacgagggttttttagcagcttcctcagtgccattttctgtaacttcttcagaaacttcagagcgcttgaattgtaaacttgtgatatttagttttccccgaatgcagaatactccagcagcatctgagtctaaacgaaatacttcaaattctagttcatcacccatgtttatctccatggtttgccactgctcagctgacaactgctcaggtttaggaatggaggcattgaaacacccatgtactaaacagccaatgtggctagaagacactttattaactatacccataagcttctgccccggttcagggcagaaaataacaaaatcggcttcaatgttaagatgaatgtgtccttgatcatcataaatatctccaagctctcccacaactttgatgttatcatatgcaatagggacacctaaaaggctctcagaatagcgaaggagctccgcatcaagctgttctcgaatgccggtgcgtttcctgttaaggtagcggggcgacagcgcgatgtgcctttggtgcggcccggccaccaggcatgagtagcgactgttcaccagcgcacaagcagcggcataagtcggcaactctaggcaaggcaggacgccagcctgccctaccagagacccatcagaagccgccgctggccgcggcgcctctgagcaacctgcagccatgctgcttgtcaaggttcccacccccggccgtaatggccgaattcccgggcatatgtccggtaccgtcgactg

SEQ ID NO: 97792 - DNA, 1226 bp, Homo Sapiens
ggaatcttattaatagaatgaatagaattctcagtgatgaaaaacattttttgtgctttttacttgttgaatcataagattatcaactgaaaatctttggacctatatccattcagtgtctacttaaatacaatttacctctattttatcatgagcccctcccccagtttcctcccacgaatgttctgcctccccttgccccagcatgtctctctgtgactaaagaattcttccaatccactaataacatttcttatttctgcacatctaggatgacagtacgagccatagtgaccaccaagaccccatctcattagctgtggaaatggcagcagtcaaccacactatcttggcattggcccgacaaggagccaacgaaatcaagacagaggccctggatgatgactgatcagggaggttaaacatgacaagttaacttagtttagacgtagcaccttagcagactttcctcggtccttaacatgtgttcttacagtataacttgcagtttcttgtatgtcaggtagctgttagggtcttgttctgtgaagatggcatggtgccctcagcctttgcatatactctctcagtattaactcccagtaaataataaccaaccaaccaaccaaacttccctctcccagcccccgaggctagaaaatcttgctgctccgtcttagcattccaagaaagtgcttccaggtatttagatagccctcagttctcaaatattagactacgtgtaaaatcttgggtacctttagattcttgtaacactagtctgtactcccttttccttccccaagactgataggatgcaagctgaggtcgtggcacaggaatgacagacaccatttggggagtatccacagagtcaaaggaacactagaatccccacctcagcgtgaggataattgatttccagctgcaataagccgtgcctcattatagccacactgtggctagattatacttctttgggtgctgtgctaagaatgtcaatggaaaaaagccgatctcagattttggttggaagttaccatgcctgaaacagacatccctttcctctcacaagctgtgggacttagtagataaaatactgcctttctgccctttgggacctggattaaaacccaggaccaaaaccccgaagtcatcccggttataccacatcaccgaatattaattaaaatgtcgggccgccctcgggcccctcaaaaaccttc

SEQ ID NO: 97793 - DNA, 900 bp, Homo Sapiens; identical to SEQ ID NO: 6131

SEQ ID NO: 97794 - DNA, 482 bp, Homo Sapiens; identical to SEQ ID NO: 14378

SEQ ID NO: 97795 - DNA, 807 bp, Homo Sapiens
  misc_feature (21)..(21): n is a, c, g, or t
gtgtcccaaccgtggtttatntgggtggggccaagggaaaaatccaaggcattctttttcccggtaattaattttacttcttcatttcataacattcgatatgctctggaattctttaaagtatctcaaagtgttttctggagaaatctttttactacatcattatacttgatattccatagcattgctatggactttagaataagaggcttaacaattaggctttggttttaatgtcatctggacagaagttggacatgctttgataacacaattcaactactacacatattatggtaatgtgaaataacacatttaaaaagacgaaggttcccctttcagtagttataatctgtattattcaagactgctgcaaaactcacaaaagaatgatatggataacaagaaagtataggaaaggggtaagacactcacttaaagctttaccagaacacaacacaaaagcaagaacatcaattctctacatttgtctataaggcagactggcaactttttatacaagatctaaaatatggtgcttattaagaggtagaaaatactaaaacagcatttaagaaaaacatgttgagttatccaaaacaatcagttattttgctaaacttttacaaagtcaaactgcggtgtggaataaacggtatgttttatattaaactgggacattccatactcaacagggaggtgatcaaacggagggacaaaaaacggggtggggtgggaagcaggaaacagtctcttaacttctcaaggactcagctctcactaaggagaaatttcctactgtctccc

SEQ ID NO: 97796 - DNA, 878 bp, Homo Sapiens
  misc_feature (210)..(423): n is a, c, g, or t
  misc_feature (455)..(469): n is a, c, g, or t
  misc_feature (512)..(541): n is a, c, g, or t
  misc_feature (545)..(717): n is a, c, g, or t
  misc_feature (734)..(795): n is a, c, g, or t
gggatggagcgcgcgggcgctactagccgcgggggccaagcccctggcttcttactgcggcttcatactgagggccgagccgaggcggcgcgggtgcaggagcaggacttacggcagtgggggctgacagggattcacctacgctcttaccagctgggaggggaagttaaaaaactggggcttcgcccccgcccgggggcgcaaccattnnnnnnnnnnnnnnnnnnnnnnnnnnnnnnnnnnnnnnnnnnnnnnnnnnnnnnnnnnnnnnnnnnnnnnnnnnnnnnnnnnnnnnnnnnnnnnnnnnnnnnnnnnnnnnnnnnnnnnnnnnnnnnnnnnnnnnnnnnnnnnnnnnnnnnnnnnnnnnnnnnnnnnnnnnnnnnnnnnnnnnnnnnnnnnnnnnnnnnnnnnnnnnnnnnnnnntgagttatttcccgccccgcgcccgttccttnnnnnnnnnnnnnnngttatggtccccccaccctcccgctcccttttccacgtttttnnnnnnnnnnnnnnnnnnnnnnnnnnnnnntcannnnnnnnnnnnnnnnnnnnnnnnnnnnnnnnnnnnnnnnnnnnnnnnnnnnnnnnnnnnnnnnnnnnnnnnnnnnnnnnnnnnnnnnnnnnnnnnnnnnnnnnnnnnnnnnnnnnnnnnnnnnnnnnnnnnnnnnnnnnnnnnnnnnnnnnnnnnnnnnnnnnnnnnnnnnnttcctttgttacttctnnnnnnnnnnnnnnnnnnnnnnnnnnnnnnnnnnnnnnnnnnnnnnnnnnnnnnnnnnnnnnatgtgggcgtcccgcccagtatttatgccccccgcggctctttcccgcccctgtatatatttttcttttcccacccttttact

SEQ ID NO: 97797 - DNA, 872 bp, Homo Sapiens
ggtggagcctaaagagaaaccgaggtgcaaattcatttcatggtgactgacccttgagcttaaacagaagcagcaaatgaaagaaccggacaaataaggaagggcacaagcctacccgactctatttacagtctgtaactttccactcttcctgtagtcccgaggccctctgggtccttctagcttttctctttcccatccttggggccttgtgtgatgatgggcgtggggctgccgatgggaaagacgggggttgttaggcttttctgcctgctcctgcttaaacacaagaaggaatcctggatcttgccctctccttagctcttagtctctttggtaggagttttgttccagaggagctctcccccttggatttgaacttgctctttttgccgctgttgttctttctcttctttttcgtacctcccactaaaggggctccaaactatcctggcctttttctaccttgctgcgcttctatcccgtcctcacctcccctctgattgttcctttccccataactgggggcccgatttgttcccccagcccgcccaattttggatcccttcccccccttttggcccaaatttctacggcggaagtaaaccctatttatgccacccactatatggtttaatccataattaaaccttccttgccgggttcctaaaccgccctataatgcccctgcaggaaaaaaccccaagggccattttcccttcccgaccaaacaacccctttgacttgcttgaaaaaggccaagcttcccttggaaaaaacgggccctgcctccttccaagaaaacgccctttcatttttgccaactgggttatcacggcaatccccacccgggggataagtcccaacccccc

SEQ ID NO: 97798 - DNA, 395 bp, Homo Sapiens
ctccatggtcctgccccactctcttctcttggttctttgaggcatcaggtgtttgccaccactggacttctgtcatcgctgcctccaactcttcccccatctttccggagctcccccacccccatccccttcgaatctcagcttggctgtttcctccttggagagatcactcccaggaccccctctgcaggggtgccacatcacctgttctgaattcttaagagcacccctgctctcagaactccttatttatttgacttgtttgtatccctgaactagaatgtaagctccatgagggcaaggccttcctctgtctcgtttccctgctgtatccccagtgcctggaatagtgcttggtgtgtagcaggcactcaataaactgtggaaagaataaa

SEQ ID NO: 97799 - DNA, 777 bp, Homo Sapiens
  misc_feature (722)..(722): n is a, c, g, or t
  misc_feature (751)..(751): n is a, c, g, or t
ggagctggtatcaacgcagagtgccattacggccgggaaatacaaagcagctgacttccctggatcttccccccactcctcacacctcacatgtccgaggagctgccttcattcaggcgggtagctgcactgggcatggggtggtggtgggagcttaccgccacctattcaagctctcagctactcctgaaacgggcagagatgatgaacagaagtgtatgtaaatacagcagctagtgggagagcaccagttgggcctaatcctgcctcatcattcttggcaggaatctgcaaatggaaacattgtgagtatcagcaatctgggaagtgacagggttaataactccttcccagaagctgtatcatgagattttgaggggaccgagccctgttacatggatgtgaacagtgaggatcagaggttttatcagaacacattctttttttctaccaactctccagagcgtgagtataggagtgccatgagctttttactcagcagttttgtaaactctgtatataaaatcattaaccacacattgtgggtgatgggaagacgatttcagctgacagagttaatggcaaccaataatggtggcctgtagctgctaagagcttcacgcaggtttggcctgggctttcactgttggtgaatttagagtgtccttttaggtggggcggctattctaaaagtgtctttctatcactggttaaggggggcnggaaagtgaggttcgagggatgacgttanggtaactcctcccctcccaaagtcca

SEQ ID NO: 97800 - DNA, 704 bp, Homo Sapiens
  misc_feature (544)..(554): n is a, c, g, or t
  misc_feature (557)..(558): n is a, c, g, or t
  misc_feature (563)..(563): n is a, c, g, or t
  misc_feature (565)..(565): n is a, c, g, or t
  misc_feature (577)..(647): n is a, c, g, or t
ggtccagaggccataggtgacatcactaaaattgcaagataaattgtaatctttgctgctgctgcactccccaacctctcccccaccccccgtggtgtgctgctttctagatgagcgtgttttggagcaggcccatctgggacactctatgctttcaccaaggaagtgcgatctgagcagccacaatccagccaaaagaggatcgtagatatttgctctgatcaactagatgaaaatatagcagaatggatttagcccactgctctgttttatccaactgagtctctgaccagcaattggtgcataattattacagcaaaagttaagaaatgaaactgtagcaattatgtaaatgaatgtgttggcctcttaatacctgttactagtggacttcctgtgaggaagttagttttttgttttgatgaaatgctttcgttttttaaatcttaattctgctgtccacatcctcccaaagtgtgcttacttcatttgtttaatttaaatgaaccttcctccttgtatgtatgaggtgacttggtgggtnnnnnnnnnnnctnnccctntncctttttttccnnnnnnnnnnnnnnnnnnnnnnnnnnnnnnnnnnnnnnnnnnnnnnnnnnnnnnnnnnnnnnnnnnnnnnngttcctccgttcgcgcctctgcgccgccgtgtcgttcttctcttcctcctcccgccc

SEQ ID NO: 97801 - DNA, 435 bp, Homo Sapiens
gtttcgtccaaactcatcatattcaccatcagattcttctctttctatatattcaacattttctctttcattaaaaccaccaccatatcctgttctttcttctaatttagcatactttggagtattacacatattacactctgatcttctggcccaattcacattgctgcaagttttacattgccagtcattagcactaaataggcctcggctcttttctgcaagtgtctttcctatttcagtgcccccagctttcatcatcttggcctcagttgttttctcccgaccacatcgattacagctggttcttctagcaaagtttacatttccacattttttgtcagggcaaatccagtccccgtcactgactcggaaattcttggtcgacatcttgaacgccaccagcacagccacccgcagctatgtcttcacccc

SEQ ID NO: 97802 - DNA, 806 bp, Homo Sapiens
  misc_feature (159)..(184): n is a, c, g, or t
  misc_feature (301)..(364): n is a, c, g, or t
ggggcagtcacagacacttgagcacacgcgtacacccagacatcttcgggctgctattggattgactttgaaggttctgtgtgggtcgccgtggctgcatgtttgaatcaggtggagaagcacttcaacgctggacgaagtaaagattattgttgttannnnnnnnnnnnnnnnnnnnnnnnnntaagaaaggaaaatatcccaaggactaatctgatcgggtcttccttcatgaacgaatgcaggaatttgggaactgagctgtgcaagcgctgaagaaggagatttgtttggaggaaannnnnnnnnnnnnnnnnnnnnnnnnnnnnnnnnnnnnnnnnnnnnnnnnnnnnnnnnnnnnnnncggggactatggggagaaaaaagattcagattacgaggattatggatgaacgtaacagacaggtgacatttacaaagaggaaatttgggttgatgaagaaggcttatgagctgagcgtgctgtgtgactgtgagattgcgctgatcatcttcaacagcaccaacaagctgttccagtatgccagccctgacatggacaaagtgcttctcaagtacacggagtacaacgacccgcatgagagccggacaaactcagacatcgtggagacgttgagaaagaagggcccttaatggctgtgaacagccaaaccccggatgcggaccaattccgtaggtcaccagccctgaatctgaggacaagtacgggaaaattaacgaaagaatttgatccaatgatcagcagggcaaagaattgggggccttgttcccctcccccactttca

SEQ ID NO: 97803 - DNA, 713 bp, Homo Sapiens
gggagttactgagaactcataagacgaagctaaaatccctcttcggatccacagtcaaccgccctgaacacatcctgcaaaaagcccagagaaaggagcgccatggattactacagaaaatatgcagctattctttctggtcacattgtcggtgtttctgcatgttctccattccgctcctgatgtgcaggattgcccagaatgcacgctacaggaaaacccattcttctcccagccgggtgccccaatacttcagtgcatgggctgctgcttctctagagcatatcccactccactaaggtccaagaagacgatgttggtccaaaagaacgtcacctcagagtccacttgctgtgtagctaaatcatataacagggtcacagtaatggggggtttcaaagtggagaaccacacggcgtgccactgcagtacttgttattatcacaaatcttaaatgttttaccaagtgctgtcttgatgactgctgattttctggaatggaaaattaagttgtttagtgtttatggctttgtgagataaaactctccttttccttaccataccactttgacacgcttcaaggatatactgcagctttactgccttcctccttatcctacagtacaatcagcagtctagttcttttcatttggaatgaatacagcattaagcttgttccactgcaaataaagccttttaaatcatcattcaaa

SEQ ID NO: 97804 - DNA, 835 bp, Homo Sapiens
gggaagataatgattatgacagatcaggaccaagatggttcccacatcaaaggcttgctgattaattttatccatcacaactggccctctcttctgcgacatcgttttctggaggaatttatcactcccattgtaaaggtatctaaaaacaagcaagaaatggcattttacagccttcctgaatttgaagagtggaagagttctactccaaatcataaaaaatggaaagtcaaatattacaaaggtttgggcaccagcacatcaaaggaagctaaagaatactttgcagatatgaaaagacatcgtatccagttcaaatattctggtcctgaagatgatgctgctatcagcctggcctttagcaaaaaacagatagatgatcgaaaggaatggttaactaatttcatggaagatagaagacaacgaaagttacttgggcttcctgaagattacttggatggacaaactaccacatatctgacatataatgacttcatcaacaaaggaacttatcttgttctcaaattctgataacgagagatctatcccttctatggtggatggtttgaaaccaggtcagagaaagttttgtttacttgcttcaaacggaatgacaagcgagaagtaaaggttgcccaattagctggatcagtggctgaaatgccttcttatcatcatggtgaagatgtcactaatgatgaccattatccatttggctcaaaatttttgtgggtagcaataatctaaacctctttgcgcccattggtcagtttgggaaccggcctacatggtgggcaaggattccggctagtccacgaaacctcttttacatggt

SEQ ID NO: 97805 - DNA, 822 bp, Homo Sapiens; identical to SEQ ID NO: 5530

SEQ ID NO: 97806 - DNA, 860 bp, Homo Sapiens
ggaaatgaaagggtgtggtttccatcaatctgatgctgcccatcgcttgcactggggtctttgtggatcgggcaggagttttcagtgtgttgggtgttgctccttcctatgtgtcttttgaatctgaggctgacatttgcttggaaggccagacccttgctccatcagagagggcagtggcaaaggccagtgaggcagctgtgagttggacagggttcaggtgagatggtgttgtcatttgtgcttagtgttggtggtgctcagggtggataacacgggtcgttctgcagcccgcttcagcacaaataggcagcttaaggcctggctcacaggctgtggggttgatctggctctgcagaggccctaggcagcttgttgactgctgtctgttgatgacgtgtgtgcaaagcaggctctagcaaccatgatcactgtccttgccttcctggttctttctctcggttggttgccagggcttgcagatcgcagtgaatttttccctttggggaacatcgccttgttttgtccctaaagtgaacttgtggcttatggccagtgctgcttggtggtctgccttcctttttaagggaatttcccttcccccaaagaaaaagggctgcattttgccttaatcaaaagaaggtgcaaattttaagggaaatttcctatggaggcggccctgttaattcgcgcagcccacgtggtccctggattccaaggcttcccgccccacgcttttggcgctgacccccactccatctttggatcccccctcattgcgatttcgcggccaaaagcacatccttaagcggtgcaaacaacaggaaggtgaaccttccccctaaccttgagaacagcgg

SEQ ID NO: 97807 - DNA, 819 bp, Homo Sapiens
  misc_feature (253)..(253): n is a, c, g, or t
caaacagcccccgataacgctacgtgagctgggccctgggcctgaggcagaaaacggacggaagaaaaggtctggccggagatgggtctcactctgtcacccagactggagtgcagtgagtggtgcgatcatagcttactgcagcctgaaactcctgggctcaagtgatcttctcgcctcagcctcctgagtagctggagctacaggaatgagcatagatgaacaatgttgcatcacgcttgacatcaccggngcttctttccagtgtggatttgctcatgtaaaatgaggtgtgagctctgcctgaaagcttttccatatgcatcacatttgcagggcttttctccagtgtgggttctttggtgtctcaaaagatgtgagctgttactgaaagctttcccacacacatcacactcatagggcttctctctaccgtggattcgctggtgtccaacaagagctgaactgtatctgaaggcctttccacgcttgtcacattcatatagtttctttccactgtggattttctggtgacagaagaggcccaagcactagctaaagcttttccctcactcactacactgctatggcttctcttcagtatgaactctgatgttgtctcagatatgaactcagagaggatctcccacaatcattacactggtatggtttcttttccgtgtgagttctctggtgtcaaataacatctgagctgtgatgaaagactttcccacactcactacattggaaaggtctctcctgtgtgggtccttcaatgctgaataagatatgaactgtaataaaagactttttcacact

SEQ ID NO: 97808 - DNA, 951 bp, Homo Sapiens
atcctctatctgtaccgcaagacaccgacatggttcctccaccttcccagttgcaccgaggattcacgtgctcttcccttcttttacttctttgaccaacaattttcctttaactggcaacccatctcttaatccgtcagtatctctcccagggtcattaatagccacctcatctaccggtggcaactccaaatctctccctcatcctagctcaacggcagctgttctctcagggctttctgcttcagcaccagtctcagcagcacctttccccctcaacctgtccactgctgttccctcacttttctctgttactcaaggacctctgtcatcttcaaatccctcctatccaggcttttctgtctctaataccccaagcgttacccctgctcttccctcattcccggggctgcaggcgccctctacagtcgcagctgtcacaccactacctgtggctgccacagccccatccccagctccagtcctcccaggattcgcctcagcattcagttccaatttcaactccgctcttgttgcacaagccggtttatcatctggacttcaagctgcagggagttctgtttttccaggccttttgtccctcccgggtatccctgggtttcctcagaatccttcacaatcatccttgcaagaattacagcataatgcggctgcgcagtcagcattgttacagctggtccattcagcttcggctctggaaagctatccagctcagccctgatgggtttcctagttatccttcagcgccaggaacaccattttctttgcaaccaagcctgtcccaaaagtggggtggcagtgaatactttttaacttttattcttccttcagagcaacatcagaattgccctgaaaacggcaatgaaacatctgaccaatggtgaaagctgggccaaaagtcggaaaaatggaaaatgagggtaatcctgg

SEQ ID NO: 97809 - DNA, 1061 bp, Homo Sapiens
  misc_feature (553)..(553): n is a, c, g, or t
cagtcgacggtaccggacatatgcccgggaattcggccattacggccggggggggaactgatggcgttcctgttacctctcatcattgtgttaatggtgaagcacagcgattcccggacgcactctctgagatattttcgcctgggcgtttcggatcccatccatggggtccctgaatttatttcggttgggtacgtggactcgcaccctatcaccacatatgacagtgtcactcggcagaaggagccacgggccccatggatggcagagaacctcgcgcctgatcactgggagaggtacactcagctgccgaggggctggcagcagatgttcaaggtggaactgaagcgcctacagaggcactacaatcactcagggtctcacacttaccagagaatgattggctgtgagctgctggaggatggaagcaccacaggatttctgcagtatgcatatgacgggcagaatttcctgatcttcaataaagacaccctctcctgggctggctgtagataaagtggctcacaccatcaagcaggcatgggaggccaantcagcatgagttgctgtatcaaaagaattggctggaagaagaatgtattgcctggctaaagagattcctggagtatgggaaagacaccctacaaagaacagaatcagaaactatccctcttgtgatgaaagctgtctctgggtccattgtccttgtcattgtgctggctggagttggtgttctagtctggaaaagaaggccccgagagcaaaatggagccatctaccttccaacacccagatcgatgattgcagatccctcttttccagttctccttcctctaggagccatgttatcctctgtcccccatagagtcaagcctagtgcttgaaggtcctgacgacacccacaacatacatgagagtaatgggattgagcatttatggcagcaacagaggagccacaatgttctttgttctttggctccaaaaagactgtcagctttcagtctcttttgatggactgttttatcagagttgactttaaatacagcttgtctcatgacaaa

SEQ ID NO: 97810 - DNA, 903 bp, Homo Sapiens
  misc_feature (33)..(33): n is a, c, g, or t
  misc_feature (58)..(122): n is a, c, g, or t
  misc_feature (126)..(126): n is a, c, g, or t
  misc_feature (169)..(200): n is a, c, g, or t
  misc_feature (281)..(290): n is a, c, g, or t
gataggggagagagggtgacgggggggcggggncgggcggcgccgcatcgcggcgaannnnnnnnnnnnnnnnnnnnnnnnnnnnnnnnnnnnnnnnnnnnnnnnnnnnnnnnnnnnnnnnnccgnagcgggagaggatgttaagccgggcgggggcgaatatgtagannnnnnnnnnnnnnnnnnnnnnnnnnnnnnnnaggcgttataaaaccaccagtccaaggaaagaacgtgacggcggacagggaaataagggaggcaagagcggggtatgtttnnnnnnnnnnaacaggtgcgggagggctgcagagtgggggctcggtgtgcgattgggcgtcgggtggatcagcgggggcgggagactgctttgagtcaagaaacagtcttttagcataaagtagtctttcaattctaagggctgttagagtgcttatgccctttgtttgaaagccaacatctgatttaaaaatgaatgcatcctgaaagagatatctaatgatatcagttgattgcattctgttatgaaagttatttaaaatgttccagtttgaatgaactatttttggtttgcaaagtcccaaacaacatagcctcatagttctgcttgttgaaactaatgtactgaattgtctaaggttccagaaaaaggagcccgctttgttattcattttgctctccactgaaacacttccaaatggcttcaaagttgtcaacatgaaaccaacgtcacttctactagtgaaaaagaacacgtgctgtcgttttcttccaggaccactcgtgagactcttctcctcgaagtaaaaagtctaggatgtgatacgggctgccgctaagcccagctcgtcctccactcaccttagagcacagaccgtgactacgtacaggagcagccataac

SEQ ID NO: 97811 - DNA, 1174 bp, Homo Sapiens
  misc_feature (189)..(189): n is a, c, g, or t
  misc_feature (265)..(265): n is a, c, g, or t
  misc_feature (346)..(346): n is a, c, g, or t
  misc_feature (418)..(418): n is a, c, g, or t
gttttcctggaagtaaagggtttgcgtgtttggctccgaaaggcccttcatcatgggatggtggttttgcaagctcccggaatcatatgagggtaacccaggggacacagcacggagtaagacggtacatatttgccatgtcatttttttctccttgtcgaattatattatgacattctgcaggtaaanactgtaagtggtctgctaccattcgttgttgacattcatgaatcaccttagtatatgaacttggatgtaggtattntcgacatcgaatttcttcatcttttaatctacctagaaccttttccatatactgtgagcagtttgattcttgtaataaatntgaagcttcttgtttgtaatactctcctgtttcagtcagaaagggagactcaaaaatttcctgataaaactntaaggggaattttttcttatactgttcaacatgaacaaaggagttaataaccccatggattactttctggtttgggtcttctccaccacgatcatttttgatttctcggagcagcattcggataaggatggcctaaagtggttcaaccatcaatttcttccacatatccaatgctagctctcctatttccataagtggttcattcatatctacaccaccatagccatactgaaggtccgcttctgttaatttattctttttaataaactgggtgttgagatacctatataagcagtccatatagtctgcacccttgctgtattcttcccagtacctatgatacataacaagtacttgttcttctgactccaaaactctcttatgcaaatgccgaacatgattttccaaaaaaatcttagtttctgtataaagtctttctccaaggggttcaggataggccacacataaagcatagatatctgagaaacggtcattccatgttgctctttcgacgtattccaacatgaccacggcttttattgtcgtcaaaagtttgttccatgtttcatcaaaatctactactcttggtttcaaagacattgtgcaagtgtagtgttgaaatcttctgcagaagcagggcaaggggcaggggacaaggggagggggaggcagcccgaaggagtgaaagacgaagccccggcgaggaaggtggacggaggcggcggcgcggcggctgtcagctcgcgttccctgctc

SEQ ID NO: 97812 - DNA, 963 bp, Homo Sapiens
cggcatggcgaccgcggagcccagcggtgcgcgcgtttgcggttgtctaccccgggaccccggcccagcggggctcggtgacctgcgcgcctgggagctgcgtgggccaccctccgggcagatcggtaatagagccctccgtctgggggagcgcacccccgctgtgccgtggaaaagcgggggccatacatggtgacgcgcgcaccctccattcaatgccaagctgcgtcagtgaatgtttaacaatggtgctatacgtgctcttagccagagtccagatgaaaacctggtgtccctcgactctgacagtgatggggagctgggatccagatactcctccgggtattcatcgtgcagagcaatgtgaaccaggatgtgagccggcagctgcttcaggatgggtatcacctggatgagattccagatgacgaggacttggacctcatcccccctaagcccatggcctcttcaacattgctcctgctgcgtggtgctgtcttggggactcttcttcctgtacccctccagtagacattaccctccaaggtgggccctgctcaccatgaggcctacagagccctgttggccactcatagctcacacagtgcagtgagcactgaagtcactgacccctagaaagtgacctgcaggtagcccttacctgttgcttctcaggccagaggcccccatctgggctgtgggctgataggtagaattctgtagttttcctctgctgttggagcagagtttggagaagtcactttaataagggcaagacagaaaattctggttcttatggtgggtgacaaaggtggctaaggaaaacacttgcagacagcttgattggtatttgtcatagtgcttcagggaggcaaaaagggagctcttgtgcccaggctgtgctagatagtgttgaatggaggcagaaaatagcactttatggtttattatagctggcaatcc

SEQ ID NO: 97813 - DNA, 803 bp, Homo Sapiens
  misc_feature (369)..(446): n is a, c, g, or t
tttcaatatacccaatccccctgttcttcgttggcccattagggaagttggaccccaccgggattggccatttctctttcgtggtctaagcgacccctaggattcggggggagattttcaacaatttccagagggtgccctgagttctaaatgtccttggttttttcttcgagagaaagagtctgtaggtatgttgaaccaaagctttttttctctttcttattttattggggaaaattctttgctatctttcttcggacttatgtttgaatctatcttaaattaccataaggttttcatttttttaattcctatagaattatctaaatcagttttattttcagaacccttgtgattagccttcttggnnnnnnnnnnnnnnnnnnnnnnnnnnnnnnnnnnnnnnnnnnnnnnnnnnnnnnnnnnnnnnnnnnnnnnnnnnnnnngactcaatgctttgctatcttcaccagagagattggaatcagaatctgaaaggtcgtaaaaacgcttcaaatcctctgtagtgctatggctaatggggcgccctcttttatccacggcatagttcaacttgaacttcttgtcatgaaacatggctcgaaatctcttgtcaattttgacttttcgatccttttctggcatttcccaaaatctcgggtcctttgcaacccgtctaaaccgctggtcactcattatttcttgtttggatgacatttttaattcttaatctcgaccaaatgcttgaagaaaacaaatacgtccgcagtcctaccaagcctcacgtggggctcacacccccc

SEQ ID NO: 97814 - DNA, 737 bp, Homo Sapiens
  misc_feature (557)..(557): n is a, c, g, or t
ggattaaagaaaatggactttttttattttaatttctcattaaacttctaaaattcttataggtgaggatcatttttccccccaccttaggatggtgaatgttgcaacacaatgacaggtttaagtcagtcaagtttattggacccttgctttgataccattcttgggcacatactccaagattgtattagatttttgtgatgaagagcttccattacttctgaaaactatatttatctgagtgagtccaaggtgcaactcctaaatgaattgtgttgcagagaactcccagtataattcactgaccagtacattttataaccatccaggccttggtttgcaagcaacagaccttaaacatacaggaaactattaaaattggctcgatcagtagtcataggaattggtataagaagagactcatttagagctcagagttttcttcacataatgggggtattaattatttgtgctgttgcgaaattatgtgtcttattcttaaagccatggtaaaaatagggatctgtgaaggaaatttctaaaattggatgtattangttttgaactctgagattgcacaaatattcaattaacttgaagttgtgtacatagagaagaaaatttggttttagcaaatgacagagccttcaaaaatattttttgggaataatgggtgaataaaccgaaaactggggggcaaagccagaaggcacaggttttttctcaagttaaggaag

SEQ ID NO: 97815 - DNA, 1345 bp, Homo Sapiens
cttgtgtgtgcaggtgtgcacatgtttggccacaggcatggcgaggtgtatgttaggagcatgtgtgtttgtaggcagactcatgagcaggtgtgtgcaaatacatatccagctgcactgtgggtgtccacccacaccttgtgttcctcatggcctaccccagcctttcttctccactgggtcccactgttccctggagacagagggctagcatgctgtcatttatctgaaggttgtggctgacccattctcctgggatttcccaggccacctctcctttccctttccctcacttaacccagacttgctcagctgaggctattgtccctgatgttggctttacttgtaggaggtttagtggctgctctggcctgccatggaattttggctgcaattttggcagtgtgtggagaactggtatcacggacagggaaccaggagtagtgatgaagatgatggtggggatggggacagaggacataggggactgtccctcttgaactctgcctttgggcacatgggagatggggacaggaaagatgataacagtggaaccctgtgaaggaataggcagaatgggaattctaaaataccagttcccaaacaaaccatctctccattggaaaaggagctgttgcaaaccgtgttcatttaagcttctgatgaaaagcaatgtatgtttataagcttgcaagtaacagacaagatgttccaaggccgatgaggaaaatatcgcttccctgtctctgcctctaccttgctgtgcctctctggctttagcagcattggatgttgaattggtttggttcatttctctgaagtcggactgtcaggaggagccagaggttggctttctgggatgtgaaggggacagtgtcagcctaagcctctggagatgcttaggatgctgaattttaaccccttctttcactgcatggcccttcaaacagggattggcaggctccgcgagttacagagggggtgagtcttggagagaaccaacgactaaggtagcttagctctctgctttgttcttgggagccaagagaatgcaagatcctggtgggtgagcagtggtatgaagaggggacactggtgggtgaacagtggcatggaagtcactgatgcagcctctggccctcagtctccctatcggcaaagtggggggctcttcctatctctaaagagtttcatccctgacaggtggatgggtgaaagatccagagagtgggggtgaggggtgggccctgaagactttttgtctgtagctcttgcatattgagtgtataaacccggcttctggaccaacccaagatgaataaactggggcagaaaattacaaaaa

SEQ ID NO: 97816 - DNA, 1434 bp, Homo Sapiens
ggggccactctgctggctgaggctgcggagagtgtgcggctccaggtgggctcacgcggtcgtgatgtctcgggagtcggatgttgaggctcaggcagtctcatggacagcagtgcctgttcacagccccatggcagcgttacccagtcccaaggctcctcctcacagtcccagggcatatccagctcctctaccagcacgatgccaaactccagccagtcctctcactccagctctgggacactgagctccttagagacagtgtccactcaggaactctattctattcctgaggaccaagaacctgaggaccaagaacctgaggagcctacccctgccccctgggctcgattatgggcccttcaggatggatttgccaatcttgaatgtgtgaatgacaactactggtttgggagggacaaaagctgtgaatattgctttgatgaaccactgctgaaaagaacagataaataccgaacatacagcaagaaacactttcggattttcagggaagtgggtcctaaaaactcttacattgcatacatagaagatcacagtggcaatggaacctttgtaaatacagagcttgtagggaaaggaaaacgccgtcctttgaataacaattctgaaattgcactgtcactaagcagaaataaagtttttgtcttttttgatctgactgtagatgatcagtcagtttatcctaaggcattaagagatgaatacatcatgtcaaaaactcttggaagtggtgcctgtggagaggtaaagctggccttcgagaggaaaacatgtaagaaagtagccataaagatcatcagcaaaaagaagtttgctattggttcagcaagagaggcagacccagctctcaatgttgaaacagaaatagaaattttgaaaaagctaaatcatcccttgcatcatcaagattaaaaactttttttgatgcagaagattattatattggtttgggaattgatggaaggggggagagctgttttgacaaagtggggggggaataaacgcctgaaagaagctacctgcaagctctatttttaccagatgctcttggctgtgcagtaccttcatgaaaacggtattatacaccgtgacttaaagccagagaatgttttactgtcatctcaagaagaggactgtccttataaagattactggatttgggccactccagaattttgggagagacctctctcatgaaaaaccttatgtggaacccccaccctacttggcgcccggaggttcttggtttctgatggggacctgctgggcattacccgtgcctgttgaacttgctggagctttagggaactcattcctttttatcttggccctgccagggggaatccccccttttctcggaacccgcggcatcctatcttcctctgcaagggctcaccatccctccggcggcac

SEQ ID NO: 97817 - DNA, 1276 bp, Homo Sapiens
gggaaatagataaaacacgccacagcctgggaaggagcgtgctctaccctgtgctaagcacggggttcgcgcaccaggtgtctttttccagtccccagaagcagagagcacagcccctgctgtgtgggtctgcaggtgagcagacaggacaggtgtgccgccacccaagtgccaagacacagcagggccaacaacctgtgcccaggccagcttcgagctacatgcatctagggcggagaggctgcacttgtgagagaaaatactatttcaagtcatattctgcgtaggaaaatgaattgtttggggaaagtcgtgtctgtcagactgccctgggtggagggagacgccgggctagagcctttgggatcgtcctggattcactggctttgcggaggctgctcagatggcctgagcctcccgaggcttgctgccccgtaggaggagactgtcttcccgtgggcatatctggggagccctgttccccgctttttcactcccatacctttaatggcccccaaaatctgtcactacaatttaaacaccagtcccgaaatttggatcttctttctttttgaatctctcaaacggcaacattcctcagaaaccaaagctttatttcaaatctcttccttccctggctggttccatctagtaccagaggcctcttttcctgaagaaatccaatcctagccctcattttaattatgtacatctggttggtagccacaagcctgaaatttctcagtgttgggaaagtttctttacctaccctcactatatattattctcgttttaaaacccataaaggagtgatttagaacagtcattaattttcaactcaatgaaatatgtgaagcccagcatctctgttgctaacacacagagctcacctgtttgaaaccaagctttcaaacatgttgaagctctttactgtaaaggcaagccagcatgtgtgtccacacatacataggatggctggctctgcacctgtaggatattggaatgcccagggcaattgagggactgagccagaccttcggagagtaatgccaccagatccctaagaacgcggagccaatggcactgcaggtgagaacccgccatccgtgctatgacttgggaggcctgaaagcccgaggacagtgtgtggagaatctaattcccaccagccaggcgtccccttcagcattatgcttcacacctaagtccttatcttcaaccactaggccatgagcaactttccttcacattttaccaggactcgtcttcccacact

SEQ ID NO: 97818 - DNA, 1251 bp, Homo Sapiens
ggttcgtgcccggctggcgcggcgtggtttcactgttacatgccttgaagtgatgaggaggtttctgttactatatgctacacagcagggacaggcaaaggccatcgcagaagaaatatgtgagcaagctgtggtacatggattttctgcagatcttcactgtattagtgaatccgataagtatgacctaaaaaccgaaacagctcctcttgttgttgtggtttctaccacgggcaccggagacccacccgacacagcccgcaagtttgttaaggaaatacagaaccaaacactgccggttgatttctttgctcacctgcggtatgggttactgggtctcggtgattcagaatacacctacttttgcaatggggggaagataattgataaacgacttcaagagcttggagcccggcatttctatgacactggacatgcagatgactgtgtaggtttagaacttgtggttgagccgtggattgctggactctggccagccctcagaaagcattttaggtcaagcagaggacaagaggagataagtggcgcactcccggtggcatcacctgcatcctcgaggacagaccttgtgaagtcagagctgctacacattgaatctcaagtcgagcttctgagattcgatgattcaggaagaaaggattctgaggttttgaagcaaaatgcagtgaacagcaaccaatccaatgttgtaattgaagactttgagtcctcacttacccgttcggtacccccactctcacaagcctctctgaatattcctggtttacccccagaatatttacaggtacatctgcaggagtctcttggccaggaggaaagccaagtatctgtgacttcagcagatccagtttttcaagtgccaatttcaaaggcagttcaacttactacgaatgatgccataaaaaccactctgctggtagaattggacatttcaaatacagacttttcctatcagcctggagatgccttcagcgtgatctgccctaacagtgattctgaggtacaaagcctactccaagactgcagcttgaagataaaagagagcactgcgtcctttttgaaataaggcagacacaaagagaaggagctacctaccccacattacctgcgggatgtctctccgttctttttcctggggctgaatcgacatctaaaagatttggagctggacttcagaggtgaacagtaggatgggaagacatacctaacgcgtgctctccgtcagtaccg

SEQ ID NO: 97819 - DNA, 1367 bp, Homo Sapiens
gggggagggggaggtaggcggggcggcgcgtgacctaaggcctctctgccgcgcgcgcagagccaaggcactgatgtttgaactggaaacttcaaaacgtttaataagagtcttcaggatgggtttgaactagacaagctagaaatttctttagaacaccagctctagcatgcatctcccacttttggctttcctggagaggagcttgaagaggtggttctgcagacagccacagtgatactcaggaaaccagaggaatggatttgacttttctgctaggattctctgttatagtttctccctgagttgtaagaggcatggaaatatacatgaaactgaagaacctgcaaggaagggaagtggaactttccatgctgagtgaaaactaaccaagtggcagttgtgactgaaaacactgaaacctaccacgtccagattcactggattgggggcatagaggaacggtcacagctagggagaaagaagtgataccggaaaagaaaacctaaatgaagagaatgaggatgactgcacagtagatggccacctctacctccacagaggcaaagtcagcctcgtggtggaattatttttttctttatgatggttccaaggtaaaggaagaaggcgatccaacaagagctggcatttgttacttttatccttcccagaccctgctagaccaacaggagttgctttgtggacagattgctggagttgtccgctgtgtttctgacatttctgactctcctcctactcttgttcgtctgagaaaactgaagtttgccataaaagttgatggagattacctttgggtgctgggctgtgctgtggagctccctgatgtcagctgcaagcggtttctggatcagctagttggattctttaatttttacaatggacctgtttccctagcttatgagaactgttctcaggaagaactgagcacggagtgggacaccttcatcgagcaaattctgaaaaacaccagtgatctgcataagattttcaattccctctggaacttggaccaaactaaagtggagcccctgttgttgctgaaggcagcccgcattctgcagacctgccagcgctcgcctcacattctcgctggctgcatcctctataaaggactgattgtcagcacccaaatcccgtcctccctcaccggcaaggtcctgcttcaacgaacaggacctcaggagcagagactccctacgggacggggatgcccccgacaggaacatgggagcggcaatgtccccgacatgtccagattatccctggtatagtgaacaaagaagaagcccatagtctccacgaggatccctgtggaaccacgctgaaaaggtctccatgcatctcag

SEQ ID NO: 97820 - DNA, 797 bp, Homo Sapiens; identical to SEQ ID NO: 3514
  misc_feature (86)..(86): n is a, c, g, or t

SEQ ID NO: 97821 - DNA, 667 bp, Homo Sapiens
  misc_feature (513)..(514): n is a, c, g, or t
tctccggaaagcagctatggcagagcccaatgcaaagtttattgaaggtgttgtgttacagttattagaggaagatgatgttgtgatgggagttcagtacaaggataaagagactggagatatcaaggaactccatgctccactgactgttgttgcagatgggcttttctccaagttcaggaaaagcctggtctccaataaagtatctgtatcatctcattttgtaggctttcttatgaagaatgcaccacagttttaaagcaaatcatgctgaacttattttagctaacccgagtccagttctcatctaccagatttcatccagtgaaactcgagtacttgtcgacattagaggagaaatgccaaggaatttaagagaatacatggttgaaaaaatttacccacaaatacctgatcacctgaaagaaccattcttagaaccactgacaattctcatctgaggtccatgccagcaagcttccttcctccttcatcagtgaagaaacgaggtgnntcttctttgggagacgcatataatatgaggcatccacttactgggtggagaatgactgttgcttttttaagatataaaactatgggagaaaaactgctaaaggggtatccctgaccctttaatgatggatgcagcctattttttcaaagcccc

SEQ ID NO: 97822 - DNA, 1219 bp, Homo Sapiens; identical to SEQ ID NO: 7574
  misc_feature (557)..(573): n is a, c, g, or t
  misc_feature (842)..(842): n is a, c, g, or t
  misc_feature (1040)..(1051): n is a, c, g, or t
  misc_feature (1061)..(1061): n is a, c, g, or t
  misc_feature (1119)..(1177): n is a, c, g, or t

SEQ ID NO: 97823 - DNA, 886 bp, Homo Sapiens
  misc_feature (778)..(786): n is a, c, g, or t
  misc_feature (827)..(827): n is a, c, g, or t
ggggagttttccagcggaagtggctcctgtaaggcagcaaggtagcgtggccggcgcccgagctggggttgtgtccctgctgggctgccgttccagctggactgccgccatggaactcagcgccgaatacctccgcgagaagctgcagcgggacctggaggcggagcatgtggaggtggaggacacgaccctcaaccgttgctcctgtagcttccgagtcctggtggtgtcggccaagttcgaggggaaaccgctgcttcagagacacaggctggtgaacgcgtgcctagcagaagagctcccgcacatccatgcctttgaacagaaaaccctgaccccagaccagtgggcacgtgagcgacagaaatgagggactgggatctgcacagccattaaattataaatctggaagaaacccgtgcctggacacgtgagcattgcgcaaccccctcatgagaaaactgagggacaaccaccaatctccttgccggcccgccctcgcccctcgaaaaatctttctagaaccatttcctttgcgcccgcgggcccccgtagggtaaacgagccatggcccttaccctgttttccctaagaaaatctctggcgccacacaataggggctgtggattcctcgcccaagaaaaaaacgccccggcgggaaaccggagccgtcctgagaaaagactccgcaaaaggagagtccttggcggccattacgtgggatcttagctccacccgcagctccccgcgccggacctccgcagacatccaaattcgnnnnnnnnngccgcttggtccgccctcttccacacgacaaatcgcgggtnaggaatggactatgcgcgcacctcttcgtcggcacagatctgtggcgggaggcgtgtta

SEQ ID NO: 97824 - DNA, 396 bp, Homo Sapiens
gcggaagtggctcctgtaaggcagcaaggtagcgtggccggcgcccgagctggggttgtgtccctgctgggctgccgttccagctggactgccgccatggaactcagcgccgaatacctccgcgagaagctgcagcgggacctggaggcggagcatgtgcttccgagtcctggtggtgtcggccaagttcgaggggaaaccgctgcttcagagacacaggctggtgaacgcgtgcctagcagaagagctcccgcacatccatgcctttgaacagaaaaccctgaccccagaccagtgggcacgtgagcgacagaaatgagggactgggatctgcacagccattaaattataaatctggacaaaacacacacccataataacactcaaaaccttgtc

SEQ ID NO: 97825 - DNA, 323 bp, Homo Sapiens; identical to SEQ ID NO: 5059

SEQ ID NO: 97826 - DNA, 1273 bp, Homo Sapiens
  misc_feature (103)..(113): n is a, c, g, or t
  misc_feature (168)..(220): n is a, c, g, or t
  misc_feature (319)..(337): n is a, c, g, or t
  misc_feature (544)..(558): n is a, c, g, or t
  misc_feature (734)..(776): n is a, c, g, or t
  misc_feature (801)..(917): n is a, c, g, or t
  misc_feature (1139)..(1139): n is a, c, g, or t
ccacacccccactggggggggcccaaaaaaattatttttttatatagccgcggccaaaaggggggcggggccccaaacagggggttggaccttcaaatatttnnnnnnnnnnntggggcggggaattttttccagggggtgtttctcacttcccaattgcccccccgnnnnnnnnnnnnnnnnnnnnnnnnnnnnnnnnnnnnnnnnnnnnnnnnnnnnnaagaaaaaataggcctctttttaaaattagagaaaattatttcaccgacagcccagggtttttcttctgtcccggaaaatggagagtttggggccacannnnnnnnnnnnnnnnnnnccgcgtataaaatatttttgtgaaattatttttgggaaggccctttccgcgcctttgtggggagatctcccccccctgggttggggaataagggaattccccccagggtaaaattggacccccttccaaggaaaacttcccccattcttgggatatttggttttccaggagaaccgccttccgggttttccccgccccggggggcgnnnnnnnnnnnnnnngggtgtaggaaatcccaaaggcccctatggttcattgggcccagggaattctcccttaagggaaaacaaggctattgggcccatggtttcacttttccctacttggggccccgcggcgccaaaaacgaattggtcttagaaagcttcctcgaggggccgaggcgggccgacaaggnnnnnnnnnnnnnnnnnnnnnnnnnnnnnnnnnnnnnnnnnnnatcccccaccacgctgcccaaaaannnnnnnnnnnnnnnnnnnnnnnnnnnnnnnnnnnnnnnnnnnnnnnnnnnnnnnnnnnnnnnnnnnnnnnnnnnnnnnnnnnnnnnnnnnnnnnnnnnnnnnnnnnnnnnnnnnnnctaggttaacttcttaaaacaatgaaggaatcacagtgttaacattgtttgtaaagtgtagtatttgtcaggcaactgaaacaatcagaccttccaaatgaagtcatttgcaggctgtgaccaacttttccctgaattcaaattgacaaaactactttgtagagatgcaagagtcttgcctcacttccaggaatgatgtatggattcatgcgccagaaaggnaaaacaatagtcaagtcagactaaaatgagagggagaacacaagcccgaattttgctcacatccccagaagcaggagtaagcttgcacttttaacaaatgcctcttaccaagaggcttaataggaaaatcttgt

SEQ ID NO: 97827 - DNA, 877 bp, Homo Sapiens
ttagggcgagagagtatgaagtcgacggcgcgccgaattcggcacgaggggcgacgggaacgggcaaacacaagctgctaagcactggccccacagagccatggtccatccgagagaagctatgtttagcatcttctgtcatgagaagtggcgatcaaaattgggtatcagttagcagagcaatcaagccctttgcagaacctggccgccctccagactggttctctcaaaaacattgtgcttcccagtactcggagcttttagagaccactgagacaccaaaacggaaacgaggtgaaaagggagaagtggtggaaactgttgaagatgttattgttcggaaattgactgctgagcgagttgaagaactaaagaaagtgataaaggaaacccaggagagatatagacggctaaagagagatgcagaactaattcaagctggacacatggacagcagactggatgagctttgcaatgacattgcaacgaaaaagaaattggaagaagaggaggctgaagtaaagaggaaggctacagatgctgcataccaggctcgtcaagcagtaaaaacacccccccggaggttacccactgtgatggttcgctctcctatagattctgcctccccaggaggtgattatccacttggggacttgactccaaccactatggaagaggctacctctggggtaacccccgggactttgccgagtacccagtcacctcgtttctgggattctgacaccttctctcagctctgcaccttagagccccatgacccagtacagatgatcacccagaaaagagctggacgaagcatcacccctccttgcgcaactctgagaggcacctgtacacccacggcagaagatgcggg

SEQ ID NO: 97828 - DNA, 881 bp, Homo Sapiens
  misc_feature (733)..(733): n is a, c, g, or t
ttaggggggagagagtatgaagtcgacggcgcgccgaattcggcacgaggggcgacgggaacgggcaaacacaagctgctaagcactggccccacagagccatggtccatccgagagaagctatgtttagcatcttctgtcatgagaagtggcgatcaaaattgggtatcagttagcagagcaatcaagccctttgcagaacctggccgccctccagactggttctctcaaaaacattgtgcttcccagtactcggagcttttagagaccactgagacaccaaaacggaaacgaggtgaaaagggagaagtggtggaaactgttgaagatgttattgttcggaaattgactgctgagcgagttgaagaactaaagaaagtgataaaggaaacccaggagagatatagacggctaaagagagatgcagaactaattcaagctggacacatggacagcagactggatgagctttgcaatgacattgcaacgaaaaagaaattggaagaagaggaggctgaagtaaagaggaaggctacagatgctgcataccaggctcgtcaagcagtaaaaacacccccccggaggttacccactgtgatggttcgctctcctatagattctgcctccccaggaggtgattatccacttggggacttgactccaaccactatggaagaggctacctctggggtcatgagagtgaatggctgtggctctggccactgacagtacngtgtcctctggagtaggcgggtcctccatgatacatgtgggagatcacaacaccatatgtgcactcctgcgctcagtgtcatcttccgcttagactgtctacagtacaacctgctctctatgtgctactcatactggcactgtatcgt

SEQ ID NO: 97829 - DNA, 291 bp, Homo Sapiens
ccgcaagcgcctgctgccgcggacgatggtgaccgtacgggccgggccgctgccgctgccgctgcctccgcctccccagaagcaacatccgaggctcggcgcagaagagccgccgctgtgagccgtgccgtaccggcccccgccgccgcccgaggagaacgggagggcgggcgagagagccggggagttgcggagcccgcccgccggcagcgccgctccccagggagggagtccgcagcatgaagtcttctccactaagaaaacacggcaaaaaaggaaagaaaaacatgt

SEQ ID NO: 97830 - DNA, 287 bp, Homo Sapiens
ggggaagcaaattgttggtttaacaggacatactttagatatttgaaaaattctctgtggaatcacaatctcttatttttaagaatgtaggaatatgtgttctatatgcttttaagttatgtattacatactattctctaaaatagaaatgtttatttggcttctaaaagtcatttgtgagttgatgttatttaaaactgcttttcagtcaacttattctttataaaaaagtttgttcaaatagcatgtttttattttgtttctaaataaattcatgtttgataatt

SEQ ID NO: 97831 - DNA, 575 bp, Homo Sapiens
tcttagtaagtttcattcatcaaagcgtgacaaatggtgtcctgggaggaatgcctgggcgccatggggagccagagggtggggtggggtgcaaatgtcccatttgaggggagaggccattgccttcagggagctccagatggagggggagacagccctgtcctcatgggaatctgtctgatgcagaagacacaaagaacctagtcccaggggagacacagtccctgtcctttgggggaggccccagtctgaaggggggagacagccctgccctcagggagctccagtctgaggggagatgcagcctcatcctcaggcagccccagtctgagggggacacagccccatcttcagggagctccagtctgagggagaagcagccctttcttcagggagccccagtctgagggagacacagccccgtcctcagggagccgcagtctgaggggagacacaacgctgtcctgagggagcccactttgagggagacacggcccatcttcagggatttccagtctgaggcagacacagccccgtcctcagggagccccagtctgaggggagacacagcctgg

SEQ ID NO: 97832 - DNA, 790 bp, Homo Sapiens
ctctgtagcaatgcagctgacctcgggaaagatgccatggaagtgcctgaagccgggatgataagtgacagtgagctgcagcacatctctgattctcccatcatcgatgggcagcagcagtcggaaaccccacccccctcagacattgctgacattgacaacctggagcaggccgaccaggagagggaggtgaagaggcggaagtacgagtgcacaatatgtggacgcaaatttatccagaaaagccactggagggaacacatgtacatacacaccgggaagcctttcaagtgcagcacttgtgacaaaagcttttgcagggccaaccaggctgcccgccacgtgtgcctcaaccagagcatcgacacttacaccatggtggacaaacagactctggaactctgcacatttgaggaagggagtcagatggacaacatgctggtgcaaacaaacaaaccctacaaatgcaacttgtgtgacaaaacattctccactcccaatgaggttgttaaacattcatgccaaaaccagaactcggatgtttttgccctagacgaagggcgatccattctcctgggcagtggggactcggaagtaacggagcctgaccacccagtgttagcttccatcaaaaaggaacaagaaaccgtcttactagactgaatgtcacttatctttttaaaaaactctcatttttacaaagactatcttccctccctttccctgaattcagaactgtagttctccatggcatgatacaaacaggtccttgttctcttctcctcttccc

SEQ ID NO: 97833 - DNA, 791 bp, Homo Sapiens; identical to SEQ ID NO: 3458
  misc_feature (175)..(223): n is a, c, g, or t
  misc_feature (692)..(700): n is a, c, g, or t

SEQ ID NO: 97834 - DNA, 1560 bp, Homo Sapiens
  misc_feature (892)..(969): n is a, c, g, or t
  misc_feature (1429)..(1481): n is a, c, g, or t
ggggagctccaaccagggcagccttcctgagaagatgcaaccaatcctgcttctgctggccttcctcctgctgcccagggcagatgcaggggagatcatcgggggacatgaggccaagccccactcccgcccctacatggcttatcttatgatctgggatcagaagtctctgaagaggtgcggtggcttcctgatacgagacgacttcgtgctgacagctgctcactgttggggaagctccataaatgtcaccttgggggcccacaatatcaaggaacaggagccgacccagcagtttatccctgtgaaaagacccatcccccatccagcctataatcctaagaacttctccaacgacatcatgctactgcagctggagagaaaggccaagcggaccagagctgtgcagcccctcaggctacctagcaacaaggcccaggtgaagccagggcagacatgcagtgtggccggctgggggcagacggcccccctgggaaaacactcacacacactacaagaggtgaagatgacagtgcaggaagatcgaaagtgcgaatctgacttacgccattattacgacagtaccattgagttgtgcgtgggggacccagagattaaaaagacttcctttaagggggactctggaggccctcttgtgtgtaacaaggtggcccagggcattgtctcctatggacgaaacaatggcatgcctccacgagcctgcaccaaagtctcaagctttgtacactggataaagaaaaccatgaaacgccactaactacaggaagcaaactaagcccccgctgtgatgaaacaccttctctggagccaagtccagatttacactgggagaggtgccagcaactgaataaatacctcttagctgagtggnnnnnnnnnnnnnnnnnnnnnnnnnnnnnnnnnnnnnnnnnnnnnnnnnnnnnnnnnnnnnnnnnnnnnnnnnnnnnnctcactcacaccgcacaaaacgctaaagcccacatgttcctatacacagcttgccccccctacgcctccggtacaacggcccccggaccttctccttttacccccgcccgcgcctcctacctactacctatcgccccctcggctgccccggctattacgtttgcacgacctcccctggtccccttcgcttgacacacctccggcacttacaaacactctcaatagcacccaacgccccccccactccgtataaccgcccataaacgccctttcccattacacaataccacctccgcgtttcccaactttatccacgccctatcctccaccttgcccccttttcctttccctatacaaatgtcccatggctaccccctaccactattaagtaaatcccagcctcgccctccggtactaatacaccacctaaaaccactcttggtggcactgcgcttcagannnnnnnnnnnnnnnnnnnnnnnnnnnnnnnnnnnnnnnnnnnnnnnnnnnnnaattttccacagtcctctgacgcccgacccctggctcctggtgcaacccgtccacctggtgaacgttcattctttcgcc

SEQ ID NO: 97835 - DNA, 551 bp, Homo Sapiens
  misc_feature (99)..(111): n is a, c, g, or t
  misc_feature (419)..(433): n is a, c, g, or t
acaagatgtttttgtactttctgttgctctgttgcggggaaacggaaagctaagttttaattttgctattgcttttgcttttttaacagaaaaggtacnnnnnnnnnnnnntgggagagatgttgccgaactccgtcccgcctgtgggctgtgggccgttagcaaagctgctagcatgaaatcgtcgagcaccgcttgcgaaacgccaaatcctcgagagcgaggccggaggctgccaaacccgcgctggggaaagggccgcctccgggcgccccatcccgctgcggacggaggtgaggttggagcgagcgctggcggaagagaggctcagcgcagggggcgcagagccggcgctggccaatatgcgccgcatgtgatacctttgagggcgcggcgggggagggtagcgtcaaatttcnnnnnnnnnnnnnnnccaaacccacacagccccggcgggcgggcgcgcgcgatgggcgccctttggctgcgggagcgagtggaggatgctgggaaggaggtaaaatggccaccggcggcggcgcggaggaaga

SEQ ID NO: 97836 - DNA, 552 bp, Homo Sapiens
ggctcaccagatttacactctagacatccacagacctgaggattgttggaataaatttatctccaaccgaacactgggactaatagtttttttagggattgtccttgggaatttgtggaaagaaaagaagacagacaaaacaaagaagggtatagagaataaaatagaaaattaatgaatgaaatttatctaggaatttttaaaacattttttacaaaatataattagatttgaatacaaaatctgatacaatatgttaaagaattaagaacctgaagatgaagatttagagcatatttacctggatcttacttatttgctagcaaaattcccccttgtcacagaaaccagggactcttcaggatttgagatggccttgagtattttagttgatacattcttctgcccattataattctcacctgaagttatggggattgcacgggttttggcactttagaaaaagcctgatgtgggtcttacataaatgaatgtctgtataaaaaaatggactcttttttttagggaaaaataaaagcaactatggcaaaa

SEQ ID NO: 97837 - DNA, 484 bp, Homo Sapiens
gcttgattcccgccccgccacccctaatttctgagagaataatggttagagaacattgcatctcacttgaaacatcctttgggggtaaatgattcttaggtgctcacttggtctgagctcagctgaatgcagggaagatgggacagagtgacatttctcctctgtgcggcctccagctgagcctgtctctgaattgttccctcccccgcaatgtgggcacttaccatgttcctggcacactggacctcaccatgtcccccggtcaccagtcctcttgctgcccatggttcataggtcatagaaggcagcaatgcactgactgggccacatcttgaaaactcgtggaaagggaaaggggaggagatgggactttgaccacacacagtgatgcctcacaccctgaaggtgggggattttgtacctgtttgtacaactttggtcttgatgggaaaaatggagaattaaaaagtgttttgagaagctt

SEQ ID NO: 97838 - DNA, 1398 bp, Homo Sapiens
  misc_feature (41)..(41): n is a, c, g, or t
  misc_feature (92)..(92): n is a, c, g, or t
  misc_feature (97)..(97): n is a, c, g, or t
  misc_feature (138)..(138): n is a, c, g, or t
  misc_feature (152)..(152): n is a, c, g, or t
  misc_feature (240)..(240): n is a, c, g, or t
  misc_feature (367)..(367): n is a, c, g, or t
  misc_feature (390)..(390): n is a, c, g, or t
  misc_feature (417)..(417): n is a, c, g, or t
  misc_feature (434)..(434): n is a, c, g, or t
  misc_feature (436)..(437): n is a, c, g, or t
  misc_feature (446)..(446): n is a, c, g, or t
  misc_feature (577)..(577): n is a, c, g, or t
  misc_feature (716)..(716): n is a, c, g, or t
  misc_feature (721)..(721): n is a, c, g, or t
  misc_feature (843)..(843): n is a, c, g, or t
  misc_feature (996)..(1004): n is a, c, g, or t
  misc_feature (1193)..(1291): n is a, c, g, or t
ttgattaacgaggtgcggtgtcccacactatacaatctgcnctgtgcttaatagacatgtagatagtttcggcttcgtcggctcagcgcggnccagngcttattttgggtgtggtcgttggtgccggggggacggcgnggtggggcgggcgnggtatcgtcctccagctctgtctgactcctcctccgcgcccccattaagtatgaatatatacatgctttgtcgagggatgagcattanaggggcaggaatatatatccctcgtgtcgacgttcctgagacaagtttactgcatgcacacacggtggcagacggcagtagaggagaaacctctgctgagcgctcgccgtcggcttgtgttgccgtnacttagtgtttttcttctttgcntcccctcaacactgcctcccacctcancccttatgctgcacaananngcccactcnggtaatcttcctccttccgatacaccactcgctctgagcgagttcacatcccatcttttttactcgttgggatggggtggagctcatagcttcagagcgtttgattttcgtcgtcggcgcgtctagggtgntgtgggtgtggtgtgaggggattttcttatcaatatgctagttgtttgcctgcggagccaacgcgcacacatcttatcagatgagggtgtgttagtgtggagacgagagacacgcgcgcgtgtgggtggttgctatccnccctnccgggtgtcgtggtggaggtacaggtgcacgcacacggaggcgtggtgctgcgctcctcccgtccacaagaagaggccgtacgacccggcacgatttagtcgtttaaagaggaacacacaantattgtctagtgcgtgggcggcgggggcatgggtggtcagtgtggcgtggggagacgtaaatgctgagagacttctagttggcttgcgtgggtcgtccgcccgcgtgggtggaaacggtatgagtgtggggggagcgtgctgcgggtgcttcnnnnnnnnncgatgggtccaaaaagatcttcctggtttgcgacaccagttgtttttactggttcggggcggccgctcagcccaacgtggggggctcggatctgttgtggtgagcgcggggtggggggaagtgtgggttttctgggttgtttttcgggttgttgatagggggtccctcctccttttttggggtttgggnnnnnnnnnnnnnnnnnnnnnnnnnnnnnnnnnnnnnnnnnnnnnnnnnnnnnnnnnnnnnnnnnnnnnnnnnnnnnnnnnnnnnnnnnnnnnnnnnnncctaccaatggggcccaggttgacctcgaactccagtccctcacaccctcgcctagccttgagagcccgagggcaggctcaatcggccggagccacaatggctcccc

SEQ ID NO: 97839 - DNA, 1840 bp, Homo Sapiens
  misc_feature (130)..(130): n is a, c, g, or t
  misc_feature (143)..(143): n is a, c, g, or t
  misc_feature (152)..(152): n is a, c, g, or t
  misc_feature (280)..(280): n is a, c, g, or t
  misc_feature (305)..(305): n is a, c, g, or t
  misc_feature (784)..(792): n is a, c, g, or t
  misc_feature (839)..(879): n is a, c, g, or t
  misc_feature (1494)..(1518): n is a, c, g, or t
ccacagctgggtgcgggtaaataactttctctccggtttgtacccccggcgccgtgcgtgtgtttcccccccctccgggggttgcaggagatattggtttttatattcctcgcacataaggttgaagatncgtatattcgtgnttttcatcngtagatatgagcgcgcagttggggcgcgcagagttcctcccgcgtggtggtgcccggcgagacaccaagtgcccgcctttttacgcgggaaagcagtgggcacagcaggacgcgacattgtaagagangaaaatgacaacaatgggggcctanactaaagaatatccggttgctgtccccacccccaacgatgtatatgagcgcgcgtagggtgagagggggttccgaaaaagctagaggtgtggatgaggggatcaataaggatatgttgcgagactacatcacgcaccatacctttctctatctcagttgtggaatgatgttcctctcgtttttgtcttcaccggattaccccacgggttgagaaggggcgcctctccggaggaggtggccgacgagggggaggagggtgttttccgagaaaacccgctgacgaggatgagccgccgcggggggggtttttttcattcgcggcggagcgagaaacccaagccccctttgttccgatggtccccgggggttttttcctttggggaaaacaaggtttgtgccgccgtgtcaccctataccgcccggggggcccgcgggccccaaccgcaaatgttttgggaaaggctttttgtggggcggcnnnnnnnnnccggccctggggtgcatgttcggcgtcttgcgtgcagagaatcgccnnnnnnnnnnnnnnnnnnnnnnnnnnnnnnnnnnnnnnnnngtgtgggttttactctgtagtagtttattgaataaaaaaaattgaagatcccgccatttttaaaaggccctttacataaagtagagtttctagtggacagatttgaaaatcagtctgaatggaacatactatgaattcaacacacagaatgagttttcctcaaacccactacccttgacatagatttgataccctccctcaaaagaatcctataaaaaattgcttcaaagcccctttgaaattgcaatagtgcagcaaaaccacaagtaaacaactgcctgttaacctgttatttcaaatatagactgaaaagccaacaggcatttttcgtgtgcaatttttcttttaaaaacaagttgtaagttgaaatatcaaatctgcacagcgctgtcccttcacagaaggcaagaaactgccggcacatcatgtcagaggccgccctcggtgctgtaggctgtggaagtgggcctccctcagggtctggttgatgtggaagtagaggccttggcacagcgcggactgctcgggcacgggctgaggcgtgttagggctggatccggccatggtctggctcaagctgccttccggcccgctggccctgtccgggctgttgannnnnnnnnnnnnnnnnnnnnnnnncccaccactgtcactgcctgaagactctgtgtcccaggaatcctgaaagacagggtttctgctacttcttttggtctgggggggaagatggttgtcttcttcgttgccattccttctccttttcctgggacggaggcgctcgctcatggcagctggcggatggaagctacgcggcgccgctccgcgaagagagggaacagagggggttgtgtttcggcggccgccacgcccaccccctcgggccttggctctcgcagccgctcgggtggacgcagccggtggcgagtacccctcagtcggacccgtaccaccactacttccc

SEQ ID NO: 97840 - DNA, 522 bp, Homo Sapiens
  misc_feature (220)..(244): n is a, c, g, or t
tcacagaaggcaagaaactgccggcacatcatgtcagaggccgccctcggtgctgtaggctgtggaagtgggcctccctcagggtctggttgatgtggaagtagaggccttggcacagcgcggactgctcgggcacgggctgaggcgtgttagggctggatccggccatggtctggctcaagctgccttccggcccgctggccctgtccgggctattgannnnnnnnnnnnnnnnnnnnnnnnncccaccactgtcactgcctgaagacgcgcagaacgctttgtttcctcttagtctgttttctttactgtttctcattacaggtactgtctctgtgtcccaggaatcctgaaagacagggtttctgctacttcttttggtctgggggggaagatggttgtcttcttcgttgccattccttctccttttcctgggacggaggcgctcgctcatggcagctggcggatggaagctacgcggcgccgctccgcgaagagagggaacagagggggttgtgtttc

SEQ ID NO: 97841 - DNA, 1056 bp, Homo Sapiens
  misc_feature (758)..(785): n is a, c, g, or t
  misc_feature (787)..(791): n is a, c, g, or t
  misc_feature (998)..(1008): n is a, c, g, or t
ggtccggaattcccgggatccggttggctgtcttgacagctggagggaagatgcaggggtgggaagcggccaggcagaaagagctccaggctcttgtgtcgcccacccagccctcccatactcactcctgacagctttcctgcactgcagcttcctgctcctctgactctagtgggaacaggccccagctcagcctccggcagggaggtcacccctccacttcagcttgccctgacctccgctcgcaaaccccgagcttccaagccttttgctccagccctgcggcttccccagaagcctgggcttagggtggagatgccgcctacacacgatcctggccctccacctgcctccaggccacgaaatgggaattccagcactaagccaggcaccgggcagaagctcggccttccgcctcccttggatggggtcaagaggccaggcctggcacattttggagtgtcctggctaccagctctcacctacacccacgcacccccccacacactatgctctctcaagaatgtaatttattggggcccccccagctgctttcctcacctgcccctgccctaccttacacccccagcttgacttctttccagtccacgtgtgtatataatgatatctatatttttgcccaggtctgggtattgctcctgcccagaccctgacatccctttccactgtgtgtgtgaccatgctgggggaaggggactctgcttggaaataaaaagttgcattggggcccctaaaannnnnnnnnnnnnnnnnnnnnnnnnnnnannnnnaaaggggcggccgcttctaaagtatccctccgaggggcccaaggttaacgcggtaccccgcttttcttgggacaaaagggggcccctataagggaagccggaataataaacctagggacttggcccgtcgcttttaaaaacgtcctgaactggggaaaaacggctaaacctggggaaatctttggggaaaggaaccctaacattctnnnnnnnnnnnaacttaaattgggaaaaaacttcccttacaggaaattttaaaaggctc

SEQ ID NO: 97842 - DNA, 406 bp, Homo Sapiens
  misc_feature (195)..(253): n is a, c, g, or t
gggtcccttccctcccccatacctagcccgagtctgagccctaacgagaaggctgggcctaggccgctggatgctggagtgaaaggaagggagaaagggaaaaagcgggaagagtcgagaaggctgagtgttaagaggccaagtgcgacgcgcgtatccgggcagacggactgacggacgggcccgtgcttctgnnnnnnnnnnnnnnnnnnnnnnnnnnnnnnnnnnnnnnnnnnnnnnnnnnnnnnnnnnnaaaccgaaggggagccatggcggctgacagtcgggaggagaaagatggagaacttaatgttctggatgatattttaactgaagtaccagaacaagatgatgaactgtataatccagagagtgaacaagataaaaatgaataacaaaacccccc

SEQ ID NO: 97843 - DNA, 858 bp, Homo Sapiens; identical to SEQ ID NO: 8140
  misc_feature (705)..(705): n is a, c, g, or t
  misc_feature (825)..(825): n is a, c, g, or t

SEQ ID NO: 97844 - DNA, 813 bp, Homo Sapiens
  misc_feature (762)..(762): n is a, c, g, or t
ggggcagccgccgagtgtgaaagcgacgcacacgcaaggagcgaacgcggccgcccgcagtctcctgagctccccgcgggccgccgcagagccgcggagaaggagccagcgcccggccagacagtctcagcccgccgtcggcgcccgccgcgctcgcgcccggctgctccgaggggattagtgggccgtccgcgcggctcgtcggcgcgggagccatgttgaccgagggacttggcaacgcgtgagacacccgcggcccctcccgaggctccggacccgcggcgagagccggaaggcggctgtggcggcggaggcctgcgctcggaagcgcctcacgtctgccggccgctgagacccggacttgcatccggtcgccgcgggcgtccgcggagcagcttccccccgcgcctctcttcgcctcgcctcgggacccgcggtccccgctcttgctggatttttcaagccacattcaattgataggatgaaaaaatttaagagaaggctatccctcacactccgaggaagtcagactattgatgaatcattgtctgaattggctgaacaaatgactattgaagaaaacagcagcaaggataatgagcctattgtgaagaatggtcaggcctccaacggtctcacagtatgcattcctttcctccaccagtacacagggatcttttcaagaagccccccattgcggaagaccacaccagtggttatttggaggggagcccttggcctcctttcatggcaatgccccantaaatggaagccaaattagaatatttgtttcatgaaaaatctaaaaaaggg

SEQ ID NO: 97845 - DNA, 387 bp, Homo Sapiens
  misc_feature (146)..(146): n is a, c, g, or t
gagttccagaggaaatgatgtagggacagaggcagagggcctccaggaggcaccagccccagagtcttccctagaatcagactttaagcacaagcagggagggaaagcacttgagcagtgcccgtccctgcatacctggcctctgntggaacccatgcagggacaggacacttctttatcagcaatcctgttcctctcctgggcagcttcaacctgaacatcctccttcaccttgagctaaaatgggtttcttgtcacccttgcccatcaaacctggccttgccctcaggaaccacacaggacaagcctaatacttccttcttgtggcaacactttagcaattgagacctggctgtcaggtcctccaaataaacatttgtgactgcg

SEQ ID NO: 97846 - DNA, 775 bp, Homo Sapiens
gggaggagggcggaacccggaaggcacggcgctcagctcaggaccgcgcgccgtggtctgaggtccgcggcagggtcccgcatggcggcgcacaggaagcacgtgtttgtggagaaggtgctgcagagactttttcctcctgttccaagtggccaaggaaagagggaaccccagacgctggccgtccaaaatccaccaaagaaagtgacctctgagaaagtgagccagaaacatgctgagcctttgacagacactggctctgagaccccgactgcccgacggctctacactgccagcgggcctcctgagggctacgtcccctgttggccggagcccagcagctgtgggagccccgagaacgcctccagcggggatgacacagaagatcaggatcctcatgaccagccaaagagaagaagaattaggaagcataaatcaaagaaaaaatttaaaaatcccaataatgttcttatagaacaagcagaattacgagaaacagcagagtctgttacaggagaaatctcagcgacagcacacagatgggcaccacaataagcaaaaataaacaaaggaaactgaaaaagaaacagcaaattaaaaggaagaaagcagccggcttggcagcaaaggctgctggtgtcagtttcatgtaccagcccgaggacagcagcaatgaaggggaaggcgtgggagaggcttgtgaggaggatggtgtggaacacagcggaggaagacccgacaactggccggggaggaagacgttaaaggatccagg

SEQ ID NO: 97847 - DNA, 443 bp, Homo Sapiens
cgcgtccccgggtagctgtcggagtccccgagaacgccgtccagcggggatgacacaggaagagaatatgcccagacgtctaagccccaagcacagccttgcagctgcagagccgatggagcctccagggccctcaggagccagaggccaggagaagcaaggatgggacccctctctctctgaccctccaaggtcagtgtgggaacacggcacacaagaaggaagagcctttgagcttttttggttgcagttttaagcacagagatcaggatcctcatgaccagccaaagagaagaagaattaggaagcataaatcaaagaaaaaatttaaaaatcccaataatgttcttatagaacaagcagaattagagaaacagcagagtctgttacaggagaaatctcagcgacagcacacagatggcaccacaataagcaaaaataaa

SEQ ID NO: 97848 - DNA, 773 bp, Homo Sapiens
gttagaaggtcaacgtgggagaggttaaagggctgcgaatgtgagaatgaatcagaatgatagaatcagtatagtttatcagggaatcagaagacagttagataacctttgtcaaaattactaaaattacgaagaattcattttgcactttgtgttcacaaagggaaatgaggctccatcaaaccctgcagagcacaagaggaagcaggttgtttgctcaggcatcagcagaaataggccccgaagaactaccctcagtttcttctacatcatgtccaggaatgaaaagcaaagctctgcaaaatgctgaaggttttagaagtataacgatgcttaggaaagatcactggtctggtgttgcagcagccccagtgttgagagacacgctaggcttctgtagtatcgctcccttctactccatgaccaccattggctaggagtgttggtttagaagatggagtatcttcaatgctggctagtgttctgagcacggtttcttctttgactctgagttcccggttttcgtcatcaacatccaggagaggaatatagtctgtttttccaacagtttctcccacaacatcatcaaaggcctctgcctctagtgtggcaatgaagtcccgctttatctctccctcaatgtctggagatggttctgttaatgcatctgcaagactgaggtcagccattctgcacacactgcaactgcccgccgccgccgagacggagctggggcagaagggagccaggagagcgccgggaagagccgtgag

SEQ ID NO: 97849 - DNA, 809 bp, Homo Sapiens
  misc_feature (549)..(569): n is a, c, g, or t
  misc_feature (670)..(689): n is a, c, g, or t
tcgtccaaatcatgaaatgtttggccttagtcaatatctatgcccgtcacataacagccgaggcaccgaggcccacagagaagcagctgggagcttggaaacctggtctcttgaatttcaaacctggtttcttacaggtggttgtctggggtgggtggagtggcgacaggatagagctgaaggactatgcaaatgaggaagtaagtcagggcgggctttgagaaggggacccatatcctacaggcaaaaagcaggctaggtgaccttgggacactacgctaagggagggaggctaaaggcagccaggtttgcagtgcgggaagatgagcaggccagtgggaggaggggcagggcagggctgtagttggtgactgggtgttcattttagctctaagaaaaaaaatcagtgtttcgtgaaggtgttggagaggggctgtgtctgggtgagggatggcggggtactgatttttttgggaggttatgagcaaaaataaaacgaaacatttcctctagatgatacctcgcccccaaccccctctccgtagtctnnnnnnnnnnnnnnnnnnnnngcaactccaacacccactacctcccctcgtccttctttgatttatctacttccatgaccgccatcccgttaaaaattttttggtcacccttcgcccccctnnnnnnnnnnnnnnnnnnnncctcccttggggccccgccggggcgccagctggtgtaagggaaaacggggcctatatagtgtggttccctagaaaaacaccgggggactagaaacagacggggttgggttatttcccccc

SEQ ID NO: 97850 - DNA, 761 bp, Homo Sapiens; identical to SEQ ID NO: 15839

SEQ ID NO: 97851 - DNA, 603 bp, Homo Sapiens; identical to SEQ ID NO: 15840
  misc_feature (540)..(540): n is a, c, g, or t
  misc_feature (543)..(544): n is a, c, g, or t
  misc_feature (549)..(549): n is a, c, g, or t
  misc_feature (551)..(552): n is a, c, g, or t
  misc_feature (556)..(556): n is a, c, g, or t
  misc_feature (558)..(558): n is a, c, g, or t
  misc_feature (589)..(589): n is a, c, g, or t

SEQ ID NO: 97852 - DNA, 533 bp, Homo Sapiens
  misc_feature (207)..(254): n is a, c, g, or t
  misc_feature (332)..(383): n is a, c, g, or t
aactcaataaaaaagtttttaaaaatttacaaagctcatatttgatccagctaggattttaccctgtacatttgtatttcttgtaggctggcgcacagatatcttaaatggctactaattgctgctgtgtatgaaaacaaatggctatcaaggccgggtgcagtggcttacagatctggtctgaatctcaagtccagaccagtccannnnnnnnnnnnnnnnnnnnnnnnnnnnnnnnnnnnnnnnnnnnnnnnaactcggcaaggcatggtggcatgcacctgttgtcccagctactcaggggctggggcaggaggatggcatgagcccannnnnnnnnnnnnnnnnnnnnnnnnnnnnnnnnnnnnnnnnnnnnnnnnnnntgacagagtgagacccccatctccaaaagaaaaggctatcaatacaaaagtttatctaaattactgtacagctatacaatggaatactctacaaaatggagagatccataagataaagcaaatgaataaagcaaaatgcatgtgttgacc

SEQ ID NO: 97853 - DNA, 832 bp, Homo Sapiens; identical to SEQ ID NO: 8392

SEQ ID NO: 97854 - DNA, 483 bp, Homo Sapiens
  misc_feature (298)..(307): n is a, c, g, or t
gggagatttcattgaggctcagatggagagctacgacaagcacgtcacttacaatgctgagcggtcccggtcctcgtccaggaggcggcggtcctcttccacagcaccaccaacttcatcagagagtagctagaagagaataagttaaccacaaaataagactttttgccatcatatggtcaatattttagcttttattgtaaagcccctatggctctaatcagcgctatccgggttctgatgacagaatcctgggaacctgaacactaagttttaggccaaaatgagtgaaaactcnnnnnnnnnnctttcagatgcacagggaatgcacctattattgctatatagattgttcctcctgtaatttcactaacttttcattcatgcactccaaacaaactttactactacattatatgatatacaataagcacagttaatttctgccctccagtgttcaacccggtcgaccctctcccttgg

SEQ ID NO: 97855 - DNA, 533 bp, Homo Sapiens
aaccaacccaccaaaaaaaagaaccctgtggtctgtctggtgaaaaaagaaaacaaattggaagagaggacatgagaattttaataaacagaaggaaactaatggaccttccaggatttattgtggacggatgtggatatacgtctgtacaggaacaacacatatggaagtggactgaagcctatgtagaaacacacacacactgaacattgttattcattttgtaaaatactagtctttattttcattttttgtaaaatttaaacatcgtatggcgcataaagaaaaaggaaacaagaattaggggaaaataacattttccaaataattataaaaaattggcctgtgtctatgtatctatatctgttttgtatttttttctggttccaaaccagatttcctgtgattctatactaataatttttgatataaccctttgcttcttataatgagtgcgatatatgttgtcgaggctgttcttcaagaattaaaattgaagtgaaaatttaaacaaaaataaaagaatttaacac

SEQ ID NO: 97856 - DNA, 541 bp, Homo Sapiens
ccgactccgaggacggggaggaggaggaggcggcgcccgctgacgcaggggcgttcaatgctccagtaataaaccgattcacaaggcgtgcctcagtatgtgcagaagcttataatcctgatgaagaagaagatgatgcagagtccaggattatacatccaaaaactgatgatcaaagaaataggttgcaagaggcttgcaaagacatcctgctgtttaagaatctggatccggagcagatgtctcaagtattagatgccatgttttgaaaaattggtcaaagatgggggagcatgtaattgatccaaggtgacgatggtgacaacttttatgtaattgatagaggcacatttgatatttatgtgaaatgtgatggtgttggaagatgtgttggtaactatgataatcgtgggagtttcggcgaactggccttaatgtacaatacacccagagcagctacaatcactgctacctctcctggtgctctgtggggtttggacagggtaaccttcaggagaataattgtgaaaaacaatgccaa

SEQ ID NO: 97857 - DNA, 482 bp, Homo Sapiens
taaaactaggattcctgttcctttgtcttctcactcgcactctggcactgctccctctgaagtgcagtgggatctcgtgtgctttgtcttgattctgtgctgcgctgccgctgggcgatgcagaccacctgtcttctactgaaggacagtccgctgtctccagtgggggcagcagctgtcccccagcctcgatggagacactggggcagtctgccttgtctgtggagctgctctctctccctcatcccaccccaaaatacttaaaatgacactacacccagacggcgcccagctggctgcagcacttgtagcatgcacatgactctggtagtaaccaacaaaaacttgttttatggattcctcgtttactgaggaaagggaacatgctggttctggaaaagccacaatattgaatctaaaaggaaaccgtttattgtttgatgaaagtttcactggttaaataaaaaactaaattaatacat

SEQ ID NO: 97858 - DNA, 718 bp, Homo Sapiens
  misc_feature (544)..(544): n is a, c, g, or t
  misc_feature (644)..(644): n is a, c, g, or t
  misc_feature (653)..(653): n is a, c, g, or t
  misc_feature (668)..(668): n is a, c, g, or t
gatgacaaagacatggctttaatgttatccaggagacatctgattcacatagggttactgaacactagaatctgatcttgaatctctcatgtcaacaacagacaaatgcattacaatttagggacagctgttttctgggtacctcccaggtgtttgcagaagaaggctagaatttgcttccaggcatcttcctgggccttagaatgagccctgggctccccaccccatataacatgtttgttcagtaaatctgtgaaagggaagctgggcacagggggaagtaaggaggctcgatgtaatgcccagtcccagggtaacagatgatctggggtttttcctttccatgggcctgtaaccgttcagagactgtttgggcatacaactcacttctccagttatggtcatcctgaccaacaatgagcaggatgggcccctgggccttctctattggaatcatgctggggttcttgtaccctcctacgagagcattccttatatccacaatgtccacgaggcctgagaaagctaccttgattctcctcangtcatagcccaatggtggaatgctactgtgcttatagttgatggctgtgttcccactgatcccagatccattgatgggaactgtggctgagacattcttncagaatgangccattgagagacanatatcagctcctagagaaatgcccaaaagcccaatgcctgggccttttac

SEQ ID NO: 97859 - DNA, 825 bp, Homo Sapiens
  misc_feature (499)..(499): n is a, c, g, or t
  misc_feature (578)..(593): n is a, c, g, or t
gggatccctgactcggggtcgcctttggagcagagaggaggcaatggccaccatggagaacaaggtgatctgcgccctggtcctggtgtccatgctggccctcggcaccctggccgaggcccagacagagacgtgtacagtggccccccgtgaaagacagaattgtggttttcctggtgtcacgccctcccagtgtgcaaataagggctgctgtttcgacgacaccgttcgtggggtcccctggtgcttctatcctaataccatcgacgtccctccagaagaggagtgtgaattttagacacttctgcagggatctgcctgcatcctgacgcggtgccgtccccagcacggtgattagtcccagagctcggctgccacctccaccggacacctcagacacgcttctgcagctgtgcctcggctcacaacacagattgactgctctgactttgactactcaaaattggcctaaaaattaaaagagatcgatattatacancagccccttcgagaacaccggtgtgcctccgtatgcacctcgccctcctcacacctaacaccacccgtctgcggccttnnnnnnnnnnnnnnnnattcttcttgatcatacctttagtaggtttttttgtgggggcgccgccccgcggcccctgaaaaaacttttttttaatacccatttcttgttttgggcccgccgcggcccccccctttggcggttacgggcgcactatgggccccaaaaatctcggttccccctagagagagaaaaccctctgagccactatagacaaaatagggcgctcggggcaatttctcccgcacccc

SEQ ID NO: 97860 - DNA, 314 bp, Homo Sapiens
  misc_feature (44)..(44): n is a, c, g, or t
  misc_feature (63)..(63): n is a, c, g, or t
aaaaagccggcaaccatagttgaccaagcctgtgcatgcactgncactagctataaagtaatncttatgacagattttgagtaaatgacatatacttgagatcagttatttgcaaaaatttttttaaaaaaggaaatgtcttacaaaagatatatagcatgaagtcacattacactgaagaacacttatctgtattaaatgtaaattttatgtcatctagaaaactatcattttgcttttactgaacactaccagttacagcagtgcatagtgttcattcaaataaaactttatagtttcttttaagcccctcc

SEQ ID NO: 97861 - DNA, 591 bp, Homo Sapiens
gagcatgaagcatttttttaatgtgttggcaggccccattaaatgcataaactgcataggactcatgtggtctgaatgtattttagggctttctgggaattgtcttgacagagaacctcagctggacaaagcagccttgatctgagtgagctaactgacacaatgaaactgtcaggcatgtttctgctcctctctctggctcttttctgctttttaacaggtgtcttcagtcagggaggacaggttgactgtggtgagttccaggacaccaaggtctactgcactcgggaatctaacccacactgtggctctgatggccagacatatggcaataaatgtgccttctgtaaggccatagtgaaaagtggtggaaagattagcctaaagcatcctggaaaatgctgagttaaagccaatgtttcttggtgacttgccagcttttgcagccttcttttctcacttctgcttatacttttgctggtggattcctttaattcataaagacatacctactctgcctgggtcttgaggagttcaatgtatgtctatttctcttgattcacttgtcaataaagtacattctgcaaaagc

SEQ ID NO: 97862 - DNA, 1131 bp, Homo Sapiens
  misc_feature (599)..(672): n is a, c, g, or t
  misc_feature (676)..(677): n is a, c, g, or t
  misc_feature (680)..(680): n is a, c, g, or t
  misc_feature (682)..(682): n is a, c, g, or t
  misc_feature (685)..(687): n is a, c, g, or t
  misc_feature (706)..(706): n is a, c, g, or t
gcgcccgccggtcaggattcgcgacccgacatggagcgtccccgcagtccccaatgctcggccccggcctctgcctcagcttcggttaccctggcgcagctcctgcagctggtccagcagggccaggaactcccgggcctggagaaacgccacatcgcggcgatccacggcgaacccacagcgtcccggctgccgcggaggcccaagccctgggaggccgcggctttggctgagtcccttccccctccgaccctcaggataggaacggccccggcggagcctggcttggttgaggcagcgactgcgccttcttcatggcatacagtgggcccctgaggttccaggtcctttgcggcggcgatctggagggcgtggctacaggacccgggatgccattcagttactcatcttttatgctttcgtcctgacctgtctcaactagacttgctcctgcaaccaccatgggggttttgcatttacatttgtggaccatgttacagttaagaaaaatcctgtttcagtccttatatgtaataaaatgttttatgatgtaacttggccccagaatgattttgaagatacattaaaggaaagccctnnnnnnnnnnnnnnnnnnnnnnnnnnnnnnnnnnnnnnnnnnnnnnnnnnnnnnnnnnnnnnnnnnnnnnnnnnccannaananggnnngcgccgccccaaccacgtngggcggccacggccctcccccgaaaaccttagaaaacctgtccctggcggaccgctcggccttcacaccaagagaaaaagcggccctggcgggcttcccgcacggtccgcatcgacctcgggaatgggagttctggattcccctcccagggaacaaacgcccccgggggatcacacgagacgctcctataatcaatccaaggtgcgccctcctggagacccccactcccgggaacttgatctcgaagattcccttaacgcgttggtcggccccaatcaaggagataacccctcccacccacacccgacactgactatacaccagggcacttgggcgaataaagggattttcaacaacccctgcgcgcgcggcattgcgaacaccaccacccccccgaccccgtcggagtggaatacacccgcggt

SEQ ID NO: 97863 - DNA, 543 bp, Homo Sapiens
atgcccgtttctaatacaatgtgtgtaggaattatttgtatgtatgaggtatgattgtaaagattgagcattggaaggggtatcagagaccatgtagttcaactttccactcaaagtaagatttatgaattatttaaatgatagttgttacttggaacagccacttgagaggctctcttggtattgtttggaattgttttaaagtcagtttgagtctcacaagaaggtaagtagagtttcttaatagtcacaacttaatttgaaccacaagtatccagcttaatcacgaatcttactcacgataccactggtccagatgagtttaggtaattttcaaacattaaatccaacttcaacggaaacaaatacactcaagggaagttatttttaaaaaggtactctgcatgttcccgcagtaatgttctgcacaacagtattgtaattgtaatggaatcataacctgctaactagtttgctttaatatggcttgtaattcttgacatttttcttaaaattaaaacgaatttttattttgaatttaaa

SEQ ID NO: 97864 - DNA, 389 bp, Homo Sapiens
  misc_feature (213)..(237): n is a, c, g, or t
cagaccccttagcagccctgccctccctatcgtctgaacagttgtcttcctcagcctcctcccgcccccaccttgggaatgtaaatacaccgtgactttgaaagtttgtacccctgtccttccctttacgccactagtgtgtaggcagatgtctgagtccctaggtggtttctaggattgatagcaattagctttgatgaacccatcccaggnnnnnnnnnnnnnnnnnnnnnnnnnggaaagattggttctcccagcactgctcagcagccacagcctccctgtatgcctgtgcttggtctactgataagccctctacaaaaaaacaaaagtatatatatatatgtacataatatcagaattataacaggcaaataaaacctgaaaat

SEQ ID NO: 97865 - DNA, 474 bp, Homo Sapiens
  misc_feature (54)..(54): n is a, c, g, or t
cgatagaatcgagctcggtaccttctcgtacatggtcacacccggtgcagaggnccatctatacctgagcctccaaagcctgcggctgatcaggatggagctgaggtgcttgggactaggagcagaagcctgccagaaaaaggccctcccaaggctttggcctataagacagtggaagtggtggaatctatcgagaagatttccacggagagcattcagacatatgaagaagccgctgtgatcgtggagaccatgattggaaagacaaagtcagacaagaagaaatcaggagagaagagctcttaaaatgcccaggcttgatgggataaaatgtatttggggccactgtaggggtaatgctttgatattttagagcaaatgataaaagggtgagggttcctgtttggattagaccatagttgacccatctggcattgccaacgaagccttcattaaaatgttttctttgcttgc

SEQ ID NO: 97866 - DNA, 1379 bp, Homo Sapiens
  misc_feature (159)..(159): n is a, c, g, or t
  misc_feature (225)..(225): n is a, c, g, or t
  misc_feature (439)..(439): n is a, c, g, or t
  misc_feature (637)..(645): n is a, c, g, or t
  misc_feature (766)..(774): n is a, c, g, or t
  misc_feature (813)..(821): n is a, c, g, or t
aaggacgagagaagatatctgtgctgcccccgggtttttccgctctcggtgggcgggaagttatttcatacgtgcgagaagtgcggcagcagagtggcgcttacaggcgtgcccccggacgggcatggtttcgcgaagtattgtcgttaaaacagccgngtgtgcgggggagatgaggttcttccacatgtggggcgcgcgcggaaaacaactgggccggacatntaaatatgcggccaacaccactgcgcgttggattaaaacggcagcggaacaccgcgggggcgggggcggggagaaactggttgacaagataatgggggcgcttctgggcacgggtggcgcgcacccccctgcatgggcgggcgagcagagggccgcccccagtgtgacgcgaggccaggccccgctgagagaatactctccctccatcattgangagggggtgtatttgtgttctctcaaagaccaggcgaccgcgggtttttgtcccacccccgcggggccgctgtattttgtctgttgcggggggggaagatggtcaccgggcgcgcctgcatttgcggtgaaaaccggggggggttccctttagggagcggcagcgacaattgccccaacttggtcctcttgccctacnnnnnnnnncgcggggcgcgccagaacgggaggtgttctaaaaaaatatctttctaagaagccggagggcggccccacacagggggggcgtgtctattagttgtcgggctgggatcaagcggggtacgannnnnnnnnctaccggtagttcacgtaatattgacatatgttgctccnnnnnnnnncgttctggtcatcttagttttattgtagtgagtagtatttttaattttcttgaaaggcacccaagaataattacttttgtgaaccaaaactatataaaactgtacagaataaatatttcatagaaatctaactatgccttcttgtaaaataaagctacattgtccctctcttgaggcaacttaaaccacttacctttagaagtgccttttgctactgatttatggcatctatcaatgtacatcaataaaaataaaataatttttcctatttactttacaactgtgaattacttggccacaagaaatgtatttctattatggtcattcagatttacaaagaattaagcctatgaaataaagcaaacccaatatattctctagtcatatttacagcagaatctcagtagcatttttaaaatatcccaagaagaagaattaaactttgagcataaatgacatactttagttcacagcagcactgacattaaaattgtctacacaaaatgtgtagaaaacccaaaaagtatgcttatttcttccacctgaactattaatcat

SEQ ID NO: 97867 - DNA, 981 bp, Homo Sapiens
ggcatgtgaatatagaaccagtttgtaacaaaaaagcaggctggtacggtcggatatcccgggatatcgtcgacccacgcgtcgcaatcaccctccctcacatccacccagagaagtccagacctgtggccacttccatgccctctccagaccaggagacacctgctgctgacctcgtggaaaacttagattttgacattctgatgcttcggaagtggtggctcctcctccttcacccctccgccacctgtgggcctcctctctgcatctcaagagaacaaccagatctttgggctcctggggtgtgtgccatgcaatttagacgaagtgctttgaaaatatgccattcagtctctgactaggaaaataagtctgacctgataggtccgatgtcatcagctcttcaacatgagacaaaagaggggattttatgttttgagtcattagaatgatataataattttctgaattgacatctggatgttgaaattaggatggtgcaaaaggggtccagggcctcaggctgggcgcagcagccagctcccaatgacgcagaagctgcttcaaaaccccctcaacaaagaggggcacatgcaagtcaccaaagtgggaagccttcaccaaggccacacccaaagtctactgattgtctgtccaaagttcgttgattcctggccatgaacaagcacaatagaaaaagacacagggtcctagtggctacaagtcaatgtgaattggcacatggtctagcagttttaaaatctgacagtagagtatggcaatgggcaagggccaagaagtcctgagatgggaggtcagcgctctaactgggctcagtggaggtctgtgaccagtgtctggacactagctacaggggaccgggcagaggattctgggcagaaggaaaatgtctaaaagtactttgggagggtaaaggacaggggccttatttaaaataaagactgaaggataataagtgtc

SEQ ID NO: 97868 - DNA, 835 bp, Homo Sapiens
  misc_feature (550)..(652): n is a, c, g, or t
  misc_feature (679)..(701): n is a, c, g, or t
  misc_feature (749)..(749): n is a, c, g, or t
ggatagatgggatgtctttgcaggtttgaggggatcatcgacctgcagagccccctttgacccagtacctcccaaagtgctgagattgtaggtgtgagccacagcatctggcccagagtgaggagaattaatgagattcttttttgtgtgtgttagataatattgatttaagcctttttttaaaaagtactctcaaccaaatacaaaattgaaaatgtgaggtttaatagaaatgtgttggctatttgcaatggattttcttcttgcccaagtgtttggagttctactttatgctctgtatttaaaaattagtgacctcaaagcagagttgatgacacaggctttggggccctcatgttcttgtctttagaacatatcactactaagtatcagcttatcttcagaacattacaacattcaccgtgttcatatgctttctgagaagtcaccacttgtaatttcagatcacatacacctgaaggcattttatagttcctaaagttaacatgttagatcttttttttccaccccatgagggtctcactctcannnnnnnnnnnnnnnnnnnnnnnnnnnnnnnnnnnnnnnnnnnnnnnnnnnnnnnnnnnnnnnnnnnnnnnnnnnnnnnnnnnnnnnnnnnnnnnnnnnnnnntggtgcacaccaccacacctggctaannnnnnnnnnnnnnnnnnnnnnnggaaaataggtatggctatgttgccttgggcccgtcatgaactcctancctcaggtgaccctccccactcaggccttcccaaagggttggggattacagggagtgagctactgcactggggccaacaggttaaa

SEQ ID NO: 97869 - DNA, 1080 bp, Homo Sapiens; identical to SEQ ID NO: 9226
  misc_feature (464)..(472): n is a, c, g, or t

SEQ ID NO: 97870 - DNA, 824 bp, Homo Sapiens
  misc_feature (309)..(365): n is a, c, g, or t
  misc_feature (651)..(651): n is a, c, g, or t
gggggtgggcggagggacggagggaagatggctgcagagaccggatattggcgctgcctccccgaatcccggacctgcgctgaggaggcggttcatctgtggccagcggtgcttcgggacccgcgctgggggaaccctggcgacggggcctggccctgctatatgcgggggcctcggctggagtgagcggcgtggacgcctctttcctccggctcttcccttgttgctgcgagagcgagagggccgcgggcggcggaggcagcggggccgggatggaggacgttaactctaacgtgaacgcggaccaannnnnnnnnnnnnnnnnnnnnnnnnnnnnnnnnnnnnnnnnnnnnnnnnnnnnnnnnaggaaaatggctttgtaaagaagcttgagcctaaatctggctggatgacttttctagaagttacaggaaagatctgtgaaatgctcttctgtcctgaagcaatactgttgaccagaaaggacactctatattgtgaaaccggcctaatttttctgactcttacgaaaacgattgccaacacatacttctacttttaaataaacaactttgatgatgtaacttgaccttccagagttacagaaattttgtccccatgtaatgaataaattgtatgtatttttcgccnaaactcccccaaaggattggatgaaaaccttggcgggccgccccgggccccccaaaggtttccagaaccatttgttttgggcggccgggcccagtagggtaagggaaactggggtcataacctgctttcccaaagaaaaaccgcgggcccaggaccaaaggggcttgggatct

SEQ ID NO: 97871 - DNA, 458 bp, Homo Sapiens
accagacccagctcagtgactggcacacaggtctcacggactgctgcaacgacatgcctgtctgtctgtgcggcacttttgctcctctgtgccttgcctgccgcatctccgacgactttggcgagtgctgctgcgcgccctacctgcccggaggcctgcactccatccgcaccggcatggcgggagcgctaccacatccagggctccgtcgggcacgactgggcggccctcaccttttgtctgccctgcgccctctgccagatggcgcgggaactgaagatccgagagtaaggaagttccctgtcttccccgtccttttccaccagtctcgcctctggccttctctggccactcctgggagggactgcctcaccacccctgtccccctgccagaaatacacccacaataaaaacctgaaagccgcccaaccagagaaaaataaataaaataaacatgt

SEQ ID NO: 97872 - DNA, 844 bp, Homo Sapiens
  misc_feature (802)..(802): n is a, c, g, or t
gaaaataagtgaagatgaaagtagtggacttgttacaaaagtggctcaggagaaattggatcagaaacaagtgacaaaaaggattcattttatacagattcaagtagtatcttaaactacagagaagattcgaatatactttcatttgatagtgatggtaatcaaaacatactttcaagtactttaactagtaaaggaaatgaaaccatagagtccatctttaaagctgaagattggcttccagaagcagcttcactctctgaaaaccaggatatcagtaaagaagagacccccccagttagaacacttaaatcacagtcatctttaagtggaaagcctaaggaacgttgcccacccaacctggctcctctctgtgtttcttataagaatatgaaaagaagctcttcacaaatgtcattggataccatttcacttgacagcatgatattggaagaacagttattagaaagtgatggaagtgatagccatatgtttttggaaaaaggaaataaaaagaactcaactacaaattacaggggcacagcagaaagtgtgaatgctggtgcaaacctacagaattatggtgaaacttctccagatgccatcagtacaaattcagagggtgctcaggaaaatcatgatgacctgatgtccgttgtggtatttaaaattactggtgggaatggggaaattgacatccgagggggaagatacagaaatctgtcttcaagtgaaccaagtgacaccagaccaattaaggcaatatcagccctccggcattaccctttgtaatcgtcccagnttggtttccgaatcagaaagctggtaatttcaattccaaaac

SEQ ID NO: 97873 - DNA, 1216 bp, Homo Sapiens
  misc_feature (383)..(392): n is a, c, g, or t
  misc_feature (641)..(644): n is a, c, g, or t
  misc_feature (646)..(658): n is a, c, g, or t
  misc_feature (660)..(663): n is a, c, g, or t
  misc_feature (666)..(666): n is a, c, g, or t
  misc_feature (732)..(740): n is a, c, g, or t
  misc_feature (899)..(899): n is a, c, g, or t
ggtccggaattcccgggatgtgtgagtcctcagtcttgggctattcggccacgtgcctgccggacatgggacgctggagggtcagcagcgtggagtcctggccttttgcgtccacgggtgggaaattggccattgccacggcgggaactgggactcaggctgccccccggccgtttctcatccgtccaccggactcgtgggcgctcgcactggcgctgatgtagtttcctgacctctgacccgtattgtctccagattaaaggtacgacatttggaggccccagcgagaaacgtcaccgggagaaacgtcaccgggcgagagccgggcccgctgtgtgctcccccggaaggacagccagcttgtaggggggagtgccacctgnnnnnnnnnntttccaggtccccaaagggtgaccgtcttccggaggacagcggatcgactaccatgtgggtgcccacaaaaattccacctctgagtcctcaactgctgaccccggggtcaggtccagattttgaacaaatctcgctagagattgaacagagctgcgcctggatcccgccacagtgaggagacctgaagaccagagaaaacacagcaaacggggtcttgctctgtttgtccaggctggaatgtagtgggnnnnannnnnnnnnnnnngnnnngtnaaaggcgggagtgcgagtaatcaaattaaacgggatactttaaaaggcacatacattcctctggtnnnnnnnnnatcttcgtcccactctctccagcactgctttctctcccacacgcactgcccccctctccagtccatccgtcttttctcatgctcctacttctcctttcactggactccgcctgactccatgacagtcctcgtccgattaacacccgcaaccctccctgnccactcgcaccacctccctaagagctccgccacctctgtctgactcccccacctactcattcatcccacacttccccatcctacccccatcgagtggccgcgtagaccttctactcgcgcttctaccccccgtgcgccaacatcctcttccagtccccagtaatatgtgctccaataactctcataagtcccaacctgaacgattcttcgagcctctaatactcgcactttccaccgcgacgtccctcatcaactacttcaataccccgtcgccagcaccactgacatctggccgttatcgtagcaggtgtggatcg

SEQ ID NO: 97874 - DNA, 1229 bp, Homo Sapiens; identical to SEQ ID NO: 3568
  misc_feature (427)..(427): n is a, c, g, or t
  misc_feature (1055)..(1055): n is a, c, g, or t

SEQ ID NO: 97875 - DNA, 618 bp, Homo Sapiens
gggtgcgcggaggctcggggagtcggcgccatgaccccatcgaggcttccctggttgcttagctgggtctcggccacggcgtggagagcggcaagatcaccccttctgtgtcattctctgaggaaaacaagttcttctcaaggaggaaagtctgaacttgtcaaacagtcccttaagaagccgaagttaccagaaggtcgttttgatgcaccagaggattcccatttagagaaagaaccactggaaactcaagctaagacatccagtgagccacagagatatgtgagaaagaagaacttccgttagagaggccttcaagggaattcgtggagtaggaaaaagccaacttgcattgcagtaaagcatggaattattttgaaaacagaatgctgatgagtatgggggagagtttattcacaatataacaagaataaaagaatgaatatttgaaaaattttcacggtaaattctgtatcctttttcttttgcctgaggggctttatgattttggtgaagatcatttagttttctaaagagatatagtttgggtaatcattctcctgcagtttccccgtgctatgcaggataaaataaaagccgtatgccttttcttctgtt

SEQ ID NO: 97876 - DNA, 1108 bp, Homo Sapiens
  misc_feature (786)..(798): n is a, c, g, or t
  misc_feature (957)..(964): n is a, c, g, or t
  misc_feature (966)..(1016): n is a, c, g, or t
  misc_feature (1018)..(1020): n is a, c, g, or t
  misc_feature (1023)..(1033): n is a, c, g, or t
  misc_feature (1035)..(1036): n is a, c, g, or t
  misc_feature (1038)..(1047): n is a, c, g, or t
  misc_feature (1050)..(1050): n is a, c, g, or t
  misc_feature (1055)..(1056): n is a, c, g, or t
gggggcgctccgccggccgccctgcgtacgctcgcaaggcgctcgcagactccggagtcgccaacatgtcgaccgccatgaatttcgggaccaagagcttccagccgcggcccccggacaagggcagcttcccgctggatcacttaggtgaatgtaaaagctttaaagagaaattcatgaagtgtcttcataacaataattttgaaaatgctttgtgcagaaaggaatcaaaagaatatttagaatgcaggatggagagaaaattgatgctacaagaaccattggagaaactgggatttggagacttgactagtggaaaatcagaggcaaaaaaatgaattttgatgagaagacccctgggccgtgttcagtggtctctcaggacagagggcatcatcctgcctcttaggttggctgaggcctgcgtgtggtgtccttagaaatgggcttcgaatagaagctccagccctgtgggggcgtctcctgggtagggagtggcgtcccgttttcccttaggagggtgtttctgcattgaacccctgagtgggacggcgttcccggcaaagctgggagggaggcgagcgtggggcaagacccttgtcttcgaggccggggccctcttgtatggggcggttttatgttgcagtcctctgatactttctgagttcaaagaggtaaatgtataaatttcagtcccttctgaacacagatatcatcagaaaattaccattccctagcaggatgtcatcgagattgtattcgtatatgccagttcatttcctttgnnnnnnnnnnnnngtggaacacaaagtaggaagtgagaaccttctggctttggatggattgacttcttgattctttctggttttgcctgaacaccaagtagcttcataatcaaagggtcattttctggtttgtatcagaccgtatttataaagttgggtatttaatttcaannnnnnnngnnnnnnnnnnnnnnnnnnnnnnnnnnnnnnnnnnnnnnnnnnnnnnnnnnnannntgnnnnnnnnnnntnngnnnnnnnnnnaangtttnnaaaccattctctttgggaaagctttccaaaaaagtaatttaaaattggtgtg

SEQ ID NO: 97877 - DNA, 851 bp, Homo Sapiens
  misc_feature (560)..(575): n is a, c, g, or t
  misc_feature (588)..(755): n is a, c, g, or t
caggctggtactggtccggaattcccgggatatcgtcgacccacgcgttcgcgcggggcatgccctcggcagacggccaatggcggcggtgctcggggcgctcggggcgacgcggcgcttgttggcggcgctgcgaggccagagcctagggctagcggccatgtcatcaggtactcacaggttgactgcagaggagaggaaccaagctatacttgaccttaaagcagcaggatggtcggaattaagtgagagagatgccatctacaaagaattctccttccacaattttaatcaggcatttggctttatgtcccgagttgccctacaagcagagaagatgaatcatcacccagaatggttcaatgtatacaacaaggtccagataactctcacctcacatgactgtggtgaactgaccaaaaaagatgtgaagctggccaagtttattgaaaaagcagctgcttctgtgtgatttcttccaaaatacatgtaaaatcttgtacacatcttagctgcaatgtatgttgaaggaaatttatgtgaacaaatagagttgtgcnnnnnnnnnnnnnnnnaagacagagtgtnnnnnnnnnnnnnnnnnnnnnnnnnnnnnnnnnnnnnnnnnnnnnnnnnnnnnnnnnnnnnnnnnnnnnnnnnnnnnnnnnnnnnnnnnnnnnnnnnnnnnnnnnnnnnnnnnnnnnnnnnnnnnnnnnnnnnnnnnnnnnnnnnnnnnnnnnnnnnnnnnnnnnnnngacccagtgggccaggcttggtctcgaactcctgaacttcgtgatcggcttggctaagcttcccaagtgctgggattcaaggatgagccacatgcg

SEQ ID NO: 97878 - DNA, 1665 bp, Homo Sapiens; identical to SEQ ID NO: 15407
  misc_feature (577)..(587): n is a, c, g, or t
  misc_feature (645)..(665): n is a, c, g, or t
  misc_feature (1341)..(1341): n is a, c, g, or t

SEQ ID NO: 97879 - DNA, 914 bp, Homo Sapiens; identical to SEQ ID NO: 15408
  misc_feature (38)..(38): n is a, c, g, or t

SEQ ID NO: 97880 - DNA, 210 bp, Homo Sapiens
gggggattccgccttcctcgtggctgactggatgcatccgctggtactgatttacgaagagaatgatcatgaagggcaaatggcagtgaagcaagaagagctggcttcaggctcagaagagaatgctgtgcctcttcctcatggtttgcggtgccctgcatgttcagagaaacttctctagtaatgaatgaactatagaaatgatccctg

SEQ ID NO: 97881 - DNA, 901 bp, Homo Sapiens
  misc_feature (95)..(112): n is a, c, g, or t
  misc_feature (230)..(530): n is a, c, g, or t
  misc_feature (548)..(793): n is a, c, g, or t
gggtgctatgtccacctcctaaactggctactgagaaaatcatcttcagccctgtcagattgtctctggcagtagctcctaataattatttatgnnnnnnnnnnnnnnnnnncaacttttaaaaaaccttctatccatttcaatttgaattatttgatttgtacaatatatgtatattctcttcttcctttttgtcatccctgccctgccacccccaaaattttgttttnnnnnnnnnnnnnnnnnnnnnnnnnnnnnnnnnnnnnnnnnnnnnnnnnnnnnnnnnnnnnnnnnnnnnnnnnnnnnnnnnnnnnnnnnnnnnnnnnnnnnnnnnnnnnnnnnnnnnnnnnnnnnnnnnnnnnnnnnnnnnnnnnnnnnnnnnnnnnnnnnnnnnnnnnnnnnnnnnnnnnnnnnnnnnnnnnnnnnnnnnnnnnnnnnnnnnnnnnnnnnnnnnnnnnnnnnnnnnnnnnnnnnnnnnnnnnnnnnnnnnnnnnnnnnnnnnnnnnnnnnnnnnnnnnnnnnnnnnnnnncctcgtgccgaattcttnnnnnnnnnnnnnnnnnnnnnnnnnnnnnnnnnnnnnnnnnnnnnnnnnnnnnnnnnnnnnnnnnnnnnnnnnnnnnnnnnnnnnnnnnnnnnnnnnnnnnnnnnnnnnnnnnnnnnnnnnnnnnnnnnnnnnnnnnnnnnnnnnnnnnnnnnnnnnnnnnnnnnnnnnnnnnnnnnnnnnnnnnnnnnnnnnnnnnnnnnnnnnnnnnnnnnnnnnnnnnnnnnnnnnnnnnnnnnnnnnnnnnngaaaaggggtttgccttattgggcgcttctccgcttcctcgctcattgactcgttgcctcggtcttcgttggggggacgcggatacccaactaagggggtaaaccgtt

SEQ ID NO: 97882 - DNA, 1598 bp, Homo Sapiens
  misc_feature (293)..(293): n is a, c, g, or t
  misc_feature (1268)..(1346): n is a, c, g, or t
  misc_feature (1353)..(1412): n is a, c, g, or t
  misc_feature (1465)..(1484): n is a, c, g, or t
ctgattcagcaggaagcatctcagacaccaaccactatgctgtcagcagttgcccggggctaccagggctggtttcatccctgtgctaggctttctgtgaggatgagcagcaccgggatagacaggaagggcgtcctggctaaccgggtagccgtggtcacggggtccaccagtgggatcggctttgccatcgcccgacgtctggcccgggacggggcccacgtggtcatcagcagccggaagcagcagaacgtggaccgggccatggccaagctggcagggggaggggctgnagtgtggcgggcattgtgtgccacgtggggaaggctgaggaccgggagcagctggtggccaaggccctggagcaactgtgggggcgtcgacttcctggtgtgcagcgcaggggtcaacccctctggtagggagcactctggggaccagtgagcagatctgggacaagatcctaagtgtgaacgtgaagtccccagccctgctgctgagccagttgctgccctacatggagaacaggaggggtgctgtcatcctggtctcttccattgcagcttataatccagtagtggcgctgggtgtctacaatgtcagcaagacagcgctgctgggtctcactagaacactggcattggagctggcccccaaggacatccgggtaaactgcgtggttccaggaattatcaaaactgacttcagcaaagtgtttcatgggaatgagtctctctggaagaacttcaaggaacatcatcagctgcagaggattggggagtcagaggactgtgcaggaatcgtgtccttcctgtgctctccagatgccagctacgtcaacggggagaacattgcggtggcaggctactccactcggctctgagaggagtgggggcggctgcgtagctgtggtcccaggcccaggagcctgagggggtgtctaggtgatcatttggatctggaggcagagtctgccattctgccagactagcaatttgggggcttactcatgctaggcttgaggaagaagaaaaacgcttcggcattctccttaggacttatctgcttgtagatttggctgatccaattaacatgtggggttcttggtgtgggtctggggagctgaaggattttatggagctggtgctttggaggaatcttaagggaaaggagtagaagctcaggcctttgaaggatttcagctcctcctctctgtaatttgtgctttaagcattttttttcctaaaataaactcaaatttatcctcnnnnnnnnnnnnnnnnnnnnnnnnnnnnnnnnnnnnnnnnnnnnnnnnnnnnnnnnnnnnnnnnnnnnnnnnnnnnnnngaaacgnnnnnnnnnnnnnnnnnnnnnnnnnnnnnnnnnnnnnnnnnnnnnnnnnnnnnnnnnnnngcctttttccctcaaaattacacacaacaagaaaaacaatttttttggggggnnnnnnnnnnnnnnnnnnnnacaaaaaagattttttacaacaaccctttcttgttgtggggcggccgcccggcccacccccacggagtgacaggagcaaagcccggggggacacaaattgcgtgggttttccat

SEQ ID NO: 97883 - DNA, 518 bp, Homo Sapiens
  misc_feature (302)..(302): n is a, c, g, or t
  misc_feature (400)..(400): n is a, c, g, or t
ctgattcagcaggaagcatctcagacaccaaccactatgctgtcagcagttgcccggggctaccagggctggtttcatccctgtgctaggctttctgtgaggatgagcagcaccgggatagacaggaagggcgtcctggctaaccgggtagccgtggtcacggggtccaccagtgggatcggctttgccatcgcccgacgtctggcccgggacggggcccacgtggtcatcagcagccggaagcagcagaacgtggaccgggccatggccaagctggcaaggggaggggctgaagtgtggcngggcattgtgtgccaacgtgggggaaggctgaagaccgggaaacagctgggtggccaaggccctggagcaactggtggggggcgtcgaacttcctggntgtggcaagcggcagggggtcaaccccctctgggtaagggaagcactctgggggaccagttggaagcagaatctgggacaaagatccttaagtggtgaaaacgtgaagtcccccagcc

SEQ ID NO: 97884 - DNA, 747 bp, Homo Sapiens
ccccaatccttttacagaacccgagtgggagtagccttgccacccgcaatgttcttccccgttgaccgtagctggcatctggagagcacaaggaaggacacgattcttgcaccagtcctctgactccccaatcctttgcagctgatgatgttccttgagttcttccagagagactcattcccatgaaacactttgctgaagtcagttttgataattcctggaaccacgcagtttacccggatgtccttgggggccagctccaatgccagtgttctagtgagacccagcagcgctgtcttgctgacattgtagacacccagcgccactactggattataagctgcaatggaagagaccaggatgacagcacccctcctgttctccatgtagggcagcaactggctcagcagcagggctggggacttcacgttcacacttaggatctgaaatcagagcagagcatgggtgagggcagagagacatggtcagcccaagtcctgctctcataagacacttggagccctgtaatttgtgcagtagacccaatgtatgtgcatataagagaaaccaatcccccttctgactggtgcaagaggtatttccaatttgctaatggtttcataggcaggcaggctaagtcacaggcctgtgagcagagccctgaaaatgtgaattgttcaggactgacacgaggaaggaaatgttcaggccttttaaagaaaatggggactgggggcagtgggtcat

SEQ ID NO: 97885 - DNA, 924 bp, Homo Sapiens
  misc_feature (661)..(672): n is a, c, g, or t
  misc_feature (784)..(792): n is a, c, g, or t
gggagtgaggggcgggacaagtgcccggaggacagacagatggggcgacactggctggtggaggggaggggcaggcgaggagcgggggcaggcccggaagaaatggggacccggcaggcggtgacggaggcggcacgcgcggagatggatactgggccagccacgaaagcctccgccccctcgaagcgggctccctcgccgccaactctagagaagaagcagcccttctccccggcgcccgctggtttgcagaggcctgctatgaagagcttgtgcaagtaaagcgtttgctgagcggaaacaggctgcgggtggctgcggcagggcatggagccgacgcggatcttttggcaaaacatcctttattaatctcatataaaaaataaaggggcccctcgcaaggcaagggcctgggggggtcccccccaaacctgttcgggccggctcttcggcccctcggagaaagcttttcccaacacccattcgcgtgagggtggccgggcggggggccccggctagggaaaaatggaaaccctgggccccttaagcgtgggttttcctctaagggaagaaatccctgggggtccactgggactcagaggggcctttgggcgatttttcctcccaccgcacctgtgataaaaaaaaacccgccccaccnnnnnnnnnnnntaaacctccgggaggagcctcctccgcctgttggaaaacaccacaatatacccccgccaaaaataggggggggcgggttctttcttaggaagagccgcccattttatacccnnnnnnnnnaatcccccaatctccaaaaccggcgggggaaggacccctcaaacgccggaaagccttttccgcgaataagacgacaaatatttttgtgggcgcgcccgagggccgcggttgggccacagtgtctaattcggc

SEQ ID NO: 97886 - DNA, 245 bp, Homo Sapiens
cacttttactttttacctcttgtgtatatgtagggaatttatagggaaatatgtactttatggaataaattttaagaactaaaatatattttattttaaataaagtaatggacctttaatcttacacagctaaattactgattatatatttgctgagctgatttaagggttaaaaaaattgtatcaagagttttattttttgacttcaaagccttcttaataaagcctcttttctacatgtgaaa

SEQ ID NO: 97887 - DNA, 179 bp, Homo Sapiens
tttttgaacagccaagaaaaaaattgcaatttattaagattcaataaagcgttgtactttcgaaagcaactttcgatgcatgttcttcaacagtcacattctatgaggaaaacattaagagccacgaacttgttgtttaatctcagagttacagacatattaagttcaaaataaaaggt

SEQ ID NO: 97888 - DNA, 804 bp, Homo Sapiens
  misc_feature (581)..(581): n is a, c, g, or t
  misc_feature (611)..(611): n is a, c, g, or t
  misc_feature (616)..(616): n is a, c, g, or t
gggggcagccagtgagaaggccgtcaagatggcggcctcctggaggctgggctgtgatccgcggctgctgcgttatcttgtgggcttccccggccgccgaagcgtagggctggtgaagggggctcttgggtggtccgtaagccgcggagctaattggagatggtttcacagcacgcagtggcttcggggtgatcccattaagatactaatgccatcactgtctcctacaatggaagaaggaaacattgtgaaatggctgaaaaaggaaggtgaagcggtgagtgctggagatgcattatgtgaaattgagactgacaaagctgtggttaccttagatgcaagtgatgatggaatcttggccaaaatcgtggttgaagaaggaagtaaaaatatacggctaggttcactaattggtttgatagtagaagaaggagaagattggaaacatgttgaaattcccaaagacgtgggtcctccaccaccagtttcaaaaccttcagagcctcgcccctcaccagaaccacagatttccatccctgtcaagaaggaaacacatacccggggacactaccggttccgtnttaagtccagctgcccgccatattctgganacacncaccaaaggaaaaaagaaggaaaatgtcgggccgccctcgggccctcgaagaaacctttcctaaaccattccttttgggcgcccgcggccccgttaggtaaagtggaacttggcccatagctggttttccaaggaagaaccctgggcactggactagggcgttgggaattcctccccaaatagaaaac

SEQ ID NO: 97889 - DNA, 323 bp, Homo Sapiens
tgccgccgggattacaggcgtgagccaccatgcctggccttcattatctcttttttaaaaatgaaaaagtttataatttacattcagtaaaatcaccctttttagtgtctagtctgtgaattttgacaaatgcatggttttgtaaccaatcgataggacagttctgccacccaggacattcccctctgttcctctgttcctctcttctcctgccccctagcaaccactggtgttttctgtccctcttgttcattgacatttattttaaaataaaatattttaaaatccgcctaactgaaacacaacatggaaaaaaaccttgt

SEQ ID NO: 97890 - DNA, 554 bp, Homo Sapiens; identical to SEQ ID NO: 64106

SEQ ID NO: 97891 - DNA, 1161 bp, Homo Sapiens
  misc_feature (50)..(164): n is a, c, g, or t
  misc_feature (172)..(206): n is a, c, g, or t
  misc_feature (276)..(286): n is a, c, g, or t
  misc_feature (319)..(389): n is a, c, g, or t
  misc_feature (399)..(411): n is a, c, g, or t
  misc_feature (532)..(540): n is a, c, g, or t
  misc_feature (608)..(616): n is a, c, g, or t
  misc_feature (653)..(661): n is a, c, g, or t
cagtcgacggtaccggacatatgcccgggaattcggccattacggccggnnnnnnnnnnnnnnnnnnnnnnnnnnnnnnnnnnnnnnnnnnnnnnnnnnnnnnnnnnnnnnnnnnnnnnnnnnnnnnnnnnnnnnnnnnnnnnnnnnnnnnnnnnnnnnnnnnntctccagnnnnnnnnnnnnnnnnnnnnnnnnnnnnnnnnnnntaagcgtaacttccctcaaagcaacaaccccccttgcccatgcctccagctacaaaacaattcaattgcnnnnnnnnnnnggtccaaaataaaacctcagctagctctgccgnnnnnnnnnnnnnnnnnnnnnnnnnnnnnnnnnnnnnnnnnnnnnnnnnnnnnnnnnnnnnnnnnnnnnnncacaacacannnnnnnnnnnnnaaagcccaacgcctacgccaaccgcttccgaaaacaacgcttccccccaccgcggtgctcgcgacccccgtctcgcgcccggaaaaatctcctcgaacatcttttgtgtgggcgcccgggnnnnnnnnntcgagaccccggaaaccgcggcacaccacatccgccctcccccccgaggaaactccgatcccctaaannnnnnnnntctttccggtttatctccccgcacaaataaaaaaaannnnnnnnngcggggggcctcccccacgcgcaatttcttttttgcaacacatccgcccccgcgcgcgggcggggttcttattcgtgggccgccgttattcctgtcgtgggcggaccccttataccaccgacagagggcgctgtcctctccccccctatgacatatcaccttaaacacccataccattattgtacaccccgtcctcgtctacttccgctccgccaccacttgtatccgcgctcaaaacgaaaccggtggagtgttgacactatatatacactccaccccatatatattcgccgcgccccgacaacagaggcttgcgacacccccgttattatctctccacccggcgtttactccggacgacatcaccgcctaaacgtacccgcgacagcgtgtgccatcccacagaccatacacctctgcgcgcgcccttatgtgtggtgcccattatagttatatttcctcccaccccgagagaaggacaaaacacccgcgcgcgcccc

SEQ ID NO: 97892 - DNA, 433 bp, Homo Sapiens
  misc_feature (66)..(121): n is a, c, g, or t
  misc_feature (353)..(353): n is a, c, g, or t
  misc_feature (383)..(383): n is a, c, g, or t
gggattatcaccgaggcctcttgggtggaccgtccctctgaaactaagacagaggagcagggaatnnnnnnnnnnnnnnnnnnnnnnnnnnnnnnnnnnnnnnnnnnnnnnnnnnnnnnnngggcagagcagcgggagcaggaacgggcagtgcgggaacagtgggcagaacgggaacgggaaatggagcggcgggagcggactcgatcagagcgtgaatgggatcgggacaaagttcgagaagggccccgttcccgatcaaggtcccgtgaccgccgccgcaaggaacgtgcgaagtctaaagaaaagaagagtgagaagaaagagaaagcccaggaggaaccacctgccangctgctggatgaccttttccgaaagaccanggcagctccctgcatctattggctcccactgactgacagccagatcgttc

SEQ ID NO: 97893 - DNA, 900 bp, Homo Sapiens
gggagcgcagctgcaggcgttggggcggcaggagccgcggagccggcgctgagaggggctgcggccggagcgggcggctgagacaaaggcgacgatagggccagatttgagtgtgtgaatttttgagtgaaacctggaacccaaatgagaagaaatctgcaaggaataactactgacagtgaatctgcggtcatctgtatgcataatatggaatgttcttaacccagaagtagctgaatgtgttactccattgctgaggagtgactatctgttatagtccctgggtcaagacaacaatttttataccttcgtcgtggttcagaaaggagtctctgtagaaccagaagcaaagaaaggaaacaatccaaatttttctttattaaatcgactgtgtaagatacttgacttccaggaacaaaaacacggtgaaataataaaatttcatcttggcatcactggacatcatcgtattgaggagcgtatttttggaacttcccgagttgagatttggaaccttcattggtgctcatttactgtggactgtaagcatgagtgaattctggttgtgtttcaactgctgtattgcagaacagcctcagcctaaaaggcgacggcggattgacagaagtatgattggagagcccacaaactttgtgcatacagctcatgttggatcaggagacctgttcagtggaatgaattcagttagctccattcagaaccaaatgcagtccaagggaggttatggaggtggaatgcctgccaatgtccagatgcagctcgtggatacgaaggcgggatagccctggtcctttctccaggttattgtgaatttctatattttctctgtccactattctgtaattttttttgtcctgtgatcgcttcattttgaattac

SEQ ID NO: 97894 - DNA, 1042 bp, Homo Sapiens
gggtcctgggcagttaccgctctataccggcagcagccgcggagagcatgccccgcccccgtggagcccaccccgggcggttaacctcgggtctcagtcccgggctgtgaccctccccgaggccccgcccccacggcgaaggcccggggcagttaacccttctcttgctgcggcagagtccgcacccgggcaggcccatctcagaattaacgctttgatggcatcaccgcgtcgggaatccctggggatggtgttctccaccgtcaagacctttgagccgcctgagcgactaactcctgcgcccctgatggtcacagctagcattggacagtgctgaacgatgtgcacaggacgtacattgatgctcatgcaagttccatctgcactgccagcctgggttacagacgggaaaccttgtctctaaacaaaagaagaaagaatgatagaacatgacaacatagtgacgattatgtacttacatgaaattaacagtcattcagagtttccaacattgtcaggggtgtcactcgggactctgtccaccgtactagtaggcctagcattgtcaccaatggaggccatggagcggagcctcggacccaaagctggggcctcttcattgtcgacacgaaggcctttttgtcgcagaccaggctctgtgtggctgctgtcatggctggtatggcatcctagggctggtggcgagtggtcacgtgatagccctttggcgcccatgatagggtagacagttctgctggaagaactcgatctggatactcagacatgagcgtggagcagaaatgcccattcggcaattgtctacaacggagaaagcctggagtcagttcgcttgacttagcgagggacaaacttccaggcctagtaaatcttctgtattggcccatgccatgtgcccagttcttcggccattataggcacaaagagccaaggaagctgtagaagacgacgctgaaactgcctataaaccgggggtagggccaacacctgtgctctattttggcgggggatctctctcggcccc

SEQ ID NO: 97895 - DNA, 221 bp, Homo Sapiens
ctcctacaaaataaaaaagaataaatttaatgacattaccattttaaatttctatatattcaacactataaaccaagttaaaaggcaagcaagtgacagaagatatttacaagacatttgaaaaatatttgcaatctagaatattttaaaaatcctataaatgaggaaactgcaaaaagtgcagtagatagagaaatataaaccttcagttcacagaaccc

SEQ ID NO: 97896 - DNA, 798 bp, Homo Sapiens
cgggccggcaggaagatggcgaacgtggggctgcagttccaggcgagcgcgggggactcggacccacagagccggcccctgctgctgctcgggcagctgcaccacctgcaccgcgtgccctggagccacgtccgcgggaagctgcagccccgggtcaccgaggagctctggcaggctgccctgagcacgctcaaccccaaccccacggacagctgtcccctctacctgaactacgccaccgtggctgccctgccctgcagggtgagccggcacaacagcccctcggccgcccacttcatcacgcggctggtgcggacctgcctgccgcccggagcgcatcgctgcattgtgatggtctgcgagcagccggaggtctttgcttccgcctgtgccctggcccgggccttcccgctgttcacccaccgctcaggtgcctctcggcgcttggagaagaagacggtcaccgtggagtttttcctggtgggacaagacaacgggccggtggaggtgtccacattgcagtgcttagcgaatgccacagacggcgtgcggctagcagcccgcatcgtggacacaccctgcaatgagatgaacaccgacaccttcctcgaggagattaacaaagttggaaaaggagctggggatcatcccaaccatcatccgggatgaggaactgaagacgagaggattcggagggaatctatgggcgttggcaaagccgtcctgcatccccaagcctggcgtcctcagcacaacccagatggagccacgcagagcatcgcctgggtgggcaaaggc

SEQ ID NO: 97897 - DNA, 513 bp, Homo Sapiens
aaatttggcctcatattgcacaggttcaaaggacgcaaccatttgggggggaaggaagaaagtaaagctactgaggaacaccaactggcccttggattagaacacactgcgaggtaaatgagagggggttagggcgggtggaggggaaggtcaagaggcatttcaatgctagatccaaaaaccgttctgcattcagtcagctgtccaaaggacctccgtcccatttccacacatgaacttgcactcagactcctggaaacaggaaagctttgaaacgtgcattcacacctcctgttctgtgccaaaaatatgcaagttaacactgattgaccatcattccttagctgtgttcatgatgagtctcattgtagtccatgatatgtagctgtccaacactgttccgggtcggggagacgggtgatggccatccaggttcacgggaatcttgggctccacaaccaagtctttggccagttccgtctttaagccctccgaaaggctactggtcaatcc

SEQ ID NO: 97898 - DNA, 1177 bp, Homo Sapiens
  misc_feature (101)..(101): n is a, c, g, or t
  misc_feature (226)..(244): n is a, c, g, or t
taccggagtaggtgcgagtggggacgaatcgcgatagtagcggcggcgggaaagtacaaggagaggcgagagaaggaaggggcgcgcggcggggcgacgcnggttcaaaagatggtcggcgcacgagcgatggtgagggcgcgctcgacgtggcggtgaagtgcgcgacatgggggtagtggggccgagcggcgaaggtccggcggcctttgggccgacgagtgcnnnnnnnnnnnnnnnnnnncggactgacgggcggtgtggcgcgagggtgagtgtacgcgggctccgtggggggggtcgactcatggaacggcagagagtatccggaacgggctcaccaaagacgcgagtacgtggcgccgtagtgtcgggaaggcccatcgaggtgggggagtggaaggactcccgggttggccgagggccaaaagcgcgagggatggggcgggggccagggccaggtttggctgggaggggtccgaattctccgtgggatcccccagccaatgtcgccgcccacaccgggtttcgggccctcatcctgaagttccccccagcccggtggtcgtccctggagctgagggtgcggacggcttcctggtagcccacgtcccgcagcgaggcggggcacagcttctcctcagccagcaggtggtacaagcgggccacagcccaggacacatctgggggctcctctgggtcctcggtgctgtccacgccagcccactggcgggccaccagccgggccaccgcatcggccttcaatgcctctagagagatcctggcctcagtttcctggcccagcttcaggagaaccatggcatgcaggaggtcctgcccctggcagcctgggcgtggggtcttcagtttgtgcttcagatacaagagcttgtcctggcctgctgcacctagaatgtcgaaggcgctaggaagtgatgggcccgtgcaggccatgggcacaggtgggtgcagcctccggcagcagaagctggaggtggtgaaggcatgttccacactgccccccgccttctgcacgcccagtgtcccctacccattcactgttccaggttctgcaggagctgcccaagcagatcaggatccggggctgccggctgcgccactggtcctgggtcctgggggctgggcttctgcgagttgcccgcgaccgtagcgcgct

SEQ ID NO: 97899 - DNA, 459 bp, Homo Sapiens
gctatagtagaagcctattagcatggataagtgtctgaataaaagataactgtacaaaaatcaattgttttttctgtattctagcaataatcaactagaaacagtatcaaaagaaaaacattccatttacaattgcaacaaataggtatatatatatttgctcttctacacataacctatttctggaagggagcagaactgggcaattcagggacagcaatggaaggggaacactgctatgttattttaaatactttttagtaagctttgaaccatattaatgtattacctgttcaaaattatacttaataaatttaacaagaaaaccatattgaagggcataaaaataagacctgacaagtgaaaaaacatcaagttttagaaaggatgatttaatactaaaatatacatttcttaatatataacttaatgtaaacctaataaataatttaatacaaa

SEQ ID NO: 97900 - DNA, 909 bp, Homo Sapiens
aaaatcataacgggcgtagtcagagctgggtaggcccatgtgcctgtacatgtgtaagggggtaaggctggaagttattctccttcaggaactcaaagggtgttcttgcccaggagctcaaagggcgatgcacatgtgaccgtggaagttgaaccagtcagacatcaagacacacaggaacttgttttctttgtccttctccttgatttttttgagcacgttgatttctagccgggcagcctcccggtacttgcccacgttgcggatgatcttcagggcaacctgagacttccctctggcatggtccaagcactccaccaccttgccaaaggtgccttcacccaggttccccacaatctcatatcgctcttggagccaatcgccgatccggcacaccaggtgaccctccttgtcatcttccacactccggctgctgcgcttactgctctgttggcttctcgaggaggcgctgctacaagacctggtgcggcgtttgtggcagtggtgggcatgcttgcgggtccggtatggccccctctcccgcgatcgccgacgatgacgagaacgtgaaggtccatagtagtcctctccaaaggatgggctccgctcttcacaccggtatgtatcgctgtcacggcgctcccggtacctcctctggtagggcaggcggtcatggcttctggaccgagatcttcgtgggggaggctcccttcgggacgggtatcgcagtctcccttcatgttcccgactgtaggacctcctcctcttccatcggtagctcaggtacgggtctggttcaggggagcggtatcgcttacagtgatgcatcgtctcccaggctccggctgcagctaggccccactccccgctccgagcgcctcttccgcttccggctgcgacctccgcccg

SEQ ID NO: 97901 - DNA, 1337 bp, Homo Sapiens
acgcccacttgccggtcccagggggctgtggccctaacagggttcccgggggcaagacctcgcttcggtctttcccagcgactgggccccggataccacgggttcctgccggggaggaaggtggaggactccctgccctggacagggcccaatccccgtggaacagcgcccccaggattggagggacagggcgagggttacgcaggcgcccaccctccacatctactttcccgagggcgggaagggttttctaggaggaggggccaggcatgcaggggcggggtgcgtgcatgggtgggtgctgctgtctccttcatgtgatccgagcttgggggcggggcaggggccggggacggttgtgtcaggtggaggcaccctggaggccaccagggccttgcgggctaggtgccggcacatgcgctggggccacggcctcgcccaggatctggcagagctcctggaggcgccgctgcatcttgggaatgcccgccagctgctgctccagccgctgcttctcctccgtcaggctcaggcgggcagctgagtccagcttctcgaacttccagccgccctccccatcgaactgtagcaagtgtgtgtggtatttccacaggaaggcccggtgggtgatggagaccaggggcaatgcccgcgtccttggccgcctggaagatcttgccttccacgtcgatgctcacggcgctggtgcattcatccaggagggcgtacttgggcctgtggtagaacatgcgggccatgccgattctctgcttctcgccacccgacaggacgtccttccagtcacacatagcctcccaacctccctcccgctgcaggatgtggtgcaggtgcacgacgtccaggatggcttccaggtcctgctccgagtagcccttcctttgcatgtcctccactgagtccgggtagatcacctggtcacgcagggagcccacagacatgtagggcctctgcgggatgtagaacatgcgctggggtgggggcttgtagagcacaccaccgtacgtgggccagagcccacccaggatccggaacagggagctcttgccgcagccattggggcctgtgatgagcagatgcatgccttcctccaccctgatgttgaggctggccaccaccacctctcctgagggcgtgacgatggggatgttctcgcagatgatcccctgttccacatccaccacctggcctcggatcttcagggggccctccacacggacaccagaccggcctatggtcccagaccccgcctgagcgtcctctagctccctgggcctcttgaagtgcctcgtgccgaattcgccacccaggcctcgctc

SEQ ID NO: 97902 - DNA, 219 bp, Homo Sapiens
  misc_feature (135)..(143): n is a, c, g, or t
tcctcctttcctttcttcctcttttacttcgttcactactgtattccacataaaatatatttggcatatagtaggtgttcaatatgttgaaggaatgaaagaatttatagacttgagttgcaatataaaatgtannnnnnnnnactgtgagtgatggcaaaaaaagttttgaaagccgcttctaaataatgcagatgtcagtgctttgaccctggaata

SEQ ID NO: 97903 - DNA, 905 bp, Homo Sapiens
  misc_feature (554)..(565): n is a, c, g, or t
gggaaaaacctgtagtgtctgcaccaaggttcctaaagatcctgctgtttgccttgtgtgtggtacttttgtatgcctgaaaggactttgctgcaagcaacaaagttactgtgaatgtgtactgcactctcagaactgtggtgcaggaacaggtattttccttttgatcaatgcatcggtaattatcatcattcgaggtcaccgcttctgcctctggggttccgtgtatttggatgctcatggagaggaagaccgggatcttaggcgaggcaaacctctctacatttgtaaggaaagatacaaagttcttgagcaacagtggatttctcatacttttgatcacatcaataaaagatggggtccacattacaatgggctgtgactctccacctcagcattgcatcgtatcatcattttcgctacgaatttatttttcaacaataagctttaacttaatttgggggattaacacttttgctgagggagaaaaagaaaacatacattatgaagcctttccaaaattaggtgcttggcaatcacgttaatggtataannnnnnnnnnnnaatatctggagaacattaataacaagttaaattattctttagtggtcattttttaagtgcacaattaataagaagcacaacttgttcacaaactcattcagaaatgattctcccaacaatgcatatcagctattcattgatacttagagtgggtgtgatttatttgacattttactgcttctttctgtctgtgtgttttaatttgcatctgccaagcataatgcatcttttttcctctgccattcttgtgttgattggagaatttttctgtatgtaattagaaaaaaatgtaaaacatgatttatgtgaaatactgtatagtaaaagttggtctaatagt

SEQ ID NO: 97904 - DNA, 897 bp, Homo Sapiens
  misc_feature (329)..(384): n is a, c, g, or t
  misc_feature (698)..(698): n is a, c, g, or t
tgtgaatatgaacagtgggtacaaaaagcaggctggtacggtcggaatccgggatatcgtcgaccacgcgtcgcgccatccctatagagaagaacggaggtacggcctgtggtcatggcgctgttcccagcctttgcggggcttagtgaggctcccgatggcgggagctccaggaaagagttagactggctgagcaacccaagcttttgtgttggatccataacgtccctgagccaacaaactgaagcagctccagcccatgtttctgaagggttaccgctgacaaggagtcatctgaaatcagagtcttcagatgaaagtgacactannnnnnnnnnnnnnnnnnnnnnnnnnnnnnnnnnnnnnnnnnnnnnnnnnnnnnnngaagcatcagcatcataagaaaacaaagaggaagcatgggccgtcgagtagcagcaggtctgagacagacaccgattctgaaaaggacaaaccttccagaggcgttggaggcagtaaaaaggaatctgaggaaccgaatcaaggaaataatgctgcagctgatactggacatcgctttgttggcttgaggacattcaggctgtgacgggagaaaccttcagaacagataagaaaccagatcctgcgaactgggagtacaagtctctctaccgaggggatatagcaagattacaacgaggaaaggagactcctgncctgtggggatttaaccctaagaagcagtgcatatcttgggaagggaccttccacagaagaagaaggcattcaccgcagcagggttgaacgccattttactaagaagaagtgtgggataatgcaccatcccgtggggttgcccttagcagttaaacttggacctccctcatttgagcatcctcttatacccgtgaggtc

SEQ ID NO: 97905 - DNA, 416 bp, Homo Sapiens
  misc_feature (291)..(349): n is a, c, g, or t
gggccgcctctccgccgccggggtacgccaaggtgcggctggtggcactgacatcggcggccctgcctctcctccctcgcccccggccttccccatgtgatcggtcttaatcctggccgtgtgtgcgcgcgtggggctccattccgcggtgctgggtctccgtgccggggtgggtgctcgtgtgtgcgcttctcctccccatcccccttcccccaagaataaaagaagaaccgggaggcgtgctcagaaaataaataaataaccaccacacacgcgcacgccggagcgagnnnnnnnnnnnnnnnnnnnnnnnnnnnnnnnnnnnnnnnnnnnnnnnnnnnnnnnnnnncgcgcggaaaagggagcaactttaaagccagctcagagcctagagctccagccgagcagtttgcagc

SEQ ID NO: 97906 - DNA, 995 bp, Homo Sapiens
  misc_feature (442)..(450): n is a, c, g, or t
  misc_feature (574)..(591): n is a, c, g, or t
  misc_feature (608)..(622): n is a, c, g, or t
  misc_feature (650)..(764): n is a, c, g, or t
ccaatctccacccgtggtgaggggtttgccccacccctcctttctgtttatataaaaggtgtggcgcacacatagagagacaatcttttctttctccgccccgtttgtttctccccgtgcgcgaaattattatatttcgctgacggggcgccaccagcgtgtgggggtggccgccgcgtcgaggaaaattagggtgttcaatcaatctcccggtgtgcgggtaggggtcttccccgccggccgggccgaaaggtgtttttatgaaatttcccccacccttcctcccccatcaagatgtccagcggggcgggggggcggaatatattatattaggcagcgcggggggcccccccttgtgttgtaatccccccggaaagctccccggaaacggtccccttttggtatttttttcaacagccccggtggtgccccccgcgcggcnnnnnnnnnggtgggggaattccaaacccctttgttttcgccgcggtgtttttcttggaacacaaatttaacccattcttgcttccctgtggggggcgccgcgccccaaaagaatggttttaaaaagtttttnnnnnnnnnnnnnnnnnncaacaatattctcttcnnnnnnnnnnnnnnncctctcgggggcgtgtctccgcgcttcnnnnnnnnnnnnnnnnnnnnnnnnnnnnnnnnnnnnnnnnnnnnnnnnnnnnnnnnnnnnnnnnnnnnnnnnnnnnnnnnnnnnnnnnnnnnnnnnnnnnnnnnnnnnnnnnnnnctcatcctttaatttctggttttatgatcaaatgttccgaagacactgcttctttttgctcaaaatagttgacattgtcattgcttctagtttttcagctcctactatgcttactatgtccatgggtgccattgacgtctttggctatttatcatctctgggtggcgcaggccaaggacgcccatggacagcgcgacctcctcccattccacacacgcgcccacgaccccc

SEQ ID NO: 97907 - DNA, 1529 bp, Homo Sapiens
  misc_feature (547)..(607): n is a, c, g, or t
  misc_feature (782)..(893): n is a, c, g, or t
  misc_feature (1471)..(1471): n is a, c, g, or t
catgaacagaggcaagtgccccagagactccactttcattcctaactgttctcaaattaatgctcatgattgagtattctcagtgcaactcgtagagtttgataagtaaaagttacatgcccctgttttcctagcatgatattcactgttatcaaagacaagaggcagaccattcattcattctcaaaacactgaatgccattctgtgcctagtgctatacaaggcatgggagattcagtgtgaataagtctttgctctccacctaacaagggacagttttaattatagattgtcttcctattaagtatgagttttagtaggcattaaaaatcgtaattagtttgataatatgagacccaaccctaacttgccagaagagtaatcagttcatgaaccattgatatttcctgtatatttcatgaatgtgacttcagtcattctagtgttaatactgtggaatgtcattggtgtagcaacgtgggttcaccaaaacacctttttatacaaaagacagatgtgtgaattaaagagattaaaggataaaannnnnnnnnnnnnnnnnnnnnnnnnnnnnnnnnnnnnnnnnnnnnnnnnnnnnnnnnnnnntatgaactatcgcgaaccagcagccacctgaacaatgcctccagcgcccgcccagtttgctctgccagcccctaccgtcctcccccggaccagccttgacaccctccgtacatgcggatcactcggagaaaacaccaccgctgcagcgattccttgttagataaaagcttactcnnnnnnnnnnnnnnnnnnnnnnnnnnnnnnnnnnnnnnnnnnnnnnnnnnnnnnnnnnnnnnnnnnnnnnnnnnnnnnnnnnnnnnnnnnnnnnnnnnnnnnnnnnnnnnnnagccgcctaacctgtggcgccctcgttatgccgacccacgtagactagcggcaggcatagtggggccgcactcgagatagaacaaacgccgccgcccagcctatcctcgcagtgtccccgagaagctagcgggctgcacaacagtttttgacgccgccttccgttcagaacccgccagcaccgccccccgcacgactagcgctcgccgacgcccgttgtcatgcgttacgcccggacgcccgctggccgtccccgctcgcccttatagcgacgcggggactgcgaatcgctggtcgtttgatcaccgacattgctggggtcggtaattcggcgctacgcgtgtcttcgcgtgatcaccgcctcgcaccggacttgaaacctcgtgcgaccgcgcaacacgcgccacatccgtgcgtgagccgttggctcgtctagcgcacacaacaacacgcgcgtgaaatgacgcccacacctcatgcgcggagcctcgaaaatctatcgcccgcccatagtccctcctcccgcactgtcgtcgaccgtgacttatgcgcccttctccatatcctgttacgccacantgcgcgttcgcacgccgtacttgtcctcggtgtttgcctagtgcacgcaggtgatact

SEQ ID NO: 97908 - DNA, 1087 bp, Homo Sapiens
  misc_feature (985)..(985): n is a, c, g, or t
  misc_feature (1026)..(1026): n is a, c, g, or t
  misc_feature (1030)..(1030): n is a, c, g, or t
  misc_feature (1035)..(1037): n is a, c, g, or t
gggtcctcggcgggtggcggtggtggccgtagcggttcctcctggccctgttaatgtcggggccaggccgggggaggatggcgccctagaacccggccttgctggggtaggggcgggaggggacggggtggggaccggccatgtcggaggtgacccggagtctgctgcagcgctggggcgccagttttaggagaggcgccgacttcgactcttggggccagctggtggaggcgatagacgagtatcagatattagcaagacatctacaaaaggaggcccaagctcaacacaataattctgaattcacagaagaacaaaagaaaaccataggcaaaattgcaacatgcttggaattgcgaagtgcagctttacagtccacacagtctcaagaagaatttaaactggaggacctgaagaagctagaaccaatcctaaagaatattcttacatataataaagaattcccatttgatgttcagcctgtcccattaagaagaattttggcacctggtgaagaagagaatttggaatttgaagaagatgaagaagagggtggtgctggagcagggtctcctgattcttttcctgctagagttcccggtactttattaccaaggttgccatcggaaccaggaatgacattactcactatcagaattgagaaaattggtttgaaagatgctgggcagtgcatcgatccctatattacagttagtgtaaaggatctgaatggcatagacttaactcctgtgcaagatactcctgtgggcttcaagaaaagaagatacatatgttccttttaagggggaacattggagctccaaaaagcatggtggaaaaattaaccaaagggggcagcctatcttccttgtgaatcccaacccctaccaagccctaaaaaaagggtttacccccccacccaagtgggttttggctttccttggggggatgggatggaaatttaggccctggggcccaagtgggnaggagggacgtttgccaggagaacccccccgtgactttttnaaangcggnnnacggggggcgagttattggggccgaaggaaacccccttttaatcgtctcg

SEQ ID NO: 97909 - DNA, 1014 bp, Homo Sapiens
  misc_feature (97)..(97): n is a, c, g, or t
  misc_feature (256)..(256): n is a, c, g, or t
ccattcctgggcgtcaaagtagagcccatggtgaggtagtatccccgccgccgggaaggcatagaagtaatcagagatgagcagatctgcccaccgntgaagtcagtgtgatgcataaaagaaaatagagttgcacttcctgcataaatccagaggtgccacaggacaggaaagagcagggaccagacgatgatgatgcagtgagggacaaagatgtttctcaggaatctgtagagatggtcccacacggggaagnaaggccatgtagagcgccacgtccccccactgtcgggtaggacttaaagatggcgatgacagcgatctggataaacatgaagaagatggggtgctcctttagctttatggctaaggggatggtgtagaagaagacgttgatctgaaacacacatacaaagaagaggctgaagtgctcaaacatctctgcaaagaagtaccagaaaagaccaatgtttggagtgagatctggaacagaaagtataaagccatagactgcggggatgaaatcccaagagctgagaaggaagaaggagaggcaaatgattaccactaggcttcccacatacatcatggcatactcccaagaaaagatccagaaggctttgctcttcattttcacaggtatgtactgccgctggaggagatagaggagtcctgggacaaacaaggtgagtgggtacagagactggtatgtcgctaaggcaagaaaaatagcactgaggaaagcactgccttttatcgtagtcaaaatgaagaaagcaatgagggtgttgttgatggcacaggtagacttggcaacacaagacaaaatcgtgtaaggatttaagagatagaacagggccactttcaaagggatgtaacgcatttccataggggtccggatgagttcggccacatctggggcatactggtccagttctaggaggagtttctgctttttaaacacaactttattgaagtcctggattgcaaaatacagggcaatagcagtgagtg

SEQ ID NO: 97910 - DNA, 316 bp, Homo Sapiens
gggtcttcacatgcctatgactaatttgtacacaaactaatgctcgtgtttcccaagcacctggaagacatgccagatccatgtgcagtaatgcctggtggctccaggtctgccccgccgtcctgtggggctgtgagctttcccagcctcctgcccgtgtttgtgaatatcattctgtcctcagctgcatttccagcccaggctgtttggcgctgcccaggaatggtatcaattcccctgtttctcttgtagccagttactagaataaaatcatctactttacccacgaaaataaacggcgcaaaaacgaacctgt

SEQ ID NO: 97911 - DNA, 409 bp, Homo Sapiens
  misc_feature (378)..(378): n is a, c, g, or t
gggggccgaggatggtggggatgccccttcacccagcaaacggccctgggccaggaagaggaggaaggagggcgagcgaggaggatggcggagtcggggctcctgacggaactctaatgaatcattgattgaccagcactattttaccagttggaatgaatgatcagaaatgggcatagtgcttttagatccaacatgtaacagatggatgttactccatgctgattacttcttcaagccagtacttttttgattgtgtaggatctttgtctcttcatctttgaattcaattactggaaaataaaaggagttcatgtagtttttgtccaggcttgagtcaccatgagtagtagtttaggaaaagaaaaagactctacngatggaaggctgaggtaattactgggcttgt

SEQ ID NO: 97912 - DNA, 367 bp, Homo Sapiens; identical to SEQ ID NO: 33086

SEQ ID NO: 97913 - DNA, 1245 bp, Homo Sapiens
  misc_feature (1144)..(1144): n is a, c, g, or t
tactccagccagggtgacagagcaagaccctatctctaaaactatttttaaaaataaaacaatatgttgttcatattatcctaatgtagtgttttactgaatagaattccttaaaggattcttttccccaaggatattaactcaaggtaaattataataggattgcagataaattaagcatctttatctttgattacagagatatttagcatatgactatagataatttccccttcatattttcttgggcttctagtatttatgtatcaagaaaattatttccttatgtttgaaatggtgacatttctgaaatgtaccagcagaggatacagggatttttgtttgcttttcattttcttatttactgaagaaataaaggcattttagtttatgacaacggagacgctacgacgcagtgagtccacatctacccaaccgccccggccccgcaccgttggcatgtcccccccgtgaccgggaggatgaacggcggcaggagggagacaaatggggtgtgtggggggtccgcgctcgggcgccctcaaaaaacgtttgtaaaaacacttttcggtggtgggcgcggcgggcgcccccgcacggggaaaagggggaccacggtgcgcgcgcgccagcgtggtgcttttacaggaggcgaaagcacttgcggggcccgaagcaacagcgagggggccgggcgggaccttgcgggggccccaggagaaaaaagaaaacgccccgccggggcgggctccaacacggaggagaggggcgctgttcggtggaaagaagggaaactgcctgcgggagaggggaggcgcgccacgcggggcggggtcgttgcttctcggggtggggcctcttcgtacgccaacgggggcgagggcccacgcaaaaggcgtagggctcctggtgtaatagaggagcatggcatgtctgggccctccgccgcgcgccctcgaccggaacctcgcgatgcgacagcggtgacacggacgtggtggaggatgtgttccgtatatggacgacgggttggtcattgggcgagcggagaatcggtggagagaacagacgcctccacgagagaacgggccgctaacgtgtatgagtcgagcgcgcacgactgagacgtcgcgcggcgggaacngctagaccgatacaacacacacgatagagcgggcacggagcgcgcgcaggatcgtggtgcttattgtcggcccgcaggcgtgcacgagaatagcggacggg

SEQ ID NO: 97914 - DNA, 518 bp, Homo Sapiens
gattgatgcaggggatcaaatttaggaagttctgatctgttaatttactacaagtttttgtataaaatgaaaactcgtattctacctatgtcttttctgtaaattattgagacaattgtgtatcatttttgttctgttaatgtggcttagtacattgatttacttcaatttgttaccacaacttgctgaaatacaccattattatttgttgtatgcaatactggatttattttgataacgtattgtttagattttgttctcatctatgttaatgaaagaaattggcctgtatttttacattcttgtaatatctttgccaggttctataaaatgcaataataagcaaataaattactttgtttttgtataagtatgtataggattgagctctaaaaccaaaccattataatgataatttgggtagcttcaaactcaaattgaagagagtcttcactacaatcttcactacaacctttggccttcctctctacatttaagagtagcaatagaacaataaa

SEQ ID NO: 97915 - DNA, 572 bp, Homo Sapiens
ttgttcccctgatctctaaatatggaggtcattaccaagaaatgctttggtatgaatgagagccagatctccactgtgtgagccagtgaattatggctaattcggctgttacagccactggttggctggattttaaaccataaaactggaagattacctacaaaagtaacagtgtggctataagcctgagctttaatggatatacatcctcacagaaaagttggaaataaccaaaactgaagtcttaatttaccttcagtttaatctgtggatttgttcaaatactaaagatcctcaggtccagaattccagcatcatttattcttttaaaatttttaagaacttgatccattgtatcagtacctcacaatcagagttggcaaatgatggatgagtgattcaagcagtgcacccggtggaagctgaaatccatctgtgaatggaactgaagtgaacgtgaatatgctgactatatcctggaagcatttttataccatcttgaaatttcaacaaactggcttttgccagttaatccagctgtctttcaagaataaaagttggggttttcaagg

SEQ ID NO: 97916 - DNA, 461 bp, Homo Sapiens
gggacaacgtgctcgtttgttcattctgcaagtaaatgcttaatgcttcctaggtggcaggctaaagaatatgatcattttaaagcagtcatgctttgaaaataaacaacccatcccagctgtaagctttttgaaagtgtacaaaatatgtaattgatgactccctaaatggtttgcagctttggtatttgactgaattgtaaaccattagttaaactacatttcagttatgctttgtaggaaaaacactttcctatgcattgaatgttctataactaaggagcttagtaatctactgctaaaaatctcactgaaatctccagtttaagcgatttaagcaatttacagctcttggcaaatatttgttttgggttataaaacactttttttctgactagtaaattgttcatgttctttgtttccagtaaaatgggaataaaggtttcagtactcaaaaaaaa

SEQ ID NO: 97917 - DNA, 429 bp, Homo Sapiens
ggggggaagtgacgagagccgggtggacccagggtggggaactacctcttcctctccacgcggttgagaagaccggtcggcctgggcaacctgcgctgaagatgccgggaaaactccgtagtgacgctggtttggaatcagacaccgcaatgaaaaaaggggagacactgcgaaagcaaaccgaggagaaagagaaaaaagagaagccaaaatctgataagactgaagagatagcagaagaggaagaaactgttttccccaaagctaaacaagttaaaaagaaagcagagccttctgaagttgacatgaattctcctaaatccaaaaaggcaaaaaagaaagaggagccatctcaaaatgacatttctcctaaaaccaaaagtttgagaaagaaaaaggagcccattgaaaagaaagtggtttcttcta

SEQ ID NO: 97918 - DNA, 745 bp, Homo Sapiens
  misc_feature (343)..(347): n is a, c, g, or t
  misc_feature (349)..(350): n is a, c, g, or t
  misc_feature (354)..(402): n is a, c, g, or t
  misc_feature (405)..(485): n is a, c, g, or t
  misc_feature (488)..(489): n is a, c, g, or t
  misc_feature (494)..(588): n is a, c, g, or t
ggatgtaatttaactctcaaattcatgtttttcttcattcctattatattcacatgtgaaagcaagtgatctgttgttgctgaatcagagatatgagagattcttttttataggtgggcattatttatgcccctttctgtggaagagtaagaaaattaaaatacaagatgcatgaggaaaatgtagagatgctctttgtgattaacttagaatattaagtgctacttgaggtacatgttcagactaacattcttttgcagtatagtgagaaaaaaacattttaaaattaattatcattttgttgattgtgcttttatgtaataaaatgcagtactttaaaacnnnnnannaaannnnnnnnnnnnnnnnnnnnnnnnnnnnnnnnnnnnnnnnnnnnnnnnnccnnnnnnnnnnnnnnnnnnnnnnnnnnnnnnnnnnnnnnnnnnnnnnnnnnnnnnnnnnnnnnnnnnnnnnnnnnnnnnnnnccnnaaaannnnnnnnnnnnnnnnnnnnnnnnnnnnnnnnnnnnnnnnnnnnnnnnnnnnnnnnnnnnnnnnnnnnnnnnnnnnnnnnnnnnnnnnnnnnnnnaaaaaattctttaaacccccttctttttccgccccgcgccccccaaggaagaaaagaagcccttttctcttttttttccaaaaggaaacccgccggaaataaatttgcggggtccccccccaccaaaaacaccgcgcgggcggccccgggggtttat

SEQ ID NO: 97919 - DNA, 604 bp, Homo Sapiens
gggggcccaggcggggtgcgagtggcgcagtcggagcccgttgcggcccctgaggaagcgaggaggcgtcggcgtcggctgaggcgggcggaccggcgaggcgaggcggcggccccaggcccgagggactcgggagctcgagcagcggcggcggcaagacctctccccctcggaggcggcgggcggaggcggcgggagcggtggtgccccccccgggcacggggccatgtacaacgggatcgggctgccgacgccccggggcagcggcaccaacggctacgtccagcgcaacctgtccctggtgcggggccgccggggtgagcggcctgactacaagggagaggaggaactgcggcgcctggaggctgccctggtgaagcggcctaatcctgacatcctggaccacgagcgcaagcggcgcgtcgagctgcgatgcctcgagctggaggagatgatggaagagcaggggtacgaggaacagcaaattcaggaaaaagtggcgacctttcgactcatgttgctggagaaggatgtgaaccctgggggcaaggaggagaccccagggcagaggccagcggtcacggagactcaccagttggcaaaa

SEQ ID NO: 97920 - DNA, 196 bp, Homo Sapiens
acgtgagccaccgtgcctggcctggaattatctggactttcaaagaagatggcattattataagaagagaagattattgccgaaaagatggattgcctcactttccactttttatgtaacagtagttaaaaaacagctgtttttttacttgaattacaaaaaaagtttaaataaaacttgtatttatgatacgaaa

SEQ ID NO: 97921 - DNA, 187 bp, Homo Sapiens; identical to SEQ ID NO: 10550

SEQ ID NO: 97922 - DNA, 222 bp, Homo Sapiens
  misc_feature (125)..(178): n is a, c, g, or t
ggggaattctaacggctgagctcttggaagacttgggtccttgggtcgcaggtgggagccgacggggtctcactccattgcccaggccagagtgcggggatatttgataagaaacttcagtgaannnnnnnnnnnnnnnnnnnnnnnnnnnnnnnnnnnnnnnnnnnnnnnnnnnnnntcatggaccgatctaaagaaaactgcatttcaggacctgttaag

SEQ ID NO: 97923 - DNA, 496 bp, Homo Sapiens; identical to SEQ ID NO: 6164

SEQ ID NO: 97924 - DNA, 1047 bp, Homo Sapiens
  misc_feature (269)..(281): n is a, c, g, or t
  misc_feature (420)..(629): n is a, c, g, or t
  misc_feature (636)..(638): n is a, c, g, or t
  misc_feature (643)..(644): n is a, c, g, or t
  misc_feature (684)..(737): n is a, c, g, or t
cagtgtgaggagagcgtgaggtgcgtgtgtgaacatcggacggatatgggcgcggctaacgggtacgaggtgatcgacgccgcgtggcaggtgcgagggtattataggcggagtagtgggattttatgagtggaacgaggaggaagggggtggtaggacgaggagaggagcgtcgggtgggtgggaaagagggaagagcgggtgggtgtaggggtgggtaggttgttatctacgtagggcgcgggatgggggaatatacaggacgactnnnnnnnnnnnnnctatttcggggaataatggcgggggtgccaggccagggagggtgtgcagcacatacgcacatagaaccggaggggcgaacgaggtaaagtagggctcagcgacgcaagcgggcacactgagaggggaagatggcgcacnnnnnnnnnnnnnnnnnnnnnnnnnnnnnnnnnnnnnnnnnnnnnnnnnnnnnnnnnnnnnnnnnnnnnnnnnnnnnnnnnnnnnnnnnnnnnnnnnnnnnnnnnnnnnnnnnnnnnnnnnnnnnnnnnnnnnnnnnnnnnnnnnnnnnnnnnnnnnnnnnnnnnnnnnnnnnnnnnnnnnnnnnnnnnnnnnnnnnnnnnnnnnnnnnntttttgnnncggcnntgcactccagcctaggcacagagagtgaaacttcgtctgnnnnnnnnnnnnnnnnnnnnnnnnnnnnnnnnnnnnnnnnnnnnnnnnnnnnnntccagccttgtggcctgggggtaggaggaagaccccatgcattctcctcggtgtctgagagcatggggtcagcgtgcaagccatgcggcctggctggtggcagcgagggcacttctatcccgtcctcactgctcgcctcagagctcactacaacagacatttgagccagggttgcatcaacaggctggagaaagcccagagcctgggtcatcagctctgcaaatggggtcagctacacacctctgcatttgaagaacaacaaaaaccacccaagtcctgacccacgcccaccctgcaaacgaggtcctgt

SEQ ID NO: 97925 - DNA, 699 bp, Homo Sapiens
ggggagttggaagaggcgagtccggtctcaaaatggagggccatgatccaaaggaaccagagcagttgagaaaactgtttattggtggtctgagctttgaaactacagatgatagtttacgagaacattttgagaaatggggcacactcacagattgtgtggtaatgagagacccccaaacaaaacgttccaggggctttggttttgtgacttattcttgtgttgaagaggtggatgcagcaatgtgtgctcgaccacacaaggttgatgggcgtgtagtggaaccaaagagagctgtttctagagaggattctgtaaagcctggtgcccatctaacagtgaagaaaatttttgttggtggtattaaagaagatacagaagaatataatttgagagactactttgaaaagtatggcaagattgaaaccatagaagttatggaagacaggcagagtggaaaaaagagaggatttgcttttgtaacttttgatgatcatgatacagttgataaaattgttggtaagtagcaatttatggtaacttgaatgagaaagtagaactggtttttctgttttgaactaaatttgctaaattgtaattttctgttgcgtgtaatggcatttatagtgtatagtcaattttcatagtgtctgcctgtgtaatcagtatccagatcaagaaataaacataaacatctcg

SEQ ID NO: 97926 - DNA, 198 bp, Homo Sapiens
tgatcatttctagcttaattccatggtgatcagaaaaacattacaaataatttcagtatttttacatttcttaatctatttttttatttgaatggcccagaatgtggttgtgatggttaatattgagtgtcaacttgattggactgaggatacaaaaagtataaaggataaaataaagcaggcagaagaaagtggaat

SEQ ID NO: 97927 - DNA, 470 bp, Homo Sapiens
  misc_feature (91)..(188): n is a, c, g, or t
ggacacctttaggagtaggaagagtactcatactggaagagtattcagcacggactggaatcctgcatacatatctgagctctgtgttctnnnnnnnnnnnnnnnnnnnnnnnnnnnnnnnnnnnnnnnnnnnnnnnnnnnnnnnnnnnnnnnnnnnnnnnnnnnnnnnnnnnnnnnnnnnnnnnnnntttctgacttcatatctgtgggatccacacaatggggaggtactggccttggaatccatggatccccagctatcattttactttagaattacagtgttctctgttagtgtcaagggaatgaacctgacgagaaaagaccaaacataggactgttacagggaagaaaaatatgaaaagacctaaagatgcacgtcctcattatatgtaaggaatctatttcctagaatcctataaaaagctcaagtgaatttgcttcagttaataaatgtgatttaattatga

SEQ ID NO: 97928 - DNA, 445 bp, Homo Sapiens
tgggggtagcccacggggctgccacttttggaatgtgtcgaggtcgcatatctgatgtaacctcccactccgtcccttaggtgctctagtggaacataccccaagttcttcggcctctgttcctttgcccccaggccacccactttgggtccccggaaatgccaccagcagcgcggagctggagcgggagtccgcctgaggccgcggttttacgcgaagcgtcttccctggcgctcgaggtggctagatgtcgtcggctttagctattcctggtgcagacgcccaccggcactgaggctggcgacaccttcgatgtatggttgctaggctcactgcctggtctgtagtcgtgtccctagagatgtcttcccttccccacagccactggctggagtgggggacccgacactgatagaaaactgcagaataaaaaagaaagaactgg

SEQ ID NO: 97929 - DNA, 855 bp, Homo Sapiens; identical to SEQ ID NO: 10635

SEQ ID NO: 97930 - DNA, 1387 bp, Homo Sapiens
gccttctgctgcctgttggtcgttcccttggcttttcggctctctttgcttcccctctcgttggcacgctctgaaccaattttagtgcaaatgtctccgctacggaggttgtctctccttgatccccgtccagcttccagtgctgtttcacgattacccctgcccccacccatttatccctaataagtccattatccttggtatctgagttgtatcctggactcatctcaattaaataatcattattgggggcggagaggacttcctgttgttcccaggctcagggctaattttaggataagttctcttttcagaaagagaaacactaggtatgactagtatccctttggcatataatcactttgtgggatgacagatagttctaggttaggagttcccaagctctagtctactttcaacactcttcagaccttagtaggaagttagccctcttctgggaagaaagtgggagcccaggaacaaattcaggtatgttcggtaaagatagggctgctcaaatcaatgcaaatggcaactaaaaatgacagccaaggttgtcacatagtgatcaagatgctccgtctaccagttacgtagatagaaaagttcactttcatgcagttggtatggtcctttggggggagttaaaggcagataaataatgtcttccatactgaacaggcctgttaagtgaattccttggaagctgacttttgcttttctttcacctcagttagcatcaggaactcactgccttgttggggccagatctttcccaattctgtcttcagaagaatctgttattaagaaatgcttgagcatccattttttcaggggactgaaaaaagcaggaacattagtattcacagtaaaaaaatactgtcattatgcttccacatgttcacagagtaccccctttccagaatgagctactcagctgtgtgggaatggctcttgttcatccagctttggcaaagagatattacctgggggggccacaaagtactcctccacgacgcgatgggagttttgtagtaattcatcagcacagttgccttctaccacattgtcggatctcaggtatagacatctgtcctccaggaccgattccatgggctccaccccgtctgtgtccacggcgcgtagccggtcggcgaaggcgatagctttctccagtcgcgccactgcctcgcggctgccgaagtccacaagcgctagacgctccaggtgctcgatcaccgcagccgtgatccggccactgccctgaggatccgccttggaggtgaagccctggcgcccgcccagaggggcccgaaggcccagccacaccaaccgcgaccacatttcttccttccttggcccccgcagtgcgcccgcgcgtaacccc

SEQ ID NO: 97931 - DNA, 866 bp, Homo Sapiens; identical to SEQ ID NO: 10651
  misc_feature (631)..(669): n is a, c, g, or t
  misc_feature (726)..(736): n is a, c, g, or t
  misc_feature (772)..(812): n is a, c, g, or t

SEQ ID NO: 97932 - DNA, 788 bp, Homo Sapiens
  misc_feature (474)..(474): n is a, c, g, or t
ggggggggagggtggcagagtaaggagtgggcgccgctttgtgcggcaggactgcctcggcttgtggccccgccccagtcgtcccttctattcatttctccccggtaacgacagctgagggggactgtgggtggcggccctttgccgtacggcaggttggagtcggtgagagtgtgcgggaggatcttctttcagccacccgcggcgacactggtcgggtccaggatggtgggcttggtctcccaggagcccaaggagcctgcagggccctgggcccattgtcccacatgagggccatgcgctcccgcttctggctcgggcgtgtgctggccccggccttgggcgctgcgagcaaatctgagcactgatccggctggtctgcaggctcttttcctcgtggtggcccgccggggtgtccctgtctgcccagcaaggttttgcggcctccaggtggtgggtccaatttttcattangctttgatgagccagcagaacagcctgtgaggaagaacaagatggcttctaacatctttgggacaccggaagagaaccccccatcttgggccaagtcagcaggttccaagtctagtggtggcagggaaagattcggagtcgcctgggaacacagagaagtaactccttctgaagccaggctctggagatttcttaaaacctccaagggaaaaaggtgaaaatgcagaaaaatgtgggaccccgactttccaagcccaccctggcgccataaggggaggccaaaacctttgcccccctgtttcttgtggcccccc

SEQ ID NO: 97933 - DNA, 823 bp, Homo Sapiens
  misc_feature (622)..(622): n is a, c, g, or t
  misc_feature (714)..(764): n is a, c, g, or t
ggggagggcgggcaagccatactcggcctcgcgcgtccattggtcggctgcgtgaggggaggagccgctggctccggccgccgagatgagctggggccgtctgagccgcttacttaagccagcactgctgtgcggggctctggctgcgcctggtctggcaggcaccatgtgtgcatcccgcgatgattggcgctgtgcgcgctccatgcacgaattctcagccaaggacatcgacgggcacatggtctgcctggataagtacaggggtttcgtgtgcatcgtcaccaacgtggcctcgcaatgaggcaaaactgacgtaaactacactcagctagtcgatctgcatgcccgatatgctgagtgtggtttacgaatcctggccttcccctgcaaccagtttgggaggcaggagccaggaagtaatcaagaaatcaaggagtttgcagccggctacaacgtcaagtttgacatgtacagcaagatctgtgtaaatggggacgatgcccacccactgtggaaatggatgaaagtccagcccaaaggcaggggcatgctggggaaatgccatcaaatggaactttaccaagtttctcattgataaaaaccgctgtcgtggtgaaancgctatgggtcccatggaagagcccccaggggaataaaagaaggaacctgccccggcctatcctctaacctaaccccctaccaagggtgttnnnnnnnnnnnnnnnnnnnnnnnnnnnnnnnnnnnnnnnnnnnnnnnnnnntccacccccgggaaatttcatggaaagggtctgccctgtaaaacccacccccctccttt

SEQ ID NO: 97934 - DNA, 810 bp, Homo Sapiens; identical to SEQ ID NO: 10653
  misc_feature (192)..(224): n is a, c, g, or t
  misc_feature (606)..(621): n is a, c, g, or t

SEQ ID NO: 97935 - DNA, 836 bp, Homo Sapiens; identical to SEQ ID NO: 10655
  misc_feature (421)..(471): n is a, c, g, or t
  misc_feature (561)..(570): n is a, c, g, or t
  misc_feature (577)..(720): n is a, c, g, or t

SEQ ID NO: 97936 - DNA, 715 bp, Homo Sapiens; identical to SEQ ID NO: 10656

SEQ ID NO: 97937 - DNA, 972 bp, Homo Sapiens; identical to SEQ ID NO: 10657
  misc_feature (41)..(41): n is a, c, g, or t
  misc_feature (306)..(329): n is a, c, g, or t

SEQ ID NO: 97938 - DNA, 590 bp, Homo Sapiens; identical to SEQ ID NO: 10659

SEQ ID NO: 97939 - DNA, 787 bp, Homo Sapiens; identical to SEQ ID NO: 10671
  misc_feature (677)..(677): n is a, c, g, or t

SEQ ID NO: 97940 - DNA, 1071 bp, Homo Sapiens; identical to SEQ ID NO: 10672

SEQ ID NO: 97941 - DNA, 552 bp, Homo Sapiens; identical to SEQ ID NO: 10683

SEQ ID NO: 97942 - DNA, 561 bp, Homo Sapiens
ttttttagtaactatgtactttaatcttcaacattcataattgcacaaagcatcactggtcatttaaataatacatgtcaattaatctaatgaagaaactggcaaagtagaatgttaaaagcaatacctcgagcacgtaaagaatgtttgatattaacacttaacatgcaaaacgcagattagaacagctcttttgagcatggttatttaaaatccttaccaacagggcaaagcaagcactgtggagaaatacacataaatatatccaacctgccagatctctcaggtgagtgcacaccaattctaacaggtctggctgacctggctttccacatatatacagtggtttctaatactccaaagttgtctgacgatgggaacgcagaatcggaacaaggagggaagaccatttactttcaaaatagaatccggcagggaagtctcaactcctgacaagtcacctttaaaacaacataaccagaactttcttacagagaaaaatcttttttccttaaaaatgtatatgtggcaaaaatggctgaaaatcttgtccatgctagg

SEQ ID NO: 97943 - DNA, 855 bp, Homo Sapiens; identical to SEQ ID NO: 10698
  misc_feature (534)..(537): n is a, c, g, or t
  misc_feature (539)..(540): n is a, c, g, or t
  misc_feature (547)..(547): n is a, c, g, or t
  misc_feature (719)..(719): n is a, c, g, or t
  misc_feature (727)..(727): n is a, c, g, or t
  misc_feature (760)..(761): n is a, c, g, or t

SEQ ID NO: 97944 - DNA, 308 bp, Homo Sapiens
atcacctgcctgccggcagggcagtccgtgctcctccagctgccctagtgaggccccagcctacctgcacctccgtgaggcaactgggccacagccccgatgattcgtaacaccacctttcgccctcaccccagaaatcactgaaatttcatgattggcttaaagtgaaggaagtaaaggtaaaatcacttcagatctctaaaaaacaaagaattacatgagttagtacatgaaaaaattatgggaaactacatgaaatatactgttacgttcaataaacattagcttctgtatataataatatcaaa

SEQ ID NO: 97945 - DNA, 415 bp, Homo Sapiens
cagtgcggggttagggattccccgggagagaggacgaagcgaggagagttctccatcccctctccccgcgtggactcctgagcctgcgggtccagggtggggggctgtcactttattcgctacacgcctcttctctcctataaggatgcgccccaccccgctttcccctttctccgggcttggttttttacggtttttatttattcgtggagcctctcggctcctggggtccttctaactccgcccgcgcccttaatttaaatcgcagtatactgtatttatcggggccccggaggggaggtcgcgagagccgcgtctgtgtataaaagcaggaaatagccaaagctttaatctagcctaatttatttttccccttatatttccctaccctaccctccccccaaaaaaaagcaaa

SEQ ID NO: 97946 - DNA, 348 bp, Homo Sapiens
gggggcagaaccaagacagcacagtgcccctgtgcggggcccacggctcccactaaggcctgcccaccaccgcccgcctgggcagccatgaatgtagcgccccaggccctgccccagcccgccatgccacaaggtgggggaggccctgggcagaatgttcactctatttattggggaaggagggaggggggggacacttaacttattcctttgtaccccagggggtggagccctgtgcccaccctgcactggggggagggtgggcagggatactcagggacagggcatcatgggggatttggcacaaaatggagcattaaaggtaacccctgccccctaccgtaaaaa

SEQ ID NO: 97947 - DNA, 505 bp, Homo Sapiens
aacaattggctgcatgtcagcttcacggccaagcacgccaacaaggtcaaggtgctggacgcccccgtgcccgactgcctgggtgtgcactgtgacttccaccaaggcctcctgtccttctacaatgcccgcaccaaacaagtgctgcacactttcaagaccaggttcacacagccgctgctgcctgctttcacggtatggtgtggcagcttccaggtgacgacaggcctgcaggtccccagtgctgtgcgctgcctgcaaaagcgaggcagtgctaccagcagctccaacaccagcctcacctaggcccccaggcacccacccagctggggtgtttttgggggagtcgccgccaagcccaggctgctggagccaggcaccctcctctgtcacttgctgcttggagccttaactccagatgggggggtcaccaagagggagtgggcaccctggcgggccctctccccacctcacctcttaataaaggtcagacactggccaggct

SEQ ID NO: 97948 - DNA, 377 bp, Homo Sapiens; identical to SEQ ID NO: 4147

SEQ ID NO: 97949 - DNA, 960 bp, Homo Sapiens; identical to SEQ ID NO: 2949
  misc_feature (406)..(406): n is a, c, g, or t
  misc_feature (408)..(408): n is a, c, g, or t
  misc_feature (437)..(451): n is a, c, g, or t
  misc_feature (478)..(478): n is a, c, g, or t
  misc_feature (508)..(517): n is a, c, g, or t

SEQ ID NO: 97950 - DNA, 680 bp, Homo Sapiens
ggaaagacaggaaacatcccattccactggcagctaaagcctgtcagagaaagtggagctggcctggaccatagcgatggacaatcctggagatcatcagtaaagactttaggaaccacttatttattgaataaatgttcttgttgtatttataaactgttcaggaagtctcataagagactcatgacttccccgttcaatgaattatgctgtaattgaatgaagaaattcttttcctgagcaaaaagatactttttgattcatctttgctctggaatgtattacatgttttcttccaactgtttgaaggagaattttgaatgtttgccacaccgctgatacccaaataattttttaaatgaagtggagcttgtggcttcctgatgtgtcaccagacaaaatattcgcttgggatatgtattctttgttttttgctccatgtacactttcagctgtgagttagtatagggcgtatacttaccggtttaatgacctcaacctcagttgtgtttggataacttagggtgtatacccttagtttccttagagttggtaggatcaagtcattggtttgctttgactgggtttttaaagtatcaagtacagtgtcatcaatttacagttaaggaaaggaatcgtgaagtagaaaaattattttctttagtctttttggtgggaag

SEQ ID NO: 97951 - DNA, 1743 bp, Homo Sapiens
  misc_feature (940)..(1123): n is a, c, g, or t
gccttcaggaaccagtcaacgctgaagacgcacatgcgaagccacacgggggagaaaccgtacgaatgcgatcactgtgggaaggccttcagcataggctccaacctgaatgtgcacaggcggatccacaccggggagaagccctacgaatgccttgtctgcgggaaagccttcagcgaccactcatccctcaggagccacgtgaaaactcaccggggagagaagctctttgtgtcatccgtgtggaaaaggctccagtgagcgcgcctgctttagagacacaggatgattcagaccggaaacagacctcgtgggtgtaagaggaagcctctgtgagctcgcaccttactgggtgcaaaagaatccacggaacttgggagaagtccagttcctgtaaaaactgggaagacgaggcgttctcatcccataggaggtttgtgagaactcacgccgggggtgaaaatgtacgtctgtagcatggagaagccttcagggtacattcagctcttaacaaacacaggaggacttaatggcagcttggcatttaatgtcaaaatccaagccgtggcatttaatgtcaaaatgacttcagaccacttctagcccttctgggcccatgagtaataatgagcacactagggagcatctctgtaaacacagtggctggggaaacccttcctagtctcacttgattcctcatgacggaaatcacactaaagagagaaatcagtgaagtaaggaacgtggaaggtcatgaatgggccgcaaaccacggccagctgcttgtctttgtatggccttgccagctaacaatagtggttccatctttaaggaagaagaatgtttgatggagaaaatttgtggccaatgaagtctgaaatacttcctgtcatctgcccctttccagaaaaacttggccgacccttggtctacagcacgnnnnnnnnnnnnnnnnnnnnnnnnnnnnnnnnnnnnnnnnnnnnnnnnnnnnnnnnnnnnnnnnnnnnnnnnnnnnnnnnnnnnnnnnnnnnnnnnnnnnnnnnnnnnnnnnnnnnnnnnnnnnnnnnnnnnnnnnnnnnnnnnnnnnnnnnnnnnnnnnnnnnnnnnnnnnnnnnnnnnnnnnactgttgctgaggttgaaaataatcatgcagtcattcctcaattactgcctgcagcaattcctccatttttatgaatcttgtgagcacttacgctaggagaaatttcttttacaaaacttttaaaatacaattagtgctgataattcctatgtggaaatgattccagccatggtcccctcacttgagcatgtgaatattctcacggagagaagccccagcgagattttccggtgaatacgggattgcacttactctttcatcacggaaacagagccccgcgagagaagccccaacgagattttcccgtgaatacgggactgcacgtactctctcatcatgaaaacagagccccgttcataaatttgtcatctttacttgtgtaaggttatactcctctaaataagcccttaagcctcatcaagaaaggttggtggatagtatgtatactatagcttcagtccttgataacgtcctaatttccttctggacagcctcctgtgaccaagggcatagtggagatctatgtgacatgaggatatttctcaggtaccacttggttactggtacctgatgcacacggattgcgaacagagcatgatgcctccatcaagtggtaata

SEQ ID NO: 97952 - DNA, 415 bp, Homo Sapiens
ggaagattgaaaatgacagttgttgattttctgaggtaatatacccaaataaaatatatgtatgtgtacatgaatctaaactgtcttcttctgttcctcattttgctttacttaaataatctttcatattttttaagtgttttgcccatgtgcttgggtagccttgaagtcaccagaataactaggactcaaattcagaccaaaccaggactagctttttgtgccatgagttagccatggtcctggacccagcaaaaagaatgattatgatggtcagagtaagatgagcaattgcaacataatattctctaatattgtatactgtaaatttattcagctgccctcgtttactcacagtttgcttatttgccaccataaaaaatggtacaataaaaattcatgtaatccaaaaaaa

SEQ ID NO: 97953 - DNA, 366 bp, Homo Sapiens
tgtctgcttttgctcagtgtaatgtttttgaggttcatctatgttgttgcatgtattagtaggttgtatctattggtgcatagttattccattgtatgtatgtaccacactcttcatttacctgctgatggatattgcattgtttccagttttgggttattatgaataaaactgctgttaaccttaaaatataagtctttgtgtagacatatgttttcatttgtcttgagcaaatacctgattggtcagatggtcatatgtcagtatatgtttaatatcatgtacttccaactgtttaccaaagtagttgtgccattttattttcccactagcgatgtatgagttccatttgatccacatctttgc

SEQ ID NO: 97954 - DNA, 1401 bp, Homo Sapiens
  misc_feature (49)..(49): n is a, c, g, or t
  misc_feature (261)..(261): n is a, c, g, or t
  misc_feature (270)..(270): n is a, c, g, or t
  misc_feature (305)..(351): n is a, c, g, or t
  misc_feature (358)..(495): n is a, c, g, or t
  misc_feature (500)..(500): n is a, c, g, or t
  misc_feature (502)..(505): n is a, c, g, or t
  misc_feature (507)..(510): n is a, c, g, or t
  misc_feature (512)..(530): n is a, c, g, or t
  misc_feature (578)..(654): n is a, c, g, or t
  misc_feature (789)..(790): n is a, c, g, or t
  misc_feature (1276)..(1284): n is a, c, g, or t
atgagtgtgacaaagaggccgaaggatggataatatattgggtgagagntcatgagtgatgtcgcagtggggattgcggtgcttgggagtattatcgtatgcgggtgacagatagcgcggttagtatacgggtggggaatatcgtttgtgggggtatcacaagggggggctcgctaatggtcgatttaccatgggcgtggtatcaacaatggggcgcggggtggagataagtaagtaaggggggagaatgtgggtggggcnttggggtgnttgcccccggcgtctctatcggtgtttcgtgcgcnnnnnnnnnnnnnnnnnnnnnnnnnnnnnnnnnnnnnnnnnnnnnnnattcggnnnnnnnnnnnnnnnnnnnnnnnnnnnnnnnnnnnnnnnnnnnnnnnnnnnnnnnnnnnnnnnnnnnnnnnnnnnnnnnnnnnnnnnnnnnnnnnnnnnnnnnnnnnnnnnnnnnnnnnnnnnnnnnnnnnnnnnnnnggggngnnnngnnnngnnnnnnnnnnnnnnnnnnnttactcattctgcgcagatgttgaagtttgagcgaggcggcgacaagnnnnnnnnnnnnnnnnnnnnnnnnnnnnnnnnnnnnnnnnnnnnnnnnnnnnnnnnnnnnnnnnnnnnnnnnnnnnnagttcaacataaaatgagaaagaaaaaaatatttctgacattttcaaagaacagaaatagggaaagtatgttcatatacatcaaacgtatactgcacatattggttactacaatacaaagcaatgagtttttttnnaaagtgtagtttgcaagatggcacggttagtaggctcactggctttcatctgttgtggctggagggtgcagtctgctctcccatacatacagtaccatgtaaacacatcaggctgagcgcgtggtggtggtagggcaggttgggggcataagagttggaacaagcgcagataagtcaacagctttttagggctttcttggtaagcccccttctggtgagtagttggtgaccccaccaagtggaggggagactggggaccatggaaacatgggacagctcccacgaagggctcttgcactgcagaattccactcaagggatcttgggtccaggagccgagctgccagtatcagtggagaaggacaaggtgcatggggatcccgccagcaacatcaggatggccatgccgggcacccgctttcctctgtgcaaattcaggatgaaagactaggaggggactcgggacctcttgctctcctttcccagnnnnnnnnngggtggaagagtcagtgtattcaaggtctctctcttgttttgaagatcagaaggagataacccagaccctctctcagccccagccagcagagaagactttggtttctaacaatgaag

SEQ ID NO: 97955 - DNA, 843 bp, Homo Sapiens
  misc_feature (135)..(158): n is a, c, g, or t
  misc_feature (707)..(707): n is a, c, g, or t
gcttctaatgctagccggtgaggctgacctggagccagctgctggggtccctcagcctcctggttcatccaggcacctgcctataccccacatcccttctgcctcgaggccaagatgcctaaaaaagctaaaggnnnnnnnnnnnnnnnnnnnnnnnntcctgcctcctctcctctttggggatcaccagctctgactccaccaaccctcatccaggaatctgccatgagtcccagggagtcacactccccactcccttcctggcttgtatttacttttcttggccctggccagggctgggcgcaaggcacgcagtgatgggcaaaccaattgctgcccatctggcctgtgtgcccatctttttctggagaaagtcagattcacagcatgacagagatttgacaccagggagatcctccatagctggctttgaggacacggggaccacagccatgagcggcctctaagagctgagagacaaccggcagggaatcggaaccctcagaccccagccgcaaggcactggaatctggcagcacccctgaaggaactgggaaataagttcttccccagcctccagataagagcccccgccggccaatcccttcatttccaactaaagaagaccctaaacaaaaaaacctagctgagccactcctgacctacaaagctggtgacttaaaaaatgtggggcttttaagcccgcntaggaaccccaccataccacgatttttccttttccggcccccttgggccctccaaaaacttttctaaacctattcccttggggggcgcggggcccatacggaaatgtgaacatgggcccttacctgttttccaagg

SEQ ID NO: 97956 - DNA, 827 bp, Homo Sapiens
acatgcctgatgttgctgccgatgatttcaacgcctggctttgagattccgtgagtagtcttgaataatttaaaattcgaaaatcaaattctacttattttctcttaatgctattgtatttcctaattctcagctttaacatgtaagaaagtactttcgctaggggtcttaattgaatggtggggtcgagatgactgcgtcagaattaaatctctggaagacctctgagctccttttaaaatcatcaacaagcgaaaatccttatcaatagcgatgtgggaatgcattaggtacagtattttaaacatacaaaacctaggcatattaaaaagcactcctctggtaatttaataaggaataatgatgtccttaagtttattttaatcagcaagtatgactcaatttgaaaatatgagaacaaatagatttaaataggaacacccagtaaactatggtatgcaaataaactcagaggtaaacttgtgaatacataaatctaaataagtcagttaccatcaaaatattacgtgatcctatatttttctgtccacgtcttaaaagtattttttaccttggggctttattttctttccctcttcccaagattatccaaggcagttccaatacgcgttttcaataatggtaattaaacttttggagggtaatcgccagctgtttccagaaaaatacttttaataggtggtagtcctccctgtaactggttttccctgtaatccttttgtgcacattgtaaaaataacccccatgaacgtgccaccaaggggacaatgaagagaaacaggttctcggcccagagttgtgaagcc

SEQ ID NO: 97957 - DNA, 522 bp, Homo Sapiens; identical to SEQ ID NO: 5587
  misc_feature (249)..(372): n is a, c, g, or t

SEQ ID NO: 97958 - DNA, 853 bp, Homo Sapiens
ggggaatgtggcggcggtagttccaggcgacggcggacggtggtacggtcctggagggcccagtgcgcggggctagccgtggctggagagcttcgaagagccttgaaatgtgaggaggaggaagatagctgttgcagaagtagtggccaaggtatcgttctggacgcgcctgcggcaggagggtcgccgcgtccacttccgccagccccacctccccccggccttcctggagtccctgaaagaggaagaagtaggttttaaggcaaaagatggccaaggaaagatgcctgaaaaagtcctttcaagatagtcttgaagacataaagaagcgaatgaaagagaaaaggaataaaaacttggcagagattggcaaacgcaggtcttttatagctgcaccatgccaaataatcaccaacacttctacactgctgaaaaattacaagacaacaacaaaatgttagttttagctttggaaatgaaaaatccaaagtgaaagaagcccagatatcatcctacagctgagaaaagaatgttactatctcacatgtcagctatatgcattgaaaaggaaacttacatcaccacaaacagtagaacctgctcagaaccaggaaatattgttcctctggaatggaccccaatagtgatggacgctcccgaaatttattttggaaggatttaccgcaaattcctcttgagaaactggacctcccggacaagggaatcttttccaatagaaaaaccaatccctctattccttccgaaccccctgggaggtggtttttgattcaggggaaactaaggcccccgtggaaagggcctaccctaaaactggatctggttcctaaccaaa

SEQ ID NO: 97959 - DNA, 364 bp, Homo Sapiens; identical to SEQ ID NO: 13311

SEQ ID NO: 97960 - DNA, 979 bp, Homo Sapiens
cagtcgacggtaccggacatatgcccgggaattcggccattacggccgggggccatccctggggcccagtcaccacctactgccactccctcagccctgtggagaacacagcagagaccagccctcaggtcctccccagctccaagaggaggcgcgttgaagggcctgccaagcctaacagagaggacgtctcctcgtcccaggaagaaagtctgcagctgaacagcatcccgcccacgcccaccctcacctccacagctgtgaagagcaggcagcccctgtgggggttgaaagagatggaggaagaagatggctcagagttggattttgcccagggcagtcagcccgtcgcaggcaccgagagggtcaaggttcttgggtccacaatatttccagactccacacaacccttcaaggtcctggcctgggcaaccagctgatgcgactcagccttatggaagaggacgaggaagaagagttagaaatccaggatgagtcaaatgaagaacggcaggatacagacatgcaagcaagtagctactcttccaccagtgagcgcgggctggacctcttagattctacagagctggatattgaggatttctgacaggactctgggcccctccccagctccactccctacctcaagaatgtgaccatttggaaaaggcaaagagaaaaggagcaaaatgaagcattcccccaggcttcagccctgggctctgaggggaaagagttgggcattgtttttctaacctaacctttccctctggggtagagaagccgagagaccctgtcctccctaatgcactgtggcccagtccccttgcctttttcctgttctgtttggagtggagaagggcagcacctctgtgtttaatggaaatagcccatagtctcctggatttttggaacatctttctcagcctattttgtgtcctaatgattcgctcaataaacatgtttgaatccacacgcc

SEQ ID NO: 97961 - DNA, 819 bp, Homo Sapiens
  misc_feature (49)..(49): n is a, c, g, or t
  misc_feature (147)..(147): n is a, c, g, or t
cttgggaatggacttcaacgaggtttcaccctggagcagggagcccttngtccccttcccacagcagtgtaggcccttgatggggacgtagggctcacttgcatagttgggctcagggtcttccgtctcgtcaggactgtccagggnctcgaggaaggacgctgggatccagcttcgctttgctttcatctgacagaaccacccaaccgctctcgcttttcttccacgacctccaccacgtcccccgtggacagagccatctcggagcccgaggtcttctcgtagttggcaatggcgcggtacgtctgcaggatgatggggcccggtgatgtctgtcgcggtactcttgccatctttgggcatcaagtatgtctctggcttttttgtctggttgtccgtggggagcttgaggtcatcagggcgcaccttgaagaagtcgaggaggtggggacagcgggagatcttggtgggcaggctcatgagcgtgccgcagtactcggtaagtgtgccctggcggttctcggcggcccgctgcccgtcaaaccacttgggagctgggaggtgggggatgatcctgttctctggattgatcgcccctgcctcaatagggaacatttcttttaaggttttatggaactcgtagatctcggtgaagcgccggtagaccaccttctccgacaggtcctgccatttcaccaggaacatgtacacatagtgctggctgggtacgaagcgcttctcaaagcccagcagggcgatgtgacggatgaaggtgtcccccatgactgggtggcctccagtgctccctggcacttccag

SEQ ID NO: 97962 - DNA, 1084 bp, Homo Sapiens
ggtcggattcccgggatcatgggggacaccttcatccgtcacatcgccctgctgggctttgagaagcgcttcgtacccagccagcactatgtgtacatgttcctggtgaaatggcaggacctgtcggagaaggtggtctaccggcgcttcaccgagatctacgagttccataaaaccttaaaagaaatgttccctattgaggcaggggcgatcaatccagagaacaggatcatcccccacctcccagctcccaagtggtttgacgggcagcgggccgccgagaaccgccagggcacacttaccgagtactgcagcacgctcatgagcctgcccaccaagatctcccgctgtccccacctcctcgacttcttcaaggtgcgccctgatgacctcaagctccccacggacaaccagacaaaaaagccagagacatacttgatgcccaaagatggcaagagtaccgcgacagacatcaccggccccatcatcctgcagacgtaccgcgccattgccaactacgagaagacctcgggctccgagatggctctgtccacgggggacgtggtggaggtcgtagagaagagcgagagcggtcagacctcccaccttacggggctccttcccctggtgctcaggaacccacagccacaagccccctgccaaggctcaggcagcctggcccctgggaggactccggctctgttaggggccctaaatgtcctccccacactgtgggtcgccttctgtcttagtgtgcaccctgtggtggctgtgggcatctgtgcatggcaggccggggcggggcatgtctgcgtgtcctgtctgcatgggtatgggaccgttctgttcattatgaaatggggctcagaagctgtgatttctgtgagcatgggtgcatgccatgcctggggaccctcattgcccagtgtggatggaaggggaaacttttcccaaatctgaaccattgggacacatcagggggtcctggggccccctgggttccttccacattccctggatggtctgccaaggcaacacgcctgggggcccttggcccccttcagtttaaccttttcccgcaccc

SEQ ID NO: 97963 - DNA, 1361 bp, Homo Sapiens
ggggctggtcttctctcccgcggcgctggggcccgcgctccgctgctgttgctccattcggcgcttttctggcggctggctcctctccgctgccggctgctcctcgaccaggcctccttctcaacctcagcccgcggcgccgacccttccggcaccctcccgccccgtctcgtactgtcgccgtcaccgccgcggctccggccctggccccgatggctctgtgcaacggagactccaagctggagaatgctggaggagaccttaaggatggccaccaccactatgaaggagctgttgtcattctggatgctggtgctcagtacgggaaagtcatagaccgaagagtgagggaactgttcgtgcagtctgaaattttccccttggaaacaccagcatttgctataaaggaacaaggattccgtgctattatcatctctggaggacctaattctgtgtatgctgaagatgctccctggtttgatccagcaatattcactattggcaagcctgttcttggaatttgctatggtatgcagatgatgaataaggtatttggaggtactgtgcacaaaaaaagtgtcagagaagatggagttttcaacattagtgtggataatacatgttcattattcaggggccttcagaaggaagaagttgttttgcttacacatggagatagtgtagacaaagtagctgatggattcaaggttgtggcacgttctggaaacatagtagcaggcatagcaaatgaatctaaaaagttatatggagcacagttccaccctgaagttgggcttacacaaaatgggaaaaagtaatactgaagaatttccttttatgataatagctggatggcagtgggaaccttcaccgtccagaacagagaacttgagtgtattcgagagatcaaagagagagtaggcacgtcaaaacttttggttttactcaatggtggagtagactcaacagtttgtacagctttgctaaatcgtgctttgaaccaagaacaagtcattgctgtgcacattgataatggctttatgagaaaacgagaaagccagtctgttgaagaggccctcaaaaagcttggaattcaggtcaaagtgataaatgctgctcattccttctacaatggaacaacaaccctaccaatatcagatgaagatagaacccccccgcacagaattagccaaaccttacatatgaccaccagtcctgaagagaaaagaaaaatccttggggatacttttgttaagattgcccatgaagtaattggagaaatgaacttgaaacccgaggaggttttccttgccccaggtactttaccggcctgatctaattgaaagtgcatcctgtctgcc

SEQ ID NO: 97964 - DNA, 809 bp, Homo Sapiens
  misc_feature (165)..(190): n is a, c, g, or t
  misc_feature (217)..(238): n is a, c, g, or t
ggttctgcaaatcttaggaagaaaaatgtccctagtagcaaacgggtgtcttctgtgcataaataagtacaacacaattctccgaaagttcgggtaaaaagagatgcggtagcagctgccctgtgtgaagctgtctaccccgcatctctcaggcgctaagctcannnnnnnnnnnnnnnnnnnnnnnnnnaaagaaaagatgtataattgcaggaannnnnnnnnnnnnnnnnnnnnnccatcattctatatatgtgatggtgaaagatatgcctggaaaagttttgttttgaaaagtttattttctgcttcgtcttcagttggcaaaagctctcaatgctttagcttccagtttcttttctctcttttcctttgttagggaattaaaggtatgtaaacaaattacctcatgtagcaggggattttcatgttgagaggaatctttccgtgtgagttgtttgggtcacacaaataacccctttctcaattttaagagtttgggatttggcaaatgtaaggtttttcttcaaagggggcatataactacatattggactgccaagaactattgactgtagcacttaatcaccacacatagagccacacaattatttaattttctaactctctggggggccctagaaaaattccggtggatggggtttagggtaaaagtcttgaagaaaccccgttggaaccctttccttggaaaggttcctaaccctaagttttctggaatgggaactaacatggatccacgtctaccataatttcctggggatcacccaacaagtcccgagcttgggtcc

SEQ ID NO: 97965 - DNA, 863 bp, Homo Sapiens
  misc_feature (714)..(714): n is a, c, g, or t
gggactcctgagagcagagctggccgcagccatgaccccgcagcttctcctggcccttgtcctctgggccagctgcccgccctgcagtggaaggaaagggcccccagcagctctgacactgccccgggtgcaatgccgagcctctcggtacccgatcgccgtggattgctcctggaccctgccgcctgctccaaactccaccagccccgtgtccttcattgccacgtacaggctcggcatggctgcccggggccacagctggccctgcctgcagcagacgccaacgtccaccagctgcaccatcacggatgtccagctgttctccatggctccctacgtgctcaatgtcaccgccgtccacccctggggctccagcagcagcttcgtgcctttcataacagagcacatcatcaagcccgaccctccagaaggcgtgcgcctaagccccctcgctgagcgccagctacaggtgcagtgggagcctcccgggtcctggcccttcccagagatcttctcactgaagtactggatccgttacaagcgtcagggagctgcgcgcttccaccgggtggggcccattgaagccacgtccttcatcctcaaggctgtgcggccccgagccaggtactacgtccaagtggcggctcaggacctcacagactacggggaactgagtgactggagtctccccgccactgccacaatgagcctggngcaagtagcaaagggcttccccgctgcctccagacagcacctgggtcctcgccacccctaagccccgggacacctgttgggagggccggatgggaatctggcctaagcctggggttggaagtcctttgccttttgctggctgctggaga

SEQ ID NO: 97966 - DNA, 880 bp, Homo Sapiens
  misc_feature (314)..(438): n is a, c, g, or t
  misc_feature (745)..(745): n is a, c, g, or t
ggggcggacggtggcgctgggtggccacggaggtcccgcgctccccgaccgagatagggcgggccctatttcggagaggtgtttggcaccaacattttttaaagccccgtgggtggttctccgggatctcccagaccgagagggcctgaacgtccagacctcagggaatggggtcgaaggggcggcgctcgtccgcggaggtgggcgggagcggcccggggcctcgggcctctagagagcgggagtgaccctcggtttctggcctccgaggggcgggagcgatcctcagccatgtccctagtctctggcttgcnnnnnnnnnnnnnnnnnnnnnnnnnnnnnnnnnnnnnnnnnnnnnnnnnnnnnnnnnnnnnnnnnnnnnnnnnnnnnnnnnnnnnnnnnnnnnnnnnnnnnnnnnnnnnnnnnnnnnnnnnnnnnactgcgcacggccgtggtcagctttgaaagctgggtagatccctttggctcatacgcctttctgctagcttaccctgattctgcttctgggtcagatagtattttaaatatttccaagggtgtctcttttgcaagaatacctgaaaacctttctgtggaaatggaagtggccatggaaaaataaaaccacataatccattaccggaagtgggaataaaatacacgaccacaagacaaaaacaaacccttggttcgggccgcccttcgggcccctccaaaaaaacctttcctaacaacccacttcctntttggggcggcgggggggcccccagttaaggtaaaaggggaaccagggggccactaaacctgggtttcccccaaagaaaaaaccctgggggacagtaacataaaggggccttgggaatttcctccccgccacggt

SEQ ID NO: 97967 - DNA, 878 bp, Homo Sapiens
gggggcccggccgggggggcaagatggcggcggcagtaggggttcgtggccggtacgagctgccgccttgctccggcccaggctggctcctcagcctttccgccttgctgagtgtggcggcacgaggggccttcgccaccacgcactgggtcgtcacggaggacgggaaaatccagcagcaggtggattcaccaatgaacttgaagcatcctcatgacctagtcatattaatgagacaagaagcaacagttaactacctcaaagaattagagaaacaattagttgctcaaaaaattcacatagaagagaatgaggacagagacacaggactggaacagagacataataaagaagacccagactgcatcaaagccaaggtgcccttaggggacctggatctatatgatggcacatacataactttggagagcaaagacatcagtcctgaagattatatagacacagaatctcctgtccctccagacccagagcaacctgattgtactaaaattctagaacttccatatagtatacatgcttttcagcacttgagaggtgtacagggagagagttaatctttctgcacctctgctacctaaagaagacccaatcttcacatatttatctaaaccggttaggaaaggagtatagaatgacatagggtcacctcattcagtgaaggcctacagaagaacacttcctcgtgggtactggtataacatggcttccatttactggcagacgcacgacatgaggccccaaccagtcagagaaaggcgccccgcgaaccagccaactcctacacagggcaccacaaagaccgtgccccgagacaaccgggacacggccaaccaacggccacacccacgcaaccccca

SEQ ID NO: 97968 - DNA, 504 bp, Homo Sapiens
ccaatcttcacatatttatctaaacggttaggaaggagtatagatgacataggtcacctcattcatgaaggcctacagaaggtaagtcatcagtcacttaaagagccagcgggctgagccagcgggctctgtgtaaacagaagatatttttatcttggaaaatacctgactaatttgtttttatctagaagacgctttaaaattacacttacattgatgcaaattgcatagttcagtgctggggagaaatatggatagactagtctcctttcccaggaagagatgctggaaagttttatctaaactgatgaaaaacgaaatataaactgacataagcaacagcgtttataggctggattatatacattgtgtaagtaagaaagttaatgttttagtgtcgttaatatatctatacacaatacatgtattattactgttttctgagacagaaaaagaatcaccaccagcaacaaaatcttctgtaacttactttaaagagactat

SEQ ID NO: 97969 - DNA, 1275 bp, Homo Sapiens
gctccaccgcggcgagaggcatgggcacgtggctgccgagggtggccgagctctgggaagaaaagcccgtgtgcctctgcgtagcgtcgctacagcgctgactcggtgtggattgattggaaaggtttgagggagtacttgggaagcatggtggcacatgatgagactggaggtctcctacctattaaaaggaccatacgagtcctagatgtcaataaccagtccttcagagaacaagaggagccaagcaataaaacgagttctgacctctggctcgtgtcacgtccttggcaaatttaatctctcctgtaagaaatggagctgtcagacgtttaggtcaaacaatacagtcatttacccttcgtggtgaccacagatccccagcctctgcccagaagttttctagcaggtcaagcagtcccaatacccgccaagagaaggagcagtgcactgtggtcagagatgctggacatcaccatgaaggagtctctcaccaccagggagatcagacggcaggaggcaatatatgaaatgtcccgaggtgaacaggatttaaattgaggatctcaaacttgcaagaaaggcctaccatgaccccatgttaaagttgtccatcatggcagaagaggaactcacacatatatttggtgatctggactcttacatacctcttgcatgaagatctgttgacaagaataggagaagcaaacaagcctgatggaacagtggagcagattggtcacattctcgtgagctggttaccgcgcttgaatgcctacagaggttactgtagtaaccagctggcagccaaagctcttcttgatcaaaagaaacaggatccaagagtccaagacttcctccagcgatgtctcgagtctcccttcagtcgaaaactagatctttggagtttcctagatatccctcgaagtcgcctagtcaaataccctttactgttaaaagaaattcttaaacacactccaaaagagcaccctgatgttcagcttctggaggatgctatattgataatacagggagtcctctctgatatcaacttgaaaaaaagtggaatccgagtgccagtattacatccgacagctggagtacctggatgaaaagcagagggaaccccaaaatcgagccgagcaaagtgctgctggtgccatgggggagctgccggagccagaaggggacataaacctttacctttttcctggtttcaagaacatcctggggttcttggactcggccccgttccccacgggaaacgaaacggct

SEQ ID NO: 97970 - DNA, 680 bp, Homo Sapiens
  misc_feature (353)..(547): n is a, c, g, or t
gtgagccaccgaggcctgccagtctttttcttttgtggctgatgttggacagggacaccagtagaaaggtcactgcagatttcttcccaagagcaaggctcttcggtcaaccccctttcccactttcccagcggatgtgaacttcgtgctcaccaaagcaagaggtttcaaggtagcagcccatggggttgtatctgattggcagaaatgtgtggtttgccctgaattgttttaagatgttttcatgttgtgacaattgggtaaacttctggaaaaaatagagctccatacctcactcagcacacctggattgtaaatcgattaggagcttaatgtataaaatgaatctattnnnnnnnnnnnnnnnnnnnnnnnnnnnnnnnnnnnnnnnnnnnnnnnnnnnnnnnnnnnnnnnnnnnnnnnnnnnnnnnnnnnnnnnnnnnnnnnnnnnnnnnnnnnnnnnnnnnnnnnnnnnnnnnnnnnnnnnnnnnnnnnnnnnnnnnnnnnnnnnnnnnnnnnnnnnnnnnnnnnnnnnnnnnnnnnnnnnattgttccaaaccaagaaacttgaagattgcaatcgagctaacattgcgggaactgaaattccagcctgtggttgacaaagagattcccccaggacttcaccacaataaaaaataaaccggaagtcttatgtg

SEQ ID NO: 97971 - DNA, 924 bp, Homo Sapiens
  misc_feature (515)..(808): n is a, c, g, or t
  misc_feature (810)..(810): n is a, c, g, or t
  misc_feature (812)..(813): n is a, c, g, or t
  misc_feature (815)..(816): n is a, c, g, or t
  misc_feature (818)..(818): n is a, c, g, or t
  misc_feature (822)..(824): n is a, c, g, or t
  misc_feature (826)..(826): n is a, c, g, or t
ggtttaatgatgtggtgagaggaagaattctctcaggaaactttttcttattaaaagaaaactatgaaaattattttgtcaaagcacagaaagtgagacgcctcattgctaatgactttgtaaatgcttttaactctggagtagatgtcttgctaactcccaccaccttgagtgaggcagtaccatacttggagttcatcaaagaggacaacagaacccgaagtgcccaggatgatatttttacacaagctgtaaatatggcaggattgccagcagtgagtatccctgttgcactctcaaaccaagggttgccaataggactgcagtttattggacgtgcgttttgtgaccagcagcttcttacagtagccaaatggtttgaaaaacaagtacagtttcctgttattcaacttcaagaactcatggatgattgttcagcagtccttgaaaatgaaaagttagcctctgtctctctaaaacagtaaacatatcttacaaattaaaatgacttttannnnnnnnnnnnnnnnnnnnnnnnnnnnnnnnnnnnnnnnnnnnnnnnnnnnnnnnnnnnnnnnnnnnnnnnnnnnnnnnnnnnnnnnnnnnnnnnnnnnnnnnnnnnnnnnnnnnnnnnnnnnnnnnnnnnnnnnnnnnnnnnnnnnnnnnnnnnnnnnnnnnnnnnnnnnnnnnnnnnnnnnnnnnnnnnnnnnnnnnnnnnnnnnnnnnnnnnnnnnnnnnnnnnnnnnnnnnnnnnnnnnnnnnnnnnnnnnnnnnnnnnnnnnnnnnnnnnnnnnnnnnnnnnnnnnnnanannannanaaannnanaaacatgttcggccgccctcgggccctccgagagcttttctagacccattcgttttgggcgcgcggggcccacgtaggtaaggtggaacatgggtccc

SEQ ID NO: 97972 - DNA, 1016 bp, Homo Sapiens
  misc_feature (466)..(485): n is a, c, g, or t
  misc_feature (909)..(909): n is a, c, g, or t
  misc_feature (919)..(919): n is a, c, g, or t
acctgcattcagtcacagtggagaggatacaagcagaagaaggcatatcaagatcggttagcttacctgcgctcccacaaagatgaagttgtaaagattcagtccctggcaaggatgcaccaagctcgaaagcgctatcgagatcgcctgcagtacttccgggaccatataaatgacattatcaaaatccaggcttttattcgggcaaacaaagctcgggatgactacaagactctcatcaatgctgaggatcctcctatggttgtggtccgaaaatttgtccacctgctggaccaaagtgaccaggattttcaggaggagcttgaccttatgaagatgcgggaagaggttatcaccctcattcgttctaaccagcagctggagaatgacctcaatctcatggatatcaaaattggactgctagtgaaaaataagattacgttgcaggatgtggtttcccacagtnnnnnnnnnnnnnnnnnnnntaaggaacagttgtctgatatgatgatgataaataaacagaagggaggtctcaaggctttgagcaaggagaagagagagaagttggaagcttaccagcacctgttttatttattgcaaaccaatcccacctatctggccaagctcatttttcagatgccccagaacaagtccaccaagttcatggactctgtaatcttcacactctacaactacgcgtccaaccagcgagaggagtacctgctcctgcggctctttaagacagcactccaagaggaaatcaagtcgaaggtagatcagattcaagagattgtgacaggaaatcctacggttattaaaatggttgtaagtttcaaccgtggtgcccgtggccagaatgccctgagacagatcttggccccagtcgtgaagggaattatggatgancaatctctcnacatcaaaactgaccctgtggatatttacaaatcttggggttaatcagatgggagtctccagacagggaaagggcagccaaactgcccctatgatgt

SEQ ID NO: 97973 - DNA, 412 bp, Homo Sapiens
  misc_feature (33)..(33): n is a, c, g, or t
agctgaggagaaagtcagcctccaccctccccnccagtcagaaaggggaatgcaggggttacaaagcaggatgaaccgttccaaggcccccgctggcactgggccatacctgcaacgtaatcttatttttcactaacagtccaattttgatatccatgagattgaggtcattcaacagctactggttagaacgaatgagggtgataaactcttcacgcatcttcataaggtcaagcgcctcctgaaaatcctggtcactttggtccagcaggtggacaaattttcggaccacaaccataggaggatactcagcattgactgacacacaagtatccatcaaagaatggagttagcagaaaaaggtactacgtctcaggaaatagcattgtcttgaaaaagtggactaaagtgg

SEQ ID NO: 97974 - DNA, 898 bp, Homo Sapiens
gggaaaattgaagtgatacgtgaaattgagatgagtgtggatgatgatgatatcaatagttcgaaagtaattaatgacctcttcagtgatgtcctagaggaaggtgaactagatatggagaagagccaagaggagatggatcaagcattagcagaaagcagcgaagaacaggaagatgcactgaatatctcctcaatgtctttacttgcaccattggcacaaacagttggtgtggtaagtccagagagtttagtgtccacacctagactggaattgaaagacaccagcagaagtgatgaaagtccaaaaccaggaaaattccaaagaactcgtgtccctcgagctgaatctggtgatagccttggttctgaagatcgtgatcttctttacagcattgatgcatatagatctcaaagattcaaagaaacagaacgtccatcaataaagcaggtgattgttcggaaggaagatgttacttcaaaactggatgaaaaaaataatgcctttccttgtcaagttaatatcaaacagaaaatgcaggaactcaataacgaaataaatatgcaacagacagtgatctatcaagctagccaggctcttaactgctgtgttgatgaagaacatggaaaagggtccctagaagaagctgaagcagaaagacttcttctaatttgcaactgggaagagaacacttttgattgatgaattgaataaattgaagaacgaaggaccctcagaggaagaaaaaggctagtccccaaagtgaatttatgccatcccaaaggatcagttacttttgtcagaaatccgccttgcctctaaaagcagattttgtctgcagtacggttcagaaaccagatgcagcaattactattacttaattatacttaaaagcagg

SEQ ID NO: 97975 - DNA, 1119 bp, Homo Sapiens
  misc_feature (196)..(326): n is a, c, g, or t
  misc_feature (1019)..(1019): n is a, c, g, or t
cggacatggcggccaacatgtaccgggtcggagattatgtctactttgagaattcctccagcaacccatacctaataagaaggatagaagaactcaacaagactgcaagtggcaacgtggaagcaaaagtagtatgcttttatagacgacgtgatatttccaacacacttataatgctcgcagataagcatgctannnnnnnnnnnnnnnnnnnnnnnnnnnnnnnnnnnnnnnnnnnnnnnnnnnnnnnnnnnnnnnnnnnnnnnnnnnnnnnnnnnnnnnnnnnnnnnnnnnnnnnnnnnnnnnnnnnnnnnnnnnnnnnnnnntgaggaagaatctgaaacaacagttgaggctgacttgaccgataagcagaaacatcagttgaaacatagggaactctttttgtcacgccagtatgaatctctgcccgcaacacatatcaggggaaagtgcagtgttgcccttctgaatgagacagaatcagtattgtcatatcttgataaggaggataccttcttctactcattggtctatgacccctcattgaaaacactattagctgacaaaggtgaaatcagagtgggacctagatatcaagcagacattccagaaatgctgttagaaggagaatcagatgagagggaacaatcaaaattggaagttaaagtttgggatccaaatagcccacttacggatcgacagattgaccagtttttagttgtagcacgtgctgttgggacattcgccagagccctggattgcagcaagtctgtgaggcagcctagtttgcatataagtgctgctgcaacttcccaagacatcaccttgtttcacgctatggatacattgtatagacacagctatgatttgagcagtgccattagtgtcttagtaccactcggaggacctgttttatgcagagatgaaatggaggaatggtcagcctctgaagctagcttatttgaagaggcactggaaaaatatggcaaagacttcaatgacatacgggcagattntcttccttgggaatcattgactagcatcattgaatattattacatgtggaaaactactgacagatatgtgccaccagaacgtctaaaagcagcagaagct

SEQ ID NO: 97976 - DNA, 949 bp, Homo Sapiens
tggatccgcggccagggactctcaggttggctcggcaatgagcgcaatcaacctgtgtcccgcttgcagccgctctcgctggcttccctgagaaacatctggtcgtgcgccggaaggcttctctgagggctccctcagggtctgtggccagctccgggctggcgggcagcgttggtgtgcacgtgggacaaccggcgtaccttcgcagcatccacgcctccgtgaccatcaaacacagcaaagtaggcgcggttcacagggtcagacaagccgaagagctggttgaaggaagggagggacacgtgccggtcctccatcttgcggcgagtgttccggatggcgtggatggagaccagccactgccgctgtgaggcccgggcagccaatggcacctgcttctgccactggccggcgacttcccaaaggcggttaaagaaactctgtgccaggctttgggcatccagcaaggtcacaggggccttttcctcctcgtcatcgtcctcctcctcttcttcttcctccctgggcaacttcctgaattcggaaaggtctgtctgtagcagctgtgaaactgcttcgtgggccagagcagcagcaagtggtggcggggccttcctgctgcccagaaagcccatggccagctcagccagctcgccctccacctcctcctggctgagcaccgtccctggggccttccatggcagagggtcctctgggttcagcagggctgggaagtcttgcaggagcgtgtccaggaagcctggggtctcctcagctccactggccattgggctgctcttctgtggggctccagaggacatgcccaaagcatcccgggggcctgcagctaggccagggcaagagggtctccaggcttcaccccctggtctccgcgggcctcagctgtctcctcgcggctccgtgtcccgccatccgaagcagttgccgg

SEQ ID NO: 97977 - DNA, 982 bp, Homo Sapiens
  misc_feature (623)..(623): n is a, c, g, or t
  misc_feature (656)..(939): n is a, c, g, or t
ggaggggaaggaggggagggcgccaaaattccaaggaccaggaggtgtgggggggaaaaggggataaggaaatgggcggttaagaatttgggaaggaaagggaatgtaagtctccataaaatgtttctaagctgggtgacccttaagttagattggggaggaaagtaccccgggggagggatttcaggagggaccatacttggttggccagaggagtggattttatccgaaacctgtccatagagatgtccagttggtaatcccaatacagatttaaagtctgggggaggtggggtttggagctatgtattgggaatcaccagcatatcagcagcaattgaggacatcaggatgaatgactcccattttgggagtaaatagaaaggaaagagaagtgaatcaaagagggaacgatggaagcactgatactgacaggcatgagcaatcgttgagaaatttctcaagagagtcggacaagacagagtcagagagagaagtacatgaaacagcccctgtaggggtggctagaagccatggactgggttgggaacaattctagagctcccagaaggcaggcaagattgagtcacacttccaacaaagccctctgcacaccaaaaccnccaggaagtattgtttttctttgttagtttgcnnnnnnnnnnnnnnnnnnnnnnnnnnnnnnnnnnnnnnnnnnnnnnnnnnnnnnnnnnnnnnnnnnnnnnnnnnnnnnnnnnnnnnnnnnnnnnnnnnnnnnnnnnnnnnnnnnnnnnnnnnnnnnnnnnnnnnnnnnnnnnnnnnnnnnnnnnnnnnnnnnnnnnnnnnnnnnnnnnnnnnnnnnnnnnnnnnnnnnnnnnnnnnnnnnnnnnnnnnnnnnnnnnnnnnnnnnnnnnnnnnnnnnnnnnnnnnnnnnnnnnnnnnnnnnnnnnnnnnnnnnnnggaagtattgttaattgaaataaatgccaaaatgttcctaccc

SEQ ID NO: 97978 - DNA, 959 bp, Homo Sapiens
  misc_feature (604)..(624): n is a, c, g, or t
cggtccggaattcccgggattgaggtcgtctgagccctgcgacagcctggacagcaactcaggatggcatcaggcagggcacgctgcacccgaaaactccggaactgggtggtggagcaagtggagagtgggcagtttcccggagtgtgctgggatgatacagctaagaccatgttccggattccctggaaacatgcaggcaagcaggacttccgggaggaccaggatgctgccttcttcaaggcctgggcaatatttaagggaaagtataaggagggggacacaggaggtccagctgtctggaagactcgcctgcgctgtgcactcaacaagagttctgaatttaaggaggttcctgagaggggccgcatggatgttgctgagccctacaaggtgtatcagttgctgccaccaggaatcgtctctggccagccagggactcagaaagtaccatcaaagcgacagcacagttctgtgtcctctgagaggaaggaggaagaggatgccatgcagaactgcacactcagtccctctgtgctccaggactccctcaataatgaggaggagggggccagtgggggagcagtccattcagacattgggnnnnnnnnnnnnnnnnnnnnncctgagccacaggaagttacagacacaactgaggccccctttcaaggggatcagaggtccctggagtttctgcttcctccagagccagactactcactgctgctcaccttcatctacaacgggcgcgtggtgggcgaggcccaggtgcaaagcctggattgccgcttgtggtgagcctcaggctctgaagacagcatggagcaggtgctgttccccaaggcctggccaactggagcccaagcaagcctgtgagcaacttgagaggggatcctatggccaagaacccgaaggctcttcggcaggcttgccaatccatttctggatggcccggtccc

SEQ ID NO: 97979 - DNA, 792 bp, Homo Sapiens
  misc_feature (215)..(215): n is a, c, g, or t
aaggaaggccagctcgggagaaagtcctgaccacagccctctgatctgctctcatgggatggtgcaccacggaagagcccccagtgactgcaggaggcactcctggggatacagatttgtgtgtgtacatgcacacgcacacacaaacacacaagaaagggaaggccaaacacgagaggtgtcctatggtcagacaccctattagacccccgtcnccctggtcagccagccagctactagccacagctcagagactaaagccctttctgaaaatcaggatacagggaaaaaccaccactcttcagctacctctttgttccccaaaccctctgctcactgggaagtgggcaaagccttcagatgagaccatctgagatctatataacccagggtttgtttcacagctttcatagattatggctctcctatcccctgccctgtctggaaacattaggagctcaagactgaacatgaagctccaattgtgagctccaggaaggtggaagaaacagctgcaggcacaggttgttcaaaccaaaatgaaacaggaggggaggaattagaactgagtcagtgatgccatgagggaatgaccgtcctgtcaggaacatgagtcttggtcttcctaaattcgactgagaatggcctggttctagccactcttccccactagagagctgctggggaaatactggctaccatagctgtggatgggagggagcacaaagtcaatccgagcaggaatgacaccagcaaagttgcctcctactgtagttacagtccctgctcccc

SEQ ID NO: 97980 - DNA, 1049 bp, Homo Sapiens
  misc_feature (218)..(228): n is a, c, g, or t
cactggaaattgtcttttatttttctttgctgtggttcaaggtcatttctttaatcaaccctcagagttggatatagagtcatcaaaagaaaaatcattcttcttcctctctgtttccctaaaaataaaacagtcacaggagacctttccttttttcttaattgttctcatctcatcctttaattattgctgctgctgttatgtgtttatgtttcccnnnnnnnnnnnaagttttgagggtagatcgtgtcactgggcgtaagatactgagaaatcaggtagcttcactggctggtaggggacttttgcttttgaaacgtcacaggctgtcttcctttggatgtaatggacgtcctgatgacccaagccatctgcttagctgtgttctgaccagggccttggggatatggatgaccagcatgggttctagagtgggcttccccgggtttgagtcctcagcaccacttattagttctgtgactgtggaaagtttccatccatcctgtgccccacctcctcattgaaaaacaggacacctgttggcttggcttgacctcctggcttcaggttcccattttcccactttacccctggcatctttcctcctggcatctccatccccatttttgctactttaccacttcttgttggcgaaccgctgaacagtttttataaacatttcctgttttagtcttccacgcctggctcttgatatgccaagtggagaagaaaagctggacattctttctcaggtcaccagcccagcctgaaagactagctcttcctgcaacatcgttctcttgagtgcatgaaggagaatctcacgttggtctatctccttgcattctttctgtattccttatgtttccactaggcagagggatgtctccaagatcagagcaaagaaaaactctgccaaagagaaaagcacgttaatgctttctgcaaggctcttggattggtcggaaccctgagagcgcgccaacaagcaaaacaaggtggtgtggagcaacacactgtttcagtgagcgcctgggtgcagatgggct

SEQ ID NO: 97981 - DNA, 804 bp, Homo Sapiens
  misc_feature (791)..(791): n is a, c, g, or t
gggcccctggctgcggctcctcagtcggcggcggctgctgctgcctgtggcccgggcggctgggagaagcggagtgttggtgagtgacgcggcggaggtgtagtttgacgcggtgtgttacgtgggggagagaataaaactccagcgagatccgggccgtgaacgaaagcagtgacggaggagcttgtaccaccggtatctatgccagcagctcatgcaacataatctgctcccaccgtaactctagtacagctccccaaggggcaagacagttcaagtccagggagtcaattcaggcgccccacccatcagttattcagtctccacaagtccaaacagttaagatttcaactattgcagaaagtgaagattcacaggagtcagtggatagtgtaactgattcccaaaagcgaagggaaattctttcaaggaggccttcctactaggaaaattttgaatgacttatcttctgatgcaccaggagtgccaaggattgaagaagagaagtctgaagaggagacttcagcacctgccatcaccactgtaacggtgccaactccaatttaccaaactagcagtggacagtatattgccattacccagggaggagcaatacagctggctaacaatggtaccgatggggtacagggcctgcaaacattaaccatgaccaatgcagcagccactcagccgggtactaccattctacagtatgcacagaccactgatggacagcagatcttagtgcccagcaaccaagtttgttgttcaagctggctcttggagacgtnccaaacataccag

SEQ ID NO: 97982 - DNA, 813 bp, Homo Sapiens
gggagtgacgctgcggcctccttctgcctaggtcccaacgcttcggggcaggggtgcggtcttgcaataggaagccgagcgtcttgcaagcttcccgtcgggcaccagctactcggccccgcaccctacctggtgcattccctagacacctccggggtccctacctggagatccccggagccccccttcctgcgccagccatgcctttaaaccgcactttgtccatgtcctcactgccaggactggaggactgggaggatgaattcgacctggagaacgcagtgctcttcgaagtggcctgggaggtggctaacaaggtgggtggcatctacacggtgctgcagacgaaggcgaaggtgacaggggacgaatggggcgacaactacttcctggtggggccgtacacggagcagggcgtgaggacccaggtggaactgctggaggcccccaccccggccctgaagaggacactggattccatgaacagcaagggctgcaaggtgtatttcgggcgctggctgatcgagggaggccctctggtggtgctcctggacgtgggtgcctcagcttgggccctggagcgctggaagggagagctctgggatacctgcaacatcggagtgccgtggtacgaccgcgaggccaacgacgctgtcctctttggctttctgaccacctggttcctggggtgagttccctggcacagagtgaggagaagccacatgtggttgctcacttccatgagtggttggcaggcgttggactctgactgtgtcgtgcccgggactgcctgtagcaacatcttcaccacca

SEQ ID NO: 97983 - DNA, 1215 bp, Homo Sapiens
  misc_feature (955)..(1078): n is a, c, g, or t
ttctcgccggtcctgcgggtcgctgctcggctgtgggttagcagcaccctgagcggagcggaagagctgcccgccgccgcgtaaccccgaggccgagactcctggcctggcctccttgggcccacgacgcctgccccgcggagcggacccatgggcctgaggtttgtgtgcggggcctcaggcgagcgctggcgcagcctgtcccccatcgtctgcgccctgcgggcctggccctccccgtggaaggaccgcgggcttcggggccccacgctggggggctgactcctgccacacacacagcggtggccgcgggcctggggcggcagcacagccattctgctcgggctgcgtgagctgaccccgctctctgtgcacctacttttgctgcgtttggtgctgagcctgaagtcccaggacaggcggctgagggggaaagatggtgtgaattgggtgggcagagacaactgaaagccacaggacccggttggcacctttttggccgcctgcgcctttgcctgcagccccgctccctgggtcacccgaaggaggagctggcgctctttccgggcgcagaagcacccgacccacgctggaggaaacggtccctctgggcaggagaagctttgggcctggctggagcacactcacggaaccacgccaacgcctggcctgtagccagctcccacctcccctcccaccttctaaaatgcttgcgggatctcacgtggccgaccctaaccagatacacatggggaaagggaatcaggtggcacacatacccgcctttactccatagaaaacttccaattgggggtaaagaaacaaagcccccacctctgcctaatagatgcaggtttccaactgcagccaaaaaaacaacctgttataagcttttttcccaaagggacaggcatctctatgaaactgccattgcaaaatttgccgacagtgagannnnnnnnnnnnnnnnnnnnnnnnnnnnnnnnnnnnnnnnnnnnnnnnnnnnnnnnnnnnnnnnnnnnnnnnnnnnnnnnnnnnnnnnnnnnnnnnnnnnnnnnnnnnnnnnnnnnnnnnnnnntttcctgggggattagccctgctttttgtggggacccaacaggattagcccaccaggatttagaaaacctacggggtttggaaaaaggtcaacggccagaccgggggaagggccttaccaagggaatttcctgggaa

SEQ ID NO: 97984 - DNA, 1480 bp, Homo Sapiens
  misc_feature (1337)..(1337): n is a, c, g, or t
gggggctgggactggaggacagcggtggcggaggcgactagcggcggcgggagcggcgccgagaggccgtgcgggacgcgggcgccaggaccggccgaacgcagagaaggtagaagatagcaccatgccgattcgtcgaactgtgaattctacccgggaaactcctcccaaaagcaagcttgctgaaggggaggaagaaaagccagaaccagacataagttcagaggaatctgtctccactgtagaagaacaagagaatgaaactccacctgctacttcgagtgaggcagagcagccaaagggggaacctgagaatgaagagaaggaagaaaataagtcttctgaggaaaccaaaaaggatgagaaagatcagtctaaagaaaaggagaagaaagtgaaaaaaacaattccttcctgggctaccctttctgccagccagctagccagggcccagaaacaaacaccgatggcttcttccccacgtcccaagatggatgcaatcttaactgaggccattaaggcatgcttccagaagagtggtgcatcagtggttgctattcgaaaatacatcatccataagtatccttctctggagctggagagaaggggttatctccttaaacaagcactgaaaagagaattaaatagaggagtcatcaaacaggttaaaggaaaaggtgcttctggaagttttgttgtggttcagaaatcaagaaaaacacctcagaaatccagaaacagaaagaataggagctctgcagtggatccagaaccacaagtaaaattggaggatgtcctcccactggcctttactcgcctttgtgaacctaaagaagcttcctacagtctcatcaggaaatatgtgtctcagtattatcctaagcttagagtggacatcaggcctcagctgttgaagaacgctctgcagagagcagtagagaggggccagttagaacagataactggcaaaggtgcttcggggacattccagctgaagaaatcaggggagaaacccctgcttggtggaagcctgatggaatatgcaatcttgtctgccattgctgccatgaatgagccgaagacctgctctaccactgctctgaagaagtatgtcctagagaatcacccaggaaccaattctaactatcaaatgcatttgctgaaaaaaaccctgcagaaatgcgaaaagaatgggtggatggaacagatctctgggaaagggttcagtggcaccttccagctctgttttccctattatcccagccccagagttctgtttccgaagaaagagccagatgattctagagatgagggatgaagatgagatgagtcatcanaagaagaatctgaggatggagagccgcccacctaaaagaaggtgcagaagaaaaaccccagccaagtccccagggaagggcccatctgttgaaagcagaaagggtcccaaacctggaacctaaagttttcagctggcccaaga

SEQ ID NO: 97985 - DNA, 809 bp, Homo Sapiens
  misc_feature (674)..(674): n is a, c, g, or t
gggggagcctttgcttcctcaaatacgagcgggaactgcgttgagcgctggattccaggccgagtgctggcgaggcgcgcagttctctgctgtttaaaaagtatccctgtgctttgaagatactgctataatttgaaaatttgaaattagtgtttcagctgaaccatccgttcatcttcaagccatcatgagctgtaagaagcagaggtcacggaagcactcagtcaatgaaaaatgtaatatgaaaatcgagcactatttttctccggtctctaaagagcaacagaataattgcagtacttctctaatgaggatggagtctagaggagacccaagagccacaactaatacccaggctcaaagattccattcacctaagaaaaatccagaagaccagaccatgccccaaaataggacaatatatgttaccttgaaggtaaaccacaggagaaaccaagatatgaaacttaagctcacacatagtgagaatagtagcttatatatggctctcaacactctccaggctgtcagaaaagagatagaaactcaccaaggccaagaaatgcttgtgcgtggcacaggaagggatcaaagagtacataaacccttggaatggcccctccagttgtttccctgaaaggtgggccaaggtggtcattaacatttttcccaanagtaaaaagtaagccagaaagggaagataaacccaccttttttgggcaagggcaaggacaaaagcctccgaactggaatgggggccaaaatttttacatttccatgccaattggggaaatttgggggaaggggtt

SEQ ID NO: 97986 - DNA, 801 bp, Homo Sapiens
  misc_feature (375)..(375): n is a, c, g, or t
ggggaggtggtggcgcttggtggccactggcggccgaggtagaggcagtggcgcttgagttggtcgggggcagcggcagatttgaggcttaagcaacttcttccggggaagagtgccagtgcagccactgttacaattcaagatcttgatctatatccatagattggaatattggtgggccagcaatcctcagacgcctcacttaggacaagtctgtaaaatattaaaatgaacaaattacggcaaagttttaggagaaagaaggatgtttatgttccagaggccagtcgtccacatcagtggcagacagatgaagaaggcgttcgcaccggaaaatgtagcttcccggttaagtaccttggccatgtagaagtngatgaatcaagaggaatgcacatctgtgaagatgctgtaaaaagattgaaagctactggaaagaaagcagttaaagcagttctgtgggtctcagcagatggactcagagtgtggatgaaaaaactaaggacctcatagttgaccagacgatagagaaagtttctttctgtgccccagacaggaactttgatagagccttttcttacatatgccgtgatggcaccactcgtcgctggatctgtcactgcttcatggctgtcaaggacacaggtgaaaggttgagccatgcagtaggctgtgcttttgcagcctgtttagagcgcaagcagaagcgggagaaggaatgtggagtgacctgtacttttgatgctagtcggaccacttttacaagagaacgatcattccgtgttacaaacaggcactgaa

SEQ ID NO: 97987 - DNA, 1318 bp, Homo Sapiens
  misc_feature (833)..(833): n is a, c, g, or t
ggggaagtagggccttcgcgcacctcatggaatcccttctgcagcacctggatcgcttttccgagcttctggcggtctcaagcactacctacgtcagcacctgggaccccgccaccgtgcgccgggccttgcagtgggcgcgctacctgcgccacatccatcggcgctttggtcggcatggccccattcgcacggctctggagcggcggctgcacaaccagtggaggcaagagggcggctttgggcggggtccagttccgggattagcgaacttccaggccctcggtcactgtgacgtcctgctctctctgcgcctgctggagaaccgggccctcggggatgcagctcgttaccacctggtgcagcaactctttcccggcccgggcgtccgggacgccgatgaggagacactccaagagagcctggcccgccttgcccgccggcggtctgcggtgcacatgctgcgcttcaatggctatagagagaacccaaatctccaggaggactctctgatgaagacccaggcggagctgctgctggagcgtctgcaggaggtggggaaggccgaagcggagcgtcccgccaggtttctcagcagcctgtgggagcgcttgcctcagaacaacttcctgaaggtgatagcggtggcgctgttgcagccgcctttgtctcgtcggccccaagaagagttggaacccggcatccacaaatcacctggagaggggagccaagtgctagtccactggcttctggggaattcggaagtctttgctgccctttgtcgcgccctcccagccgggcttttgactttagtgactagccgcccacccagncgctgtcctcctgtctatctgggtctgctaacagactggggtcaacgtttgcactatgaccttcagaaaggcatttgggttggaactgagtcccaagatgtgccctgggaggagttgcacaataggtttcaaagcctctgtcaggcccctccacctctgaaagaataaagttctaactgccctggagacctgtaaagcgcaggatggacgatttcgaagtacctgggtcttagcatctggacagacctcttattagctcttcgtagtggtgcatttaggaaaagacaagttttgggtctcagcgcaggcctcagttctgtataggcaatgctgtgttattacttgaatatagaatatatagtttacaaaatgaaaattacaatgttctcaccaaatatatgccttcgtgtgtccaaagtataattattttagatgctaattttgaatagtttattaaacagttataaatatgcaaagtagctggc

SEQ ID NO: 97988 - DNA, 797 bp, Homo Sapiens
  misc_feature (122)..(122): n is a, c, g, or t
  misc_feature (125)..(125): n is a, c, g, or t
  misc_feature (135)..(393): n is a, c, g, or t
caggtttccctttaccctacggggggccggcccgcccaaaacgaaatggttttagaaaagttttttcgaagggcccgaaggcggcccgacaatgaacaaatgttttggggaaatattttgtnccnttaggagacnnnnnnnnnnnnnnnnnnnnnnnnnnnnnnnnnnnnnnnnnnnnnnnnnnnnnnnnnnnnnnnnnnnnnnnnnnnnnnnnnnnnnnnnnnnnnnnnnnnnnnnnnnnnnnnnnnnnnnnnnnnnnnnnnnnnnnnnnnnnnnnnnnnnnnnnnnnnnnnnnnnnnnnnnnnnnnnnnnnnnnnnnnnnnnnnnnnnnnnnnnnnnnnnnnnnnnnnnnnnnnnnnnnnnnnnnnnnnnnnnnnnnnnnnnnnnnnnnnncctggtttaataagaaccagagccacaaccctctcagagtgacccagtggagccccagttacctgcctcactctgagagtgaaattaggcagcgagaaaggaaaagccagtttttcaaccagcaggcaactttcccctctcaacagggacactggggacttatgtgccagcccaggctgaactaactactgtgtgacttactgcctcagctaaagcttgcagctcaagaaggaggatgccccttccttcgcgaaccctccgtgggtctggcaggcacccagcctctgtgcatggcctgggaaggaaccactgccctgggttagagaatgccacgtgaacacaagaaaaaggatgcggcaggagttaaccatcctccccttctgtcgtcttctcgcagccgtata

SEQ ID NO: 97989 - DNA, 337 bp, Homo Sapiens; identical to SEQ ID NO: 5588
  misc_feature (282)..(282): n is a, c, g, or t

SEQ ID NO: 97990 - DNA, 839 bp, Homo Sapiens
gggactgagagtcttcagttactagggcagaggactgctgtttgctgacacaatcttggtgcgttggaagtgaaagggaagaggcactggtggctgtgctttgggcccgagcagccagaagccagttgccatcacctatgacgaggagacagcgcctggggcagagcccagtatggggcctagccagggctgggttctcacccacctgtgccgccctgccttgttacctggaagcacagccttggggactgagcaggccctcactgtcactttaagaagggaatcagccactttgtgctcaccacctctggggaaggtgtgagaggagagaaggaagtggctgtttggctgctgacaacatgaagacttcctgcgatgagaacagaggcacaggtgccggccctgcagcccccagaacctggactggagggggccatggggcaccggaccctggccctgccctgggtgctgctgaccctgcgtgtcactgcagggaccccggaggtgtgagtacaagttcggatggaggccaccgagctctcgtccttcaccatccgttgtgggttcctggagtctggctccatctccctggtgactgtggagcagggggggccccaacgggtgctgggggggaccacgctgggctgtgttgcacccagaacgtggcatccaggcaatgggcccctgctcgccagggcccgctgggaaacccaaagcagcatctcctctcatcctgggaaggcttctggggccagcagccccctgggccaacacccccttttggttggaaagtttggggtcccttcccgaggggctccctggggaagcgccggtgggct

SEQ ID NO: 97991 - DNA, 539 bp, Homo Sapiens
ggtggtgggttgtgctgaaacagctcttctgagaacttccaaccacccatgctctaacctggagacagccatcccctgcctcagaataagtaccaattcgtagtacatgtatggtactcttgtccccaagaaatgttaggaagcttgtcagctgaatgagaggaggtgccttctgggtatctctgtgttggtgtatctgtgccattggctacagaacaagaaaaatactatttgccatgctattaccttggcagatgtgtaggtgatagtcatctggctttgagctgagatggtcagtgggttgtaaattccccactagcagatattcagggtggcctgagttatgtaaacaagtgagcaacacagctttaatttcatggaggaatcaaagctgcacactggtattaaaacaacttgattttgcgcacacagttgcatgcatggcaagctgttaacctctgggtggcattttcattatgaatttgttcaccacctgtcttgcttaagctacaaaataaatgcatttgactgcacagaaa

SEQ ID NO: 97992 - DNA, 1064 bp, Homo Sapiens; identical to SEQ ID NO: 9193
  misc_feature (42)..(42): n is a, c, g, or t

SEQ ID NO: 97993 - DNA, 850 bp, Homo Sapiens; identical to SEQ ID NO: 9194

SEQ ID NO: 97994 - DNA, 1330 bp, Homo Sapiens
  misc_feature (1204)..(1264): n is a, c, g, or t
atagactcaaaataggtgtttttttgaggcactaagaaaaaagattcctctaagcaatcaaaatcagcatttgagatttaatcactaaatccaaaatgagatcagctaaaccagatactagtaaggtcactaggctcacgaaaattgaactttggagaagagagatgccaaagagtaataatagcatcagaatgtgtgaaatctgtaaaactttaatcctcattatggatcaaagttctctgcgttccccactaaacattttatgtaggaaacagcagttaaaacgttgaatcagaaatggttaagtcacttgggtgagagatcatccatcaagatgaacgaagagcatgaattggagcatgctactggagactctgcggtagcgctgcctttagccagcgggtctgaggataagccactgctgctactactgccatccaaaatatctgaacatgaactgagatcagacagttgcgcggcatctggagataacatattggtagtgccttggaagagtctcttgggctgactttctgtctccatttcaccttttcttttaagaggaccaagaacacggggtctaatgcacttggactggactctgacttctcctgcttgaaaaatcgtctgggactgggaactggacttggtggcaatccactgctgctcacgaacatctttccgaatcccctggtgggtgaaggtgcgggagaaactggagggaagtcaattctcttaggagaatataatttctccggcttgtcaaaatcactgtcactcaggctcaagctctcatcccatgattggcttatctgcattgccgtttgcatttccctttcatgtgcagtttctctgttcaccatatccaggccttcttcccttttgatctgatgcagtctgctactaggaatacgattaggtgaggatgacagcaacaggctgtgacggctcataattgttgtactattcctccgagttctaagtgtgtaaggttggaaaacctgtgaaaggtcactgagcccatggattaggggagcgctgctggatctcctcagggttcccccataagatgtgtcaggctcaaggtccagctccattttctcctgagccatgtcagacttgcaggcaggcacagcgggcagtgttcagctcctggtgcttagctatggactcccaagactctcactgcaggactgagctgctnnnnnnnnnnnnnnnnnnnnnnnnnnnnnnnnnnnnnnnnnnnnnnnnnnnnnnnnnnnnngcagtctcttccgcctcccacgcttcagaagcgggaacctccgctgggccagttcttccgcgtcca

SEQ ID NO: 97995 - DNA, 1047 bp, Homo Sapiens
tttcctggagcccgcgccgtgccgcggtacgcccgccgggagccgggcagagcggccaagatgtcgcagccccaagaaaagaaagcttgagtcgggggcgcgcgcgaaggaggggagggaactgaagaggaagatggcgcggagcgggagccggccctggagcgaccccggaggactaatgcgggaacgggaccagctgtactacgatgtgctactcggacgttatcggtccacgaggagatgatcgcggacctgcgtccgcacctgatgcctacctgcctgggtatccttcggaactgggcagcactgcgagtgcaagacggtactggacgtgggctgcgggcaccggcattctgagcatcttctgtgcccaggccggggcccgggcgcgtgtacgcggtagaggccagcgccatctggacaacaggcccgggaggtggtgcggttcaacgggctggaggaccgggttgcacgtcctgccgggaccagtggagactgtagagttgccggaacaggtggatgccatcgtgagccgagtggatgggctacaggactcctgcaagagtccatgctgagctccgtcctcccacgcagcgaaccaagtggctggaaggagggcggtcttctcctgccggcctccgccgagctcttcataggcccccatcagagaccagaatgcctgaatggccgccttgcgcttctgggagccagggtgaaagcagacacttatggtgtgggacatgagcctgcctggaagggcttacggccaagcgcttgtctcatgggccactcggagaatcgttgtgcagggattgtccggcgaaggacggtttgcatgggaccacgggccgcaaacggcatatttgcatcagacgtagaaggatccttcacgtgatgcccggtgctagggaagcaaggagcatgaaaagagccaggagatagggcatgggaacatacccgaatgcaagcttgggtaaatgtgatacggggcgcacaagtgcaattgtcattaggccaatacttggataccagagatagaacataacc

SEQ ID NO: 97996 - DNA, 1071 bp, Homo Sapiens; identical to SEQ ID NO: 9299
  misc_feature (160)..(161): n is a, c, g, or t
  misc_feature (165)..(165): n is a, c, g, or t
  misc_feature (170)..(170): n is a, c, g, or t
  misc_feature (272)..(291): n is a, c, g, or t
  misc_feature (315)..(357): n is a, c, g, or t
  misc_feature (773)..(832): n is a, c, g, or t
  misc_feature (897)..(960): n is a, c, g, or t
  misc_feature (989)..(989): n is a, c, g, or t

SEQ ID NO: 97997 - DNA, 1149 bp, Homo Sapiens
  misc_feature (801)..(852): n is a, c, g, or t
  misc_feature (993)..(1027): n is a, c, g, or t
  misc_feature (1065)..(1075): n is a, c, g, or t
cggcggctccaccttcgctttgcgcctctttattatatttttctttgttgtcatggaccgtgattcccgggatgcgaggccgggcacagccttcctgtgtggttttaccgcccagagagcgtcatggacctggggaaaccaatgaaaagcgtgctggtggtggctctccttgtcattttccaggtatgcctgtgtcaagatgaggtcacggacgattacatcggagacaacaccacagtggactacactttgttcgagtctttgtgctccaagaaggacgtgcggaactttaaagcctggttcctccctatcatgtactccatcatttgtttcgtgggcctactgggcaatgggctggtcgtgttgacctatatctatttcaagaggctcaagaccatgaccgatacctacctgctcaacctggcggtggcagacatcctcttcctcctgacccttcccttctgggcctacagcgcggccaagtcctgggtcttcggtgtccacttttgcaagctcatctttgccatctacaagatgagcttccttcagtggcatgctcctacttctttgcatcagcattgaccgctacgtgggccatcgtcaaggctggctcagcttcaccgccaccgtggcccgcgtccttcttcatcaagcaggttggccctgggtggggcatctggaatactaagcccagggggttctcccttcccagaactccctgtacaaggggccctcccaaagggagccaccaggtggaccaaacggaagggggaatgcttcttcctcttcccacaaaaaatnnnnnnnnnnnnnnnnnnnnnnnnnnnnnnnnnnnnnnnnnnnnnnnnnnnnatatcgcggttttcttgggggccccccccgggtggggcccatgaagctttttggggaaaccctgggggaaaaaatccccgaacccttttgtttcgaggggacggaaaatttttttggggcgcgaaaaagggcgccctcaannnnnnnnnnnnnnnnnnnnnnnnnnnnnnnnnnnctcttcatataatttttccacagggggcccccaaaaannnnnnnnnnncccccgcggccccccaaaggggggggcaatttttttatatttcctcccaagaaacccccgtggggggctcctct

SEQ ID NO: 97998 - DNA, 876 bp, Homo Sapiens
gggaacacagagcctagttgtaaacggacagagacgagaggggcaagggaggacagtggatgacagggaagacgagtgggggcagagctgctcaggaccatggctgaggccatcacctatgcagatctgaggtttgtgaaggctcccctgaagaagagcatctccagccggttaggacaggacccaggggctgatgatgatggggaaatcacctacgagaatgttcaagtgcccgcagtcctaggggtgccctcaagcttggcttcttctgtactaggggacaaagcagcggtcaagtcggagcagccaactgcgtcctggagagccgtgacgtcaccagctgtcgggcggattctcccctgccgcacaacctgcctgcgatacctcctgctcggcctgctcctcacctgcctgctgttaggagtgaccgccatctgcctgggagtgcgctatctgcaggtgtctcaacagcctccagcagacgaaccagggttctggaagtcactaaccaccagcctgagggcagcacctccgcctcaagataacgcagctgggacagagtgccgaaggatctgccagggggccaggaagagagctggccgcaaagtccgggaagcccctactggggggaaacagaagggcttcatcaggccggcccaaaagggcaaactaccggggcctggccagggcgggaccggaccggaagaacgcagggaggacccttggccaaggggagggaaccaacacgaggggggggcccttgggtaaccataaagtctggacccaacatggggaaaaacacgaactggaagaccctttttttcgaaatggcggggcttcccccaaaaaaccccgggcttgtgccccgtcggcgaa

SEQ ID NO: 97999 - DNA, 801 bp, Homo Sapiens
caaaaatcttactagtggattcgcctgggatgggcaatgctgacgatgaacagcaggaagaaggcacttcttccaaacaggtggtgaagcaaggcctgcaggagaggagcaaggaaggagatgtagaggagcccactgatgactcgctccccacgactggagatgctggaggccgtgagccaatggaagagaaactcctggaaatccaagggaaaatcgaagctgtggagatgcacttgaccagggaacacatgaagcgagtcttaggagaagtgtatctgcacacctggatcacagaaaacactagcatccccacccgcggactctgtaactttttaatgtctgatgaagagtatgatgacagaactgcacgggtgctgattggacatatctcaaagaagatgaacaaacagactttccctgagcactgtagtttgtgtaaagagatcttgccattcacagatcgcaaacaggcagtctgttccaatggccacatttggctccggtgcttcttaacctaccagtcctgccagagtttgatatatagaaggtgtttgctccatgacagcattgcccggcatccagctcccagaagatcccgactggattaagaggttactgcaaagcccctgcccctttctgtgattctcctgtcttctaaataatcagtgaccggggaagatggaaggggcatggatgaactctgccatagaaaacttcctcccagcctgaaaagaaggatgccctggaaggaacccccggaccctcccgaatgggagaaaaaacccttgggggaattgg

SEQ ID NO: 98000 - DNA, 1262 bp, Homo Sapiens
  misc_feature (311)..(350): n is a, c, g, or t
ggatgttccattcctttggtcaaggagttaaaccctgttacttctggaccaattaggccatatttattctctaaagtaaggttctgtgattttacccatatagcaaaggccaaggagggaaagtggcaaaagccaaaacaattttcataagtgaggagtcatttaatgtctttctgggctggtcttaaaattttaaagttgatataattttcaattctgtttagcattcttatttatggggatttctagctattaaagaagttttatcccacattttagatatatcaatggcatcagatccaccccaaagnnnnnnnnnnnnnnnnnnnnnnnnnnnnnnnnnnnnnnnnctatttaatttaccaccaggagtcaacacacgtttccaaattccacaaatggggctttcttaaggttcacacatgtggactctataaatgatcgctttggtttgcctacagtgaggtggctccctgtgggctttcattactaataatgaggctgctgtttggagatactttcctggtacagatgagaaacagtcttagttatcctgttctcttgagagtggactggaatttggcacttgctttcttctagctccttcacttgtgccccattgtggacacttgcactcagggtagaaacagaacaggttttggcttggttattatatcctcccacttgcatgagagagggcttctcagtgttagcagactgcaggccagctgcagaagacgtgtttgtcagcagcccctctggtgccggacagtgccagctgcggcttggaggattgctctgctgttggaacctcgcagtcttatccatgatgcccatgaacggcgtgttgcgggctctgtgctcagctgtaccgctctgaacgtgggttacaaccttgtctttaattctagtatctggtccttggaccttgaagccatctgaaaaactgctgctcgaagtcaaactactggttgaacttgacatctttatgctgctggatggagaaccagaagagcctgagctggtgagggaagctgggtgtcgcacgtcgctgcaggtcgccagcccaccttggtttggaggggctgcgtccacagccacggaggaatgagacagaagcctctctgtggttttcgtcttacttggtaaagggtgtgcagggccattctccgaacgcgtgggtcgacgatatcccgggaattccgaccgtaccagcctgcttttttaccacctgggttatagtcactaatgctcatgcgccc

SEQ ID NO: 98001 - DNA, 979 bp, Homo Sapiens
  misc_feature (16)..(16): n is a, c, g, or t
agaactgtgttggaancagagagtccctcttccgagcggtggagaaaagtgtgtgattttcctacaaatacggcgcgtttgtatagaatgcgacgtttcgatataggtaggggggcctgggcaagcggtgtccccgagtaggtgtatttctaagtaaaacaactgtgggactttttgtgtctctcgctcttttaacttagaaaaggtagtgggaaggccaaaggagcagggtgggtattattgcccacggggttggtgtgccccaagaagccacgggcaattggggggaatttcagggaggcgctttggtaatggggactttaaccggggacccggtgggatgggtttctttaaaaggtgggttgtgcccatgttaccaaagcctctcagtgggctaaaaaacccagggggcctccaggatatatctttctgggttttttcaaatgaaaatattctagcgaaggattgaagccccacaatcccagtgaaggagatggagcccaggttattttgccaggttagggggtccgggaatgatctggcccgcccaaatggaaaagcctgtgatcctgagtgggcagccactgtactgaatgccccttttctgcacccacgggccttttattgggaaatatccggccgccgcctgggaattcaaagaactcccataggaatctgttgggtagcttgtgggtggtccttggcaacaggaccatttctcagggtggaggtctcccaccggttggtttttcctcttcatttgtgctgggtgttgcacttggcagaggggggatatgctggttggtgaactggccacagcaacacctgttagagtctttcatgctaggaattacaaagatacattcccgtttgcaaaaggttttctctatccaagatttctgaccctgccacagcagtggaatggagagggcacagctcagggctctttcagcctcctccttggccagggcagggaccc

SEQ ID NO: 98002 - DNA, 942 bp, Homo Sapiens
cgcgcactcgcgggtgcgcgcgcggacggccgggcggcggcggctcccggaggtggtggcttcactttccaggactcaggggcagccacagcgacagccgcgggcagcagcctcaggagccggagctggaacggccgggggcggcggcagcggcggcgctgagggatctaaaatgtccactgaggcacaaagagttgatgacagtccaagcactagtggaggaagttccgatggagatcaacgtgaaagtgttcagcaagaaccagaaagagaacaagttcagcccaagaaaaaggagggaaaaatatccagcaaaaccgctgctaaattgtcaactagtgctaaaagaattcagaaggaacttgcagaaatcacattggaccctcctcccaactgtagtgctggacccaaaggagacaacatttatgcaatggcaggtcaactatattgggacccccaggatctgtctatgaacgaggggtgctctttcttgacattaccttttcaccagactatccgtttaaaccccctaaggttaccttccgaacaagaatctatcactgtaatattaacagccaaggtggtgatctgtctggaccatcttaacaggacaactggagtccggctttaactatttctaaaggtctcctctccatctggctcacttcttacagattgcaaccctgcttgacctctggtgggcagcatcgccacacagtacatgaccaacagagcagagcatgaccggatggccagacagtggaccaagccggtacgccacattaggggcctgcttgcttgccgcccgcgagcacctgtggcacgcactttcaccaagtgcatcgggtagcccttgccaccccttcagacttcggtcctatttccctaatttcatccacttcggaccttccgcggcgcgctgttgccctcttcccttccatt

SEQ ID NO: 98003 - DNA, 661 bp, Homo Sapiens
ccctcctgtccacagcagcacatttaatctatgaagaggattttctctgctggggctatgaaaacaaatgcacatttcttttaagttctatcatacatacaggagataaggtaaaaacatttccttttctatgctgacatacatggcgagtaactgccaaatttaaacactaggagatagtcacacacttcagagaagagaagaggtactagagaggaagtgacacccgcttccagaagcagtatctcaggagtgaagagaggaacagtggcactcccgtcttggctgcgaatgagaaagagtttccttcagtgggaagaaattcatttctccatcccagtgcagtcagacttcatggggcctgtcttgaactctgattgcatcattaacacgatcaagagagacagtgaaatggggtcccggatccactgggacaattcaaaagcctacaatactgctttgatggatcctacataattacttacaatcattcatggcaggcatttgaaatcaatcatgacctagagttacgctactttattgtaaaaagcctctaaaatctgagttttcctttgctgctgggattctgataggttggctcctctggtgtttaacagcatcccactgatgcccatgcagcatgaccatgatgcaaatcacc

SEQ ID NO: 98004 - DNA, 901 bp, Homo Sapiens
gggcgggcctccaatctcggcggcggcggcggcaacaggggagcctgggtctcgcggcctgcgagtccgtcgcgtgctgagggagacgcaggaggtggagccggccgggtgctcgagggaaggagactggaagctggttccgagtctgaaaaaggggagcgcggagaggaggctggaagaggaagatgcctagcacagaccttctgatgttgaaggcctttgagccctacttagagattttggaagtatactccacaaaagccaagaattatgtaaatggacattgcaccaagtatgagccctggcagctaattgcatggagtgtcgtgtggaccctgctgatagtctggggatatgagtttgtcttccagccagagagtttatggtcaaggtttaaaaagaaatgttttaagctcaccaggaagatgcccattattggtcgtaagattcaagacaagttgaacaagaccaaggatgatattagcaagaacatgtcattcctgaaagtggacaaagagtatgtgaaagctttaccctcccagggtctgagctcatctgctgttttggagaaacttaaggagtacagctctatggacgccttctggcaagaggggagagcctctggaacagtgtacagtggggaggagaagctcactgagctccttgtgaaggcttatggagattttgcatggagtaaccccctgcatccagatatcttcccaggactacgcaagatagaggcagaaattgtgaggatagcttgttccctgttcaatgggggaccagattcgtgtggatgtgaagcattgtttttgttttgtttttctaatatgttggcgccatgaaaatcatcatgttcaaatattagtagtaataaaggtgatatgcctggcaaaaaaaa

SEQ ID NO: 98005 - DNA, 928 bp, Homo Sapiens
  misc_feature (804)..(804): n is a, c, g, or t
caaggtagcgaggcctgggtggcgaattccgcacgaggctccggacctggcaggcggcggctgcagggcaggtcaggggccacatggctgagggggacgcagggagcgaccagaggcagaatgaggaaattgaagcaatggcagccatttatggcgaggagtggtgtgtcattgatgactgtgccaaaatattttgtattagaattagcgacgatatagatgaccccaaatggacactttgcttgcaggtgatgctgccgaatgaatacccaggtacagctccacctatctaccagttgaatgctccttggcttaaagggcaagaacgtgcggatttatcaaatagccttgaggaaatatatattcagaatatcggtgaaagtattctttacctgtgggtggagaaaataagagatgttcttatacaaaaatctcagatgacagaaccaggcccagatgtaaagaagaaaactgaagaggaagatgttgaatgtgaagatgatctcattttagcatgtcagccggaaagttcggttaaagcattggattttgatatcagtgaaactcggacagaagtagaagtagaagaattacctccgattgatcatggcattcctattacagaccgaagaagtacttttcaggcacacttggctccagtggtttgtcccaaacaggtgaaaatggttctttccaaattgtatgagaataagaaaatagctagtgccacccacaacatctatgcctacagaatatattgtgaggataaacagaccttcttacaggattgtgaagatgatgggngaaacagcagctggtgggcggtcttcttcatctcatggagattttgaatgggaagaatgtcatgggtggtagtatcacgcctgggtatggaagggattctgcttagaccagatcgcttttaaac

SEQ ID NO: 98006 - DNA, 1280 bp, Homo Sapiens
  misc_feature (540)..(540): n is a, c, g, or t
  misc_feature (707)..(707): n is a, c, g, or t
  misc_feature (748)..(748): n is a, c, g, or t
  misc_feature (1050)..(1050): n is a, c, g, or t
  misc_feature (1134)..(1134): n is a, c, g, or t
  misc_feature (1232)..(1232): n is a, c, g, or t
gggggggtcggaaggtctaggccgggcgcggagcgaggaagcgggtggcgctgggacgcatgctctgggggagatgagtataatgacccgcgtttgtccgccgcccgtgccccgctcaatccccgcatcaatcccgtgaggccgtttctcccgttggctccactgtaccgggggctgacgcccagggaggtctcgcggctccctaggctatccagctagtaagaggcgaagctggaattctcactgcgggcccattccatggattttgccagagcgccagggacacactcagttcaccttcctagcaggcaagacccacaagatgcgcgccccctggcagccaccgccgtcagaaccccggcgaatttcctaagtggtcccaccatccaccctccctcccactgcccttctccgcgatggccctctggtttggggcaacgcgcttgaggtttccctccttcgcaaagtaatccgcattttccctctgggtcccattaaggcgttgctacaaataagcgaatctcctaccttccccacgcnccttcttgttccctgtgccttgtgtgtgccgctacccggtcattaaccccccttattgttctggcggcaaggagggtactcataagaagcgctcttgagggagcgaccatcgccgcggggagatccccaagttttatcaccaacaatttcggggtgtgccaggaggnggctcacacaaatctcctctctcgccacacgactccacgcnagagtctgtgcgcggtggcgtcatacggcggggacaatcaccgtggtacatagacgctaggtgggccacccgcctggtcgcggctcttcacatcgggcgatatttataaaggaacagcccgctctcgttttgcacgccgcagcccccctgttggctgacctttgggcgcagcgcacgtgcggccctctcccccttggtggtgtcataatagggcgagacacctccagatgcgcgcatatttgcgacagcccatgctccgtttatcagcgtccgcaacaagatacgaagagcgcaggtgcgtncttctgtgccgcgtgggcggcccgcacgctcctctatatctccgcggccagatactcctcggcgctcagcccggcgcgtgaaanatgatctgcatcgcctccggacccgagctatctgaggatgtgggtgcgtcgcgtcccttgcgcctagatgcgcggaatagcgtgtttcttcctcacgncacccactcttcgttcatactccgatcgcccgcgcgacccccacacgt

SEQ ID NO: 98007 - DNA, 1125 bp, Homo Sapiens
cggctggaccggtccggaactccagagatctcggccgagccgggccgctccgccgctgtttgcattgttaacaagattctgcttctcagaagatgcactattatagatactctaacgccaaggtcagctgctggtacaagtacctccttttcagctacaacatcatcttctggttggctggagttgtcttccttggagtcgggctgtgggcatggagcgaaaagggtgtgctgtccgacctcaccaaagtgacccggatgcatggaatcgaccctgtggtgctggtcctgatggtgggcgtggtgatgttcaccctggggttcgccggctgcgtgggggctctgcgggagaatatctgcttgctcaactttttctgtggcaccatcgtgctcatcttcttcctggagctggctgtggccgtgctggccttcctgttccaggactgggtgagggaccggttccgggagttcttcgagagcaacatcaagtcctaccgggacgatatcgatctgcaaaacctcatcgactcccttcagaaagctaaccagtgctgtggcgcatatggccctgaagactgggacctcaacgtctacttcaattgcagcggtgccagctacagccgagagaagtgcggggtccccttctcctgctgcgtgccagatcctgcgcaaaaagttgtgaacacacagtgtggatatgatgtcaagattcacctgaagagcaagtgggatgagtccatcttcacaaaaggctgcattccaggcgctggaaagctggctcccgcgggaacatttacattgtgggcgggcgtcttcatcgccatctccctggttgcaaatattgggcatcttcccgggaaaggacccttatttcaaacatccagggacataaaggccggccattcattcttgaggaaccaaaaatttgagggaacccaactttaaacccccccttggaaggccccaaagccctttttctgccaatagacccttaagtccccaaaagggaaaaggactcccaaaaccccccaagatcccaagggccccaacttttaaccatcataccgtgtgacgtgacccctccctggtttcccgcgctttccgcgggcccctcaaacaaacacgg

SEQ ID NO: 98008 - DNA, 820 bp, Homo Sapiens
ggaatccacattccagaggctcaggaagtggaaatggcctcaggtcattttgccttcctacatgtgcctgttccagatggcagggctccttactgcaaggcatctctcagcgcctccagcagcctggaacccacgcctcctgaggacacagccatcagcagcttgcgccctccctctgctcctgagatgctgacccagcatggagcccaagagcagctcgaagaccatcctggccatagcagccaagcccccattcccagagcagaccctctccccagaaggacccgcaggcccttgttattgcctcgcttagatccaggacagagaggaaacaagcttcccacgggggaacaaggcctggatgaggatgttgatggggtctgtgaaagccacgcagcccctggtctggaatgcagttcaggctcagcaaactgtcagggtgctggcccctctgcagatggaatcagctccaggctgacaccagcagagtcctgcatggggctcgtgaggatgaatctctacactcactgcgtcaaagggctgatgctgtccctgctggctgaggagccgctgctgggaaacagcgcagcaatagaggaagtgtaccacagcagccctggctttactgaaatgggctgggaagcccaccctgaaagagacggctgcccaagggatgaagccagccctcccacgagccaccaccctaccaccttccacataattaccgaacccgcatttccaaaagctttggttggaaagggaaaaaaccctggccccgccaaagggtggcccacaccccccgcccattgtgattcccccc

SEQ ID NO: 98009 - DNA, 949 bp, Homo Sapiens
ggcggcggcacagagcctggtggtggagcctgccgaggccacctcgtgtatgcagagaccatgtgtgtctgatctgctgggatcctagagctggaacaggccaagtgatattgtgaaaagaacactggacagcaagacaggagaccttggatctgccactcactgactgtgaggagggtcacgcagcacaatgccagctctgcccctggaccaactccagatcacccacaaggacccgaagacaggaaagctgaggacttcaccagcgctgcaccccgagcagaaggcagaccggtattttgtgttatacaaaccgccccctaaagacaacattcccgccctagtggaggagtacctggaacgcgccaccttcgtagccaatgacctcgactggctcctggccttgcctcacgataaattctggtgccaggtgatctttgacgagactctacagaagtgcctggactcctacctgcgctatgtcccccgcgaaattcgacgagggggtggcctcagacccctgagagttgttgacatgcagaagcgcctccatcgaaggtgtgtaactcaccttccgtccggcatgtccacgtcacaaggaatccgaaagatcacttcatttccccttctgcgtttggagaaatcctctacaataacttcctctttgacattccaaagatcctggacctctgcgtgctctttggaaaaggcaactcaccactgcttcagaagatgataggaaacatctttacaccagcaggccaggttactacaagtgacctggatgaaaccctgcctagcatccttcagggtcttcagcaatatcctccagcactgggggttgcaaggggacggggccaatacaaacccagaaagctgaggaaaagggccgattggacccgttgaatgccctctggattaaggcattgtctcttactttgggaactga

SEQ ID NO: 98010 - DNA, 907 bp, Homo Sapiens; identical to SEQ ID NO: 9724
  misc_feature (252)..(320): n is a, c, g, or t

SEQ ID NO: 98011 - DNA, 470 bp, Homo Sapiens
ggtgtttccctgaagtctatgtcacactgagaactttttctgactgcactgctttggagctattcatttaaattgagtttggcctagttttcctggtataaaacaggaaatctacattgttccctctttctctcccttccatcccttcccctgcctttcctatacacgctggtgtgcttttgccctcagaaattcttggtttgggagttatgtatttttgagtgatcgaggttatgacatacttggagcggcatgatttcaagaagccattccaaattcttatagctccttagctatggttttactctcgtattttccccaagaaaattttttggctattcaaagaaagcacaaaatatgtgatgtggaactcatgaaaatagggacttttgatatctctttaaatattccctgactcacggaaaagatgtcctcttttggtgtatacattgtgaaaatctacccattta

SEQ ID NO: 98012 - DNA, 871 bp, Homo Sapiens
  misc_feature (210)..(210): n is a, c, g, or t
tagaataccaaccttagttaataaataaaaggaaacataggtgactgcgcttctgggagaccatccagtgtcctgagggcctcttcaacagtcttctttgagaacttccactgccaacttccaattcgggccaagcctaatggtgcggcccatgaacgttcgtagccatctggtcttactaatgccacggtgccaaggctgcaccccaancaccagctggcacatgacagatgagttcatgctcatgggggtcatatttgtcaccaatgggtgtcagtttctccaggccatgcttgccaaacacacttttcagctttgcttctaaaagcaacaaccctcggaagaccttgctccagagtgagcttttggtcctcaggctccgattcttcagaaatgcactctgtagtcttctccaaaatgtcagccacctccaccaagtccttacagaaactctggattccaaatatcttggcgtcttccacacatctctgggttcgcctccttatgttttcacaatcagctatagctctctggtatctcactgttaaatcttggacttctttctccagtttaacagcttttacccttaaggctcgttcagcaagagggggcccaagctcatcaggagggtcctcagaacggcagtcctcaccagcagttctctgggtggcagtgctgaatggaagcggccatcccttgctctcccacgcggcactccaggccagtaggcgctgcacccgcagccggcccgcccacagcgacagtacggccatgtttccaatttgggctgagaggcagcgcacgcgcacttgctgcgagtgaagagatgctcccgcttaaaaaccagcctttgcgggcgtttccctctcag

SEQ ID NO: 98013 - DNA, 734 bp, Homo Sapiens
  misc_feature (121)..(227): n is a, c, g, or t
  misc_feature (675)..(687): n is a, c, g, or t
cagtctccactgccaagcaggacttggcacatgagcacccaccccacagcaccatcaggcagcacccatgggctccaccagcccagctctgtccctcccctaggtaaagatcacactgaannnnnnnnnnnnnnnnnnnnnnnnnnnnnnnnnnnnnnnnnnnnnnnnnnnnnnnnnnnnnnnnnnnnnnnnnnnnnnnnnnnnnnnnnnnnnnnnnnnnnnnnnnntgacagagtgagacactgtttcaaaacaaaacaaagcaaaacaacagtccatgagtgtataatgaaaattaaatgaataaattgggaaggaagggcttctggcttatagtagattaccaagtgcaacctgtaaagctggagaaggcgctagaattggaaaatcattttgcaaacatagtaaaagatcagtgcaggtaagaaacatcaatgcatgctaattttaacggggacactttcataggcaagagattggcatggtctgaaagtctacatatactggttataagttccaggtagggggatatacagagaagttggacaccttgaccaagtgatcaaaatttaccactatcaatgagggggcagatggatatcaagtcattatgggcaaaaacacataaactgattctaaatatgaggaaatatcaaactgagttgttttctgttnnnnnnnnnnnnncagggtggggttgggggtggctacattcaccaaaaatatcaatgagg

SEQ ID NO: 98014 - DNA, 1269 bp, Homo Sapiens
gggggtcccgggaggcttttctccaagctgttgccaccagacccgccatgggaaccctggccacagaagcctcccggggagtgagccagagcctggaccgctgtgctgatgtgtctggggtggagggagggtggggagtgtgcaagggtgtgtgtgtgcccggggggtgttcatgggcaagcatgtgcgtgcctgtgtgtgtgcgtgcccctcccctgcagccgtcggtggtatctccctccagccccttcgccaccttctgagcattgtctgtccacgtgagactgcccagagacagcagagctccacgtggttttaaagggagacctttccctggacctggcggtctcgccgtatctcatggaccaggtgctaaatgacccgacatgcatcacctgccctttcgatgaacaacctccctgtccccccgccccagtgacctgcccccggcgggcgtcttcacggcgaacgccctgcctccctgacaattggatggcgtcactggcaaccccacacttactattccgtggactggcggacatacctttcgttggttaccccttgcggtgggtctaaccgaggtgcaagcactttgtgcacacgtctacgaattgtgccgccctccgacatctcgtctatggagaacgaccgctctaggggtgctacgcggcaataacgctcacctatatctggccacgcctaagttttatgtcagattaccgccacggcactatacgatctgagttgataggacaagttcctaactactccccacccaccgactatcgtggtgaacggacccccgcccgcccttcacatcaatacacccctatcacgacaccccgccccgtcttcttagttatacgcgatagcccttcgcccaatgcaacgcgcccaagcatcccgattgatctcttcccccgcatatctttattttgtgcccgaagtagacatcccccccatgtgtgaggggacatcctgctgcaccgtgcccccgctgcgtgcggtccgatgaccctctctctccttcgtagacccactcagcatttccaccgtatcgtctagcacgcgcaagacgttccaaggagtaagagaccatgcctccagaataactcgcgacagtttctcgtaatccccggttggtctctgagtactgcgcacctccgggctgcccgatagagcactcatctgagtcagagcgacactatcctccaggagcggaacaagcctttcttcccccgtcctccatcgcacagctgtctctcaata

SEQ ID NO: 98015 - DNA, 816 bp, Homo Sapiens
ggcaatttccatctttaagaagaaactcaagggtcacagtcaacaagatgaccgcaatccccttgtgagtgactaaaaaccccactgtgcctaggacttgaggtccctctttgagctcaaggctgccgtggtcaacctctcctgtggttcttctctgacagactcttcccctcctctccctctgcctcggcctcttcggggaaaccctcctcctacagactaggaagaggcaccctgctgccagggcaggcagagcctggattcctcctgcttcatcgattgcacttaggagagagactcaaagccctggggcccggccctctctgcatctctctctgatctagctagcagtgggggtgtcaggacagtgaggctgagatgacagaggtggtcatggctggcacagggctcaggtacattctagatggctgtcaggtggtgggcagctttagttacattgaatttttcttgcttctctatttttgtccacacacaaatcagtttctcctgatctttatgtcttggaacagggccagacagggagaactctcaggtactccttgggagttggtcccatacaagtgcggactcctggacattagcgaggtgtaaagagggcagggtctgtgctgccccggcagcttttgctctccagatgctggaatagggtgggcctccttcagcctgggagggtctgagaaaaagatctactgacccccatttatatcaaacctgataccttacacatgggcttctttctagattcttctttccatagctcatggagctgcagggaaagctttaagagctttggtc

SEQ ID NO: 98016 - DNA, 1352 bp, Homo Sapiens
  misc_feature (151)..(189): n is a, c, g, or t
  misc_feature (1267)..(1275): n is a, c, g, or t
gggggaagaggaggcggaggccgaggcggtggcggcgctgctgctgaacggcggcagcggtgggggcggcggaggcggcggcggaggagtggggggcggcgaggcagagacgatgtcggagccgagccccgagagcgccagccaggccggnnnnnnnnnnnnnnnnnnnnnnnnnnnnnnnnnnnnnnnagatgagagcagcagcagcggcgggggtgaggaggagagtagcgccgagagcctggtgggcagcagcggcgggagcagcagcgacgagacccgctcgttgagccccggcgccgccagcagcagcagcggggatggggacggcaaggagggcctggaggagcccaagggaccgcggggcagccagggcggcggcgggggcggcagcagtagtagcagcgtagtctccagcggcggcgacgagggctacgggactgggggaggcggaagcaacgcgacctccgggggccggcggggcagccttgggagatgtcgtcggatggggaacccctgagccgcatggactcggaggacagcataagcagtactataatggatgtagacagcacaatttccagtgggcgttcaactccagcaatgatgaatggacaaggaagcactacttcttcaagcaaaaatattgcctataattgttgttgggaccagtgccaggcttgcttcaactctagcccagatctggcagatcacatccgttccatacatgtagatggtcagcgaggaggggtatttgtttgcttatggaaaggttgtaaagtatataacactccatctaccagtcaaagttggttacaaaggcatatgctgacacacagtggagacaaacctttcaagtgtgttgttggtggctgcaatgccagctttgcttctcagggagggctagctcgtcatgtacccacacacttcagtcagcagaactcctcaaaagtttctagccagccaaaggccaaagaagaatctccttctaaagctggaatgaacaaaaggaggaaattaaagaacaaaagacgacgctcattaccacggccacatgatttcttcgatgcacaaacactgggatgcgataaaacatcgagccatatgctttaacctctcagctcatatagaaagtttaagggaacggacacagcggttgttttttcatagtactggaaatagcctaagagaaaaagaagatttctgggaaagatcaaacctttttgccttcattgggatggcctggaggacaattctgccctgaatnnnnnnnnntgtgaatgaaaaagggaaacgcacatttcagtttaaaaagacttaaagggaactttccacttttattccaaaggcta

SEQ ID NO: 98017 - DNA, 1249 bp, Homo Sapiens; identical to SEQ ID NO: 2235
  misc_feature (374)..(467): n is a, c, g, or t

SEQ ID NO: 98018 - DNA, 1006 bp, Homo Sapiens
aggaaggaattccaggggatgtttaaaagaaactcgtattttggcgtaattcgttcctgaaatagaaattttcctctcacctggcccatggtactcttccaacgtgggcccagccaggtccattgtcctcccaagccacctctctaatccttaggtgcggggtggtgctcccactagtgtccaagctgttgtcatccacaccagtgacttttgtaaaccagcaaatgggcacaggtctctggctgtcatgtctgctagaatctccaccactttgcttgtcccatctcactaaaagactttaacatcctgctttgcggcggcctggctcggaggtaaagaacccggcgggagcacaggggggctcccaggaccacagagttcaggaaaaggattggggatggccgccagagaagaggttctaaactcctggtcttcctcctgaagggcgcctgacagcgagggatgtgcacaggctgggagcgctgcaccctctgccttgaggacacctgtggctggatggaccgaggagggcctgaagcccgaggctggctgcgggcatgctggccattctgcaggaggggcaccgtgtctgactgcatgctgcaggccgagtacaggctctccagggatgcattcatatcgttcaccagggcttccaggtccacatcatcctcctggtgattcgcaagtcggtcagactgtgcggggagtcctggtcctgccgggtcttgttgactgcgaggtgtctgctccaccttgtcctgccgcgcgcggctccccgccgcctccgcgtggctgcgggcgacactcggcgtggccggcggcgggcgcgggtccccgcggggcgaggccggcgctcaagactgtcccgggcgccccgcgccgccggcgctgccgccacccaggggctgcgcggaaactttgggctccaccgggtctccgagcgccgagcccgcccggccgcagatcgcttccctctctcctcgtgtgagaacgccacccaggc

SEQ ID NO: 98019 - DNA, 848 bp, Homo Sapiens
  misc_feature (698)..(698): n is a, c, g, or t
  misc_feature (773)..(773): n is a, c, g, or t
  misc_feature (791)..(791): n is a, c, g, or t
  misc_feature (837)..(837): n is a, c, g, or t
gggagtgacaaccaggaagtgcaagactctgaaccaacgcccatgcctgccatccccaaacatgggctcaaaacccccttcccagggacggctgtgtccacccctcagcaggaggaggagaccccacagcaccgggtgaaaggtcagtgctgaagccagggaggcagctctcagcagggcacctgtgtggagccagggaagccagggccacacttgcagggtgaagtggggaactcggaaggctgggcagtggagcaaaatgcttggtgccctgcgggaaccggtggccaaggctacactgggatgaagggagccgtggagctgcagaatctgcgggtggccctcagtggcaggcagccaggccaacaggggctttgggctgcaggtcagcccctcccctgctctggaacttttggagggccattacaaaggacatcagccccaagatactcctctgaaattctgcctgaaaggcccttcacattccctaattggcacttacaacattccagaacattctatggtaccttaagtttctcctccccctccaaagggcccttgaaccttaaggatagggcagaaggggctcctcaccctggcctcgagggcttaagatccagctgaggactcctagcctccctgtgtgctgggcaagaaagtagctccatgtcactgctgtccctggggaagggaaaaangttgaggaagggctcaaagccagccttcagaacaagcaagaaagggttcaagccagcccttcaagccatgcaggnccctcaagggctcccagnacagctcaaagaatgatctggtgcgaaaccccaagtcgggtggcancagaacagccg

SEQ ID NO: 98020 - DNA, 845 bp, Homo Sapiens
ggggaggcgcggaggggctggctgggcaggaggggttggcggggcagcagggccgcggccatggggagcttgaaggaggagctgctcaaagccatctggcacgccttcaccgcactcgaccaggaccacagcggcaaggtctccaagtcccagctcaaggtcctttcccataacctgtgcacggtgctgaaggttcctcatgacccagttgcccttgaagagcacttcagggatgatgatgagggtccagtgtccaaccagggctacatgccttatttaaacaggttcattttggaagaggtccaagacaactttgacaagattgaattcaataggatgtgttggaccctctgtgtcaaaaaaaacctcacaaagaatcccctgctcattacagaagaagatgcatttaaaatatgggttattttcaactttttatctgaggacaagtatccattaattattgtgtcacaagagattgaatacctgcttaagaagcttacagaagctatgggaggaggatggcagcaagaacaatttgaacattataaaatcaactttgatgacagtaaaaatgggcttttctgcatgggaacttattgagcttattggaaatggacagcctaccaaaggcatggaccggcagactgtgtctatgggcaataatggagcctttaatgaacttatattagatggggtaaaaccagggttacatgatgaaaaaagggcccaccgacggaaaaaactgggactggaaccattggtttgtaacttaaaacccaacatacatttccttactaatgggaagggaagcacctccaaggcttcggaaagggaggcctttcctc

SEQ ID NO: 98021 - DNA, 1036 bp, Homo Sapiens
tgtcccattttttataaaggcccaccaggtgagttccaaaatgagggcaaaggtagaatatttctgaaaggttcatattccccaaaggggcttaattttcattgcttggcgccaaagacaaagcccgtaaaaaaggagcaagaaaagtgtgcaaagcacttccttggaagacctcgtccactaccagatcacaagaaaagccaagtgcagcccctcacatgaaaggaaggcaggcagtaacatcggagacttcccagtctccccgacgtctgctcacgctggatgctggcactggcttatcatgaagggaaggagagcagtaacgctggagacttcccagtctccccgacatctgctcatgctggatgctggcactggcttatcagctacccactggctgaaatggaaatcaacaccagcacttcacgtgacagccacatagtgacagtccaggcacgtgaatgaccccatttgtgttcccctagtttgtggagagacttcctattgctgtgcttctcacaccctctagttttaagaatatgtcaaattgatgatatattatgcaagtaaacgatcttatatacacgaatagtgaaaggtaattaggaatatgctgaatcacctggtgctgttgaaaaaaacgtgcagatgcatctctctcacctcaccgctttcttctagcttctgctatatttcatcccctattagttactctctttccctccaacttatcttcatcctcaaacctcagaggaaataatcgcaagggtcacatctgggagagtggtagttggaaggcagcatttctagggggtagggaagcaccacctccccagcaccgcatccttacaaaatctaaagggcaaccaatgggtcagtctggaggccgccatgcttctgtaacaaccgcagcaattttatctttgcatctcttactggattatataagccatctaggtaaagtaaacactgccaaaagctcctacccactggaaagagaagcctcgtgccgaattcgccacccaggcctcgctac

SEQ ID NO: 98022 - DNA, 1165 bp, Homo Sapiens
ggggctcagcaggcggggcgggagccgcctgcgcccgaggacccggccggaaggcttgcgccagctcaggatgaggacaggctgggcgacccctcgccgcccggcggggctcctcatgctgctcttctggttcttcgatctcgcggagccctctggccgcgcagctaagctaagttaccatctggtttagacttccttcggagagcgatgggaagagatttctcagagtgtgaatggcatcatcctatctacagcaaggacctggaaatgaaccctgctctgagtcacacttctctattctcctttgaccctgtgtgctaggaactaccaaaagaatcctttaaaataagatcctttattgccttgataatttattctgcctgccccacaatccaaggtggaaaagttcactgcagcaactaactacagtgaaaatgcactaacttttcaatcactaacctcttggttcccatcgacatctgcttcagtcctgtttttatctccttcacaaatttcaggatttccctaattcttgcaatctctgcaatcactgccctttatcactgacccaaagcgaaaagcaccaggtttaactctgttccccctgtgctaggtccccacaggttttgttatcctgtatccttccttactcctagcagctactctgatcgattttctctcaccctcagagcagacttgtggccttgtttggggaagcactggaattttgaaccccccagccatttgggtcaattgtttggcaagagtgtccgcttcatgatgctggtgatggcatgcacctcgtcacatgtgcacggctaggcttgtgcaggtggcctctattacccaaacactgaaggagcccctctgtgtccttggagagatgccaggtgcttagtttacatttttgcctgcttggagagctaacagcttgaagtaaaccaatccatcagggactcctgaggttttcaccagccaacaccacccaatcgtgcgtgaagactttctgactccctggacattgccatggactcaactgtcacttcaggacctgtttttgaactaacaaacctagacttctgattctctcttgctgcacctacctgtacattccgaacacatggtagagactctacaaaatgcttaatatgtgatctatggacgg

SEQ ID NO: 98023 - DNA, 1098 bp, Homo Sapiens
  misc_feature (1)..(1): n is a, c, g, or t
ngacgagacaaccatgctgtgctgtatgagaagaaccaaacaggttgaaaaaaatgatgacgaccaaaagattgaacaagatggtatcaaaccagaagataaagctcataaggccgcaaccaaaattcaggctagcttccgtggacacataacaaggaaaaagctcaaaggagagaagaaggatgatgtccaagctgctgaggctgaagctaataagaaggatgaagcccctgttgccgatggggtggagaagaagggagaaggcaccactactgccgaagcagccccagccactggctccaagcctgatgagcccggcaaagcaggagaaactccttccgaggagaagaagggggagggtgatgctgccacagagcaggcagccccccaggctcctgcatcctcagaggagaaggccggctcagctgagacagaaagtgccactaaagcttccactgataactcgccgtcctccaaggctgaagatgccccagccaaggaggagcctaaacaagccgatgtgcctgctgctgtcactgctgctgctgccaccacccctgccgcagaggatgctgctgccaaggcaacagcccagcctccaacggagactggggagagcagccaagctgaagagaacatagaagctgtagatgaaaccaaacctaaggaaagtgcccggcaggacgagggtaaagaagaggaacctgaggctgaccaagaacatgcctgaactctaagaaatggctttccacatccccaccctcccctctcctgagcctgtctctccctaccctcttctcagctccactctgaagtcccttcctgtcctgctcacgtctgtgagtctgtcctttcccacccactagccctctttctctctgtgtggcaaacatttaaccacaccacacactcaaacccgggaaagatcccaagctccaactgtggtggcctcaacacatctctcggtccccttggatctcgtctctgccccgctcctcgcgccctcgcatgatccactcctctgggcgcacattcctcgccctggctcccagtttcacgtgacgtggtgcctgtggcccgtgcgaggcccactctccc

SEQ ID NO: 98024 - DNA, 425 bp, Homo Sapiens
aatgtttgccacacagagagaaagagggctagtgggtgggaaaggacagactcacagacgtgagcaggacaggaagggacttcagagtggagctgagaagagggtagggagagacaggctcaggagaggggagggtggggatgtggaaagccatttcttagagttcaggcatgttcttggtcagcctcaggttcctcttctttaccctcgtcctgccgggcactttccttaggtttggtttcatctacagcttctgagaaagaaaacaagataggatggggggaaaaggagagaattagtattttggcttatctgttcatacaacagtgcaatgcatttcttctttttatgtcatttcataagagcattaagattaaaagagattattaatatcccagttaatgtaggttacaagttcagaagag

SEQ ID NO: 98025 - DNA, 1028 bp, Homo Sapiens
gggccctccccaatcaggggggcaatccctagggccagcctccccaggccccctggaaatagtatttttgatcaaaccagttggtttctggttatttcgaagaagctgcaaggagccttgcaatggcaacagatgctgtttcctggaatatcttcattgaatgtgcaatactggtttcgatacttgtccaggagacgaaatgcattcacattggcaaaatcttcaaactgaataaggcaattcatgccatacttggaagaaactgcctccatgaattcgtccaaaaaatcatcatattcagaacctcttactcttctctgccgtagtccaatgtagagtgaatctttaagctaactcctcattttcggttcccacatccagaatgacaggcagacattctcgaggattcatccctccgcaagctgtatatagagccaatttacccacagggatgcccattccattacagccaaggtctcccaagccaagaatacgctctccatcagtcaccacaatggcattgatgacatcttctggccatgcattgagaactgaagcaatatgccctcgatcgtggatagtaataaagagacctcttggcttccgaaacaccaaactatattgttggcaagccagacccacagtgggagtataaacaataggcatgaatttctcaatgtcagatgtcagcactctataaaagagtttttcatttctatcttggagatccattaagagaagatacctgtcaaagtcagagttcagatgctcgaaattttttactactctaagaacctggatctcctgactgttgaaggaaggtggcaacaatccatgaatgttcaattgctgtctctcttccagggtaaaggccaagtccttgttgaggtgagggttccgtgtcagcaggtagccgcgctgatgggtgtggcggcgacggggggcttcgggctccatggctggcgccgggttcggcggcggggtcaggccggggcgggccgcacgcgcggtgcaggcggcggatgctg

SEQ ID NO: 98026 - DNA, 1136 bp, Homo Sapiens
tcgcttcctacgggcgcgagaagaggggagccaggccgagccccggccctaccgccgccgccgccatgtggcccccagaccccgatcccgacctggacccgagcctgccggcggctcccgtcccgtgcccgcggtccccgggctccgcgccctgctgccggcgcgggctttcctctgctctctcaaaggccgcctcctgctggccgagtcgggtctctcattcatcacttttatctgctatgtggcgtcctcagcatctgccttcctcacagcgcctctgctggagttcctgctggccttgtacttcctctttgctgatgccatgcagctgaatgacaagtggcagggcttgtgctggcccatgatggacttcctgcgctgtgtcaccgcggccctcatctactttgctatctccatcacggccatcgccaagtactcggatggggcttccaaagccgctggggtgtttggcttctttgctaccatcgtgtttgcaactgatttctacctgatctttaacgacgtggccaaattcctcaaacaaggggactctgcagatgagaccacagacccacaagacagaagaagagaattccgactcggactctgactgaaggcctggcgggtgccttggcaacctgagccacacaggcctccacccctgcgcctcacaggggtcgctggcgttggagcagaggcctggacttctgagttgcagagggggctgcggacacagcaggccccctacagcctcaggttctgcctgagcccaaccataccaggcttgcccctcagctcaacactgttgaccacgctgcctatgaggggcatcttggggatcccactccctttccccccatttctgtcccacagggccttcaggccctttaacgtgctctgccaaaaacccagccccagggagaccacaggcgagccccttgggctggaatctggggccgacagggtggtccactgcctgcaagcgggaggcggggggacctcgaccaatcttccggccgcggagcgaactcacgggcagtgccaactggattctagaaggatgagacgctcgaacccgaccctgctgtcggtccgatacagatatagtcctggccgcgtcggcagcgcgtatggaa

SEQ ID NO: 98027 - DNA, 819 bp, Homo Sapiens
  misc_feature (383)..(383): n is a, c, g, or t
gggggcccgcgggcccatgaggaggcctggggaccatgggctccaggatcaagcagaatccagagaccacatttgaagtatatgttgaagtggcctatcccaggacaggtggcactctttcagatcctgaggtgcagaggcaattcccggaggactacagtgaccaggaagttctacagactttgaccaagttttgtttccccttctatgtggacagcctcacagttagccaagttggccagaacttcacattcgtgctcactgacattgacagcaaacagagattcgggttctgccgcttatcttcaggagcgaagagctgcttctgtatcttaagctatctcccctggttcgaggtattttataagctgcttaacatcctnggcagattacacgacaaaaagacaggaaaatcagtggaatgagcttcttgaaactctgcacaaacttcccatccctgaaccaggagtgtctgtccatctcagcgtgcattcttatattactgtgcctgataccagagaacttcccagcatacctgagaatagaaatctgacagaatattttgtggctgtggatgttaacaacatgttgcatctgtacgccagtatgctgtacgaacgccggatactcatcatttgcaaccaaactcagcactctgactgcctgcatccacgggtctgcggcgatgctctaccccatgtactggcagcacgtgtacatccccgtgctgccgccgcatctgctggactactgctgtgctcccatgccctaactcataggaatccatttaagtttaatggagacagtcagaaacatggc

SEQ ID NO: 98028 - DNA, 806 bp, Homo Sapiens
atttccaagccggggttataaaaaaacctttttccaaaggaaggaattcccttttcctgtaggcccccgttagccatgaaaacctcttcctggcttgccttcttggggttttcaaaccgggaagggcttctttgcttttcagtaccataacgggcaaacagcgcttctgaaacccctcctctgatagattcctgctgggccaccatctgtttctgttcaggcttaacatgaggagagacttttggtgcagcacgttgctttgcgacatcatttctgatggctgcagatgcagcaggactcatttcagcttgacttagtggctttggttttgttaccgatttgtattgcttatcaactttctccttctcctcctgaagacgttttgccaaaagcatataattcaacttctgaaaaatacgaatggtcttcatcactgcagacaccgccccagcattttgaatcatcaaggtagctacttgtattctgtttgcagtatgtagtttgcctgtggcaatattaaactcgtctgaaagaaagaacttaaacctatccagttcctcatcagtgatgttatccaggcctgttagcaagagtatctccttgtatttactctccatctgacaactttgggatcagcctcctgatccctggggcgatcagcaaaccgggtctgccaccttcttttcagagagcttaactagcagaggactcaggagagcatgcccaaataacctaggtgactttcaaagctacaaagactctgacacttctggacggcttcacatgtacccctaataaacactccc

SEQ ID NO: 98029 - DNA, 955 bp, Homo Sapiens
  misc_feature (646)..(646): n is a, c, g, or t
tggcggaagcagtggcgtccgcagctggggcttggcctgcgggcggccagcgaaggtggcgaaggctcccactggatccagagtttgccgtccaagcagcctcgtctcggcgcgcagtgtctgtgtccgtcctctaccagcgccttggctgagcggagtcgtgcggttggtgggggagccctgccctcctggttcgccctccccgcgcactacaacgagcaagggagaagcaagttactatgagtctgctaaactgtgaaaacagctgcggatccagccaccctgaaactgactgctgtgtggccatggccagctcctggacggctgcaagcacagatcagagggggggtcgaagcgcgagcgcgagcgaagcgcggccggctgagtgggggccgcggagccaccggggactcggctacgccgtgtgaccgcacgctcggggacggccgtctggcaaccgccgcaagcacggtcgacgcgctctctcgggacgggcgcccggtcatacttgctgtccgtcgctcgttcggcttcgtgcgcaccgccttgctggcgcgcgtgcggtcggagcgcgcgcgggcagcgggtcggggcgcccgtaaagttggttgcggacgcacactgggggcgtgtcggaatatcgatngccccccgacggcgaggggtgcgacgccacaaaccgcccaacactctgtgtcttgtggcgcggtctcgtgcgaacgtgcaggcccccggtggcgctgacgcacagccgctgcagaggttcacgtgggcgtcgcgcaggaaggccgttgcgtgacgggtgatgtccgcgcgcagccgctgcctgtagaggtccggcaccgcggtggtggccgcgtgcggcggccgctcgcgggactgcccgcgaccaagaatctcgacgcgcgcgcgctggagcggagggagcgcagcgttagcagcgcgcggccgcccc

SEQ ID NO: 98030 - DNA, 883 bp, Homo Sapiens
gggagacggctctcagatccgggggctgcggataaatccccgtaggccgcgggcagggagatgttgcgttccggtgtgggtgtgggtgtgcctccgacggcgtctcggtgccagtgtcgaggttctttctgcttagctacccggagccgactacggaggaggacacctgagtttacgtctcttccatctgctgctcacctcagctgcctgggtccccgacgagagccaggtgacacttaactccgccatctgcgttttgagcactgttctcataatggagtttcctgatttggggaagcatggttcagaaaagacttgcaaagcagctagattttcttccagtaaaatgtgatgcatgtaaacaagatttctgtaaagatcattttccatacgctgcacataagtgtccgtttgcattccagaaggatgttcacgtcccagtatgcccactctgtaatacccccatcccagtaaaaaagggccagataccagacgtggtggttggtgatcacattgacagagactgtgactctcaccctgggaagaagaaagagaagatttttacataccgttgctcaaaagagggctgcaagaagaaagagatgctgcagatggtatgtgcccaatgtcacggccaacttctgtatccagcacagacaccctttggaccacagctgcagacacgggagtcgccccaccatcaaagctgggtgagaagagactccgctgcgatggctcggagcacgcagtagcatgcgtggaagcagcttacactctagtgggaagtggagccccattgagcaccatcccacactggctgctgatcttgtttgttgagggagatggtactataataaaattgaatgctgaagttgaaaaaaaa

SEQ ID NO: 98031 - DNA, 960 bp, Homo Sapiens
ggggtttggctgaggggagcgagcggcgctttgggggaggggtcgcgtaggcgcctcacctgaccctgcggccgtgcggttgctgctccggggcaggtctccttccaggccaggggcccggaatcatgtacataaagcaggtgattatccagggttttcgaagttacagagatcaaacaattgtagatcccttcagttcaaaacataatgtgattgtgggcagaaatggatctggaaaaagtaactttttttatgcaattcagtttgttctcagtgatgagtttagtcatcttcgtccagaacagcggttggctttattgcatgaaggtactggtcctcgtgttatttctgcttttgtggagattatttttgataattcagacaaccggttaccaatcgataaagaggaagtttcacttcgaagagttattggtgccaaaaaggatcagtatttcttagacaagaagatggtcacgaaaaatgatgtgatgaacctccttgaaagcgctggtttttctcgaagcaatccttattatattgttaaacaaggaaagatcaaccagatggcaacagcaccagattctcagagattaaagctattaagagaagtagctggtactagagtgtatgacgaacgaaaggaagaaagcatctcccttaatgaaagaaacagaaggcaaacgggaaaaaatcaacgagttgttaaaatacattgaagagagattacatactctaaaggaagaaaaggaaaaactagctcactatcagaagggagataaaatgagaccagcccctggaatataccatttacaatcaggaaacttaaccgagactcgtgcccaaacttgatgagcctttctgctagccggagaaactagtgggagaaaaaatccagaacaatttagaaaatgctcaaccaggatgccaggaaaataaaatgggaggatattcaaacgccca

SEQ ID NO: 98032 - DNA, 1458 bp, Homo Sapiens
  misc_feature (343)..(354): n is a, c, g, or t
  misc_feature (356)..(451): n is a, c, g, or t
  misc_feature (457)..(478): n is a, c, g, or t
  misc_feature (618)..(626): n is a, c, g, or t
gggtctttgctcttcaaattattttcagcctccttgtcatataatcatttcaggcaaactgaggcaacactaacagctaatgacccagatggctctatttgggtaatttacctacaacttattccaccagcctttactcctctgcccttttgtcaattttaccttataatcctttattaaatgatgggaggtggtgatcaggacaaaagtgttaggttcccatgatttctcatttcatttattaatagttaatgctgaattttttttaagtttcctctggctctatttatgttactttttgcgataagaacacttaacataagtattctctcctcttggcaannnnnnnnnnnncnnnnnnnnnnnnnnnnnnnnnnnnnnnnnnnnnnnnnnnnnnnnnnnnnnnnnnnnnnnnnnnnnnnnnnnnnnnnnnnnnnnnnnnnnnnnnnnncaaagnnnnnnnnnnnnnnnnnnnnnnaagttggtactcacaaatcactacctctgttatattgacaagctctatttcctattctttgtatctgttaagtcacatctgtgtaaacattgagctcaccttttatatattaacctctagaattaatgggcctatgtggnnnnnnnnncagtcttatagctggtgttctgtaaaagatttgtcccaataaacgacttaatggaatgatacatcagtcagattttaggaaggcagtcaattatggatattttaatgttggaagaggccttaatgatcaaatctcaccctttctgcttctgaagtatgaaaatctagtctttttaggactggacacaaggaaaataatctctaaactatagactaaattccagtgagagtatgaatgaagaacaactagatattaatgtcaatcatttaagattaatgggcatgcaattaagtctccatttaagattaatgggcatgcaatgaaagtctccagcagacaatcagatgttgttggatgtctagattataataggtttaggttgaagttataaaataaaataaaattcattttccactgaaactctatgacattcagtgggagtggtggaaaattaaccctcttatacattatagataattctaagaacagcacacaaacttatcaataaagccatctccttgtgggccttaccatcttcatcagatttagacccttaaaaaacaagtaaatatgcacttttaaaatgcaatcaaaagactggtggttaagcttgtaaaaccagaacatcttttggcattccactaagtatatattgtaaatttaatgaacaatcaaggttcacaataggaagttgtctttttttgccttccattctgtgagatttgacagatggtgacaataagaaaatgagctgattgtaattactctctgtgtgttttttattgctagctatcattaccagttagaattaacattaattacaattaacaat

SEQ ID NO: 98033 - DNA, 1063 bp, Homo Sapiens
  misc_feature (385)..(385): n is a, c, g, or t
gtgtggggccaaggcaaccaagccctcaggccagggtcctccttgcagccagctcaaaaagatgccagttcccccagcttggatgggggtgcaccaaggggtaggctgtttttcctttcggtctagctcccaaacccatgtgctgtaccacctcttcgtctgcccagtgataagagaggagtggagggacctgtgtagtgcgaagagaggactcccagggctggcaccttgcaaggtgtccctggctgcactgagctaaggtgaagtgacagagcagatcatggactctggtaccatccaccggcagcagtcccaagcctggtgagttggcatcagcaggaagggggatggggagattcctgtgttcgtaacggctctttgttcnccgggcacagtgggtggacaggaggtgggagaggacacccgtagaagcagcacatctggcttctccttgtccactggatgcccaccctcaaagtcttccccggtcccatctgcccgtgcactggccctgagacctctttgtagccttgggggcaaggagatatagccccctccccactggggtcctggggcccgcccctcgcctctcccagtgccaggggggcaccaagctgagtctgtctgggctcagaagcccccgctctcagagctgctccggctgtggtagctgggactgggggtcctcgaggggctgcgtgtccggctgcgggtcccatggctgcgactgctgtagctcccgtggctgtggccggggctggggctgcggctgtggctccgggtcgagtagtcgctgctcaagcagctggaggaggaagaggggctgggccggtagtatggaataggacgcttgcgggcgctggtgatgcgccgcggctccatgaagcttggcgagtcccggcgccgcttgcggatgggcgagtagctgcgggagcggcgccgggcgcgggtggcctcggcctcagagtgccttgcgcggccctcgccgtccttgtcccggctgaggggcttcttgggcgacggcgagcggctggggctgtgggccgcttctccgcagagcgcg

SEQ ID NO: 98034 - DNA, 564 bp, Homo Sapiens
ggagcttagcagcgagtcagggacagctgccactttccacagagccacaggatgggcagagcagggacccagggaatgaatagccagtggacaaacagtcttgagctctgttcagccagagtgatgggccctgccagttaaggggctgtgtcttcatccttgaagacagatgtgcaatattgaccctgcctctccccagggctttgtggaaagatagttgagggctttagtgagatcacactcagagtggggcaattccagcatttatcctggctgcgtttcattgcattgtctgtgaagtataatttctgggccagaattgctcagttgcatttgatccaggactatagattggaaatgggtcatcattgttttctgttgtgattatagccattctagtaggcgtttaaggtcatggcctgcagaaaatgatgtaagaactagttcttaatctttcagatcaagctaatgatgatatggaaccttgagttcgaattgattggtttacttggaaaaaaacatgttttgaaaattgcaaaagttccgccgggcgcggtggctcat

SEQ ID NO: 98035 - DNA, 596 bp, Homo Sapiens
  misc_feature (437)..(488): n is a, c, g, or t
gggaccaggccccgcccttcaaccagggcttctgcagcgtctacatcactctgctcaacgagctggacgaggccgtgcagttctccaatgcctcatacgaggctgccatcctggagaatctggcactgggtactgagattgtgcgggtccaggcctactccatcgacaacctcaaccaaatcacgtaccgcttcaacgcctacaccagcacccaggccaaagccctcttcaagatagacgccatcacggtgaggggctgggggcagggagcaccatttcttccaatctaaccaacattggttgagctccttctgtgtgcacagcactctcctctttgtcataaaatgtccttgagatggccaagtgtggtgttaggtacctgtagtcccaactgcttgaaaggctggggcaggaagattgcttcagctcaggagttnnnnnnnnnnnnnnnnnnnnnnnnnnnnnnnnnnnnnnnnnnnnnnnnnnnngagtgagaccttgttttttacaaagaaacaaaaaaaagtccccgagatcaatatccctgtaacacatccattttcatatgtaggagtaagataaagtttatacctatg

SEQ ID NO: 98036 - DNA, 787 bp, Homo Sapiens
  misc_feature (736)..(736): n is a, c, g, or t
ggtactggtctgatcctcagtgaagtccagcggaacctcaatagctgggatcgggcccgggttcagcgacaccttgagctcctactgcgggatctggaagatagccggggtgccacccttaatccttggcgcaaggcccagctgctgcgagtggagggcgaggtcagggccctcctggagcagctgggaagctctggaagctgagacactggcggcaggcacctagctatgtgaccactggccctaaaccttttccctctgtggcctcctggcttgcactgctccctctagaaagattccttcaggtctggaggcagaggaatggcatagctgagccagttgccctcctagggcatgtttgaccaggactgagtctggaatctccaagttaaagatggtgaatcaatgcttcgggcttggagatggaacatgcctcctctccattcagctagaaggaccaaagcatgtggcatttggatggccagagtgccctgaagcaccactaccaaccttgcctccccctcctctcaaagagcctctgactgtgtcaccaaggggctcacatcttatgtctgccatgcccaggggtgtcgccatccagatgtgttggaagcttcccctcctgccctatgctcacctgtggacaccgaggatgccctcacattgggtgctttctcctcatcctcatgccccctttgccacaatggtatgatggcttggtagcccctcgaagcanatgcacctgaacttgctgctattaaaaagccgtgtgcctttctaccaaaaa

SEQ ID NO: 98037 - DNA, 1053 bp, Homo Sapiens
  misc_feature (730)..(730): n is a, c, g, or t
  misc_feature (768)..(768): n is a, c, g, or t
gggagaggatccggcgccgaatcactgactggcacaggtgttgggaaaatgatccacagtctatttctcataaactgttccggtgacatatttctagagaagcactggaagagcgttgtgagccagtctgtctgtgattatttctttgaagctcaagagaaagctgctgatgttgaaaatgtaccacctgtcatttcaacacctcaccactacctcatcagtatctaccgggataagctcttctttgtatctgtcatacagaccgaagtgccacctctctttgtaattgagttcctacatcgagttgctgacacttttcaggactactttggtgagtgttcagaggctgcaattaaggataatgtggtcatagtatatgaactcttagaagaaatgttagacaatggatttccactggctaccgaatctaacattttgaaagaattgattaaaccaccaacaattctacgctctgttgtcaactctattacaggcagtagtaatgttggggacacactccccaccgggcagctgtccaacataccatggcgtcgggcaggggtaaagtacacaaaccaatgaagcctattttggatgttgttgaagaaatagacccaattatagaataaatcaggatctacaggtctttgcagaaattcagggggtcattgatgcttgcattaaactatctggaatgcctgatctctcccctttctttcatgacccctangcttctggatgatgtcagctttcacccctgcatccggntcaagcgttgggaatctgaaaagagttttgtcatttaatccctccacgatggaattttccgactcatatcataacgtggcagcttccaaaatctagtggcaataccagtgtatgggaaacatagtatcagcttttaaggaaaaaattccttgcgggaaaatttggatttaacattggacccaagccgaaatttggggaaaaactattgaagggaattacacgggaaggtttccatgccaaaaaatttgggcttgaaaattaaaccggaaacccacccaaggggag

SEQ ID NO: 98038 - DNA, 918 bp, Homo Sapiens
gggggagtccgggcgtgcgccggccgagggagggggcgcggcggctttggagtccggcgctccctcaagccgcggacgcgatgctggttgctgcggctcgggcggcggggctggcggggatgtgacgggcggcccttcgtctcaccttccgtcctcgggcccgcaggtcgcagggcggcctgcagctgggccgcggccgaggaggcagcgcgacctccgcacgattctttcaacttttaagaacaaatgcaccttatagctcatggaagaaaaaacacaaatcaagacatttttgggttccaagttgccaaagtatggaacaaaatctgtaagaagtacattgcagccaatgccaaatgggacacctgttaatttattaggaacttccaagaatagtaatgtcaaaagttacatcaaaaataatggctctgattgtccatcatctcattcatttaattggaggaaagcaaataaatatcagctttgtgcacaaggtgtcgaagagcctaacaatactcaaaattcacatgataaaataattgatcctgaaaaacgtgttcctactcaaggaatgtttgataaaaatgggataaagggaggtttgaacaagtgtttctttattcacatcaaagttagcaaagccatccactatgtttggtgtcatctacagaggaggttaaaccaaaagtctttttctggaccatctaatttgggtaaaattcaccaaaggcacattattaggaaggacttcatattctttcgatcaatactccaaaatcacagttgaatgggattttatggaaaccgatcagctggtagcatgcaaaggcctagagcgaactcctgtgccaccagaagcagttctggagaaagcttagctcaatccccagacagtagtaaatctattaatcgtgaaaa

SEQ ID NO: 98039 - DNA, 684 bp, Homo Sapiens
  misc_feature (566)..(609): n is a, c, g, or t
ggggcaaacgccgggagtagccgaaggggacgccgggaacaggaatttcttcacatggctcctggagaagtgaccatcacagttcgcctcatccgttcctttgaacatcgcaatttcaaacctgtagtgtatcacggagtgaatttggaccaaactgtaaaggaatttatcgtatttctaaagcaagatatccctttaaggaccaacctgccaccaccattcagaaattataaatatgatgcactaaagattattcatcaagcacataaatcaaagacaaatgaacttgtgttgagtttggaagatgacgaaagactcctgctgaaagaagacagcactctgaaagcagctggaatcgccagtgaaactgaaattgcattcttctgtgaagaagattataagaactacaaagctaatcccatttcatcctggtgaaaacatctcgagggcttcctttttgcatacctgtattaagctctttattccactgctgaatttttgaaattgacaaacaaatcttaaaaaattaatcccaggctatactctttgagctaaaatctggttannnnnnnnnnnnnnnnnnnnnnnnnnnnnnnnnnnnnnnnnnnnttgttgtaaaataatatattatgagaaaaacatttgatctttttaaagggaaataaattgttattaaaaattaaa

SEQ ID NO: 98040 - DNA, 1107 bp, Homo Sapiens
gggggtgcggccggggaggcgcgcggaggctggagctggaggcgcggcgccggtgagctgagaaccatgtgtgctcagtattgcatctcctttgctgatgttgaaaaagctcatatcaacattcgagattctatccacctcacaccagtgctaacaagctccattttgaatcaactaacagggcgcaatcttttcttcaaatgtgaactcttccagaaaacaggatcttttaagattcgtggtgctctcaatgccgtcagaagcttggttcctgatgctttagaaaggaagccgaaagctgttgttactcacagcagtggaaaccatggccaggctctcacctatgctgccaaattggaaggaattcctgcttatattgtggtgccccagacagctccagactgtaaaaaaacttgcaatacaagcctacggagcgtcaattgtatactgtgaacctaatgatgagtccagagaaaatgttgcaaaaagagttacagaagaaacagaaggcatcatggtacatcccaaccaggaacctgcagtgatagctggacaagggacaattgccctggaagtgctgaaccaggttcctttggtggatgcactggtggtacctgtaggtggaggaggaatgcttgctggaatagcaattacagttaaggctctgaaacctagtgtgaaggtatatgctgctgaaccctcaaatgcagatgactgctaccagtccaagctgaaagggaaactgatgccccaatctttatcctccagaaaaccatagcagatggtgtcaaatccagcattggcttgaacacctggcctattatcagggaccttgtggatgataatcttcactgtcccagaggatgaaattaagtgtgcaacccatctggggtggggagaggatgaaactactcattgaacctaccactggtgttgggagtggctgcctgtgctggcctccacattttcaaactgtttcccccaaaagtaaagaacatttggaattgtgcctcagtgggcggaaatgtaaaacttaaccctcctcccttaccttggggggaagcaggcttgaaaagggcaactttctttatcaggtctggttttcgg

SEQ ID NO: 98041 - DNA, 853 bp, Homo Sapiens
gggggagtaggaattagtgaaaggggagtctagttggtttacctataaagttcagatgagaatacgtgtccagtttgaattttcttatcactgtgtacacacgcttcccaaagcttttctttaattctgactctgcttctgtcaagagggttgtcattaatacatctagggtaccctcccatgtcatgaagttacctagtcaggttcccgtgggtcacttgctactcctaagggaagtttcttctgcctaagaagttacaccatgctttgctatttcttttcttgctggagcctcaccttaatttcatcctctgtgacagtgaagatatcatccacaaggtccctgataataggccaggtgttcaagccaatgctggatttgacaccatctgctatggtttctggaggataaagattgggcatcagtttccccttcagcttggactggtagcagtcatctgcatttgagggttcagcagcatataccttcacactaggtttcagagcctgggaagaggaatattaagacatcttaacaacaaaccacaacattgcctgcatgtctaaaagaaaatatggggcctggggtgggtggctcccaccctgtaatccccacacctttgggagccccgaggcggggtggatccgcttggaggtcagggagttccaaggaccagccttgggcccaaccttgtgggaaaatggccagtgtccaacctaaaaaataggggaaaatatccccccggggcgttggggtggcaagaaaccccctggtaaaatccccaagcctttacctctcaaaaagaggcctttaggggtatagggaaaaaaattcacctccttgggaaaccta

SEQ ID NO: 98042 - DNA, 714 bp, Homo Sapiens
  misc_feature (411)..(412): n is a, c, g, or t
gggggcgggctgctcgctgcatctctgggcgtctttggctcgccacgctgggcagtgcctgcctgcgcctttcgcaacctcctcggccctgcgtggtcttgagctgggtgagcgagcgggcgggctggtaggctggcctgggctgcgaccggcggctacgactattctttggccgggtcggtgcgagtggtcggctgggcagagtgcacgctgcttggcgccgcaggctgatcccgccgtccactcccgggagcagtgatgttgggcaactctgcgccggggcctgcgacccgcgaggcgggctcggcgctgctagcattgcagcagacggcgctccaagaggaccaggagaatatcaacccggaaaaggcagcgcccgtccaacaacccgcggaccccgggccgcgctgnngcggtactgaagtccgggaacccgcggggtctagcgcagcagcagaggccgaagacgagacgggttgcaccccttaaggatcttcctgtaaatgatgagcatgtcaccgttcctccttggaaagcaaacagtaaacagcctgcgttcaccattcatgtggatgaaagcagaaaaagaagctcagaagaagcccgcctgaatctcaaaaaaatagaagcgtggaaagatgcccccgggccttttttaatttccagccccatttaagttttaccccttgggacccccagaaaaaaacccatttc

SEQ ID NO: 98043 - DNA, 649 bp, Homo Sapiens
ggggccagaacaagatggccgacgcggcggccacagctggggccggtggctccggaacgagatcgggaagtaaacagtccactaaccctgccgataactatcatctggcccggaggagaaccctgcaggtggttgtgagctccttgctgacagaggcagggtttgagagtgccgagaaagcatccgtggaaacgctgacagagatgctgcagagctacatttcagaaattgggagaagtgccaagtcttactgtgagcacacagccaggacccagcccacactgtccgatatcgtggtaacacttgcagagatgggtctaaatatggacactctccctgcttatgcaaaacggtctcagaggatggtcatcactgctcctccggtgaccaatcagccagtgacccccaaggccctcactgcagggcagaaccgaccccacccgccgcacatccccagccattttcctgagttccctgatccccacacctacatcaaaactccggtgagtgatgaagcactgggactgcgcgtggtgtaaagcacggagtcagttcctactgactgtcacgtggcagagtccagtccaaaagcttgttgatgaaagagtggttcaaaactcagaatgtggccgggcacattggctcacac

SEQ ID NO: 98044 - DNA, 812 bp, Homo Sapiens
  misc_feature (573)..(706): n is a, c, g, or t
gggagactaatcctctttctgtcttttccccctcccagcaccagcatcctttgataagaaggtgggggaaggacagtgagggccccgttgtgcagaggagttaaggatgggaaaggcttgggcggtaggaggaagaaaagctccattctttcctcatctgcctaatagagtctcctgtcactggctctgtctggccgctttaagctcattcggaatttacatccagtgctcactcaacaaagcctattgcatggcagggctgatggagccctgggcctgcttctcagcgctgcatgaccttgggcaaatcacatcccactgcagaaccagaattgtcattgatgaagctgggctactatcacctgcttccctggaatgtttggaggattgagtgggataatgtgtatcaaagcatctagcatagtctagcagaaagcctccatatacacgtccttctcccatggggcatagtcacaggtgggtgagagctgtatgatttggccagggctatccttctggcagagatgggatctgaatttaatgcagggggacagcttttcctgatgcttttgnnnnnnnnnnnnnnnnnnnnnnnnnnnnnnnnnnnnnnnnnnnnnnnnnnnnnnnnnnnnnnnnnnnnnnnnnnnnnnnnnnnnnnnnnnnnnnnnnnnnnnnnnnnnnnnnnnnnnnnnnnnnnnnnnnnnnncaaaaatttaacttggggccgggcttggcctggccgccctggtaaatcccaccccttgcctcccggaaacggtttgggcgccggggcaaaaaattggcttttgaac

SEQ ID NO: 98045 - DNA, 1277 bp, Homo Sapiens
ccatttctgagttggggccagctccccacccgcaaaaggccccacattccgggccagcagcccagaaagtccctccccgcaggcggagacagccccaagaagtcgacgccccggtcccgccgcccggccactacccagagggctgccgccgcctctccaagttcttgtggcccccgcggtgcggagtatggggcgctgatggccatggagggctactggcgcttcctggcgctgctggggtcggcactgctcgtcggcttcctgtcggtgatcttcgccctcgtctgggtcctccactaccgagaggggcttggctgggatgggagcgcactagagtttaactggcacccagtgctcatggtcaccggcttcgtcttcatccagggcatcgccatcatcgtctacagactgccgtggacctggaaatgcagcaagctcctgatgaaatccatccatgcagggttaaatgcagttgctgccattcttgcaattatctctgtggtggccgtgtttgagaaccacaatgttaacaatatagccaatatgtacagtctgcacagctgggttggactgatagctgtcatatgctatttgttacagcttctttcaggtttttcagtctttctgcttccatgggctccgctttctctccgagcatttctcatgcccatacatgtttattctggaattgtcatcttttggaacagtgattgcaacagcactttatgggattgacagagaaactgattttttccctgagagatcctgcatacagtacattcccgccagaaggtgttttcgtaaatacgcttggccttctgatcctggtgttcggggccctcattttttggatagtcaccagaccgcaatggaaacgtcctaaggagccaaattctaccattcttcatccaaatggaggcactgaacaggggagcagaggttccatgccagcctactctggcaacaacatggacaaatcagattcagagttaaacaatgaagtagcagcaaggaaaaagaaacttagctctggatgaggctgggcagagatctaccatgtaaaatgttgtagagatagagccatataacgtcacgtttcaaaactagctctacagttttgcttctcctattagccatatgataattgggctatgtagtatcaatatttactttaatcacaaaggatggtttcttgaaataatttgtattgattgaggcctatgaactgacctgaattggaaaggatgtgattaatataaataatagcagatataaaa

SEQ ID NO: 98046 - DNA, 1011 bp, Homo Sapiens
  misc_feature (79)..(118): n is a, c, g, or t
  misc_feature (258)..(258): n is a, c, g, or t
gagggctgaggtttccattaaaccgaagatcacgcccagtgcattcccagcctgggataggagcaaggattctgtttcnnnnnnnnnnnnnnnnnnnnnnnnnnnnnnnnnnnnnnnnccagtgatgtgggtaggatcaccttctagccatctggaagccacacagtaacaacttcaagttgccagctggttttgttcaaagaaatgtgtaaagccaggatccactatccttagctgattctgttagatcaaaatgcntaatacaaacaatttcctcatgtctaaaatactgtttccgaaagttatttcttttgttttacaaatagagagcagtaatcattttcctatgaatactagaatgattatataatcctcattcaaacctcacaccaagtgttttcaacagccagaacagagcaatttttaaactacgaaaaatgaagtgcaaaccttacaatttcatagcaatgttccccacgtttcactcatgaacagctatccaattgcatgcaccttcctgcagaacttcttccaagtccagtccttccactggaggggctttcttcctatttctccaataggtctaaaatgtcaggttacagtcagatttggcaatgtgtattacttcaaatgattgagctggaggaaactacattcctttggaatgatgacagaatctatcagaaacttcacacatccactcagctctcctggatccctgtccacaccatgaagcctgaagttgttatgatggcctttatgaacctgaaagaagccgctggcttccaccacaccacagtgtcacccaagaaatccaatccttgtaagaaaggatagggcttatcttctcatgacttagaatttttcagaaatgagaatattcacaaaagagggaaaggcaattcccttacctatgcgctagggaagccaaagtcagtgtgtgcaagagctagctctcaaaggcaatgaaaggagagtaaagaatagtttaagttatcccctatccacttc

SEQ ID NO: 98047 - DNA, 882 bp, Homo Sapiens
ccagctggacgacagtgagtttgagagagccctgcagaagctgcagctgaccaggagcatctggaccatcgacctggcctacctgatgcaccactttggcgtgaggcaccgcttctgtacccagaccctgggtgtcgacaagggctacaagaaccagtccttctacaggaagcactttgacacagaagagacccgggtgaatcagctgtttgcacaagcaaaggcctgcaaggtgctggtggagaaatgcacagtgagtgtgaaggacatccaggcgcacctggctcagggccatgtggccatcgtgctggtgaactcgggggtgctgcactgtgacctgtgctccagccctgtcaagtactgctgcttcacccccagtggccaccactgcttctgccgcactcctgactaccagggccacttcatcgtgctgcgtggctacaaccgggccactggctgcatcttctacaacaacccagcctatgccgaccgaatgtgcagcaccagcatcagtaactttgaggaggccagaaccagctatggcacagatgaggacatcctctttgtctacttggacagctgacagcaggagcctggtgcgcctaggccctcggaccccatccccaccccagccgggcccgctcaagacgccctggcccaggcttggggctgctggggttggaatgtggaactgcagcctcagcccatctggcagagtcccaggaactcggagactggcacagctgctttgtctgccagtgccgtgtgttgtcatgtcactcaccccaagcacctgctggctgctgggaccataccccaagacccccaagccttgactccagcctgcgccccaacaggaaagtccagtccccgcacaggtgc

SEQ ID NO: 98048 - DNA, 1183 bp, Homo Sapiens
acggctttgacagttgcttctggggctgctgctccggagttctggaggaggctgtaggcgagcgtgttggctgggggtctggtctccatccctcggagctccctgaactccatgtgccgccgacagcagtctgcatctgggatccccagagagctggagcggtgggtggatctgatccgccgagggatagcagggggtagctcgggctcctcatcctcaatgtccccaatggagggtcctttcccgggattcttcagtttgtcaagaagatccaggatcaggcctcgattcagcccaggctgggataccaggttgatgactgagcatcttggtggcactgggtcgtttcttgggactctttagtcagagtgaactttgatgaaagttgtggaagggcagccgaccatttgcctttgttcgcttcagtcggggaggcctggtagccactcttggtcatgaggaagagaactctgagagggtgcacatcaaagagcggtggctgtagctcggccagttcgatggccgtgatgcccagggaccagatgtcacacagctcattgtatcctcccttcagggccacagctgccacttccggagccatccagtagggtgtcccaatgaaagagaggcgtctggccagtgtagccccaatctgggccgagatgccaaagtcagccaatctgacctccccagcatcattgatgaggatgttagctcccttgatgtccctgtgtatcttcttctgtgagtgcaaataggccagtccctggagcacttcccggcagacatagctaatctggagctctgacagggagcctgtcacttggtagatgtcctggagagaaccagccccacagaattccatgcagatccagagtttctgcaaccagagataactcccatggtaggccacgatgttggcgtgccggcaagttttcaatatgaggatttccttctgaagggtggagacatcatcatcaggctccatcttcaccatcttcagtgccaccaggtcccctgacaccttgtctcgagccttaaagacttccccatacgtgccgccacccagccgctgtagcaggtcatagtggtcccgggggtctctattgaaaatgtcagggtccacgacgtccatcctgggggcctgagctgggcctgcgcccaggggccagcagggcctcag

SEQ ID NO: 98049 - DNA, 1112 bp, Homo Sapiens
ggtccggaattcccgggatggagcctcgctggcccggccaagtggtgagctgcgacgtgactggctagctgcgtgggtactggaacaagcaaacgaggcagcgagcgaaggacgggagccggaccctgggccccgtggaactccagcctgcgccaccacgtcacgcacacgctcggcgctgcgatccgcgcatataacgatatttggatttgacctgcattttggaatttatctacacttaaaatgccaccagcagttggaggtccagttggatacacccccccagatggaggctggggctgggcagtggtaattggagctttcatttccatcggcttctcttatgcatttcccaaatcaattactgtcttcttcaaagagattgaaggtatattccatgccaccaccagcgaagtgtcatggatatcctccataatgttggctgtcatgtatggtggaggtcctatcagcagtatcctggtgaataaatatggaagtcgtatagtcatgattgttggtggctgcttgtcaggctgtggcttgattgcagcttctttctgtaacaccgtacagcaactatacgtctgtattggagtcattggaggtcttgggcttgccttcaacttgaatccagctctgaccatgattggcaagtatttctacaagaggcgaccattggccaacggactggccatggcaggcagccctgtgttcctctgtactctggcccccctcaatcaggttttcttcggtatctttggatggagaggaagcttttctaattcttggggggcttgctactaaactgctgtgttgctggagccctcatgcgaccaatcgggcccaagcccacccaagcagggaaagataaatctaaagcatccccttgagaaagctggaaaatctggtgggaaaaaagatctgcatgatgccaataccgaatctattggaaggacccccctaaccagaaaaacgatccgtctttcaaacaattaatcagttccctggacttaaccctaattcccccccgagggctttttgccaatactccccgggaaagggggatccggtttttttgggactctttggcaccttttggggggttcctaaaa

SEQ ID NO: 98050 - DNA, 688 bp, Homo Sapiens
  misc_feature (58)..(58): n is a, c, g, or t
gggccaggcctgaggggccaccgtgtttggccagattcctccaagaccttcttatgtnctgtccctcacaggtcctcacaagcttgaggaaggggaagtggccatgggccgagtggtgaaggtgactcccaacgaggggctgaccgtctccttcccctttgggaagataggaacagtcagtatatttcacatgagtgactcctactccgagacgcccctggaagacttcgtcccccagaaggttgtcagatgttacatcctgtccactgcagacaacgtattgactttgtcgctgcgatcatccagaacaaacccggagacgaaaagcaaagtagaagatccagagattaactccatccaggacattaaggaagggcagcttctgaggggctatgtagggtccatccagccacacggtgtgttctttcgccttggcccctccgttgtgggtttggctcggtactcccatgtctcccagcacagcccgtccaagaaagccctttataacaaacacctccctgaagggaagctgctcacagccagggtcctacgccttaaccaccagaagaacctggtagagctgtctttcctccccggagacactgggaagccagacgtgctttctgcttccttggaagggcaacttacaaagcaagaggagaggaaaacagaggctgaggagagagac

SEQ ID NO: 98051 - DNA, 761 bp, Homo Sapiens
ataaaaccattgaagatacattaatgactgtgaaacagtatgaaagtgccaggattgaatatgatgcatatcgcactgatttggaagaactgaatcttggaccacgtgacgcaaacactctgccaaagattgagcagtcacagcatctcttccaagcacataaggaaaaatatgataaaatgcgcaatgatgtttctgtcaaattgaaatttctagaagaaaataaggttaaagtattgcacaatcagctggtccttttccacaatgccattgccgcttactttgctgggaatcagaagcagcttgaacagacacttaaacagttccatatcaaattgaaaacccctggagtggatgccccatcttggcttgaagaacagtaaaatcacagcggaaaataaaaagaaagtcgcgttgttatatttctaaaccaacctaacaagaattaagcagagttgggggaagtgggaggggtgacaagcattatagtgattcttgcacaaacagctttaatttttccctttttcatactttaacaattgaactgttaagggtggttttaatgtaaacatagtttctataatctgaacacaataattttcctttttgagaaatccttttgtattgtgaggggtgatggctatttctgtagtttgaaaacctctaataaagatttgcactgaccaagataaaaattccaggtttttgggtcccggggaaatggagggccccattggtaaacttttttccaaaggggagga

SEQ ID NO: 98052 - DNA, 1316 bp, Homo Sapiens
  misc_feature (977)..(985): n is a, c, g, or t
  misc_feature (1091)..(1091): n is a, c, g, or t
  misc_feature (1214)..(1223): n is a, c, g, or t
tgccagccccgtgccctaccgacggccccgcttccttcgcggctccagctccagccccggggcggccgacgcctcgcgccgcccagactcccggcccgtgcgcagccccgcacgaggacgcacgctaccctggaatgcaggctacgccgagattatcaatgcagagaaatctgaattcaatgaggatcaagccgcctgtgggaagctgtgcatccggagatgtgagtttggggctgaagaagagtggctgaccctgtgcccagaggagttcctgacaggccattactgggcactgttcgatgggcacggcggtcctgcagcagccatcttggctgccaacaccctgcactcctgcttgcgccggcagctggaggccgtggtggaaggcttggtggccactcagccccccatgcacctcaatggccgctgcatctgccccagtgaccctcagtttgtggaggaaaagggcatcagggccagaagacttgcgtgatcggggacattgggagaggtgcctttccaggaatcgtgatcgaggctgatcggcgcgggaagctgggaggacctcacggaccagattggggcggcctgacccagcccctgggtggcctcgcggtcccctgccaagcggaaaaccttgtaaccatggggcgccaatgcctgggcgggcagtagccatggggcccaatccttcggcctgtcgggaacaaacaatgcacaatatccgcgtcccacctcggaaactcttaccccaaagtatatcacctcgccccccacagaaaaaactggaagaggcgggcgccacgcgcccggacgactgttcaaacaccccgggcacttttgggcgccaccgtacttatgagcgcgacaagaatacacctgggcggaagaccctcatatttcctgcgggggctatgggtggaggagaacgagttttttctcacgacccctactgaaatcggggggggcgcccgctnnnnnnnnntttgctagttcgcgcgccactgtcaaaaagcgggggggcgcccttgtggaagaatgtgggagcggaggacaggagaaagaggggttgcgctcgcggctctcccagngggggagatcgccacccttccacaggggaaaggacggggcgcttggaggacagcgttttatgataactatccgggtgcggcgagggaaagaaaacaatcgcggggcaccccgtttccgggcgnnnnnnnnnnatcagcgcggggtgctcctgcgggtgcagcagcgaggggcacaacccgcccaagggcgattccataagttataccctttagtcgggcacccca

SEQ ID NO: 98053 - DNA, 820 bp, Homo Sapiens
gagcgcacgggctgcggagacgcaccggagcgctcgcccagccgccgcctccaagcccctgaggtttccggggaccacaatgaacaagttgctgtgctgcgcgctcgtgtttctggacatctccattaagtggaccacccaggaaacgtttcctccaaagtaccttcattatgacgaagaaacctctcatcagctgttgtgtgacaaatgtcctcctggtacctacctaaaacaacactgtacagcaaagtggaagaccgtgtgcgccccttgccctgaccactactacacagacagctggcacaccagtgacgagtgtctatactgcagccccgtgtgcaaggagctgcagtacgtcaagcaggagtgcaatcgcacccacaaccgcgtgtgcgaatgcaaggaagggcgctaccttgagatagagttctgcttgaaacataggagctgccctcctggatttggagtggtgcaagctggaaccccagagcgaaatacagtttgcaaaagatgtccagatgggttcttctcaaatgagacgtcatctaaagcaccctgtaaaaaacacacaaattgcaggggtcttttgggtcctcctggctaactcagaaaggaaatgcaacacacgaacaacatatggttccggaaacagggaatcaactcaaaaatgcgggaaaagatgttaccctggggtgaggaaggcattcttccaggctttggctggttcctaacaaaggttttccccccaaactgggccttaaaggggcctggggaaagaacaattctttgcccgtgggccccgcaaaagtaaaacgcccga

SEQ ID NO: 98054 - DNA, 1270 bp, Homo Sapiens
  misc_feature (31)..(31): n is a, c, g, or t
  misc_feature (93)..(129): n is a, c, g, or t
  misc_feature (192)..(192): n is a, c, g, or t
  misc_feature (199)..(207): n is a, c, g, or t
  misc_feature (209)..(240): n is a, c, g, or t
aggcctgagttagggggggaaggagaaaagnacttgaaggtggaaatctttataaaagaacagagtgattgagcaggatggtaaccatttttnnnnnnnnnnnnnnnnnnnnnnnnnnnnnnnnnnnnnccgccccaacacacaactgccctgtccagcccaatacctgacacagaatactttgtgttggtntagttgnnnnnnnnnannnnnnnnnnnnnnnnnnnnnnnnnnnnnnnntgttccaggtaattccatcgctgctacattcctgtaaatggtcactgatcagtgctatggcagagcgggagcacccggggtggcagcagtccagcctctccaatgacctccagcctcccccacccaggcaggagggagggctgtgcagggctcggggcagtgggacctggtggctctgctctgaccacgaggcgcctgactggccaatacttactgggctgacattcccagtgctcagctgggaggcatgggtttccgccccccctccccacttccctggctgtgggctggcttggtgccctccagtgagtccctcagcctctccacccatccaggctgagtatgtggctttcctatgctgggtccctctccatgggacagggagcatttaaggcgaatctcttagccagacatagtcaggaggcacagagtagaatcccctgtcttctctaccaggagcctgaggtgaaagatgtcccgtctcctccatcctcccgctccatccacccaggtacaggaaggtatagtatgagtaggaaaaggagaccagctgaccagcccatccgtcccctccaaatgttgcttcccccttaaaacggaggaagggccctgggctctcaggcaccaggtagactttggaacctgtgttttcggtgactgtcccggaggagaggatgtggggcaccaggatggttcccttcaggtcaccccaagcccttctccccggagccagggagaggagcatgtcaccaggatcctcgcctggggtgggcggggggtgtgaccatttccttcgccagcccgcagccctggggccctcaggacctctctctcttccacctttcccaggctccacaaccagctcaggtttaaaccaaatcaaagagcaaacaagttccgttggaaagtttgaagattccctggcagttctcattagttcagcattcccgaagtgtcccctgttggaggcagaggggaagctgaggaattgcctcgtgccgaattcggcgcgccgtcgacttcatacctc

SEQ ID NO: 98055 - DNA, 827 bp, Homo Sapiens
ggcagctaccaataccacccttccacacatgttgatgtctcaacgtgttattgcaccaaacccagcccagctacagggtcagcggggcccgcctaagcctggccttgtacgcaccacaacacccaacatgaatcccgccatcaattatcaaccgcagtcaagttcttctgttccatgtcagcgtacaacatcctctgccatctatatgaaccttgcttctcatatccagccagggacggtgaacagagtgtcctcgccacttcctagccccagcgccatgactgatgctgccaactcacaggctgcagccaaattggctcttcgcaaacagctggaaaagacactcctggagatcccaccccctaaacctcctgctcccttacttcatttcttgcctagtgcagccaatagcgagttcatctacatggtaggcttggaagaagtcgtacagagtgtcattgacagccaaggcaaaagctgtgcctcacttctgcgggttgaaccctttgtatgtgcccagtgccgcacagatttcacccctcactggaagcaagaaaagaatggtaagattctatgtgagcagtgtatgaccctccaaccagaaaaaagctctaaaagctgaacacaccaacccggctgaaaaatgcatttgtggaaagcccctacgcaggaaacaggaaatttaaacaccaattacagccagcaggcaacccctcctcccccactaacggcttccagctggtgtcccggggtctcttaaaaccaagaaaaccccttcgttaagaacattcataccgccttccggacaggggttcccaaaggccccc

SEQ ID NO: 98056 - DNA, 1142 bp, Homo Sapiens
  misc_feature (255)..(290): n is a, c, g, or t
  misc_feature (961)..(1004): n is a, c, g, or t
gggggggactaggagcgctctgccgacgtcagcttttgtctccagtattttcgggggctggtggacgcgtgggcgatagggtgctgtccttggggtgctgtgtatatgggatgatgacgcttatcagcactatctagtcctttccaccccgaaattcgccccgattaaagactgtgttgcattatcaggtaatgagatgtgagggagggtctttgaaagtggaaaacctgggcgtcgaggccactgtgccatctnnnnnnnnnnnnnnnnnnnnnnnnnnnnnnnnnnnnatgtaaagctgctatgtaaaatgtaaagctctacataaaccactctctgcattactttggatatatgagaatattaacgtttgacgtctacgagactagatcccattcgagcatcacctcccataaccttacagactaacccccgtcttttaaatctcagtgggtccgtaatccttacagacctaaccccctccttttaatggtctcaagggggttccttggcagcctgggcttttttggttttccatttaagcttcctccaattttcctgtgcaactgggctgccttttggtcctttttaattttaaggggaaacctccttttaaatgggggaattagggccttttttgggggggtttctcttccttaagcttttggcccaggggatcgccttggaaaaaaacaccaatggggcccttggctggcgaaattttttgcgcttggggccttttttccccggcgaacgccttttcatttctccttaataaagggagaaaccacggggggtaaacctctccccaaaaacacgctgtccgaggttggggggttttttacccacgcgtccaccacagtaaaagagcttttttaattttttccctcccacattccccacggcgttggagaactctgggggcgcgagaatcctgtggcggagaaaaaaagggggcctnnnnnnnnnnnnnnnnnnnnnnnnnnnnnnnnnnnnnnnnnnnnaaactttttctctcgtcctgcggatatcgctaaagggggagatctccccccggggccctttttttccgcggcgtgggggttagtaattcccacacgaatcgcagcatctttgtttggggacaagaaaaaacagacaac

SEQ ID NO: 98057 - DNA, 1363 bp, Homo Sapiens
  misc_feature (209)..(209): n is a, c, g, or t
  misc_feature (236)..(236): n is a, c, g, or t
ttaggacttgcggaagggggcccaatccagggtaaaagggaccaaaaaggtccaccttccggtttctcctctgaggggagcccccgggaagtattcccaaaaaggccagccgggagggttttccaggattttctggggccctgcccacttagggtcagaatttgtggctgcagagggcatcttgatgactcaaagggcaggggggtggncccctggctctgccagtccggcggggngcagcatgaaggcagtggctggggaatggcacacctgtagatggtgctcctctaggcagggggccgcaggggtcctccgggtgggggggtaggcgccctagcttcacagatgactggcacctggccccatgctccctcccctctgtgggctgaggagccacactgagcggaggctggctcagggaggagtcgggagatgacagtttcccaagaagtcgcctggctccagaggcctgtcaggttctggactaaggcgactctgcagccagtacctcgccccggccctcttatgtccttgaaggggctgctggatgcacgcatctctgcggaggcccctgctgagtgtctgtgcgcagcaaaacgcccatcctgggccttgcctgcctgaagcccttggcacctggcgtcagagcagctcctgctcgtcgtcctcggagccggaggggccctggcgtacctcctcgtacccacttgttggtgagagttttcatctggatgcgcccgtggtgcaggtcctcctgcgtcagcctccgagtgaagaaggggttcaggtacttggcgtccagccacacgaagcccttaaggtcctgccgcctgatgtagtgggcctcgtactcctcctccgtgagctccgacaggtgctccgactccacagtgttgcccatcttctcagtcttgctgaggttgacgtccttcttgttcctgcggtgtgccttggcgtcctcgatgtccatgaggcgaatgaggggcatggtgctgccgcccagcagcaggatggtgaagagcacgatgacgatggtggtggtgccgatgagctgccgcttctccatgggctccaggtccaggtgtaggctcagggcataggggatggctccccgcaggccactaaaccacatgatgaacatcatcttcggtgtgattttatgatcccggaagaaattcaggaggtaggaaagagggaaaatgtttaccgctctgccaaatagtacaagcactatgcaccagatgacaaaggaaatttcaaacttgtgaggaaaactaaaaatggacaggccaagaaatgcaaacacacatgtttcacataagaaggccacggtgcggagggtctgctgcatgaggatctgggt

SEQ ID NO: 98058 - DNA, 519 bp, Homo Sapiens
gggacggcgaggaggtggaggccggcgctccgctccgctccagctcggtttcatgtcccgccaggcgaaggatgacttcctgcggcactacacagtgtcggaccccaggactcaccccaagggctacaccgagtacaaagtaaccgcgcagttcatctcaaagaaggacccagaggatgtcaaagaggtggtggtctggaagcggtacagcgacttccgcaagctgcatggagacctggcctacacccaccgcaacctcttccgccgcctcgaggagttccctgctttcccccgggcccaggtgtttggccggtttgaagcctcagtgatcgaggagcggcgaaagggggcagaggacctgcttcgcttcactgtgcacatacctgcgctcaacaacagcccccagctcaaggagttcttccggggtggggaggtgacccgacccttggaggtgtccagggacctacacatcctgccacccgcttgattcccgcgcgcgtcgggctctgttgtgagcgc

SEQ ID NO: 98059 - DNA, 878 bp, Homo Sapiens
  misc_feature (327)..(327): n is a, c, g, or t
gcctctggtgtatggggggaaaaatagtaacacccttttctcaagtggccgggtgtttttcctgtggtgagccaaaatatttaggcgaaaatggaatttccattccaggggggtccaaccttcccaagcttttgttcagagaacctcatttaataggcaagagcagaagaagcaaggcctgtggtgagtgggacaggaaaggacatccccacccccccggaaacaggagctccctccaagcccagagaagaaaacaaagcctttggccaccactcaacgtgcaaagacttcaacatcgagagccaaaacgcagcccacttctctccntaagcagccagctcccaccaccattggtgggttgaataaaaaacccatgagccttgcttcaggcctagtgccagctgccccacccaaacgccctgccgtcgcctctgccaggccttccatcttaccttcaaaagacgtgaagccaaagcccattgcagatgcaaaggctcctgagaagcgggcctcaccatccaagccagcttctgccccagcctccagatctgggtccaagagcactcagactgttgcaaaaaccacaacagctgctgctgttgcctcaactggcccaagcagtaggagcccctccacgctcctgcccaagaagcccactgccattaagactgagggaaaacctgcagaagtcaagaagatgactgcaaagtctgtaccagctgacttgagtcgcccaaagagcacctccaccagttccatgaagaaaaccaccactctcagtgggacagcccccgctgcaggggtggttcccagccgagtcaaggccacacccatgccctcccggccctccacaactcctttcatagacaagaagccca

SEQ ID NO: 98060 - DNA, 812 bp, Homo Sapiens; identical to SEQ ID NO: 5029
  misc_feature (91)..(124): n is a, c, g, or t
  misc_feature (655)..(655): n is a, c, g, or t

SEQ ID NO: 98061 - DNA, 693 bp, Homo Sapiens
  misc_feature (55)..(170): n is a, c, g, or t
  misc_feature (311)..(429): n is a, c, g, or t
  misc_feature (444)..(565): n is a, c, g, or t
  misc_feature (587)..(587): n is a, c, g, or t
ggctcagcctcccgagtagccgggattacaggcatgcgccaccatgcccagctannnnnnnnnnnnnnnnnnnnnnnnnnnnnnnnnnnnnnnnnnnnnnnnnnnnnnnnnnnnnnnnnnnnnnnnnnnnnnnnnnnnnnnnnnnnnnnnnnnnnnnnnnnnnnnnnnnnatgagccactgcacctggccagatgacattttaaattagtggtgaatggatgggatactgattaaatgatgtgggaacatttgactaataattttaaaacataaaccatagagttggtggtggtggtggtttgaaatgtannnnnnnnnnnnnnnnnnnnnnnnnnnnnnnnnnnnnnnnnnnnnnnnnnnnnnnnnnnnnnnnnnnnnnnnnnnnnnnnnnnnnnnnnnnnnnnnnnnnnnnnnnnnnnnnnnnnnnncacatgccaccatgnnnnnnnnnnnnnnnnnnnnnnnnnnnnnnnnnnnnnnnnnnnnnnnnnnnnnnnnnnnnnnnnnnnnnnnnnnnnnnnnnnnnnnnnnnnnnnnnnnnnnnnnnnnnnnnnnnnnnnnnnnatgagctgccatgccctgccanaatataaaccatagagctttgtatcacaatatattcaaaataaagatagagtgactttttactttttagtgtgcaaattaaacataaagcttcccaggaaaaacaa

SEQ ID NO: 98062 - DNA, 839 bp, Homo Sapiens
  misc_feature (537)..(537): n is a, c, g, or t
  misc_feature (613)..(613): n is a, c, g, or t
  misc_feature (771)..(771): n is a, c, g, or t
ggggccgaagctggctactaagggaacttgggaggatcccacctcagccttcgtgactagtgaggtgcgcaaacgcccgagttttccctggtgcgcgggttccgcctttgcagtgccctccacccttcctggtgtctgacccgcctccttcccaggccttttgttcctgtcccggaaagccggcgtcctgccgcgcgatgcccctgctcggacttcttcccaggagggcctgggcttcgctgctcagccagctcctgcgaccgccctgcgcttcgtgcaccggggcggtcccgttgccaaagccaggttgcaaaggcagtgttaacatcccaactgaaagcacatcaagagaaaccaaattttattatcaagaccccaaaggggacccagggatcttagtcctcagcatatggttgtgagggagaaaattcttgatttggttatcagctgctttaaacgtcatggagcaaaggggatggacaccccagcatttgagctgaaggaaaccctgactgagaagtatggagaggactctgngctcatgtatgatctgaaggatcaaggtggagagctgttgtccctccgctatgaccttactgttccctttgctcgntatctggccatgaataaggtgaagaagatgaaacgttatcatggtgggaaaggtgtggcggcgagagagccccaacatagtccaaggccgttatagggagttctgccagtgtgattttgacattgctggtcagtttgaccctatgatccccgatgcanagatggttgaagatcatgtgttgaaatcctaaagtggatttgcagtttgggagaactttcctcattag

SEQ ID NO: 98063 - DNA, 1184 bp, Homo Sapiens
  misc_feature (537)..(537): n is a, c, g, or t
  misc_feature (603)..(603): n is a, c, g, or t
  misc_feature (672)..(672): n is a, c, g, or t
ggggaggtcagaccggttgctttcccgggagttcggcgtttgctggggctgcagtagctgaagtgtagtgttttcttgggactggcggtctgcacttctctcccgggttccatctccccccgcccggtggtgaggccctcgaggagggctcggacgggtgtagcgatccgcgctagaggaagacgaggcccgggaacgcatgtcccccagggcaggttagggggctggaggggtcaaatcccgcggtacttgtggagactctttagcgtggcttcttctctctgctgagaccccgagagctttcccagttctcctcccaggaccaccggggttcctgaagatcgggacttttctgcgcccctccaccaacagcccatctcctgtctatgaagaaagacccttcgtagaaacaacttccccgctgctgacgcgttttcccgtcccgtccccgaagtagtctactatgacctcgttgtgagcctctgaacgattttgacactttcccgaggcctagggtattatatcctaaccttactnaagaccacagaggtgcttgccattatgggaaatcagcttgctggcattgctccctcccagatcctnttctgtagagagttatttttcagatattcatgactttgaatatgataaaagcctgggggagtactcggnttttttaaagttgctcgagccaagcaccgagaaggcctggtcgttgtgaaggtttttgcaattcaggatcccacattgcctttaaccagctataaacaagagctggaggaactgaaaatcaggcttaattctgcacagaattgtctacctttccagaaagcatcagaaaaagcatctgagaaagcagctatgctctttaggcagtatgtgcgagacaatctctatgatcgcatcagtacccgtccattcttgaataacattgagaagcgctggattgctttccagatcctgacagctgtggaccaagcacacaaatctggagttcgtcatggggacatcaagactgagaatgtgatggtcaccagttggaattgggttcttctaactgattttgccagttttaagcccacttatcttccagaagacaacccggcagatttcaattatttctttgacacatcacggagagaacttgctatattgctcctgaacgtcttgctggtggaaggtac

SEQ ID NO: 98064 - DNA, 803 bp, Homo Sapiens
  misc_feature (592)..(592): n is a, c, g, or t
  misc_feature (678)..(678): n is a, c, g, or t
  misc_feature (680)..(680): n is a, c, g, or t
  misc_feature (686)..(686): n is a, c, g, or t
  misc_feature (688)..(689): n is a, c, g, or t
  misc_feature (693)..(694): n is a, c, g, or t
  misc_feature (696)..(696): n is a, c, g, or t
  misc_feature (698)..(716): n is a, c, g, or t
ggtctcctcattcctcccacagccttctgtcttggccttgtcatcacatcaatcctgttgtgtggtgctgtgtgtcttctgggtcagtcctaggcacatgctgcccagcacatgtccacctgggaaatgagatgccatcgtcacattcatttggtcaccctcagtccagccagtgggcttgctctcatttggcctgttctcaggggtgggaaggaagagcgtcccttccttctccttttgagaaaaccacagaactatgactctcatgatttttcctttgtgaaatccctggttttaagctggaagcggtgggtaaatgaggtctgatgatagcagtcctgccaccttctagttcatcccataggaatgtttttccaagtccttccagtctttttagaacgtggtggaggagggttgtgtgtgccccagggggtcgggggtaggggatgcagggaggatcttagcatttgttgttttctagtgcagggctttagccacaattgtaaacaacaggaaaaggctctttagagatcctattagatttgctttgccgattgtcactcttcatcacaggcacatttcaaaaagaggntagactttcagacttcttttttctcaaacctcaaaacttccaccccaaacttcgctctcagctggtgactttgcttctttatgtgngngtatgngnngccnnanannnnnnnnnnnnnnnnnnnagggaggatgagaacgattggggggaagagataaactttatgcataacattagggtaaatcaataaagattggcctgacacatcgtt

SEQ ID NO: 98065 - DNA, 807 bp, Homo Sapiens; identical to SEQ ID NO: 10523
  misc_feature (779)..(780): n is a, c, g, or t

SEQ ID NO: 98066 - DNA, 903 bp, Homo Sapiens
gggcctttaacaatgggcggcgcgagcgtccaggcgctgggctctagctgaggccggcgcttagcggcccactgtccgcagcatgagcggggccggcgtccgccgcacgacggcggggctggggctgtgagggccgcggttccggactcgagttgccgcgtcgggctgggcgcgccgccgggtcccatggagctggaggggcagtggtggcgaggacagctggccgccgatattcaccaagcgcttcgctacaaggagctgaagttgccctcctataaaggccagtcccctcagttaagtctcagacggtattttgctgacttgattgccattgtgagcaatcgcttcacactctgcccttctgcccgccatcttgctgtctatttactggacctgtttatggaccgctatgacatctctatccagcagctgcatttagttgcgctttcctgcctgcttctagcaagtaaatttgaagaaaaagaagacagtgtgcctaagctggagcagctcaacagcctgggttgtatgactaatatgaatctagtattaacaaaacaaaatttgctacatatggaactattatttattagaaacctttcagtggaaacctctgccttcccaacagcccccccattttcattgaggaattatctctctgaagcagtacaccgaaaccagaatccttcatgacccgcttggcccaatggatttggcttgggaaaaaaacttaaactttttccttgggcccaaaatattggccggaaattacttttcccttggggaaattattccttttgtgtaaaggccttggcttgccattgggtggtggggcttttccttttccaggggaattttaataccttctcgccacttttctcttccaccaccgggtgggcgcct

SEQ ID NO: 98067 - DNA, 927 bp, Homo Sapiens
gggagcggtagcagggccccggcgggtcggggaggaggtttactcagcttgggccccctccgggccagccgccgagggggcgcggcccaggacggcggctaggccgtagtgcagcctctccggagtcctcaggtttgccaataggattatcctgctgccatcatgtcttggtttgttgatcttgctggaaaggcagaagatcttttaaaccgagttgatcaaggggctgcaacagctctcagtaggaaagacaatgccagcaacatatatagcaaaaatactgactatactgaacttcaccagcaaaatacagatttgatatatcagactggacctaaatctacgtatatttcatcagcagctgataacattcgaaatcaaaaagccaccatcttagctggcactgcaaatgtgaaagtaggatctcggacaccagtagaggcctctcatcctgttgaaaatgcatctgttcctaggccttcatcccattttgtgcgaagaaaaaagtcagaacctgatgatgagctgctgtttgattttcttaatagttcacagaaggagcctaccgggagggtggaaatcagaaaggaaaaaggcaagacacctgtctttcagagctctcagacatcaagtgtcagttctgttgaaccccagtgtaaccacccatcaaaaccattgaaagaaaattcttttgggagccaaaccacgaagctgccagtaactcaggattctagccatgaaggtcaagaggaatctttcaaaggacaatgtgtcatccaaatgctgcctgccctgagcaaaaccccaaacaactagtgatgatgcgcaaatcacatgaactgtctaaccttcgactggagaatcagttgctgcgcggattgaagttcaagtctttaaatcagaaatggcctcgtaatcccaagatcg

SEQ ID NO: 98068 - DNA, 304 bp, Homo Sapiens
caaatctgtacttattataaacaataacttcccgtttccttttgtcctgacacccaccattctactttctgtctctatgatcctgactaccctatctcatataagtggaatcattcagtatttgtccttttgtgacgggcttatttcactgagtataatgttctcacagttcatccatgttatagcatgtgtcagaatttcttaaggctaatattccattgtatgcatgtgccacatttcgctttcagtagtcatttttaagctccataaaataaaatgaagaaaagacaggtcacaatctagt

SEQ ID NO: 98069 - DNA, 917 bp, Homo Sapiens; identical to SEQ ID NO: 10569
  misc_feature (525)..(533): n is a, c, g, or t

SEQ ID NO: 98070 - DNA, 1291 bp, Homo Sapiens
  misc_feature (241)..(241): n is a, c, g, or t
  misc_feature (494)..(494): n is a, c, g, or t
cggggagggctacatttaagcctttgaaagtgaagcggtgaacattcccccagggggacagcatgaaatgattcttctgacatgaagagtcccttgaaaaaactggattcaaaagtcaagcaggccaaatctcacacctcatgaatccagggaggtacacaatgaagaagagcttctgcctaaaggaacaaaggctgtctgggaggcctgagagtccattaaaagacaccgcatttaactncaacaaaaagaagagcagcaccacccaccagtggtgccccagacacacctctcctccaagctttgggctgctcctcttggagtctacacttagaccctgggggtgggggtgggcacacaaatggacagagtggtctaaatgcaggtctcctggggttctgcgaaatgtagccagaagcatctccatctcggtgtccatttcgatccaactaagcttccagtaaagacactgcagcaatgtaaacatgcaaccntaagctagcatgaggttctagatagtaagcctgaactaggaataaggcaactgaactgtgactttcgggccagggtcatccagctgcaattatccaggcttggcctggcttctctagggattcattctggcctgaacttcctggtaatcatgacatgaacttctggcttctgaattttaagtaaatactttgaatatataaatttgggaggtgaaacaggtttacccttttcaagtctccatgacttgggcacttaagtttactttcacactaaggaagccttatcatagatgctctttactgtctatcatatccattcctagcattaaaggtgaaaattagtatgatcacagactctctttaggatattctctcttaactctctcataatattacatactcaaaagcataatttcgattcaagaatcccttgattcgtctgttcaccgaagcccactgagactacacttgaggtgcaatcacacctactggtgcgtccactttatggaagtcacgtggctccctggacaccatctcccggtgtcagcaacactctgtatcccactatagctttctcgttcccagatgatgcataaggaattcatttttggttgcttaatttacatactatctgtgaaaacaaactattcacaattgagcatgaaaacttataagcttccctgaattctgcacaattcacacataattaggtagacagcaatagaagacactaaaatgagaagcagaaaccctgtccaggcctcgtgccgaattcgccacccaggcctcgctacctt

SEQ ID NO: 98071 - DNA, 1468 bp, Homo Sapiens
  misc_feature (1181)..(1181): n is a, c, g, or t
  misc_feature (1201)..(1201): n is a, c, g, or t
  misc_feature (1206)..(1207): n is a, c, g, or t
aaggagcgaggcctgggtggcgaattcggcacgaggcaccaccccggcagaagaggagcacgcccctgaaggagcggcagctctccaagcccctaagtgagaggaccaacagttccgacagcgagcgctccccagatctgggccacagcacgcagattccaagaaaggtggtgtatgaccagctcaatcagatcctggtgtcagatgcagccctcccagaaaatgtcattctggtgaacaccactgactggcagggccagtatgtggctgagctgctccaggaccagcggaagcctgtggtgtgcacctgctccaccgtggaggtccaggccgtgctgtccgccctgctcacccggatccagcgctactgcaactgcaactcttccatgccgaggccagtgaaggtggctgctgtgggaggccagagctacctgagctccatcctcaggttctttgtcaagtccctggccaacaagacctccgactggcttggctacatgcgcttcctcatcatccccctcggttctcaccctgtggccaaatacttggggtcagtcgacagtaaatacagtagttccttcctggattctggttggagagatctgttcagtcgctcggagccaccagtgtcagagcaactggacgtggcagggcgggtgatgcagtacgtcaacggggcagccacgacacaccagcttcccgtggccgaagccatgctgacttgccggcataagttccctgatgaagactcctatcagaagtttattcccttcattggcgtggtgaaggtgggtctggttgaagactctccctccacagcaggcgatggggacgattctcctgtggtcagccttactgtgccctccacatcaccaccctccagctcgggcctgagccgagacgccacggccacccctccctcctccccatctatgagcagcgccctggccatcgtggggagccctaatagcccatatggggacgtgattggcctccaggtggactactggctgggccaccccggggagcggaggagggaaaggcgacaagagggacgccagcttcgaagaacaccctcaagagtgtcttccgctcagtgcaggtgtcccgcctgccccatagtggggaggcccagctttctggcaccatggccatgactgtggtcaccaaagaaaagaacnagaaagttcccaacatcttncctgnnagcaagaaaccccgaggaaaaggagggtggatttctaagagcccaggtcattgaaaggcatcagcccgcctcatctgctcagccaagcagcagcagactatgctgagagggcccatcaatggggcccaagtggaagtgacatcaagttccttccaactggcagcccaaggggcccaacccatgtcaagccactttccaggggggactcttcagtggggaacaaggcccacctgaaggccctgtcttccagaccactttccc

SEQ ID NO: 98072 - DNA, 982 bp, Homo Sapiens
  misc_feature (768)..(768): n is a, c, g, or t
  misc_feature (776)..(777): n is a, c, g, or t
  misc_feature (785)..(785): n is a, c, g, or t
  misc_feature (794)..(794): n is a, c, g, or t
  misc_feature (826)..(826): n is a, c, g, or t
  misc_feature (834)..(835): n is a, c, g, or t
  misc_feature (842)..(842): n is a, c, g, or t
  misc_feature (845)..(846): n is a, c, g, or t
  misc_feature (860)..(860): n is a, c, g, or t
  misc_feature (868)..(868): n is a, c, g, or t
  misc_feature (938)..(938): n is a, c, g, or t
  misc_feature (972)..(972): n is a, c, g, or t
gaggcctgggtggcgaattcggcacgaggctcctgtggtcagccttactgtgccctccacatcaccaccctccagctcgggcctgagccgagacgccacggccacccctccctcctccccatctatgagcagcgccctggccatcgtggggagccctaatagcccatatggggacgtgattggcctccaggtggactactggctgggccaccccggggagcggaggagggaaggcgacaatagggacgccagctcgaagaacaccctcaagagtgtcttccgctcagtgcaggtgtcccgcctgccccatagtggggaggcccagctttctggcaccatggccatgactgtggtcaccaaagaaaagaacaagaaagttcccaccatcttcctgagcaagaaaccccgagaaaaggaggtggattctaagagccaggtcattgaaggcatcagccgcctcatctgctcagccaagcagcagcagactatgctgagagtgtccatcgatggggtcgagtggagtgacatcaagttcttccagctggcagcccagtggcccacccatgtcaagcactttccagtgggactcttcagtggcagcaaggccacctgaggccctgtctcccagccactttccctcctggcactgccaccagcctcaccgcctgcgggcagggggaggccagcaggcccgggcccagcaccccttccctggcaccagggtctgcctctcactcgcccaggtcccgaaggacactgccacagggnacgccttnncctccccntccccctcnagccccacccctgcacagccccctcctccttncccgcttnntcccttnctnncctctgctccaggncccaaggncgtgttgggttttgcccttctgggtgcccatagtccccctgggactggagccccccagggcctttccttncacccgactttccaaactccttcccttggtgggnatcaagtttc

SEQ ID NO: 98073 - DNA, 816 bp, Homo Sapiens
taggaggtaacatcctggtgtttctcagatgcaggtaaatcatgaccttccacattctctttcaacacagggagcacctgagatcctacagacaggaaacatggggaggataaatccaatgatgcatgcatcaggtacatgccaaagttcacctttgtttcacgactctcagaaagtttttggaaaacatgctggtttcgttgcccagtttgctggtcgatgcaaatcatctggcatctgtgacaaggccccaaaacctggaaacgcaaagagccaattgaaatctcatcccatttctcttcttcaaaagccctttttccattgataataatattgccacgaaaacgcaagctgagatccttcagtgagaataattcctcctttccattctcatcactggtgtttagttgccggtgaagttccaaaatactggatgtgttgatcagcagatactgtgcctcattcaccagagaaagggtggcccattgtaccaggaagttgatcttttccatgtttcttctttgcattcctttgagagtctgacactacgtttgatcaaatgacaaggacggccacacaatgttgacaaccagcttgaaattttctctccacaatcataagtacttactctgtcagcacagaccctcgctcggcgaatctgagtccgttcactattttcctcaagaggcaactctataggctccatcccttaggcttcgctgaccatgaatctttgacgaaagtcgatgaagggctgcatcaggcacagcggcgttcctgcactgactcacgcaaacaccattgtgatcaccaccc

SEQ ID NO: 98074 - DNA, 1462 bp, Homo Sapiens
  misc_feature (61)..(128): n is a, c, g, or t
  misc_feature (132)..(243): n is a, c, g, or t
  misc_feature (1102)..(1368): n is a, c, g, or t
  misc_feature (1371)..(1372): n is a, c, g, or t
gtgcctagctaaaattaaccctcactacaagggaataagcttgcggccgcatacgcggtcnnnnnnnnnnnnnnnnnnnnnnnnnnnnnnnnnnnnnnnnnnnnnnnnnnnnnnnnnnnnnnnnnnnngggnnnnnnnnnnnnnnnnnnnnnnnnnnnnnnnnnnnnnnnnnnnnnnnnnnnnnnnnnnnnnnnnnnnnnnnnnnnnnnnnnnnnnnnnnnnnnnnnnnnnnnnnnnnnnnnncagccagaacatctgtttttacacccaaagagcgcccctcgttaggacagaaccacggtgcccagagccaggaagccgccctcctggcgcccagcatctgagcttctacacgtgatgggcgggctcaggagaggacagggagtcgtggtggaagttccacagctggccgcgtgggggggcccttgcaccgcactgccgcctcctgactgccccgatccccgcagcccctgtgccggatttcatttccctcctctctcccagggtacctggccccagcactctcccatctgttcttcaggaaccgactcctctccagttgcaacaccagggagaaaggggcctccacatgcccaagtacccctgcaggatgaagggcaggccggcccttgatgtgccatttctgaataatagtcactgccgccgagtctaggatgtcctgttctaactcagccctgcctcggatgcaccaccgatctgtgcagagtgggtgtgggagtgtgggtgagggtcgaaatgccaaaggtctactttccagaatcaagtgccttctgcaaatcatgttggaaaagtccaaacctggagatgtccctgtgcctccgcccctacacaccccttttccttcagctgtgttaggaaggagaagttttcagaaccctctaggctggtggctttcaaacttcagaccatgatctgcagcaagaaacgtgccttccatcataaatcagtccatttgcctacaactgtgttccaagcagggtttcataaagaaattcttacccttagaacctcggatatcctctatgttttagttttcatttttttaaaatgcttcttaaaattcactaaattgggctaggtnnnnnnnnnnnnnnnnnnnnnnnnnnnnnnnnnnnnnnnnnnnnnnnnnnnnnnnnnnnnnnnnnnnnnnnnnnnnnnnnnnnnnnnnnnnnnnnnnnnnnnnnnnnnnnnnnnnnnnnnnnnnnnnnnnnnnnnnnnnnnnnnnnnnnnnnnnnnnnnnnnnnnnnnnnnnnnnnnnnnnnnnnnnnnnnnnnnnnnnnnnnnnnnnnnnnnnnnnnnnnnnnnnnnnnnnnnnnnnnnnnnnnnnnnnnnnnnnnnnnnnnnnnnctnnaacaagttacttataccaacatctacatttcggccgccttcggccctcgaaaaacttttctacaccttttcgtttggcccgggggcccaa

SEQ ID NO: 98075 - DNA, 897 bp, Homo Sapiens
ggtaaccacttttatgtgaagcccagagttgcagttaacaattttggagtgaagcactatgctggagaggtgcaatatgatgtccgaggtatcttggagaagaacagagatacatttcgagatgaccttctcaatttgctaagagaaagccgatttgactttatctacgatctttttgaacatgtttcaagccgcaacaaccaggataccttgaaatgtggaagcaaacatcggcggcctacagtcagctcacagttcaaggactcactgcattccttaatggcaacgctaagctcctctaatcctttctttgttcgctgtatcaagccaaacatgcagaagatgccagaccagtttgaccaggcggttgtgctgaaccagctgcggtactcagggatgctggagactgtgagaatccgcaaagctgggtatgcggtccgaagaccctttcaggacttttacaaaagggtataaagtgctgatgaggaatctggctctgcctgaggacgtccgagggaagtgcacgagcctgctgcagctctatgatgcctccaacagcgagtggcagctgggggaagaccaaggttctttcttcaagaatccttggaaacagaaacctggagaagcggaggggaagaggaagtgagccacgcggccatggtgattcgggcccatgtcttgggcttcttagcacgaaaacaatacagaaaggtcctttattgtgtggtgataatacagaagaattacagagcattccttctgaggaggagatttttgcacctgaaaaaggcagccatagttttccagaagcaactcagaggtcagattgctcggagagtttacagacaattgctggcagagaaaagggagccagaagaaaagaagaaacaggaagag

SEQ ID NO: 98076 - DNA, 1000 bp, Homo Sapiens
gccggaagcggaggttccgggctccgggatgaaaggagggaacgcagacagctggcagagagagaagttggctagcatggaatcaccagaggagcctggagcatccatggatgagaactactttgtgaactacactttcaaagatcggtcacattcaggccgtgtggctcaaggcatcatgaaactgtgtctagaggaggagctctttgctgatgtcaccatttcggtggaaggccgggagtttcagctccatcggctggtcctctcagctcagagctgcttcttccgatccatgttcacttccaacctgaaggaggcccacaaccgggtgattgtgctgcaggatgtcagcgagtctgttttccagctcctggttgattatatctaccatgggactgtgaaacttcgagctgaggagttgcaggaaatttatgaggtgtcagacatgtatcagctgacatctctctttgaggaatgctctcggtttttggcccgcacagtgcaagtgggaaactgccttcaggtgatgtggctggcagatcggcacagtgatcctgagctctatacggctgccaagcactgtgccaagacccacctggcccagctgcagaatacagaggaatttctccacttgccccaccgcttactcacagatatcatctcggatggagttccgtgttctcagaacccaacagaggcaatagaagcctggatcaactttaataaagaggaaagagaggcttttgcagagtcactcaggacaagcttgaaggaaaattggggaacaatgtgcacatttacctgattgggaagagtcatctcgtacccactcgttggctgtgtccttgcactgtgcagagatgactccatccgtgtaagtggccaaaacagtttgtgccacccagatcactgcgcctgtgaaaccatggtggaaacttgatattttgggggggaaaaggtcccttcccagggggcaagtgggaaatggaaacatgccacc

SEQ ID NO: 98077 - DNA, 935 bp, Homo Sapiens
ggggctcagggaagccaagtgacaagtccaaggtcacgaagactttcttggagcccgaaacaccaccctctgctcctccttctcctgtcctggcccaggcatcctaggggctgaaatcctggaaaccgtgggctggtgtgagaaggttagcatgctcagagcagagaagggctctccccactgcttcgtgactccagggccagaggccatgcagtcccagaaaccccaatcctagctggggcaggtccagagtccaagccctggtgggtagaggccaagcagaagacctgaagtggactcttgcttcccctagtagtgttttcagtgccaagaagctgaaactgtgagctggagttggggagaggtctggaagaggaccatctgggatttctacagcctgggtacccatagccacaccaaggcttctgggagattctgcagggtcagctttccaggctgttcccaaatagctccctgcctccccagctgcccctaaagccacagcagaagagccattcatctcataaacaaaaaggaagaggaaagaatgaggaaggaccctgtgcaaggttatttgcaggcagggatgggcttgtacctgacagcacccacccctgtgtggcccccaggccctcatcaccctcagacccctcctaagcagttccctcattgctctttggactaggctagacagcaagaagagcagggcccatgaccgggtggaagttcagttttggtgtctgcttcaagagggggttttacactctgattccaggacaagcactctgaggcgggtgggggagagaaaccctggctcttcacccaggtttcacacacatgtaaatgaaacactatgttagtatctaacacactcgctggatacagaacacaagtcttggcacatatgtgatggaaataaagtgttttgcaatctt

SEQ ID NO: 98078 - DNA, 983 bp, Homo Sapiens
gggaggcagccggaaggaaactcctgagctttttacggaatgcacaagacaaaagccatgttttgttcagtccttcagaagatagaaattgaacacctgacttgtggacagcacctctaaacactgcagagagagattcagagatgaatagccctggcccttagggttcttgcggtcacaagcaccgtccagtaagagcagcccatggttatgagtaacaagagcagacactacggcaggcacttggtttagggacattgccttgtttcatcctcacggtgacttcaggaggacagtgccatcgttacgccgtttaacagatggtaaaactgaggcccagagaggggagtaccttgcttcagatgtctcagcaacgcagtggctgagcaaggatttgaactcaggcagaatggtggcagagcctgtttgcctaacttctaaatttccctaactctctagaacagagggtagtaggagtgcagcagacaggacaactaaccctgcctggaaaagtcatggtgggcttcccggaggaggcgtccttaggctggggcttgaagacgaggtatttaccagacaaatagtggagaagaaggctgtcttaaacagaaaaaacttcttatgtggtcctgggttctgagggcccagctcttctcaccctccttctccgaggagtgggggaacggaagtgcagagccttcgtgttttaccctccttctccgaggagtggggaacggaagtgcagagcctttatgttttgtgacagtggaatccccttcgcgggccacctcctcgatctgaaaggctctatctgaagctactgaattcccttcagctcgtaagtcttaatagcaatgtcatccccttctgaaaactttcctggactgctccttatcttgctgccggtgattgaaagcaatcctttcctctctcttccctcacacccgcctgtttgcaaaaaagttcttgagttggactccaaa

SEQ ID NO: 98079 - DNA, 963 bp, Homo Sapiens
tttacgggatcccggccatcgcccgcctgttgcgccgcccgccagctctttgcccgcgcggggccgcccgccgcgggctcagggcagaccatgcgcccgccaagtccgctgcccgcccgctggctatgcgtgctggcaggcgccctcgcctgggcccttgggccggcgggcggccaggcggccaggctgcaggaggagtgtgactatgtgcagatgatcgaggtgcagcacaagcagtgcctggaggaggcccagctggagaatgagacaataggctgcagcaagatgtgggacaacctcacctgctggccagccacccctcggggccaggtagttgtcttggcctgtcccctcatcttcaagctcttctcctccattcaaggccgcaatgtaagccgcagctgcaccgacgaaggctggacgcacctggagcctggcccgtaccccattgcctgtggtttggatgacaaggcagcgagtttggatgagcagcagaccatgttctacggttctgtgaagaccggctacaccatcggctacggcctgtccctcgccacccttctggtcgccacagctatcctgagcctgttcaggaagctccactgcacgcggaactacatccacatgcacctcttcatatccttcatcctgagggctgccgctgtcttcatcaaagacttggccctcttcgacagcggggagtcggaccagtgctccgagggctcggtgggctgtaaggcagccatggtctttttccaatattgtgtcatggctaacttcttctggctgctggtggagggcctctacctgtacaccctgcttgccgtctccttcttctctgagcggaagtacttctgggggggtacccagcacattcaccatggtgtggaccatcgccaggatccattttgaggattatgggtgctgggacaccatcaactcctcactgtggtggatcgataa

SEQ ID NO: 98080 - DNA, 843 bp, Homo Sapiens
  misc_feature (751)..(766): n is a, c, g, or t
gggcatccgcatcattaacacgctcacgtcgcaggagcacacactggaggtgggggttctggagtccatatgggaaatcctacaccgctatctcccctataactcacatgctgccagctacacgtggaaatatgaagggaagaacctgaacatggattttaccctggaagagaatgggatccgggatgaggaggaagaatttgactatctcagtatggacggtacacttcacacacctgcaatacttctgtacttcaatgatgatctcacggagttgtaggcaaggagatgtacactcgtgtagactcaagacgtatttcgagtttggctttttctgtgccttgaggaaaagtggtggggccgaggggtgcctggacccagatctccactcctctccaggagctagcctgtgcccttctgaagtgtaaaggccctattccctgccttcattacagtttgctctgagaaaattagtgaattaatctttgggaatgatacaagaagatcaagtaccttggtttagggagatgtagaacacgatagccagagtccaggcacaactgctcgatacttaagagagaagtagtctaccggggtggagggaacgcaaggcctctcttcgccatggtgggaaatgacgtgtcttccgccccccagcgggggtaacacggaaacacagtcgacgttgctccctcggaccgttaaaaccgttggccttaattcttcccccggtctaacaacgggggtgcgnnnnnnnnnnnnnnnnacggaacacgaccgcgaaacgcccgtgggcctgaagccgcgccctgtgtgcgtcgggcccgcgctcgctggaccgcg

SEQ ID NO: 98081 - DNA, 762 bp, Homo Sapiens
  misc_feature (621)..(621): n is a, c, g, or t
gggagacctgcctgaacatttgccgcttagactttagcttcccagatgactactttaaaggagtgagccagaaggccaaggagttcgtgtgcttcctcctgcaggaggaccccgccaagcgtccctcggctgcgctggccctccaggagcagtggctgcaggccggcaacggcagaagcacgggcgtcctcgacacgtccagactgacttccttcattgagcggcgcaaacaccagaatgatgttcgacctatccgtagcattaaaaactttctgcagagcaggcttctgcctagagtttgacctatccagaagttctttctcattctctttcacctgccaatcagctgttaatctgaattttcaagagaaaacaagcaaacataactgatcagctgccggtatgttcatcgtgtgaaattgcattccaagtgagctgtgctcagcagtgcttggacacagagctgcaagctgcgctggggtggaggaccgtcacttacactctgcccaaggcagaggtcgcattgctgtatcacagtattttattcaggtttctgcaaaaaattaaaaagataactttttttaaacaaacatgaaatagaatttttgcaaaatttaacgnttttcaaagatttattccaagggaaaacaaaaatggccctatggttcaacccaactgggtgtttaaatggaaccaagggatacctggtggcggtcctctgggggggaaagaacgccacccttaagggtgggcgggggccac

SEQ ID NO: 98082 - DNA, 1146 bp, Homo Sapiens
  misc_feature (1122)..(1122): n is a, c, g, or t
cggctggaccggtccggaatttcgggatcatcatcaatgggagccaggtgtggggaggacagccagtgtatccccaggaaactgacgatgcctgcatcttccctgatggtggaccttgcccatctggctcttggtctcagaagagaagctttgtttatgtctggaagacctggggccaatactggcaagttctagggggcccagtgtctgggctgagcattgggacaggcagggcaatgctgggcacacacaccatggaagtgactgtctaccatcgccggggatcccggagctatgtgcctcttgctcattccagctcagccttcaccattactgaccaggtgcctttctccgtgagcgtgtcccagttgcgggccttggatggagggaacaagcacttcctgagaaatcagcctctgacctttgccctccagctccatgaccccagtggctatctggctgaagctgacctctcctacacctgggactttggagacagtagtggaaccctgatctctcgggcacttgtggtcactcatacttacctggagcctggcccagtcactgcccaggtggtcctgcaggctgccattcctctcacctcctgtggctcctccccagttccaggcaccacagatgggcacaggccaactgcagaggcccctaacaccacagctggccaagtgcctactacagaaagttgtgggtactacaccctggtcaggcgccaactgcagagccctctggaaccacatctgtgcaggtgccaaccactgaagtcataagcactgcacctgtgcagatgccaactgcagagagcacaggtatgacacctgagaaagtgccagttttcagaggtcatgggtaccacactggcagagatgtcaactccagaggctacaggtatgacacctgcagaggtatcaattgtggtgctttctggaaccacagctgcacaggtaacaactacagagtggggtggagaccacagctagagagctacctatccctgagcctgaaggtccagatgccagctcaatcatgtctacggaaaaggattacaggttcccctggggcccccctgctgggatgggtacaggccaccccttaaaggctgggtgnaaaagaccaggtccccccctgggc

SEQ ID NO: 98083 - DNA, 1179 bp, Homo Sapiens
  misc_feature (909)..(1019): n is a, c, g, or t
  misc_feature (1024)..(1041): n is a, c, g, or t
ggggtggccggctgggatcagcctttaagatggcgtctcctcaggggggccagattgcgatcgcgatgaggcttcggaaccagctccagtcagtgtacaagatggacccgctacggaacgaggaggaggttcgagtgaagatcaaagacttgaatgaacacattgtttgctgcctatgcgccggctacttcgtggatgccaccaccatcacagagtgtcttcatactttctgcaagagttgtattgtgaagtacctccaaactagcaagtactgccccatgtgcaacattaagatccacgagacacagccactgctcaacctcaaactggaccgggtcatgcaggacatcgtgtataagctggtgcctggcttgcaagacagtgaagagaaacggattcgggaattctaccagtcccgaggtttggaccgggtcacccagcccactggggaagagccagcactgagcaacctcggcctccccttcagcagctttgaccactctaaagcccactactatcgctatgatgagcagttgaacctgtgcctggagcggctgagttctggcaaagacaagaataaaagcgtcctgcagaacaagtatgtccgatgttctgttagagctgaggtacgccatctccggagggtcctgtgtcaccgcttgatgctaaaccctcagcatgtgcagctcctttttgacaatgaagttctccctgatcacatgacaatgaagcagatatggctctcccgctggttcggcaagccatcccctttgcttttacaatacagtgtgaaagagaagaggaggtaggggccaagcccccaccccatcccactccccttccctccccagatatttatgtgaaatgaactgcagctttattttttgaaataaaaacttttaaaaagcnnnnnnnnnnnnnnnnnnnnnnnnnnnnnnnnnnnnnnnnnnnnnnnnnnnnnnnnnnnnnnnnnnnnnnnnnnnnnnnnnnnnnnnnnnnnnnnnnnnnnnnnnnnnnnnttggnnnnnnnnnnnnnnnnnnacaaaaacctttcccaaacccttttcttttggcgggccggggccccatttagggaaaggtgaacccgggggcctttacctttgtttcccaaaagaaaaacctgggcccaagaaaaaaggggttgggaatcccccccac

SEQ ID NO: 98084 - DNA, 589 bp, Homo Sapiens
gcggccgcggagcccggggcgggtccggcgcgggagccagcgcggctgtgtggctatctgcagaagctgtcgggcaagggccccctgcgtggctaccgcagccgctggttcgtgttcgacgcgcgccgctgctacctttactatttcaagagtccgcaggacgcgctgcccctcggccacttggacatcgcggacgcctgcttcagctaccagggccccgacgaggcggcggagccgggcacggagccgcccgcgcacttccaggtgcacagcgcgggagccgtcacggtgctcaaggctcccaatcgtcaactcatgacttactggttacaggagcttcagcagaagagatgggaatattgtaacagtcttgacatggtcaagtgggacagcaggacctctccaactcccggggattttcctaagggtcttgtagccagagataacactgatttaatttacccacacccaaatgcttctgcagaaaaagccagaaatgtcctagctgtggagactgtgcctggagagctggtgggagaacaagctgcaaatcagcccgccccagggcatccaaattccattaattttt

SEQ ID NO: 98085 - DNA, 337 bp, Homo Sapiens
  misc_feature (154)..(166): n is a, c, g, or t
  misc_feature (266)..(279): n is a, c, g, or t
ggatgaaatttcaacttttcctttcatacgtctttattacccaagtcttctcccgtccattccagtcaaatctgggctcactcaccccagcgagctctcaaatccctctccaactgcctaaggccctttgtgtaaggtgtcttaatactgtccnnnnnnnnnnnnnaacagtgttttgtagatttcagatgactatgcaaaggcctgggggacccctggctctgggccgggcctggggctccgaaattccaaggcccagacttgcnnnnnnnnnnnnnntatccagaattggttgtaaatactttgcatattgtctgattaaacacaaacagacctc

SEQ ID NO: 98086 - DNA, 1166 bp, Homo Sapiens
gggaccgtttgccagccaaagctatgtctgcgcgctcaccgacttcatagggtgccgaattcttttttccccaggcttgccatggctagtcgaggggctcggcagcgcctgaagggcagcggggccagcagtggggatacggccccggctgcggacaagctgcgggagctgctgggcagccgagaggcgggcggcgcggagcaccggaccgagttatctgggaacaaagcaggacaagtctgggcacctgaaggatctactgctttcaagtgtctgctttcagcaaggttatgtgctgctctcctgagcaacatctctgactgtgatgaaacattcaactactgggagccaacacactacctcatctatggggaagggtttcagacttgggaatattccccagcatatgccattcgctcctatgcttacctgttgcttcatgcctggccagctgcatttcatgcaagaattctacaaactaataagattcttgtgttttactttttgcgatgtcttctggcttttgtgagctgtatttgtgaactttacttttacaaggctgtgtgcaagaagtttgggttgcacgtgagtcgaatgatgctagccttcttggttctcagcactggcatgttttgctcatcatcagcattccttcctagtagcttctgtatgtacactacgtttgatagccatgactggatggtatatggacaagacttccattgctgtgctgggagtagcagctggggctatcttaggctggccattcagtgcagctctagggttaaccaattgcctttgatttgctggtcatgaaacaccaggttggaaacaaggtttcttagccataggtcaggtgaatgggccctcataactaatttcttggtgccctgttgtagtgtcattggccagttactcactattggggaacgttgcggattggcgccagtcaacagtggagtttggtttaaacgggatttaagtatctctccttggtccctgagatcttatggggaccgaaaacccgtgattttccaatttaagcgtatgtgatcttctggaattagcatggtaacctatgcggtagaggccccagtgatttatccaaggtgacttcctcatgtgaaaacttcgtctacaatattatgttcaaaacatagggcacg

SEQ ID NO: 98087 - DNA, 867 bp, Homo Sapiens
cggaaggccggaggggcagtccgccgcgggggcgagcgcgcatgcgccttcctgggacccacggcaggcgcgaatcccagcggccggcgggcggcggggatacttctacatagacataatcaagttttgactatttggaaaccaagcatcattaaaattctctcaaactcctaattgcgaagaatcgataacatttcaagaagtgataacatttctctgaacaagaaaagaagtgattgaccacgttttaaaagtactctggcactggtgctgtgttttcttcccctccctaaatttgaagaactatggagaaatggtacttgatgacagtagtggttttaataggactaacagtacgatggacagtgtctcttaattcttattcaggtgctggtaaaccgcctatgtttggtgattatgaagctcagagacactggcaagaaataacttttaatttaccggtcaaacaatggtattttaacagcagtgataacaatttacagtattggggattggattacccacctcttacagcttatcatagtctcctatgtgcatatgtggcaaagtttataaatccagactggattgctctccatacatcacgtggatatgagagtcaggcacataagctcttcatgcgtacaacagttttaattgctgatctgctgatttacatacctgcagtggttttgtactgtagttgcttaaaagaaatctcaactaagaaaaagattgctaatgcattatggcatcttgctgtatccaggccttattcttatagactatggacattttcaatattattctgggagtcttggctttggcttgtggggtgtcttggaagaatcttgtgactgtgactca

SEQ ID NO: 98088 - DNA, 923 bp, Homo Sapiens
gggagactgctgcagccctaaccttcccagggctcagctctttggagctgcccattcctccggctgcgagaaaggacgcgcgccctgcgtcgggcgaagaaaagaagcaaaacttgtcgggagggtttcgtcatcaacctccttcccgcaaacctaaacctcctgccggggccatccctagacagaggaaagttcctgcagagccgaccagccctagtggatctggggcaggcagcggcgctggctgtggaattagatctgttttgaacccagtggagcgcatcgctggggctcggaagtcaccgtccgcgggcaccgggttggcgctgcccgagtggaaccgacagtttgcgagcctcggctgcaagtggcctctcctccccgcggttgttgttcagtgtcgggtgagggctgcgagtgtggcaagttgcaaagagagcctcagaggtccgaagagcgctgcgctcctactcgcgttcgcttcttcctcttctcggttccctactgtgaaatcgcagcgacatttacaaaggcctccgggtcctaccgagaccgatccgcagcgtttggcccggtcgcgcctattgcatcgggagcccccgagcaccggcgaaggactggcgggtggggtagggaggtggcggcggcggcatggcgaggttcccgaaggccgacctggccgctgcaggagttatgttactttgccacttcttcacggaccagtttcagttcgccgatgggaaacccggagaccaaatccttgattggcagtatgggaagttactcaggccttccctcacacagaaggaggacgggggaagtgggattcacacgcgtaccagcacaggggggaaaagaaactgggacttctcaaggcggagaaccgaaccgaagaaacggcggccaagaacactgagcccgaa

SEQ ID NO: 98089 - DNA, 840 bp, Homo Sapiens
cccccagatgtggtctctggaaattaagtgggtctccaaagggctttattggggtttgttgggcaaaagcacaggagggtcgggtggggtgggtaagcaactgtgaggtggacattatagggttcacctccatgggcaaagcttctgccaatcgccttatggcaaactgggatgcagagtaggctgggaaacggaataatcccaactgtcttgcgtggagggacacaaacacgatcctgcccacccgacgctccttcatggtggtgatcacggcccggctggggtacacgctgcccaggtaattgatgctcattaacctttcaaaggtactaacttcaagatcgttcaaattttcctgacactgccattcctgcacaatttaccagcatgtccactggacccagtttctcctgtgcttgttttatgacattctctacttggttatagtcttgagatacatcaactgatatgcaaagcaccacctgtttgtcattaatagagtgcatttcaatttctttctttgcctgcagcagcttatcctcatttcgtgcaaccagagttataaaagctccttgtttatagcactcgatagcaatgcacttcccgatgccactggaacctgcctgtaaccaccacatgcgccccgggcagggcgaggggcttggggctagatgagcggagacaccatgtacagcagcagcacgaaggccacgaggaaggcggcagccagcagcagcatcgctccgcggggcacaggggcccggagcggccgggcgggggccgccgggcaaggcagcgcagggcgtgggctgcggcgaggcgagaatacgcgcggcgggc

SEQ ID NO: 98090 - DNA, 1053 bp, Homo Sapiens
  misc_feature (729)..(729): n is a, c, g, or t
ggggcatgatgtagaaatggtctttgatgcgaagttactcagccaactcctgtatgagttctacacctgcatccctcctgtgaaactccagaagcagaaagtacagtctatgaatgagatagtccagagcaacctctttaaaaagcaagaatgccgggacattctgcttcctgtcatcaccaaagagctgaaggagctgctggagcagaaggatgacatgcaacaccaggtcctggagaggaagtactgcgttgaattgctcaacagcatcttggaagtccttagctaccaggatgcggccttcacctaccaccatatccaagagatcatggtccagctgctgcggacagtgaaccggacagtcatcaccatgggccgggatcacattctgattagtcactttgtggcatgtatgacagccatcttaaaccagatgggtgaccagcactactccttctacattgagaccttccagaccagctctgaacttgtggacttcttgatggagaccttcatcatgttcaaggacctcattggaaagaacgtgtaccctggagactggatggccatgagcatggttcaaaacagggtcttcctgagagctatcaacaagtttgcagaaaccatgaaccagaagttcctagaacacacgaactttgagttccagctgtggaacaactattttcatctggcagtggcttttatcacccaggattctctgcagctggnagcagttctcacacgccaaataaaacaaaatcctgaataaagtatggggacatgagacggctaatcggcttctccatccgtgatatgtggtacaagcttggtcagaacaaaatctgcttcatcccaggcatggtaggacctatattagagatgacacttatccctgaggctgagctccggaaagccaccataccaatcttcttcgacatgatgctgtgtgaatatcaaagaagtggggatttcaaaaagtttgaaaacgaaatcatcctgaagctggaccacgaggtagaaggggggcgaggcgacgagcagtacatgcagctc

SEQ ID NO: 98091 - DNA, 841 bp, Homo Sapiens
taaaaactttgagagggagggttggttattttaaaatcccgggccttaaagttttaggccattggaattaaagggtttcctggcagtatttcccttaatggcattgtattcaagaataaagtattcaagattatggagaccaagggaacatgcctttacttaattggtccagggggttaccatttagatagagtttttgtaatctcgttaggttcataaacgatcctttttcaagaacttcaatacgattgtttcccaagtgaagcatttccaaagtgaaatattccactagatcagacttcattaaactgtgaataatatttcccgctagaatgagctttctaggattttgcggaggaggtctcagatctgataagctttcaatgttgcgctcctgacaatgtattagaagtcctgatggggataggactttgcagttacaaggaatagggcagtaaggtcctggaagttgagtggatggctttgtaatataaggtatcaaacctggtgctttggtgggtagttttagaatggacgtggtcttagttgacatgcgactatcatttattgaagatgttgctgccagatgtaatgatcctgaaggatcctcatgttcttcatacactggtggagtagggcaaatagattccttctttagtctactgagtatacttcctttaaaaaatggagggctgttgcagacaacatcaccaattatagactgtggaggcatgttctccaaccaagtttttaactgcaataagtcacaattgcaggcccatttgttgtcctccaactgaagatccaatattcggccaatgtgttcgagaaaaccaacacc

SEQ ID NO: 98092 - DNA, 778 bp, Homo Sapiens; identical to SEQ ID NO: 6137
  misc_feature (623)..(640): n is a, c, g, or t

SEQ ID NO: 98093 - DNA, 891 bp, Homo Sapiens
ctcaagcttcgctgctgggcagttggctggaggggctgctgctgggaacacctggagtctccgcgggcagatctcatattttggattctggatatattataatgagtgacactttgacagcggatgtcattggtcgaagagttgaagttaatggagaacatgcaacagtacgttttgctggtgttgtccctcccgtggcaggaccctggttaggagtagaatgggacaatcccgagagaggaaagcatgatgggagccacgaagggactgtgtattttaaatgcaggcacccgacaggaggatcctttattcgtccgaacaaggtaaattttggaacagactttcttactgcaattaagaaccgctatgtgttagaagatggaccagaggaagatagaaaagagcaaattgttacaattggaaataaacctgtggagactatcggttttgactctattatgaaacagcaaagtcagctgagcaagttgcaagaagtttctctgaggaactgtgcagtaagttgtgctggtgaaaaaggaggagttgctgaagcatgtcctaatatcagaacaggtagattcgtcaaaaaacctgttgtcatcactgggatgacagtgatacacattgctgatcagcctcagacacctggaagtccttaatgtcagtgaaacataaacctaaaatttccctccggttcagtattaactggaacgctttctgtactgaaggtttaagtcctcaatcaaacaggaataacgtgggctgaggtgctgcggggtgtcccggggtgccccagccctggaggaactctaccttgagtctaacaacatttttcatttcccgaaagggccaacagaatgtttctcccagacaggtcaaagttttttaagc

SEQ ID NO: 98094 - DNA, 876 bp, Homo Sapiens
  misc_feature (630)..(630): n is a, c, g, or t
  misc_feature (678)..(678): n is a, c, g, or t
  misc_feature (812)..(812): n is a, c, g, or t
ggattagcaaaggtgccaatgttaacagggctacagccaataatgatcatacagtagtgtcgctggcatgtgcaggaggccacctggcagttgttgagcttctcttggctcatggggctgattctactcatcgactcaaggatggttcaacaatgctcattgaagctgcaaagggtggccatactaatgtagtttcttatctgttggattatccaaataatgttctgtcagttcccaccacagatgtgtctcagctccctccaccttctcaagatcagtctcaggtgccacgtgtgccaacgcatacacttgccatggttgtacctccccaggaacctgacagaacttcacaggagaactctcctgcccttttaggagtgcaaaaaggtacatccaagcagaagtccagttccctccaggtagcagatcaggacctactgccatcttttcacccataccagcctttggagtgcatagtagaggagactgaaggcaagctgaatgaactgggacaaagaattagtgctattggaaaagcacagcttaagtcactggagttaattcaaggtgaaccctctgaacaaagataagatagaagaacttaaaaagaacagagaaagagcagtcccngaagaagaagaaaatattgaaagaactgcagaaaagtggaaaggcagntgcagatgaaaacccagcagcaattttaccaaagaatacttgggaaacccaaaggtcagaaaaaacagtggtctctacaccaaacagtgcctctccatagaaggaatcttcccacaaaggggaaaggagatggntatcctcccagaaggatcactttttcagagtgtaccttcaggttggaccaattcttatttaaaa

SEQ ID NO: 98095 - DNA, 990 bp, Homo Sapiens
gggagagtgcgcgcgcgcacgttgtgcgcaggttcgaatctccgccgcttcgcggttgcttctcaacgtccgggccgcatctcggcggcggcgagggctgagcgcgggagctgcctccgagccggagccccagccctaggccctgcgcgagctgccccgccctaccccctccagcgtcctgtcgcctcctcgcccgacttcggcctgtccctctctcacgcgctcagtcctcgctcttcgccccccgcagctatcggcactcggtctcccgcgcctggcgggctccgcccgagcctctgggcccatggccaagcggcgtgcggccgagccggtgacgttccacgtgccttggaagcggctcctgctttgcgacttcgctgagcagccgccgccacccgcctctctggatccggccgcccggggtcgcgcatgctgggcagctcctcggcgtcccagagcagcaccgaaagcgcaaaatccacgcaggggaccatggcagagccctcggcttcgcccagcaagcgccgtgacagcggggacaacagcgccccgagcggccaggagcgtgaggaccacggtctggagacaggcgatccgccgctagcgccgccgcccgtactggcgggggcggaggaggagctcccggacgcccggctatccgggggggcggaggcgacgacggcgacaggacgggcagagggtggggaagagcgaaggacgggagggagagtcggtgggatgtcggggaccatggtcagctcaacaacttgacccgtcagcaaaaagtgaattctagtagcgggaaatgagggagacatagacgaccgcaagaagcggtgccgaaagaaaacaaggaatcaggcgggagttacatttaagtggtgtgacaagtccaagcacgatgcacaaggcctgcagggcacgagatgaaggtgacgtacggctatcaagacgaaccgccgcccgaactacaaaatagaaatcaagcat

SEQ ID NO: 98096 - DNA, 506 bp, Homo Sapiens
gggcttaggagattgcccagatggcaagaggtcctgggctccttcttgaggggctgcctggcccgctccatcctactcccactaactacacctcagggcgggtgaggttccgacactgatcccagagatgccgtggatacgccagggtcccagggggaatctccccaagctcacactctctcccgcttatcgcctattctcacacctcttctcggtcccatcttctgcacccattgcccagtcttgctttctctttcccatattccttttctttttctcttgtgccaaactgacagaaaccgtcaccacactggtctttttctttaatgtctcattccccttgaggccagctgctatgccaggtggtgtctctgccaggctcctcaggcccagacagaggccagcccacaacctatgaccccctcccccaggacaccacctcccacccacagaccttccctttagctgttgacacaacttcccagctctgcaagtgtgccccctgg

SEQ ID NO: 98097 - DNA, 895 bp, Homo Sapiens
gcctgttacggtgccccccagtagggacttccagcccgacttaagggggaaaggggaagggaaaggggaaaagccatgaaataatccccccacatgaatgtcaaaatgatgcagcaaaggggaaagccacatgatgccccaagtgtaaatacccaggggggcctaacctgggggaggagagcccacgaaaggcttccctaaggagcatggataagtctaccaggcagagggaacagcgtgtgcaaaggccctgtggtaagtagaaaaattaggagagagacatacagccagtagagctggagtgcccagctggggttgggggtagggggagatagtacagagtggggttggagggggagcttgtacccagatgatgtagggcttttgagaacctattacatgtatgttgatccttactctgggcaatgtgaagctgttgaggggttttaagctgctgaatgacatggtctttttgtctttggtcttctttcacttggcatagccatttaccctgccttgccactcatggggacgtggccaaagttttcacaaatgtttaacatgtccacagccagggaccaaggggcgagggaagaattaagtgagatgtttgtaatctcacatgcagttgagagcagggctttcgccgccctcatataagacagtgtcaagatcattcatatcctccttgtcaatggaagagatggaggggtaggctaacagcctcaaagggacttatgcagagacactagggagtaaaagccagagaatacagagaggacgtttttacctttagggcctgcgtctctggctttggccatcagggtcaaagagtaggagtgaggaaggaagggatgggacagcatccctgggacgttcaagtaccatcctggtc

SEQ ID NO: 98098 - DNA, 885 bp, Homo Sapiens
ataaacataagcgtataaggtagcgaggcctgggtggcgaattcggcacgaggggcatcttcatcttagcagtgtccaggccgcgcagctcccctgacgacctgaaggccctgactcgcaatgtgaaccggctgaatgagagcttccgggacttgcagctgcggctgctgcaggctccgctgcaagcggacctgacggagcaggtgtggaaggtgcaggacgcgctgcagaaccagtcagactcgttgctggcgctggcgggcgcagtgcagcggctggagggcgcgctgtgggggctgcaggcgcaggcggtgcagaccgagcaggcggtggccctgctgcgggaccgcacgggccagcagagcgacacggcgcagctggagctctaccagctgcaggtggagagcaacagtagccagctgctgctgaggcgccacgcgggcctgctggacgggctggcgcgcagggtgggcatcctgggcgaggagctggccgacgtgggcggcgtgctgcgcggcctcaaccacagcctgtcctacgacgtggcctccaccgcacgcggctgcaggacctgcgggtgctggtgagcaacgccagcgaggacacgcgccgctgcgcctggcgcacgtaggcatggagctgcagtgaagcaaggagctggccatgctcaagcggtcaccgaggactgcgctccaggactgggagcactccatcgcactgcggaacatctccctcgcgaagggcacgggaccaaaggtgatcaggcggatgaacgaaggcaggcggctggcatcctggattgctggattggagttgcggggaagaggcccagaatgccggccaggggatatggatggggcagaccatggcatgtgctcaagagcg

SEQ ID NO: 98099 - DNA, 1332 bp, Homo Sapiens
gcgggtgggcaacacgccacgggggccggatttcccattccccaagggggggcaggcacgtcccggcctccgcgatttttttccaacgtcacccaaaaatcctgcctccgctgggtaaaagccgttggtagggactccaatcactttggtgaatattggtagccctgccataaagacattgatccgcggccttttcagaactgtaagaacttttcccaacctgctgaggctgaactcaagccatcatcaacacaggtggctcccacccagagaggacagacagcgcgttgaccacaccatggacgtggtgcagcgggagcacgtggaggatcacgtcgtctttggtccatgcccacttgtggaccagcccggtcaccacagccctgatgttttggtgcgtgctcagcacgcccttgggcctccccgtggtcccactggtgtagatgatcatggcgcccttgttcctccatccctgctctgggaccgggacctctgccggttcctctactgctccagtgtagatggctggtgtgagcggcagcagcgggacccccagcttcctgaccaccgggctcaggagctccaggtactcctggctggcaaggaccacagagctctgggagtcgcagatgacatactccagctgggccgcgggatgcttcctgtagatggggtactgccacaccgccgctcatccatgaggcccactgggccacgacgtaggaggcgtcgttagcacataggaaggagaccctctcctcccggaggtccccgccgacacacccgcagagcctgcagatctcctgggacaggcgaaggctgcgggaataaagctccctgtacgtgtggcggccgtgctggtcaaccagggcgattctgtccccaaaggccagggcacgggtgaacaccggggcgctcctgtccgagcgggccactggggctgtgtgcagaagaccacttcctctgtgtctcgcaggcgccagccggcaggagggcaaggcgcagcccaggcgccggaaggtgagcaccacatggggcggcattgcactgacaggcgctcccgggagcctcctggggccgagccagctcccgagccagagagaggaggtaaggggaagttcgcagttcacaagagcggcaggcacagctgcttcagcaggtggaagggcacgataaggtgcaggcaatgcaaatgctcatcctcctggggcaggcaccaggcctggcgctggaacccggaaggccggtgggacacctacgagacggccgcaggccacggggcaggatctgcctcgccacaactcttcctcgtcctccgccgcgcgcgcgccg

SEQ ID NO: 98100 - DNA, 876 bp, Homo Sapiens
cggcagtaactataacggtactaaggtagcgaggcctgggtggcgaattcggcacgagggccgcccgcaggctgcagagagtcccgctgcgtctccgccgcgtgcgcccctcctcgaccagcagacccgcgctgcgctccgccgctgacatgtgtgccgctcagatgccgcccctggccgcacatcttccgagggacgttcgtccactccacctggacctgccccatggaggtgctgcgggatcacctcctcggcgtgagcgacagcggcaaaatagtgtttttagaagaagcatctcaacaggaaaaactggccaaagaatggtgcttcaagccgtgtgaaataagagaactgagccaccatgagttcttcatgcctgggctggttgatacacacatccatgcctctcagtattcctttgctggaagtagcatagacctgccactcttggagtggctgaccaagtacacatttcctgcagaacacagattccagaacatcgactttgcagaagaagtatataccagagttgtcaggagaacactaaagaatggaacaaccacagcttgttactttgcaaacaattcacactgactcatctctgctccttgccgacattacagataacctttggaccaggcgggcatcgtgggcaaagtttgtcatggatttgaatgacactttttccagaataccacggagaccacctgaggaatcgatcagggcaactgagagacttgtgtcacgaaatgctccaaaagaactaatcttaagtgaaagccatagtgacaccacgttttccctctcctgctctggcacttgctggtgaactggccaccttgctaactcggtttggcttcgacctttttgactctg

SEQ ID NO: 98101 - DNA, 926 bp, Homo Sapiens
gcccgagcccagccagagccgggcggagcggagcgcgccgagcctcgtcccgcggccgggccgggaccgggccgtagcggcggcgcctggatgcggacccggccgcggggagacgggcgcccgccccgaaacgactttcagtccccgacgcgccccgcccaacccctacgatgaagagggcgtccgctggagggagccggctgctggcatgggtgctgtggctgcaggcctggcaggtggcagccccatgcccaggtgcctgcgtatgctacaatgagcccaaggtgacgacaagctgcccccagcagggcctgcaggctgtgcccgtgggcatccctgctgccagccagcgcatcttcctgcacggcaaccgcatctcgcatgtgccagctgccagcttccgtgcctgccgcaacctcaccatcctgtggctgcactcgaatgtgctggcccgaattgatgcggctgccttcactggcctggccctcctggagcagctggacctcagcgataatgcacagctccggtctgtggaccctgccacattccacggcctgggccgcctacacacgctgcacctggaccgctgcggcctgcaggagctgggcccggggctgttccgcggcctggctgccctgcaagtacctctacctgcaggacaacccgctgcaggcactgcctgatgacacctttcccgaccctgggcaacctcacaaccctctttcctggccggcaacccgcttcttccaccgtgccccaaccgcgcccttccggggggctggcaaagccctcctaccgcgctcctactggccaccgaaacccccgtggccccatgtgtcaccccaccattgcctttcccgtggacctcgccccgccccccaggccccacccttactctcgtttgtgccaccaaatttcatttcacc

SEQ ID NO: 98102 - DNA, 1284 bp, Homo Sapiens
tacctatacgttctaatgtagcgaggctgggtggcgaattcggcacgaggccagcgagctggcagcagtgggggctgtgcatgtaatgccacaggctggtcctgcccgcccggtgccctgcggagagcctcgtgcagccctgggcaccgcccctgccctgccctgaccccttggccttgaaatgctgtcatcggaggagccgtcccgctcgggacaaggccagcatggacaaagctagagctggggcaagcaaggagccttcctgtcctcgaggccgtgggaagagaagcacgcccagggggccactcctgagagcctctctgtccaccaggcctctgcagaggggtcaccatggctctggcccgaggcagccggcagctgggggccctggtgtggggcgcctgcctgtgcgtgctggtgcacgggcagcaggcgcagcccgggcagggctcggaccccgcccgctggcggcagctgatccagtgggagaacaacgggcaggtgtacagcttgctcaactcgggctcagagtacgtgccggccggacctcagcgctccgagagtagctcccgggtgctgctggccggcgcgccccaggcccagcagcggcgcagccacgggagcccccggcgtcggcaggcgccgtccctgcccctgccggggcgcgtgggctcggacaccgtgcgcggccaggcgcggcacccattcggctttggccaggtgcccgacaactggcgcgaggtggccgtcggggacagcacggacatggccccggcccgcacctccgtctcccagcaacggcacggggactcctgcctcctcggtctcggcttcggccttcgccatgcacctaccgccagcagccctcctaccctgcagcagttcccctaccctgcaggcgcccttcgtcagccagtacgagaactacgacccctgcgtcgcggacctacgaccagggtttcgtgtactacctggccctgcgggcggcggcgtgggcgctggggtgcggcggccgtggcctcggcgggggtcatctacccctaccagcccctgggcgcgctacgaggagtacggcggcggcgaagagctgccctgagtacccgcctcatgggcttctacccggcccccgagaggccctactgttgccgccgcctgccgtcgcccccgactggcctggacctgccgctactcgcacagtcttgtacagcgaggggcacccccggcttcgagcaggcctaccctgacccgggtcccgaggcggtgcatgcccttggggtgagaccc

SEQ ID NO: 98103 - DNA, 609 bp, Homo Sapiens
  misc_feature (584)..(584): n is a, c, g, or t
tatgcggcatggacagtgacagtgggccagaggctgaggagcccatagaggaagatttcctcctgcagacagatcgataacatcaaggcatacatctttgatgccaagcagtgcggccgcctggatgaggtagaggtgctgacagagaatctgcgggagctgaagcatttcctggccaagcagaaggggggcactgactgaccagcagtggagagggcacctttgggcccaggggtctggcaggagccagtggagcaggacagagggcaggcaggatggatggggaaggtggcagggtgagaactcagatgcacacaggtgaggggcaggaatctgctgttttgtgttgcgcactttgaggtatttccactacagttgaataataaaatagaaactagaacagggagaatcagcattcagttgctgcttttcctgtttattattactatcttttgtaatcggaggtttaccccttttgaagggactttacatttttactaccgagatataactaaatgcagctctgttgggcccagggcagaaatggctgctgtgtaccttctgggccatttgctactgcctantctggttccttatcagtattatagg

SEQ ID NO: 98104 - DNA, 590 bp, Homo Sapiens
  misc_feature (13)..(13): n is a, c, g, or t
ccagctccctctngacgtgctgctccgactgcagtgcgctggggatctccatgttctcattagtcagctttacaaatccgctctgcagctcagccagctgctccttgagctcccggttctgggagagtgcgcggctgatggtagtgcggtcgttctgcatggtctccaggatttgcctgcgcgcctccgcctgctccccccagagctcggccgcccgctccagctccagcagcctctcctcctgctcccggttcaggcgactcaagccctcattgtcttgcacctgggcttgaagctgtcctgccagaccctccagctccttccgcaggtgctcagcctccgcttgtagctgctgctccacctcggagggccctgctgggggccctgggggcgggggttcagctgagaaaggacgcagacaataaaagcctctggattctcaaaaaaaccctcctcttggtccatacctcctctcaagctccccaaacttggcctccctgctgatgattcctcgcacccggatgttagccaatcttccaaaccactttccgatagcgacaactgtgggtggctacaacgggcactccttc

SEQ ID NO: 98105 - DNA, 1016 bp, Homo Sapiens
  misc_feature (123)..(123): n is a, c, g, or t
cccattgagatcccgcgatctcggttgcggctgctctgagggctgctcccataattcgggccgagcgggcggcttgctccttccaaggctggctccgagagtatgcctcggcttcttccaggnctgcgagccgcgacggcgtcatactggggccttcacctcttccacgatgcccgctcaggtcgatgtggcagcggctgtccatgccgacggtcaccgacacatccttcacctgtgctgccaggtccttcagctcctgctcatagatggttttcatcaactccacgaagctctccaggctttttaacttggtttccagttcagtccgatgaagacactctgcatccaggtccttcttcagctgaacaaaggtgaactccatgtctgtgcgcttggagatctcatcctcatacctgattcgaaactcctcaaccttctccagcacctgcagcaggttggcctccagctgcccccgctcctggctcactttgcgcagttcctcctgcagccggccctgatattcctcatagagatgcccgaggtcgaagatggctgagtcctggccctgcaggaagctccagcgtgtctccagcagctggttgcgctgttccagggcttgcaccttgccaattagggaggcaaatttatcattgagggccttcatctcctccttctcctggttcttcagctgctgaacagcggggtccaacttgacatccaggggcaccagcaggccggggttcacagtcaccttggagatagtgccagccgaccagcagcctgtgaggctgcgggagctgaagcccggcccgggggccctgcagctgtcccatcctgaggttccaggccgggggctgcccaccggggtcacctcacagctgctgaggctgctgaagccaaccacgcaggagcggcaggccatggtgcccccggccggaagcaggagggcccaggggggtgagcgagtgagcctggggttgagtcgggtggcaggctctggttgctctggtcacagc

SEQ ID NO: 98106 - DNA, 1029 bp, Homo Sapiens
tcattgaaaaagcaggtttgtaaagaggcagtaactataacggtcctaaggtagcgaggctgggtggcgaattcggcacgagggcttcccgtccgctgtcctctgctgccagtcccctggccccgggcaaagcccatctggtccgccgagcaggccggagctattgggagtggcggatcctcccaccccagccggatctgggccatggccgagcctggagagggactgccagaggaggtgctggcactcatcttcctgccacctgtccctgatgagacctgtgcttgcctgcctgccagggtctgcagggcctgtggcctgcctgctgctacctgcagctgccgtgtggcactgacacaaaaatcagttgcgaatgtgagctggaaggcatgctgccaccttatctgtccgcctgcctcgaccacattcacaacctacggctggaattttgagccatcgaggcaagcctgatgcctgccgggcggccatcgagctgctgatggttctggcgggccgtgccccggggctgcgaggcctgcgcctggatgtgccgcggacgaaaaaccgctcttcgacgctgggccgcgacgtcctggaggctgtgcacgctgtatgcggggcggcagccagtacgccactcgacctgcggcgcttgtccttcacactggacgacgcgctggtgctgcaggcgggcgccagtgtcccgagctccacagcctttttctggacaacagtaccctagtgggcagcggggggttccggctcaggtcgagctaactgaggctggccgcgctggcgctctcggctgcactagccagtggcgacgcatctcgaagcactggcgggcagacgagcgccttcggaccggccggggggtgccgaaagaggcgtccgcgcagagccgggcggggcgccccccggcgggcgcggcccgccgaaagacgctgtcacaccggggggcccctcgagggcgggcgccaccccgcgccggcgccgaacgagggggcgatagttggacccgaccaaaca

SEQ ID NO: 98107 - DNA, 1127 bp, Homo Sapiens
gagagagtatgaagtcgacggcgcgccgaattcggcacgagggcgtctggcaaaaattgaccatactgcaattcacccacatttacttgacatgaagattggacaagggaaatatgagccgggcttcttccctaagctgcagtctgatgtactttccactgggccagccagcaacaagtggacgaaaaggaatgcccctgcccagtggaggcggaaagatcggcagaagcagcacacagaacacctgcgtttagataatgaccagagggagaagtacatccaggaagccaggactatgggcagcactatccgccagcccaaacggtccaacctctctccatcagtgattgcccagaccaataggaagtttgtagagggcctgctgaaggaatgccgcaataagaccaagaggatgctggtggaaaagatgggccgagaagctgtggagctagggcatggggaggtgaacatcacaggggtggaagagaacaccctgcattgccagccttagtgatctcctggaacaggatctggagtcatggactacaagtgaaacaggggaaatcagccttatggtcccacctgttacattatcaggacaaccggcagagaaaactcacatcaggaagcctcagtacctcaggaatacttcttgattcagaacgtaggaagtctgatgccagctcactcatgcctcccctgaggatctccctgattcaggatatgaggcacatccagaacatcggggcaatcaaagcatgatgtgggaaaggacagagcatgggtgcgacgtccatggaaacacaagtacattccaggaaactgacgccagatcctctcagaccaagagctcaacaaaaagtcatatacgcgctaggcctacagcggctgcgatgccgagacgggcagaacctctatccactccagacataccaatgccggcgactaacatgaggcttcaaccaaggtcataacaagtaattcggaatcccagaacccaaattcctgaatagaacccaagacagaaagactgacagggcaccatggtacacgggccaaaccacgtgaccccggacaaccaggagacatgcggtgagaaaaacggagcagcaaaaataccaggaaag

SEQ ID NO: 98108 - DNA, 596 bp, Homo Sapiens
  misc_feature (49)..(49): n is a, c, g, or t
tcgcgccgtggcggagcaacctccatcccgtgatgagatcactgccctngagccaatccctacagcccttacggaagctgccttttagagcctttcgcacagatgccagaaaaatccacactgcccctgcccgaaccatgttcctgctgcgtcccctgcccattctgttggtgacaggcggcgggtatgcagggtaccggcagtatgagaagtacagggagcgagagctggagaagctgggattggagattccacccaaacttgctggtcactgggaggtggctttgtacaagtcagtgccaacgcgcttgctgtcacgggcctggggtcgcctcaatcaggtggagctgccacactggctgcgcaggcccgtctacagcctgtacatctggacgtttggggtgaacatgaaagaggccgctgtggaggacctgcatcactaccgcaacctcagcgagttcttccggcgcaagctgaagccgcaggcccggcctgtctgtggcctgcacagcgtgattagcccatcggatggaaggatcctcaactttgggcaggtgaagaactgtgaggtggagcaggtaaagggggtcacctac

SEQ ID NO: 98109 - DNA, 1048 bp, Homo Sapiens
tacgcgacaagggttaagcacactccgggccccctcaccaggcccggcgctgcccccaatgggcgggatcaacgccgcgccacaaatgccgcggacacacccggcacggccgggtcggacacgactcgccgcacgcacagacccgaggtaacccagcgatccaggtttctgcgacgaccaaaggtgcgcccagccgcactggcccgcgtgagccacaggtctggaagtgctgggagcatccacacccccccaggggtcatcagcctcacctccgacccgtccagaaccgcggcgcaccccgaagtaccctttcgtggcgtgcggaatctctcctcctcgtcctctaatcgcgacgcgcgctcctggctcccgagcgccccgctgccgcggcgtctcataggggtcgcgcacccgcggagctggtgtcgggcaaccgtcctcctggcctcctgggccgcgctggcctgacgctggccaggccgcgctcgagtgccggcacttgggggagccgcaacgccagctgaagagcttgcctttgatgtcccagaagcgctctcacatactcaaacccgagtctgctcgcacggcctcgatcaggcgggttgctgaagaaggcgatccggggcaaccgacaggtccttggtgggaccatgaacacagcgcacgggcaccaggttgggctccgcaggtggtgattgatgaaccggctgacgttcccgtagaaccgcgcgtcgatgcagtaaacctccccgtccttattgtcgagatcaaagaggtaagaatcttcctctcgaacgtcggcttctgagtctgaaatcagctccccaacatactcgcagacaaaggtgcctggtgggatgtcctgcagggaccgcacgccccagcccatgtcccgcgtccggtagagctgcagccttgccctgagaccattgtgtacgacgcgatttcggcagttcctccagcaggagcacgcgtggttgcattcgaagatcaagggaggctccgccatgttgaactctggcaggagccggccatcctgtggacagat

SEQ ID NO: 98110 - DNA, 934 bp, Homo Sapiens
cagtaactataacggtccttaaggtagcgaggcctgggtggcgaattcggcacgagggctcgagaaccctgaaggtgtgatcctatccatgggtggacagctgcccaacaacatggccatggcgttgcatcggcagcagtgccgggtgctgggcacctcccctgaagccattgactcggctgagaaccgtttcaagttttcccggctccttgacaccattggtatcagccagcctcagtggagggagctcagtgacctcgagtctgctcgccaattctgccagaccgtggggtacccctgtgtggtgcgcccctcctatgtgctgagcggtgctgctatgaatgtggcctacacggatggagacctggagcgcttcctgagcagcgcagcagccgtctccaaagagcatcccgtggtcatctccaagttcatccaggaggctaaggagattgacgtggatgccgtggcctctgatggcgtggtggcagccatcgccatctctgagcatgtggagaatgcaggtgtgcagtcaggtgatgcgacgctggtgacccccccacaagatatcactgccaaaaccctggagcggatcaaagccattgtgcatgctgtgggccaggagctacaggtcacaggacccttcaatctgcaggctcattgccaaggatgaccagctgaaagttattgaatgcaccgtacgtgtctttcgtccttccccttcgtttcaagaacactggtgtggaactagttagcttggccagcgggtcatcatgggggaagaagtggaactgtggggtaatgaatggtttgagtcggggagaaaaggggcgatactatccgatggggtggaagtgggttgggttgagaacacatggggagtgcgtgagaaaagtagatctagtaatttaagtaaaccaaaattgacagggtaaaa

SEQ ID NO: 98111 - DNA, 1105 bp, Homo Sapiens
caataatcaatcattggtcgagacacacaagggttacacacgtccgcagcggatttccatccttgctgtggcggtcagcagtgggggtcatcacgcgcccggtgtcccgctcggacagaacatttgcgcaagcccggtaggactccaggcacacaaggtgtcttcacctaacagctaagaccgaaggggagcaccaaaagggatgtcgtcaactcgtgtgagcacaggtccaggacgccgtgccgctgtcagggaccactagtggaagacccagttgcaagcccacagcacaggcagccagatttcttgttcgggtagtcaccttccccgcctccgcaagagttgtaccagaacacagctgtacccttcttaggccaaattgcggccccccagatcagggaagacggtggcaccaccagcttctacattcactcatgtagtttaagaaagtaaccacacgagttccccgtccctaaatgcttgaaagtatctcgctcatcattcctagagaagtcgaagtgcggttcatactgtcctcccactgccataatttgcaacctgtaacaattctgcagtctttactgttaaccctgtgatatgctgcatccgacgatttactcgggccacaacagggtcatcatcttcctctagccaggagcttttggaaacccggtagctggcgacagtgaggactcctgtcttgggatcacgaacggtggctcgtgcaagtttaggttttgcgatctccttgatcctctcgatttcctcatcaaacatgacatcggaatacctgacgatgtgcgggctgtcccactcgtcctcctctttgaagggggcaatgagcagctgtggggccctgttgccatggtggtacctacagaaaagcctcttctgtctacggggtgtcagtttgacaccctccccacgacagaggctctcgtaaacatccctctcaggcaggtagtccacaggcctctcatagatgccttctggggttgcctcgtgccgaattcgccacccagcctcgctaccttagaccgttatagtactggcccgttcgttttaaaataaaccctgggttttctgagcaactgagtttaggttt

SEQ ID NO: 98112 - DNA, 846 bp, Homo Sapiens
catgtactataacggtctaaggtagcgaggcctgggtggcgaattcggcacgaggcgaaggagctcccagccatggaaagccctggagagtcaggcgcgggctctcctggagcccccagcccgtccagcttcactactgggcacctggcgagagaaaagccagcccaggacccactgtatgacgtgcccaatgccagcggcgggcaggcaggcgggccgcagcggccggggcgcgttgtgagcctgcgggagcgcctgctgctcacccggcccgtgtggctgcagctgcaagccaacgcagcggccgcactgcacatgctgaggaccgagcccccggggacgttcctcgtgcggaaatctaacacccgccagtgccaggccctgtgcatgcggttgcctgaagccagtggcccctccttcgtctccagccactacatcctggagagccctggcggcgtctccttggagggctcggagctcatgttcccagacctagtccagctcatctgtgcctactgccacacccgggacatccttctcctcccgctgcagctccccagagccatccaccacgcagccactcacaaagagctggaggccatctcccatctgggcattgaagttctggagctcctccctcaacatcaaggctcagcggggcccggcttggaggcccagtgttgccccagctgaaggcccggtcccctcaagagctggaccagtggcaccggaagccgccttgtgcttcttcaaccccctgttcccggggggacctagggcccaccaagcggggagaaattcccgcagaaccttcacaggggggcgtggtccccagagaaccttcca

SEQ ID NO: 98113 - DNA, 1051 bp, Homo Sapiens
  misc_feature (1038)..(1038): n is a, c, g, or t
cgccaaacccttgccccggagccccgccctccgcggaccaccacccattggaaaacagtgcatcagggagctggtcctgtgcagactgacagagaggcaagtcttccagggagagaaattctgaaggaaccctgactgtgctcaccagccctgcacctgtgggggagcccctcaaggcaccagcacgcctctccgggcctggacagggtccagcagctcacgcgcccactcctcccgcaggcgccgccgcagccctgcatccaggtagcagctgcctgggcgccaggctccagggcgcctgccccgccgggcacaccatctggagaaagcgcggatgcgctgggcgtccctgtgcccggaacacgtgccaacacagtgctgacctggctgcccggagaccagagcccctgccccgtccaggcctgaaaggaagtctttctgtgcccggttgccaggcaggcaatggtgtgtcggcatgcaccaggatgctgaccaggtcggccacctccacacagaggttcttggtccccaggtgtccccggtgcgggctcacaccataggctgcccagagctggggctccagtggacgcagggcaaggcccggtgggaggtaggaagccaggttgagttttccatggagggcgcagtactccggaagtggcagactggcagctaggttctccaccctgctggtgtcctcatcccccaaagctcggtgcagcaggaggacagagccctcgtctgactttgggcgaagctcaggccaggagaagccctcccagaatgttgtgctgcccaggctgctgggctggggaggtccgagggggctcagcgcctgcacctggcctccaagtgccccaagagcttctgtcccccacaggttgccctgcaatgtcctttggatccctgacaccacacaggctggcctgcctccaggtgctcctggaagagttcgacgcgtgggtcgacgatatcccgggaattccgaccgtacagcctgctttttttacactggttcatattacaatgcttgccacnaccgactgcgcgg

SEQ ID NO: 98114 - DNA, 880 bp, Homo Sapiens
  misc_feature (725)..(787): n is a, c, g, or t
  misc_feature (799)..(826): n is a, c, g, or t
ggtatgaagtcgacggcgcgccgaattcggcacgagggcggcgggaggggtcccctggaagtgacgctgactcagccagtgaggagcgggcctgtctccaacaggctgcagagctgggaggagacttggagcctcatcccggagaaagggctgccggaggacgacccggacatcgttgtgaaaggttggctgtaccgggagccccgcggaggaggggcgcggccctggctgcccccgcgccgagcctggtttgtgctcacgcgggactccctggatctaattcagcaacagcgggaaaggggcgcggcgtctcgggagcctcgtgcacaccagcctgtgctcggtgaccggcccagagcgcaggcgtaacgagacaggtctgtggtcagtgactgtgtctggtcggaaacacagtgtccgcctctgctccccacgccaggcaaaagctgagcgctggggggtggcattgcgggaagtgatcgcctccaaggcacccctgtgagaccccctaccagctactgctcagggacatacaggaaagttgcggggacccagaggccgttgccctcatttacctgaggaacccgattctgagacacactagtggagccttgtatgccccactcctgcccctgccctatggagtcagcgccccaggtccgggctatgcacccctgcgcgaggaggcggtgcggtctgttctaggcgtccgcaggcgtcaggannnnnnnnnnnnnnnnnnnnnnnnnnnnnnnnnnnnnnnnnnnnnnnnnnnnnnnnnnnnnnncccccaaaaaannnnnnnnnnnnnnnnnnnnnnnnnnnnttattgtggggccccctttatttacccccgaagaaaaccttgggcccgggggac

SEQ ID NO: 98115 - DNA, 996 bp, Homo Sapiens
agtactataagggtattaaggtagcgaggcctgggtggcgaattcggcacgaggcctgctgctgccgtccatgctgagtgtgtgcggtgatcgtggcctccagcgggctgctgctcatgatcgagcggggcatcctggccgagatgaagcccctgcccctgcacccgcccggccgcgagggcacagcctggcgcgggaaagcccccaagcctgggggcctgtccctcagggctggggacgcgtgacttgcaagtgcggcaggacgtccggaacaggaccctgcgggcggtgtgcggacagccaggcatgccccgggacccctgggacttgccggtggggcagcggcgcaccctgctgcgccacatcctcgtaagtgaccgttaccgcttcctctactgctacgtccccaaggtggcctgctctaactggaagcgggtgatgaaggtgctggcaggagtactggacagcgtggacgtccgcctcaagatggaaccaccgcaagtgaacctggtgttccctggccgacctgcgggctgaggagattcgctacagcgctgcagcaactactttaagttcctgtttgtgcgggagcccttggaaagcctcctctctgcctaccgaacaagttaggcgagatccgagagtaccagcaacgctatggggctgagataatgaggcggtacaaggctggagcgggcaaggcgaggaggcgacgcgatgtaacagtggccccgaggttccagaagaaaccgggagggataacggcccgaagggatgactaagcatggagcccgagccacactggtcactgtggcgcgcactaagacatacggcacactcaaggggaggagcaccgggagagcggaagcacaagacgtcaagcagcggcaggggccgaaacagacaagagaaaaagaaggcaggacagacagaagggccagacacacaccaaaggaagcaaggcgactgcgcactgagaaaattgcaacggcgacg

SEQ ID NO: 98116 - DNA, 960 bp, Homo Sapiens
  misc_feature (761)..(761): n is a, c, g, or t
  misc_feature (932)..(932): n is a, c, g, or t
acgagcgagagagtatgaagtcgaggcgcgccgaattcggcacgagggcttcggcagcctgagcgtcaactacaccctcgtcgtgctggatgacattagcccagggaaggagagcctggggcccgacagctcctctgggggtcaagaggaccccgccagccagcagtgggcacgaccgcgcttcacacagccctccaagatgaggcgccgggtgatcgcacggcccgtgggtagctccgtgcggctcaagtgcgtggccagcgggcaccctcggcccgacatcacgtggatgaaggacgaccaggccttgacgcgcccagaggccgctgagcccaggaagaagaagtggacactgagcctgaagaacctgcggccggaggacagcggcaaatacacctgccgcgtgtcgaaccgcgcgggcgccatcaacgccacctacaaggtggatgtgatccagcggacccgttccaagcccgtgctcacaggcacgcaccccgtgaacacgacggtggacttcggggggaccacgtccttccagtgcaaggtgcgcagcgacgtgaagccggtgatccagtggctgaagcgcgtggagtacggcgccgagggccgccacaactccaccatcgatgtgggcggccagaagtttgtggtgctgcccacgggtgacgtgtggtcgcggcccgacggctcctacctcataagctgctcatcacccgtgcccgccaggacgatgcgggcatgtacatctgccttggcgccanacaccatgggctacagcttccgcagcgccttccctcaccgtgctgccagaaccaaaaccgccagggccacctgtggccccctcgtccctcggccactagcctgccgtggccccggggtcatcggcatcccagccgggcgctgtcttcatccctgggcaccctggctcctgntggctttgccaggcccaaaaagaagccg

SEQ ID NO: 98117 - DNA, 1894 bp, Homo Sapiens
cagaataggtaaaagacccgtggtaaaaaagcaggctgtacggtccgtatatcccgggatattgtcgaccacgcgtcgctggatgaaaccctgcctaccatccttcaggtcggcagcaatatcctccagcactgtggtttgcaaggggacgggcccaataacacaccccagaagcttgaggagaggggccgattgagccccagtgacatgcctctcctggaattaaaggacattgttctctacctttgtgatacctgcaccacactttggacctttctggagtatcttccctttggcttgccacgaccttccagaagcacgacttttgttacagactagcttccttctacagaagcagcaattcccgaaatggagtctgcaattaagaagaggaggctccgaagatagcacagcttcttggtgacctgtggcagaggctctcccattccaggaagaagctaatggagattatgccacatcatcctgaaccagatctgcctccttcccatcctagaaagcacgctgtgacaacattcaggggcttcatcgaagagttccttcagatcttcagctccttgctgcaggagaagaggttcctccgggactatgatgcactcttccccgtggccgaagacatcagcttgctgcagcaggcctcatcagtcttggacgagacgcggactgcctacatcctccaggcagtcgagagtgcatgggaaggggtggacagacggaaagccacagatgctaaagacccatcggtgattgaggagcctaatggggagcctaacggggtcacggtgacagcagaggcagtcagtcaagcatcatcacatccggagaactcggaggaagaggagtgcatgggagcagccgcggctgtgggccctgccatgtgtggggtggaactggactctctcatctcccaagtgaaggacctgctgccagaccttggtgagggcttcatcctggcctgcctggagtactaccactacgacccagagcaggtgatcaacaatatcctggaggagcggctggcccccaccctcagccagctggaccgcaacctagacagagaaatgaaaccagaccctacacccctgctgacgtctcgccacaacgtcttccagaatgacgagtttgatgtgttcagcagggactcagtagacctgagccgggtgcacaagggcaagagcaccaggaaggaggaaaacacgcggagtttgctgaacgacaagcgtgcagtggcggcacagcggcagcgctacgagcagtacagcgtggtggtggaggaggtgccactgcagccaggcgagagcctgccctaccacagtgtctactacgaggatgagtacgatgacaccatacgatggcaaccaggtgggcgccaaatgatgcagactctgatgacgagctcatcagccgcggggccattcaccatccctcaggttgcatgagaaccacaagtgcctaacagaagggcacggaggaggcatgacgacccgcaccgcacggaagacgatgcttgacgaggaggtcccaagcccgaccatcagggtcaggaacctgcgggctgacagacacggcggaagcacggctggcttacatcgcccagcacagggcacccggactgaaagctcccacgcagagctgccgcacccgacgcatgggacagaggagaaacccagacggcagaaacgacggcaacaggcacaaaacaaccacgaagaacaagtcgccgcagaggacaaggataccaccgaccgacgagacagggagaagaaaacacggggccaagggcccaaggccataaaccaagacggagcgaagaataacagctcaacagacaacggaacccgaagggcccgacccgcagtcagcgtcttttcgcgcg

SEQ ID NO: 98118 - DNA, 395 bp, Homo Sapiens
atccccggtcatacctggaccttctaaaggcagtcagtcaagcatcatcacatccggagaactcggaggaagaggagtagcatgggagcagtccgcggctgtgaggccctgactcatgtgtggggtggaactggactctctcatctcccaagtgaaggacctgctgccagaccttggtgagggcttcatcctggcctgcctggagtactaccactacgacccagagcagagaaatgaaaccagaccctacacccctgctgacgtctcgccacaacgtcttccagaatgaagagtttgatgtgttcagcaaggactcagtagacctgagccgggtgcacaagggcaagagcaccaggaaggaggaaaacatcgcggagtttgctgaacgacaagcg

SEQ ID NO: 98119 - DNA, 1500 bp, Homo Sapiens
gtgaaattgacagtgaaaagtatggcagatgagcaagaaatcatgtgcaaattggaaagcattaaagagatcaggaacaagaccctgcagatggagaagatcaaggctcgtttgaaggctgagtttgaggcacttgagtcagaggaaaggcacctgaaggaatacaagcaggagatggaccttctgctacaggagaagatggcccatgtggaggaactccgactgatccacgctgacatcaatgtgatggaaaacactatcaaacaatctgagaatgacctaaacaagctgctagagtctacaaggaggctgcatgatgagtataagccactgaaagaacatgtggatgccctgcgcatgactctgggcctgcagaggctccctgacttgtgtgaagaagaggagaagctttccttggattactttgagaagcagaaagcagaatggcagacagaacctcaggagccccccatccctgagtccctggccgcatgcagccgctgccgaccaacagctccaagtggctaggaagcaggatactcgtgcagacggccaccttcaggcagcaagccccaactatgaaggcctgcttgtcatgtcaccagcaagattcaccggaatgcacctatatgccctcttttgcaaggccaagagtcggtcccggaaccccaaaaagccgaaacggaagcaggatgaataaagaaagggcagagcacatgaagctttgctaattataacccctcaccttgaccagagtcattgatgtcctgatgtgaaacaacccttgcccaaccccacgaagtctcctatttaatgtgatggaagcacaacccctctctcactttgctcctatttctttctgctcttgggatttctggtttaggaagagatgtggttcaggtgctaaacagtgtgtctgatgatcccttctctcccactcacatttcaacccctgcccttgtttggagctaagggaagggcaaaaggctcagatatgattctctatctcttgtgcctgaggcctggagcctaaggagctgtagggtctgaggggcaggggaggcccatatcttgtttcaggtaaaggacccagtatttcccctccttgtacttttgccttaggttctcaagggacaatagtcttcatgttggattctccaacaggctgggtgcatgtatccccctactcctaccctcatctcatccttaaggcccagaggtagcttggacaagccctcccttttcataatcatttggggaggcatgggctgtaattcctttaagctttctccacttctgtctcccacatatactaaaattcctagggtactaggcctgttgtgtctttgggaatctttaagatcaaatgaaccttttcccccaataatcctagtccttttgccaaatttctcaattagaaaggattttccacacgtggaaaattcagcggcagcccagaaacaaaactcctaccatcctccgtggcctttaaccctaacg

SEQ ID NO: 98120 - DNA, 1010 bp, Homo Sapiens
  misc_feature (129)..(145): n is a, c, g, or t
aaactctacgtcagttgtacaaaaagcaggttatttatcgacggccagtactataacggtcctaacggtagcgaggcctgggtggcgaattcggcacgaggccgcagaagctcttctctgagcctgttnnnnnnnnnnnnnnnnncgtggaggaactggggttcgcgggagcacgagctgcagcaccacttccggaaagttcaggagccctggaaaggagaaggaataagacggcaggaggaagagagagagagggtagaatggaagaatctcacttcaattctaacccgtacttctggccttctatccccacagtctcaggtcagatcgagaacacaatgttcatcaacaagatgaaggatcagctgttgccagagaagggctgtggtctggccccacctcactaccccaccttgctgacagtgcctgcctcagtgtccctgccctcaggcatcagtatggacacagagtccaagtcagaccagctgaccccacacagccaagcgtccgttacccagaatatcacggtggtccctgtgccgtctacaggactgatgactgctggagtctcctgttctcagaggtggagaagacgacagggagtcaatcaaggggtccgggtaaggtaatcaacgtccccctcaggctctcttgtgaccacagcaatcatcagctcagaccttccccatttcggctcccatgatttgcatcagctcttccaccatggctcacaaagcccctgcaaggttgtcccctgaccctctccaagaaggtaagcatcgaacctaaccagagaaaaagacgcggaagtggtggtcgcaggtggcagtgtggtcctaagacgaccggggggaaaagaagcggatggcggaattccagggcggccgaatgatgaccttatgtctctccctgaggatgagatgcacatcaaagacgagaaactaaagtgcgcttgctcagacaattatccagagggagaggacacaccaggaaacggaaagcacagtcaa

SEQ ID NO: 98121 - DNA, 978 bp, Homo Sapiens
catactataagcggcttatatgtagcgaggcctgggtggcgaattcggcacgaggcaactccttgcactcatcgccctctggaagcgggccttgtgacgagttgcggctgaccttccctgtgcgcgatggggtggtcctggagcccttccgcctgcagcacaacctggctgtaagcaaccatgtcttccagctgcgagactcagtctacaagaccctgataatgaggcctgacctggagctgcaattcaagtgctaccaccacgaggaccggcagatgaacaccaactggccagcctcggtgcaggtcagcgtcaatgccacgccgtcaacattcgaagcgtggggagaacaagagcctcgcacaagacactctatctgctaggcatgtgtggtaggccaggacgcaagaacatccatataaatgtcaggactggtgtgtgggtgatcccacttgatcgtgctgcatgtaggtgcacgcgccacatccgtccggtcggtgctgcaggggcctcctcaaaaagcgcttctgcctgtgagcacttgattcaccaaggataaagcggaacttcagcagggcaccatccctggcacccctgggccaacggagaggacggggtggagcagacagtatcaggtgtccctgaagtgcccatcaccttccgaggatccaagctccctgcccgaggtcatgactggtcggcacatacagggcttttgacctggagtcgataccctgcagactccaatggagcgggggacttggaggggtctggtgtggcacaaaaccaattgctgggagggccgggaggggggcccaacaacgcgggggactccctgatttatttcggaaagttcgcttgtgaagggagacacattcgcacccgtgtggtgtaatacaaggcctggatacctacagataccaaggaggacgcgagtgggaacaataagagcgcgaatgatgccccaagtttgatgcg

SEQ ID NO: 98122 - DNA, 1175 bp, Homo Sapiens
ccagtaactatagcggttctaaggtagcgaggcctgggtggcgaattcggcacgaggcgggtgaagaaattagaagaagtggaaaggaaaaaaacgccaaagggagttggacaattgaagaacgagaacggcgtagagaggaagagagaagacttggcgatagttccctttctagaaaggactctcgttggggagatagagattcagaaggcacctggagaaaaggacctgaagcagattctgagtggagaagaggcccgccagagaaggagtggagacgtggagaagggcgagatgaggacaggtctcatagaacgagatgaagagcggacccggcgtctgggggatgatgaagatagagagccctctcttagaccagacgatgatcgggttccccggcgtggcatggatgatgacagaggccctagacgtggtcctgaggaagataggtactctcgtcagtggggcaacgcacgcatgaccggccttcctggcgtaacacagatgatgacacggcctcccagacgaatagcccatgaagacaggggaaactggcgtcatgcggagtgatgacagaccacctagacgaggcactggatgaggacagaggaagctggcgaacagctgatgaggacagaggaccaagacgtgggatggatgatgaccgggggccgaggcgaggaggcgctgatgatgagcgatcatcctggcgtaatgctgatgatgaccggggtcccaggcgagggttggatgatgatcggggtcccaggcgaggcatggatgatgaccggggtcccaggcgaggcatggatgatgaccggggtcccaggcgaggcatggatgatgaccggggtcccaggcgagggtggatgatgatcgaggaccttggaggaacgccgatgatgacagaattcccaggcgtgtgcagaggatgacaggggcccttggagaacaccatggatgatgatcgcctttcaagacgtgctgattgatgatcggtttcccagacgggtgatgactcaagacctggtccttggagaccattagtccagccaggtgcctggctgagcgaagaaaagcagagaggagagctgggttcacctcgaagaattaggcatccagaagaacgtgaatgcggcgcccaacaagaaaccggcgcagaaaagattggtccg

SEQ ID NO: 98123 - DNA, 505 bp, Homo Sapiens
tggagacaccctgaagtggaggaactatgaggtgaagctgcggctgctgctgcacctggaggaactgcagatggagcatgatatccggcactatgacctggagtcggtgcccatgacctgggaccctgtggaccagaaccccaggctgctcacgctggaggttcctggagtgactgagagccgcccctcagtgctacggggcgaccacctgtttgcccttttgtcctcggagacacaccaggaggaccccatcacatataagggctttgtgcacaaggtggaattggaccgtgtcaagctgagcttttccatgagcctcctgagccgctttgtggatgggctgaccttcaaggtgaactttaccttcaaccgccagccgctgcgagtccagcaccgtgccctggagctgacagggcgctggctgctgtggcccatgctccttcctgtgggacctccggacgtctcgctgctgccctcagatgtgaaactcaatctgtacgaccgg

SEQ ID NO: 98124 - DNA, 849 bp, Homo Sapiens
cctcacgaaggtatacagacagatggacatccagttggtgagcagcttctccaccacagtctctgtcctgcgcagcatcagcttgggttcttggccacatactgggcaaccaggtcactgagcagagtgcggaggatgtcagtgaaatactcaagcttcccatgcagtgccacggtgagcagagatgccacgtaggcacggtcccgagctgaaaaggtgcgctggctctccagcgtgtggatgaacttggtgaggaagagcttgctgttgagcaggttagagagctgccccagcccttgctccacagtgggccgtctgctctcaggcacacccaggtcccggtgcaagggcgactcgcggtgcccagggaagaagatcctctccgcatacaccttgtagtcgaggaaggggatgccgctgcccaggaggtcactggtgagatcggtcatctcagtcatgaggtctgtgaattccttcttgcagcggtcccgcacactgctctccagattctccagctggatctgaaccttcttatagtccctcagggcctgcttgctcttcctcctgtacatgaggacaatgatgatgacacccagagccagaagagaggtgcccacccccaagcccacctgggctgccacaggaaaagccccagggctctcgccgtcatactgcacgtgacccagggagaagcgcaagttccccatctgcacctgtgtcaggagccacctgtgagcaagggtttggcccaggtcaatgcccagcccggccagggacctgcccactgaccgtgaactcaggcaaagagtcaggtgcctctcggagggcatgagacctgagcaagccagg

SEQ ID NO: 98125 - DNA, 919 bp, Homo Sapiens
tcctgaccaggctgcaagctacaccgtggagccagacccccgatccaggcacctggccctcagcgggcccacctttggtatcattgtgaagcacttccccaagctgctgcccaaggtcctggtccagggcactgtctttgcccgcatggcccctgagcagaagacagagctggtgtgcgagctacagaagcttcagtactgcgtgggcatgtgcggagacggcgccaatgactgtggggccctgaaggcggctgatgtcggcatctcgctgtcccaggcagaagcctcagtggtctcacccttcacctcgagcatggccagtattgagtgcgtgcccatggtcatcagggaggggcgctgttcccttgacacttcattcagcgtcttcaagtacatggctctgtacagcctgacccagttcatctccgtcctgatcctctacacgatcaacaccaacctgggtgacctgcagttcctggccatcgacctggtcatcaccaccacagtggcagtgctcatgagccgcacggggccagcgctggtcctgggacgggtacggccaccgggggcgctgctcagcgtgcccgtgctcagcagcctgctgctgcagatggtcctggtgaccggcgtgcagctagggggctacttcctgaccctggcccagccatggttcgtgcctctgaacaggacagtggccgcaccagacaacctgcccaactacgagaacacggtggtcttctctctgtccagcttccagtacctcatcctggctgcagccgtgtacaagggggcgcccttccgccggccgctctacaccaatggtgccactgcgggcgcgggcgggagatgctggcggagggagggaggagccctggggtgctgaggaggcagatgggagggaggtgccggccgagtggaa

SEQ ID NO: 98126 - DNA, 917 bp, Homo Sapiens
aatgatgacccccggctaaagaggacgggcttggctttggtggggctcttcaaaaagtctaaagaaggcatgatgttcaacacagattttccagaaggacttgcagaaatcccgactggccatcaggaattccaaggtatcctggtacgcactattggcatctggccggagcttgatgagaaagcgcttcctcttgaagctcagcttccgcaccttggcccagttgaaggcattgatcttagtgaaaccctgaaacactagaattcccgtgttggcaacggccagattgatcttcgtgccttccctgtccttggccgggtgcaaccggattccatacatctctagccgacgggcaatctctaggagctggaaatctgattctgctggtgtttgtccaatgtggttatggtgaaattccacgattttgtcctctagtgcgtcttgctgaggtatgtatttattttttgctaagtgctctctgtccaaggcttcatcaaaatccccaatctcagattgcacaatgtgtgaaatcaagagagctgcgctggtgtcattacacgtcaacctgccttgagccaagtcctgcttcacctgcagcgcgaacaggtaccttgtgagttcttcttggagttgtgtgtggtcaggcggaaagaatttcaccacaaacttaacaacaacgtgctttggccttctaatctgtttcacaatgggttttaggagatccagccacaccgtgatctttttgtgatcaggaaactcgaggccaaaatagtcaccttccacgaggttgaggtggttgcaaactgcatccagcagcaccttcccaggagctctttgtggaacttcaaatgcctcctgggtgtcatccagcatctggattttgatggacaccagttttccttgaggtgttgggggcg

SEQ ID NO: 98127 - DNA, 922 bp, Homo Sapiens
agcagcagcactgcagtcccagatgcctggtccaggaagccctttttgtactcgtcgtacgtgtacatcacgggctcgttgttcttgaatagagcaacccacacgttgccccccttgcagtgaacgtggtatgcaaagtagtagacaccagggacctcacaggtgaagatgcctgtctgcgggttgtagttctgtctgccgttatacagcagtttgttaaacttcactggggcccccaccggtgggaaaggtgcggttagctcggcggtaaatgcaggcatctcataggctggccctccattcttgcctttcttagccccgtaggcatgggggggtttcacgccatcaattcccagccccatatctggcagatactctccctggggtggtggtgtagggggcatcacagctgggggtcctggaggtcctggagggcctgggggtcctggaaggccaggctggccttgaggaccaagggcaccaggcttccctggggggccatgaagtcctgccactccgggtttccctataccagggaacccagggggccctgggaggcccggctcccctttggggcctggaatcccaggtggtccaatggggccactagggcccccaatccctgggatacctggggggccctgtaaaccctgatcccctgggattcctggctctcccttaggtccgagaagccctggaacaccagggagtcctggtacacctttttgcccagcttcccccttgggccctatgggacctggcaaacccctcatgccaggaggccctacttcaccaaggaaacctggctttcctgggaagccttgaagccctggctcacccttgggacctggtggcccctgtggccctacaatcccaccttctcctttgggtccaggaaaaccaatagcacctggagggcccc

SEQ ID NO: 98128 - DNA, 879 bp, Homo Sapiens
ggaggagggacgggaggagggagggcgggcaggcgccagcccagagcagccccgggcaccagcacggactctctcttccagcccaggtgccccccactctcgctccattcggcgggagcacccagtcctgtacgccaaggaactggtcctgggggcaccatggtttcggcggcagcccccagcctcctcatccttctgttgctgctcctggggtctgtgcctgctaccgacgcccgctctgtgcccctgaaggccacgttcctggaggatgtggcgggtagtggggaggccgagggctcgtcggcctcctccccgagcctcccgccaccctggaccccggccctcagccccacatcgatggggccccagcccacaaccctggggggcccatcagacccccaacaagcttcctggatgggatagtgaacttcttccgccagtacgtgatgctgatagctgctggtgggctccctggcctttctgctgatgtacatcgtctgtgccgcggacatcacccggcagaagcagaaggcctcagactattacccatcgaacttacccaagaagaagtacgtggaacagagtgaccgggccgggggccaccgggcctaccagagaggtacccgacagagaccccgacagcaggcccgaagaaagccctgagatacaacacggcagcaccaggccgacatctggccgccaccagaacctcaagtagcacaccagggctgcaacagagcgagagacgcacggagacaccaggagtagtagcagggcagaaggagacacaaaaaagacgcacaaaggccacaccagacaacagaaccacaaaatccaaagaacctgagtccacccggaaaacaccaaaaaccaacaccc

SEQ ID NO: 98129 - DNA, 1601 bp, Homo Sapiens
ctaagggcggaagagtatgaagtcgacggcgcgccgaattcggcacgaggcctggatcgccagggctacggccagatcaaggtggtccgcgccgatggggacacattgagctgcatctgcggcaagaccaagctcggggaagacatgctgtgtctcctgcacggcaggaacagcatggcgcctccctgcggcgacatggagaacctgctgtgtgccacagattccctgtacctggacacgatgcaggtcatgaagtggttccagacggccctcaccagagcctggaagggcatcgcccacaagtacgagttcgacctggcctttggccagctggacagcccggggtccctgaagatcaagttccgttcagggaagttcatgcccttcaacctgattcctgtgatccagtgtgatgactcggacctgtactttgtctcccaccttcccagggagccctctgagggcaccccagcctccagcacagactggctcctgtcctttgctgtctatgagcgacacttcctcaggacgacactaaaggcactgcccgagggcgcctgccacctcagctgcctgcagatagcatccttcctgctctccaagcagagccgcctgaccggtcccagcgggctcagcagctaccacctgaagacggccctactgcacctcctactcctccggcaggccgccgactggaaggcggggcagctggacgctcgtctgcacgagttgctgtgcttcctggagaagagcttgctccagaagaagctccaccacttcttcatcggcaaccgcaaggtgcctgaggccatgggactccctgaggccgtgctcagggccgagcccctcaacctcttccggcccttcgtcctgcagcgaagcctttaccgtaagacactggactccttctatgagatgctcaagaatgccccagcgctcattagcgagtattccctacatgtcccctcagaccagcctaccccaaaaagctgacgtcttttacagaatgtgggatcctcgagctaagatgagggcatccctcacgttcacacccctggtggcatctgccagccctgttctggggacaaggcgggctttcgtgggagccgtgctcagcctgccaggaagccaagccctacagtgcagaggaaacagaatttcaacgggaagctggtttgcttcataccattgggatctgctggtacagctgttatttgggtttagggactgatcccttgcagtttacttctggatcaccatgaattggccaagatgggtggcagaacaccgcctgtgagacccttgaagttcagaagacaatgcacatgttggattaggggggtaaacccatggaatcccagaatcccgcctgtactctaatattagccgaggacttccgaaatgtctccacggaccccgggtataaacccgggagccctttttccgagggctctttggccgcaccacatgtgcaaaaggcattcagggggacatgtgtgtgaccattatcacaccctcctcaacaaaatgtccaccaccgcgcaaatttatatctgggagacaacacgcgattaacataggcgcgcgacacctctatcgaa

SEQ ID NO: 98130 - DNA, 727 bp, Homo Sapiens
  misc_feature (19)..(19): n is a, c, g, or t
  misc_feature (671)..(679): n is a, c, g, or t
agagaagtgtggatgaatntcgcactgcccagaccggtgatgtaaaacccagaattgcagccttagctccatcagcaacataaggaataatattttctcccaggcgcgtatctctgaacaatgctctaaggatatttaaagcatgaacctgggggactgtactctgtatgtcatctgtaggcccagccaaagagattaactctttcattgctattttcaacaaatccattctgcctttctttggttcagatgccaacagtgcctgtatgtagaaaggaattccagcactgcgccttgtagcacagagtttagatgaaggatcactgcatttaatttcctctaaaacactccatagccactgttctggcagcttttgcagactcacatttgggcacctgtttagtacttcagtgagtttcacaaaaccagtataagccaattcaaatgctcctctgtgcctggactgcaaaaggtgttgtttaaagtaatctcctatttcttttacctgctccaccgtcaataatccatcagaagattctggcacaggctgcatgggcagaagctggcacaacatgcctaaaagtaaagcaacttccttcatacttctccaacaacataccagcaccatctgcgcagttacatcacatgtttttacttctttaccttaaacnnnnnnnnncacaacgattgcaaccttgattactcatatcccaggtttctaaaaaca

SEQ ID NO: 98131 - DNA, 761 bp, Homo Sapiens
tcagcgggcgaggtgcacaggccacgagccataccaaagtcaccaatcttgagctcacagttctcattcaccaataggttggagggcttcaggtcacggtggatgacctgagccgagtgcatgtacttcaggccccgcagcagttggtacaggaagtagcgcacgtgttccagtgtgaggggctgtgaggagtggatgatctggtgcaggtcgctttccatcaggtccaggaccacgtagacagatttgaattcgccatagggcacggtgggcctcaggatgtccttgatggcgatgatgttgtcgtgtttaaagtgcttgaggatcttcagctccctgagggtccgcttggcattggtcaccacatcgaaagcattagggatcttcttgatggccacctgctggccggtgaggcggcggcgggcggaggacaccactccataggccccgttgcctatggtctcgatgatctcgtactcgtcgcccacgtcaaaggtcacatcgaaggagcgggctttaagcagggccaggttcttggccgctacagaggcagcggtgtgggcgggttcggccttcacgggcccggggggctccgcagagccgtcctcgccgtcttcctccttcagaggctcggccatggtgtccccgcgcctcctcaaggctttcagaggtcccgaggctcgccggcctcccgtccccagcgcgggggtctccgagggtggctcacctcggccgaatcggcgcgccgtcgacttcatact

SEQ ID NO: 98132 - DNA, 1028 bp, Homo Sapiens
  misc_feature (74)..(160): n is a, c, g, or t
ccgcggcgggcgcagcgggcacctgggccgtgctgcccccgcgagcaaggcgccgccattccgctgctcggggnnnnnnnnnnnnnnnnnnnnnnnnnnnnnnnnnnnnnnnnnnnnnnnnnnnnnnnnnnnnnnnnnnnnnnnnnnnnnnnnnnnnnnncggtgcgcctgcagcggcccttcctgcgcagcccgctgggggtgttgcggctgctgcagctgctggccggcgctgccttctggatcactatcgccaccagcaagtaccagggccccgtgcacttcgcgctcttcgtgtccgtgctcttctggctgctcaccctgggcctctacttcctcacgctgctgggcaagcacgagctggtccccgtgctgggctcgcgctggctcatggtcaacgtggcgcacgatgtgctggcggccgcgctctacggcgccgccaccggcatcatgagcgaccagatgcagcgccacagctactgcaacctcaaggattacccgctcccctgcgcctaccacgccttcctggcggccgccgtctgcggcggcgtctgccacggcctctacctgctttcggcgctctatggctgcgggcgtcgctgccagggcaagcaggaggtggcgtgaggccgcccgcgcccgccgcggccccgatcggggcgggggaatccccggagaccagcctccttaatcccttcccccgccgccgccccgcgcgggtgcgccctggcaccctctccctgccctccagcgtttccactgtcgcccgcgcccgggaaccctgacgctcagctcccgcccgacggcagcgccgccgccgcccagaatcccagcccagaatcccgaccgccgcgccggacgcgccgtctcccgggacaagcgcaggctgcgatccgaggggctgacacacactcgcagacgagccgccccgaggcgaaacctcgcggttcctcttcccttccctgctgagactaagacgtggacaggggccgcgcagatccggtggaggctcccaaattggaaccagg

SEQ ID NO: 98133 - DNA, 721 bp, Homo Sapiens
gaagtcgacggcgcgccgattcggcacgaggcggggccgcgtcctcctggcgtcaccggcgtcactgtcattccttggtgtctgtgctgggcatggttggcttgggggtctgtggtttcctgggccttgtggcagggtttctcccgtgggagaatttggtgtggaaagcataggaggccccttccgaggttgacaccgtgtcctccgcggtgtttctcgcctggtcgtctcgtcgtgtggacgctgccgttctggttctcggaggtgtgtccttcgccgtgttggggttatttgtctgtgttcctgcacttttcccgggctctgagctggattgatggggccagtctcccccctcccatcttgaggtcgttctccacattccttccagcacacctgtcctttccatagcccttttttggacctttagaaccacagatgataggaccagcccaatgagccacagtcaaagagtaaattgtgctgttgtgaacccccgctcctgggaacggggcgcctcccacaacccctccttcgtggtttgcaaaatctccatttgccccattccctttgcccgttattcaatgattcggggaaacccaaatttttgggcccctgagaaagggttattggcccaagggaccctgggcccgagggtttgggccccggggagccggcccccgcccaaaaaccccctggacacttggggccctggggggcgggc

SEQ ID NO: 98134 - DNA, 1994 bp, Homo Sapiens
ggtccggaattcccgggatggcttgctgaggggcaggcacaggagtcctggctgagctcatggcctgaggctgcctagcggccacggggaatggttgcaatggcggaggcagaggcaggggtggcagtggaggtccgtggactgccccctgccgtgcccgacgagctgctcactctctactttgaaaaccgccgacgctctggagggggacctgtgttgagctggcagagactgggctgtgggggcgtcctcaccttcagagagcctgcagacgccgagagggtcttggcccaggcagatcacgaactacatggtgcccagctgagcctgcggccagctccaccacgagcccctgcacgcctgctgctccaaggactgccccctggcaccacgccccagcgcttggagcagcatgtccaggccttgctgcgggcctcggggctcccagtacagccttgctgtgccttggccagcccccggccagaccgggctctggtccagttgcccaagcccctttctgaggcagatgtccgtgtcctggaggagcaggcccagaatctgggcctggaggggaccttggtgtccctggcccgggttccccaggcccgagcggtgcgtgtggtgggggatggtgcctctgtggacctgctgttgctggagttgtacctggagaatgagcgccgcagtggtggggggcccctggaggacctgcaacgcctacccgggcccctgggcactgttgcctccttccagcagtggcaagtggcagaacgagtgttgcagcaggagcaccggttgcagggctcagagctgagccttgtcccccactacgacatcctggagcccgaggagctggctgagaacaccagtggaggggaccacccgtccacccaggggcctagggctaccaagcatgctctcctgaggaccggagggttggtgacggctctgcagggtgcagggactgtgacaatgggctctggcgaggaaccagggcagtcaggggcctctctgaggacaggtcccatggtgcagggtagagggattatgacaacaggctctggccaggaaccagggcagtcagggacctctctgaggacaggtcccatggggtctctgggacaggcagagcaagtcagctcgatgcccatggggtctctggaacatgaggggctggtaagcctgaggcctgtggggttgcaggaacaggaggggcccatgagcctggggcctgtggggtctgcaggcccagtggagacctctaaggggttgctggggcaggagggcctggtggaaattgccatggactcaccagagcaagaggggctggtgggtcccatggagatcaccatggggtctctggagaaggcagggcctgtgagcccaggatgtgtgaagctggcagggcaggagggcctggtggagatggtgctattgatggagccaggggcgatgcgcttcctgcagctctaccatgaggaccttcttgcgggcctgggagacgtcgctctcttgccacttgaagggccggatatgactggctttcggctctgtggagcccaggcttcctgccaggcggctgaggagtttctgcggagcctgctgggcagcattagctgccatgtgttgtgcctggagcacccgggcagcgccaggtttctcctgggcccagaagggcagcaccttctccaggggctggaggctcagttccagtgtgtctttgggacagagcgcctggccacagccacgttggacacaggccttgaagaggtggaccctaccgaggccctcccagtgctccctggcaacgcccacaccctgtggaccccagacagtacaggtggtgaccaggaggacgtgagcctggaggaggtccgagaactgctggccaccctggagggcctagacctagacggggaggactggctgcctcgggagctggaggaggaagggcctcaggagcagccagaggaggaggtgaccccaaggcatga

SEQ ID NO: 98135 - DNA, 1013 bp, Homo Sapiens
aaaaggagtccaccaagccctctgtcccaacccgcctggtttccagcaaggtgagtaacacctgagtcccactgacgaggcagctctccgtccggtctccatcaaacatgttcttcagaagctgctccacacagtcgtgcgactccagcgctgtgaggagcgggtctggctccagagcctcttgcagctgactgccctggtctctgcccagcctaactatgtcacagagagtctgagaagcatttgactgcctatcttcatcctggctcgggtggatcaactccacaagcctctggatgaccttctcttcattcagccagtgcaggacgtcctgccggagcccggctggctccacacagctgaccaggcgcagcagcaggtccataagcgctgaggtgccgatgtgcttcaacaccaggctgatgaacttgtccttcttcttcaaaaacgtaatcacctgttcggtttttcttgcaatgagattgccaatggtcttgctgaaaaaactggcgagcagaggattgagaggcggctcatggtccaagaagtcgtacaggaggctcagcaggctctcgtccccaccgaggcggtcgctgatctgcggcacatcacaagtcagaagctcacaggctgtgtttggatatttgaagcggaccttctcctccatgtccaggggcggatcctgtgtgatgaggctcaccagctcctccatgcactgctgcctgcacaggaagtccagcagcttctggttctgagccttacactcctgcaagatgtcatcttcatccattaactcctgcagcgtcacatgctccttgtccagcagcttgtcaacatgggacgtggtgttcaagtcaaacttccagaacatcgtgacggccgcagagccaaggctaaatgaaaggaacttgaagttcagcttctttcctttttcaggatggcatatccgtcagacagaagtagacttctgtagcgaaatctcttgtttaaatcctagctgataatataaggtg

SEQ ID NO: 98136 - DNA, 1150 bp, Homo Sapiens
  misc_feature (1058)..(1058): n is a, c, g, or t
agagtatgaagtcgaccgcgcgccgaattcggcacgaggagcgatcggagtgccgcccgcggccccgagtcggtctcgagccgccggccggccgtgccggtgtccgtaggcgctgcgccctcggccgggcccatgtgtgtgcggcccgcccgaggccgcccgggctttgcctccaccagcgccctggcctccgctcgggcctccacacgggcctccgaagagctgccgcgacgcccggcccgcagggcaggtaaagagattataaatcttccactgaatgaaaaaaattttcttaaagctgcatatactccaagaaaaaaaccacaaatgtttttctgttttgcctgaatacatgatttaaacaagagatttccacagaagctctgcggccgtcacgatgttctggaagtttgacttgaacaccacgtcccatgttgacaagctgctggacaaggagcatgtgacgctgcaggagttaatggatgaagatgacatcttgcaggagtgtaaggctcagaaccagaagctgctggacttcctgtgcaggcagcagtgcatggaggagctggtgagcctcatcacacaggatccgcccctggacatggaggagaaggtccgcttcaaatatccaaacacagcctgtgagcttctgacttgtgatgtgccgcagatcagcgaccgcctcggtggggacgagagcctgctgagcctcctgtacgacttcttggaccatgagccgcctctcaatcctctgctcgccagttttttcagcaagaccattggcaatctcattgcaagaaaaaccgaacaggtgattacgtttttgaagaagaaggacaagttcatcagcctggtgttgaagcacatcggcacctcagcgcttatggacctgctgctgcgcctggtcagctgtgtggagccagccgggctccggcaggacgtcctgcactggctgaatgaagagaagtcatccagaggcttgtggagttgatcacccgagcaagatgagatagcagtcaatgctctcaactcctgtgactagttagctggcagaacangcatcactgcagagctctgagcagaccctctccacgctgatccagatggtgacactcgagactgtgagaacgacgaactctctctggacagt

SEQ ID NO: 98137 - DNA, 1043 bp, Homo Sapiens
agggggagagagtatgaagtcgacggcgcgccgaattcggcacgaggggcgcacgcacaggagcctgcactctgcgtcccgcaccccagcagccgcgccatgagccggagtctcttgctccggttcttgctgttcctgctcctgctcccgccgctccccgtcctgctcgcggacccaggggcgcccacgccagtgaatccctgttgttactatccatgccagcaccagggcatctgtgtccgcttcggccttgaccgctaccagtgtgactgcacccgcacgggctattccggccccaactgcaccatccctggcctgtggacctggctccggaattcactgcggcccagcccctctttcacccacttcctgctcactcacgggcgctggttctgggagtttgtcaatgccaccttcatccgagagatgctcatgcgcctggtactcacagtgcgctccaaccttatccccagtccccccacctacaactcagcacatgactacatcagctgggagtctttctccaacgtgagctattacactcgtattctgccctctgtgcctaaagattgccccacacccatgggaaccaaagggaagaagcagttgccagatgcccagctcctggcccgccgcttcctgctcaggaggaagttcatacctgacccccaaggcaccaacctcatgtttgccttctttgcacaacacttcacccaccagttcttcaaaacttctggcaaaatgggtcctggcttcaccaaggccttgggccatggggtagactcggcacatttatggagacaatctggagcgtcagtatcaactgcggctcttaaaggatgggaaactcaagtaccaggtgctggatgggagaaatgtacccgcctcggtagaagaggcgcctgtgttgatgcctaccccgaggatcccgcccagagccgatgggtgtgggccggagtgttgggctgatcctggggtccatctgtatgccagctcgggtcgttgagccaacgttgtttacctggtgaggtggggccccactg

SEQ ID NO: 98138 - DNA, 1112 bp, Homo Sapiens
gtgtcttccttagggcagggcattggatctccatgatagcgaagtttccagccctttttttgccctgttagatcagtttggaagatgatatcaagagcattactcttggtttcaatatttagaggcccagggaatccatgaccacagtaaggaccaaattgccgatctcctgcaacaaaaactaaactgtcaaggcagtttcccgctgagtcagctgcttccacatcaaaatcttctctccgcaaggtcaccaccacttggaaccctttctccaaccggatctggtattcacaccttgagttctctggatatggtttgggataattgggacttgcaatctccccaatcagtgcagtgaatacatccccactgcaattaactccgcaattcttcatgtcatcatggaggaaatattccggggggcaggagcagaagtaaccaccaatgaaattgttgcagaagtggctacaagggacatctacaaaatctgtgcattcatttatgtctgtggcaacatagtatgcagcaaaccccgtaaaacgctcttcattggaaaagtctgacttaaagatcacctggagtttgttgtatgggacttggaactcttccacaattggagagtggggattgttactgctcctctgtccacagagcctcccttcttcagtgtctcctgagattatctgcactgagtcatacgcacagttctctgacagctcaatgtccagatgggtgaagtagaggtgaatcccatacccttcaggaacttctatgtcccaagatttctctacctcactgggatatgcctgaggatagttaggggacaggatctccccatacatggtaggctcagcataaacccatgccaaaagtgaaaacaggacaatgcaccacatctctggcgatttgtccaccctggtgagctgcctgtctcttggtcctggctttctgcacctccggactttggagccttcagaagctggtaggagcaagtgggtcagttccctctctcctgccagtgggcatgctgggcaacccctctggcccccagggacagcagcacagggccttgacgctccctctgcaggaacctccggccagcctccctgtcc

SEQ ID NO: 98139 - DNA, 840 bp, Homo Sapiens
  misc_feature (723)..(723): n is a, c, g, or t
  misc_feature (768)..(768): n is a, c, g, or t
  misc_feature (782)..(782): n is a, c, g, or t
ggggagagagtatgaagtcgaggcgcgccgaattcggcacgaggggagcgtcaaggccctgtgctgctgtccctgggggccagaggggttgcccagcatgcccactggcaggagagagggaactgacccacttgctcctaccagcttctgaaggtgacactgagccccaggtgacgccgcaccaccaaagaaggtgcttgtgtttgtcagacaaatacagccaggcctgccaccccttaggctccaaagtccggaggtgcagaaagccaggaccaagagacaggcagctcaccagggtggacaaatcgccagagatgtggtgcattgtcctgttttcacttttggcatgggtttatgctgagcctaccatgtatggggagatcctgtcccctaactatcctcaggcatatcccagtgaggtagagaaatcttgggacatagaagttcctgaagggtatgggattcacctctacttcacccatctggacattgagctgtcagagaactgtgcgtatgactcagtgcagataatctcaggagacactgaagaagggaggctctgtggacagaggagcactaacaatccccactctccaattgtggaagagttccaagtcccatacaacaaactccaggtgatctttaagtcagacttttccaatgaagagcattttacggggtttgctgcatactatgttgccacagacataaatgaatgcacangatttgtagatgtcccttgtagccacttctgcaacatttcatggntgggtacttctgcntctgcccccccgatattttctcatgatgacatgaagatttgcgagttattgcagtggg

SEQ ID NO: 98140 - DNA, 797 bp, Homo Sapiens
  misc_feature (36)..(36): n is a, c, g, or t
  misc_feature (124)..(124): n is a, c, g, or t
catgagaatattcggggcagacagagtacacaatgnttgtgcagagtgctacaggacattacaaatctgtgcatcattatgtctgtgcaacatagtagcagcaaacccgtaaacgctcttcatnggaaaagtctgactaaagatcacctgagtttgttgtatgggacttgaactcttccacaattggagagtggggattgttactgctcctctgtccacagagcctcccttcttcagtgtctcctgagattatctgcactgagtcatacgcacagttctctgacagctcaatgtccagatgggtgaagtagaggtgaatcccatacccttcaggaacttctatgtcccaagatttctctacctcactgggatatgcctgaggatagttaggggacaggatctccccatacatggtaggctcagcataaacccatgccaaaagtgaaaacaggacaatgcaccacatctctggcgatttgtccaccctggtgagctgcctgtctcttggtcctggctttctgcacctccggactttggagcctaaggggtggcaggcctggctgtatttgtctgacaaacacaagcaccttctttggtggtgcggcgtcacctggggctcagtgtcaccttcagaagctggtaggagcaagtgggtcagttccctctctcctgccagtgggcatgctgggcaacccctctggcccccagggacagcagcacagggccttgacgctccctctgcaggaacccctcgtgccgaattcggcgcgccgcgacttcatactctctcaaacaag

SEQ ID NO: 98141 - DNA, 858 bp, Homo Sapiens
catccatagcagacatccatcatatcgatttagtctctgagatatcgggcaggcgagtacacatgaatgtgcgagtgtacaggacattacaaattggcatcattagtctgtgcacatgtagcagcaacccgtaaatgctctcatggaaaatctgactaaagatcacctgagtttgtgtatgggacttgaactcttccacaatggagagtggggatagttactgctcctctgtccacagagcctcccttcttcagtgtctcctgagattatctgcactgagtcatacgcacagttctctgacagctcaatgtccagatgggtgaagtagaggtgaatcccatacccttcaggaacttctatgtcccaagatttctctacctcactgggatatgcctgaggatagttaggggacaggatctccccatacatggtaggctcagcataaacccatgccaaaagtgaaaacaggacaatgcaccacatctctggcgatttgtccaccctggtgagctgcctgtctcttggtcctggctttctgcacctccggactttggagcctaaggggtggcaggcctggctgtatttgtctgacaaacacaagcaccttctttggtggtgcggcgtcacctggggctcagtgtcaccttcagaagctggtaggagcaagtgggtcagttccctctctcctgccagtgggcatgctgggcaacccctctggcccccagggacagcagcacagggccttgacgctccctctgcaggaacctccggccagcctccctgtcctggttctgttcataagattccctacccgagtgtgcacctcgtgccgaatcggcgcgcctcgacttcatactc

SEQ ID NO: 98142 - DNA, 839 bp, Homo Sapiens
atcccacggcaaaactccagcatatcgcatctcatctctgagaattcgggggcaagcgagtacacatgaatgtgcgagtgtacaggacattcaaatctggcatcattagtctgggcactagtagcagcaaccccgaaacgctctcatggaaagtctgacttaagatcaccggagttgttgtatgggacttggaatcttccacaattgagagtggggattgttactgctcctctgtccacagagcctcccttattcagtgtctcctgagaatatctgcactgagtcatacgcacagttctctgacagctcaatgtccagattgggtgaagtagaggtgaatcccatacccatcaggaacttctatgtcccaagatttctctacctcactgggatatgcctgaggatagttaggggacaggatctccccatacatggtaggctcagcataaacccatgccaaaagtgaaaacaggacaatgcaccacatctctggcgatttgtccaccctggtgagctgcctgtctcttggtcctggctttctgcacctccggactttggagcctaaggggtggcaggcctggctgtatttgtctgacaaacacaagcaccttctttggtggtgcggcgtcacctggggctcagtgtcaccttcagaagctggtaggagcaagtgggtcagttccctctctcctgccagtgggcatgctgggcaacccctctggcccccagggacagcagcacagggccttgacgctccctctgcaggaacctccggccagcctccctgtcctgcctcgtgccgaattcggcgcgccgtcgacttcatactcttccgcccc

SEQ ID NO: 98143 - DNA, 799 bp, Homo Sapiens
gagtatgaagtcgacggcgcgccgaattcggcacgaggggacagggaggctggccggaggttcctgcagagggagcgtcaaggccctgtgctgctgtccctgggggccagaggggttgcccagcatgcccactggcaggagagagggaactgacccacttgctcctaccagcttctgaaggtgacactgagccccaggtgacgccgcaccaccaaagaaggtgcttgtgtttgtcagacaaatacagccaggcctgccaccccttaggctccaaagtccggaggtgcagaaagccaggaccaagagacaggcagctcaccagggtggacaaatcgccagagatgtggtgcattgtcctgttttcacttttggcatgggtttatgctgagcctaccatgtatggggagatcctgtcccctaactatcctcaggcatatcccagtgaggtagagaaatcttgggacatagaagttcctgaagggtatgggattcacctctacttcacccatctggacattgagctgtcagagaactgtgcgtatgactcagtgcagataatctcaggagacactgaagaagggaggctctgtggacagaggagcagtaacaatccccactctccaattgtggaagagttccaagtcccatacaacaaactccaggtgatctttaagtcagacttttccaatgaagagcattttacggggtttgctgcatactatgttgccacagacataaatgaatgcacagattttgtagatgtcccttgtagccaacttctgcacattttcttgggtgt

SEQ ID NO: 98144 - DNA, 798 bp, Homo Sapiens
  misc_feature (704)..(704): n is a, c, g, or t
taggggggaagagtatgaagtcgacggcgcgccgaattcggcacgaggagaaccaggacagggaggctggccggaggttcctgcagagggagcgtcaaggccctgtgctgctgtccctgggggccagaggggttgcccagcatgcccactggcaggagagagggaactgacccacttgctcctaccagcttctgaaggtgacactgagccccaggtgacgccgcaccaccaaagaaggtgcttgtgtttgtcagacaaatacagccaggcctgccaccccttaggctccaaagtccggaggtgcagaaagccaggaccaagagacaggcagctcaccagggtggacaaatcgccagagatgtggtgcattgtcctgttttcacttttggcatgggtttatgctgagcctaccatgtatggggagatcctgtcccctaactatcctcaggcatatcccagtgaggtagagaaatcttgggacatagaagttcctgaagggtatgggattcacctctacttcacccatctggacattgagctgtcagagaactgtgcgtatgactcagtgcagataatctcaggagacactgaagaagggaggctctgtggacagaggagcagtaacaatccccactctccaattgtggaagagttccaagtcccatacaacaaactccaggtgatctttaagtcagacttttccnatgagagcttttacggggttgctgcatctatgttccacagacataatgatgcacagatttgtaatgtccttgtagcacttctgcacattcatgg

SEQ ID NO: 98145 - DNA, 917 bp, Homo Sapiens
  misc_feature (737)..(737): n is a, c, g, or t
aggggggagagagtatgaagtcgacggcgcgccgaattcggcacgaggagacatgcacactcgggtagggaatcttatgaacagaaccaggacagggaggctggccggaggttcctgcagagggagcgtcaaggccctgtgctgctgtccctgggggccagaggggttgcccagcatgcccactggcaggagagagggaactgacccacttgctcctaccagcttctgaaggtgacactgagccccaggtgacgccgcaccaccaaagaaggtgcttgtgtttgtcagacaaatacagccaggcctgccaccccttaggctccaaagtccggaggtgcagaaagccaggaccaagagacaggcagctcaccagggtggacaaatcgccagagatgtggtgcattgtcctgttttcacttttggcatgggtttatgctgagcctaccatgtatggggagatcctgtcccctaactatcctcaggcatatcccagtgaggtagagaaatcttgggacatagaagttcctgaagggtatgggattcacctctacttcacccatctggacattgagctgtcagagaactgtgcgtatgactcagtgcagataatctcaggagacactgaagaagggaggctctgtggacagaggagcagtaacaatccccactctccaattgtggaagagttccaagtcccatacaacaaactccaggtgatcttaagtcagacttttccnatgaagagcgtttacggggttgctgcatactatgttgcacagacataatgatgcacgatttgtaatgtcctgtagcactctgcacatttcatgtggtactctgctctgccccgatattctcagagactgagatgcgagtatgcatggagatcctgctgtgggatgcatcataccacttca

SEQ ID NO: 98146 - DNA, 947 bp, Homo Sapiens
taggggggagagagtatgaagtcgacggcgcgccgaattcggcacgaggcctgtgctgctgtccctgggggccagaggggttgcccagcatgcccactggcaggagagagggaactgacccacttgctcctaccagcttctgaaggtgacactgagccccaggtgacgccgcaccaccaaagaaggtgcttgtgtttgtcagacaaatacagccaggcctgccaccccttaggctccaaagtccggaggtgcagaaagccaggaccaagagacaggcagctcaccagggtggacaaatcgccagagatgtggtgcattgtcctgttttcacttttggcatgggtttatgctgagcctaccatgtatggggagatcctgtcccctaactatcctcaggcatatcccagtgaggtagagaaatcttgggacatagaagttcctgaagggtatgggattcacctctacttcacccatctggacattgagctgtcagagaactgtgcgtatgactcagtgcagataatctcaggagacactgaagaagggaggctctgtggacagaggagcagtaacaatccccactctccaattgtggaagagttccaagtcccatacaacaaactccaggtgatctttaagtcagacttttccaatgaagagcattttacggggtttgctgcatactatgttgccacagacataaatgaatgcacagattttgtagatgtcccttgtagccacttctgcacaatttcattggtggtactctgctctgcccccggaatatttctcatgatgactgagaattgcgagtatgcagtgggatgatcacgcatgatgggaatgcagtccatatccaacattcaagatcagtggatcaatcgtgagaggtcagtgggactcgaaaatgatgacctacacgatgctgatatgtcgacgatgctcgc

SEQ ID NO: 98147 - DNA, 748 bp, Homo Sapiens
tatggggggagagtatgaagtgacggcgcgccgaattcggcacgagggccctgtgctgctgtccctgggggccagaggggttgcccagcatgcccactggcaggagagagggaactgacccacttgctcctaccagcttctgaaggtgacactgagccccaggtgacgccgcaccaccaaagaaggtgcttgtgtttgtcagacaaatacagccaggcctgccaccccttaggctccaaagtccggaggtgcagaaagccaggaccaagagacaggcagctcaccagggtggacaaatcgccagagatgtggtgcattgtcctgttttcacttttggcatgggtttatgctgagcctaccatgtatggggagatcctgtcccctaactatcctcaggcatatcccagtgaggtagagaaatcttgggacatagaagttcctgaagggtatgggattcacctctacttcacccatctggacattgagctgtcagagaactgtgcgtatgactcagtgcagataatctcaggagacactgaagaagggaggctctgtggacagaggagcagtaaaaatcccactctccattgtgaagagttccagtcccatacacaactccagtgatctttagtcagacttcccatgaggagcattacgggttgctgctactaggtgcccgaactattgatgccaaattggaaagtccttgacccatcggacattcatggggtacttcgcctgccccgaa

SEQ ID NO: 98148 - DNA, 1656 bp, Homo Sapiens
  misc_feature (1450)..(1450): n is a, c, g, or t
  misc_feature (1517)..(1576): n is a, c, g, or t
  misc_feature (1599)..(1609): n is a, c, g, or t
ccggtactggccaggttgcctctaccgacctaagtagcgaggcctgggtggcgaattcggcacgagggttgctgagcgggcctgggacagcgggtcgcggcacctccggcctgcgcgtgtctaatccgtctgtcgggtcccgaaagagctaagccgagcctgcgccggacgggtgggctggactgagagaattctctgagctggtgacaggtgccacaggcactggggatctcaccagaaaggaaccgacggagctaggggccagcgagatggcggacgaggccttagctgggctggatgagggagcccttcggaagctgctggaggtcacagcagatctggcagagcggcggcgcatccgctcagccatccgggaactgcagcggcaggagctggagcgcgaggaggaggccctggcatccaagcgtttccgtgccgagcggcaggacaacaaggagaactggctgcactctcagcagcgggaagctgagcagcgggctgccctggcacggctggcagggcagctggagtccatgaacgatgtggaggaattgactgcactgttgcgaagcgctggtgagtatgaggagcgcaagctgatccgagctgccatccgccgtgtacgggctcaggagattgaggctgccaccttggctgggaggttgtacagcgggcgtcccaacagtggctcaagagaggacagcaaggggctagcggcacacaggctggaacagtgtgaggtgccagagcgagaggaacaggaacagcaggcagaggtttcaaagccaacccccacccctgaaggcaccagccaggatgtgaccacagtgacactcctgctgcgagccccacctgggagcacatccagctcacctgcctcacccagcagttcacccacccctgcctctcctgagcctccattggagcctgccgaggcccagtgccttacagctgaggttccaggcagcccagagccaccccccagcccacccaagaccaccagccctgagcctcaggagtctccaacgctccccagcactgagggccaggtggtcaacaagcttctgtctggccccaaagagacccctgctgcccagagccccaccagaggcccctctgacaccaagagagcagacgtggctggaccccgaccctgccaacgctccctgtcggtgctcagcccccgccaaccagcccagaaccgagagtccaccccccttgccagcggaccttcctcattccagcgggctggctctgtgcgggatcgtgtccacaagttcacatctgattctcctatggctgctaggctccaggatggcacaccccaggctgccctaagtcccctgacccccgcaaggctcctgggcccctccctcaccagcaccacccctgcctcctcctccagcgggctcctcctctcgggggcccaagtgatacctccctcccgggntcagcaaaggagcaaccaaggaagtagccccagccccctgggcccagccttcgaaagctggcccccnnnnnnnnnnnnnnnnnnnnnnnnnnnnnnnnnnnnnnnnnnnnnnnnnnnnnnnnnnnntttggaaaaaaccagaaggccannnnnnnnnnncctgtggtgggccaacccgttttcccagaaagagaaagccccctgga

SEQ ID NO: 98149 - DNA, 1506 bp, Homo Sapiens
agagtatgaaagtcgacggcgcgccgaattcggcacgaggtccatcccatccacggtcttcccagggcactgagtctgggaaggattctgagcaagagaatgggctgggcagcctgagtcccagtgatctgaacaaaaggttcatcctcagttttctccatgcccatgggaagctgtttacccggattgggatggagacattccctgcagtggctgagaaggtcctcaaggagttccaggtgttactgcagcacagcccctctcccattggaagtacccgcatgctgcagcttatgaccatcaatatgtttgcagtacacaactcccagctgaaagactgcttctcggaggagtgccgctctgtgatccaggaacaagccgcagctctgggcttggccatgttttctctactggtccgccgctgcacctgcttacttaaggagtccgccaaagctcagctgtcctctcctgaggaccaggatgaccaagacgacatcaaggtgtcttcctttgtcccggacctgaaggagctgctccccagtgtcaaagtctggtcagattggatgctcggctacccggacacctggaatcctcctcccacatccctggatctgccctcgcatgttgctgtggatgtatggtcgacgctggctgatttctgtaacatactgactgcagtgaatcagtctgaggtgccactgtacaaggacccggatgatgacctcacccttcttatcctggaagaggatcggcttctctcgggctttgtccccttgctggctgcccctcaggacccctgctacgtggagaaaacctcggataaggttattgcagctgactgcaaaagggtcacagtgctgaagtattttctggaagccctttgtggacaagaagagcctctgctggcattcaagggtggaaagtatgtgtcagtggcacccgtcccagacaccatgggaaaggaaatgggaagccaagagggaacacgactggaagatgaggaggaggatgtggtgattgaagactttgaggaagattcagaggctgaaggcagcggaggcgaggatgacatcagggagcttcgggccaagaagctggctctggccaggaagatagctgagcagcagcgtcgccaggaaaagatccaggctgtcctggaggaccacagtcagatgaggcagatggagctcgaaatcagacctttgttcctcgtaccagacaccaacggcttcattgaccacctggccagtctggcgcggctgctggagagcaggaagtacatcctggtggtgcccctcatcgtgatcaatgagctggacggcctggccaaggggccaggagacagaccaccgggcttgggggctacgcccgtgtggtacaaggagaaggcccgcaagtccatcgaggttcctcgagcagcgaattccagagttcggactctttggcctgcgagcccttgaccagccgtgggcaatgaacttcgaatccatcccctttccgcagtgg

SEQ ID NO: 98150 - DNA, 899 bp, Homo Sapiens
tgtgagaagtgcagtgactgggtactactggagattcaactgcaggcacctcctccgattgccaaccctgtccgtgtcctggaggttcaagttgtgctgttgttcccaagacaaaggaggtggtgtgcaccaactgtcctactggcaccactggtaagagatgtgagctctgtgatgatggctactttggagaccccctgggtagaaacggccctgtgagactttgccgcctgtgccagtgcagtgacaacatcgatcccaatgcagttggaaattgcaatcgcttgacgggagaatgcctgaagtgcatctataacactgctggcttctattgtgaccggtgcaaagacggattttttggaaatcccctggctcccaatccagcagacaaatgcaaagcctgcaattgcaatctgtatgggaccatgaagcagcagagcagctgtaaccccgtgacggggcagtgtgaatgtttgcctcacgtgactggccaggactgtggtgcttgtgaccctggattctacaatctgcagagtgggcaaggctgtgagaggtgtgactgccatgccttgggctccaccaatgggcagtgtgacatccgcaccggccagtgtgagtgccagcccggcatcactggtcagcactgtgagcgctgtgaggtcaaccactttgggtttggacctgaaggctgcaaaccctgtgactgtcatcctgagggatctctttcacttcagtgcaaagatgatggtcgctgtgaatgcagagaaggctttgtgggaaatcgctgtgaccagtgtgaagaaaactatttctacaatcggtcttggcctggctgccaggagcgctgttaccgctgtaaaggataaggtgcgttagagtgaagctccagtaattagaga

SEQ ID NO: 98151 - DNA, 1071 bp, Homo Sapiens
agagtatgaagtgacggcgcgccgaattcggcacgagggaaaacctggctctgagaacggcttcagcctcgcaggtgctgcctttacccatgacatggaagttacattctacccgggagaggagacggttcgtatcactcaaactgctgagggacttgacccagagaactacctgagcattaagaccaacattcaaggccaggtgccttacgtcccagcaaatttcacagcccacatctctccctacaaggagctgtaccactactccgactccactgtgacctctacaagttccagagactactctctgacttttggtgcaatcaaccaaacatggtcctaccgcatccaccagaacatcacttaccaggtgtgcaggcacgcccccagacacccgtccttccccaccacccagcagctgaacgtggaccgggtctttgccttgtataatgacgaagaaagagtgcttagatttgctgtgaccaatcaaattggcccggtcaaagaagattcagaccccactccggtgaatccttgctatgatgggagccacatgtgtgacacaacagcacggtgccatccagggacaggtgtagattacacctgtgagtgcgcatctgggtaccagggagatggacggaactgtgtggatgaaaatgaatgtgcaactggctttcatcgctgtggccccaactctgtatgtatcaacttgcctggaagctacaggtgtgagtgccggagtggttatgagtttgcagatgaccggcatacttgcatcttgatcaccccacctgccaacccctgtgaggatggcagtcatacctgtgctcctgctgggcaggcccggtgtgttcaccatggaggcagcacgttcagctgtgcctgcctgcctggttatgccggcgatgggcaccagtgcactgatgtagatgaatgctcagaaaacagatgtcaccctgcagctacctgctacaatactcctggttccttctcctgccgttgtcaacccggatattatggggatggatttcagtgcatacctgactccacctcaagcctgacaccctgtga

SEQ ID NO: 98152 - DNA, 867 bp, Homo Sapiens
  misc_feature (793)..(793): n is a, c, g, or t
  misc_feature (842)..(842): n is a, c, g, or t
ggcgaagagtatgaagtcgaggcgcgccgattcggcacgagggtagaagctgcactggggccgggactcggaggcgcgctgcgtgagccggccgcagagccatggcgggcggggaagaccgcggggacggagagccggtatcagtggtgaccgtgagggtgcagtacctggaagacaccgaccccttcgcatgtgccaactttccggagccgcgccgggcccccacctgcagcctggacggggcgctgcccttgggcgcgcagatacccgcggtgcaccgcctgctgggagcgccgctcaagttggaggattgtgctctgcaagtgtctccctccggatactacctggacaccgagctgtccctggaagagcagcgggagatgctggagggcttctatgaagagatcagcaaagggcggaagcccacgctgatccttcggacccagctctctgtgagggtcaacgctatcttggaaaagctgtatagctccagtggtcctgagctccgccgctccctcttctcactgaagcagatcttccaggaggacaaagacctggtgcctgaatttgtgcattcagaggggctgagctgcctgatccgtgtgggtgctgctgccgaccacaactaccagagctacatccttagagcgctcggccagctgatgctctttgtggatggaatgctggggggtggtggcccacagtgacactattcagtggctgtacacattgtgtgccagcctgtcccgcttggtggtgaagacagccctgaagctgctgttggtgtttgtanaatactccgaaaacacgcaacgctgttcatccgtgcagtgaactctgtnggcagcaccacggtgctcctccctg

SEQ ID NO: 98153 - DNA, 812 bp, Homo Sapiens
cgactctgcagaaggaacaaagcaccctccccactgggctcctggttgcagagctccaagtcctcacacagatacgcctgtttgagaagcagcgggcaagaaagacgcaagcccagaggccctgccatttctgtgggctcaggtccctactggctcaggcccctgcctccctcggcaaggccacaatgaaccggggagtcccttttaggcacttgcttctggtgctgcaactggcgctcctcccagcagccactcagggaaagaaagtggtgctgggcaaaaaaggggatacagtggaactgacctgtacagcttcccagaagaagagcatacaattccactggaaaaactccaaccagataaagattctgggaaatcagggctccttcttaactaaaggtccatccaagctgaatgatcgcgctgactcaagaagaagcctttgggaccaaggaaactttcccctgatcatcaagaatcttaagatagaagactcagatacttacatctgtgaagtggaggaccagaaggaggaggtgcaattgctagtgttcggattgactgccaactctgacacccacctgcttcaggggcagagcctgaccctgaccttggagagcccccctggtagtagcccctcagtgcaatgtaggagtccaaggggtaaaaacatacagggggggaagaccctctccgtgtctcagctggagctccaggatagtggcacctggacattgcactgtcttgcagaaccagaagaaggtggagttcaaaatagacatcgtgggtgctagctttccagaagggctcca

SEQ ID NO: 98154 - DNA, 725 bp, Homo Sapiens
  misc_feature (452)..(452): n is a, c, g, or t
  misc_feature (541)..(541): n is a, c, g, or t
gatgaagtcgaggcgcgccgaattcggcacgagggaacaagcaccctccccactgggctcctggttgcagagctccaagtcctcacacagatacgcctgtttgagaagcagcgggcaagaaagacgcaagcccagaggccctgccatttctgtgggctcaggtccctactggctcaggcccctgcctccctcggcaaggccacaatgaaccggggagtcccttttaggcacttgcttctggtgctgcaactggcgctcctcccagcagccactcagggaaagaaagtggtgctgggcaaaaaaggggatacagtggaactgacctgtacagcttcccagaagaagagcatacaattccactggaaaaactccaaccagataaagattctgggaaatcagggctccttcttaactaaaggtcccatccagctgaatgatcgcgctgaactcangaagaagccctttggaaccaagaaactttccctgatcatcagaatcttaaatagaaactcaatacttactctgtgattggagacagaangagagtgcattgctatgtcggatgctgcaatttgacccactgctcagggcaacctgacctaactggaaacccctgtataccctactgcagaagatccaggtaaactaagggggaaacctccttgtcccggatccaaaatggaccgatcctgtttgaaacaaaaggatataaaaccggtctttca

SEQ ID NO: 98155 - DNA, 862 bp, Homo Sapiens
  misc_feature (174)..(174): n is a, c, g, or t
catgctgctcgctcacgaggaggaaggatcactgtcctctttataatagtgagctctgaagtgcacacagtcttttgactcacttctctgtttgcagacaggcagtcaagtgcatatctggagctcagcgagacacgagaggtctccccccctgttgttttacccctggactcntacatgcactgaggggtactaccaggggggctctccaaggtcagggtcaggctctgccctgaagcaggtggtgtcagagttggcagtcaatccgaacactagcaattgcacctcctccttctggtcctccacttcacagatgtaagtatctgagtcttctatcttaagattcttgatgatcaggggaaagtttccttggtcccaaaggcttcttcttgagtcagcgcgatcattcagcttggatggacctttagttaagaaggagccctgatttcccagaatctttatctggttggagtttttccagtggaattgtatgctcttcttctgggaagctgtacaggtcagttccactgtatccccttttttgcccagcaccactttctttccctgagtggctgctgggaggagcgccagttgcagcaccagaagcaagtgcctaaaagggactccccggttcattgtggccttgccgagggaggcaggggcctgagccagtagggacctgagcccacagaaatggcagggcctctgggcttgcgtctttcttgcccgctgcttctcaaacaggcgtatctgtgtgaggacttggagctctgcaaccaggagcccagtggggagggtgctttgttccttctcctcgtgccgaattcggcgcgccgtcgacttcatactctttcaacacaag

SEQ ID NO: 98156 - DNA, 842 bp, Homo Sapiens
  misc_feature (702)..(702): n is a, c, g, or t
ggggcgaaagagtatgaagtcgacggcgcgccgaattcggcacgaggagcaccctccccactgggctcctggttgcagagctccaagtcctcacacagatacgcctgtttgagaagcagcgggcaagaaagacgcaagcccagaggccctgccatttctgtgggctcaggtccctactggctcaggcccctgcctccctcggcaaggccacaatgaaccggggagtcccttttaggcacttgcttctggtgctgcaactggcgctcctcccagcagccactcagggaaagaaagtggtgctgggcaaaaaaggggatacagtggaactgacctgtacagcttcccagaagaagagcatacaattccactggaaaaactccaaccagataaagattctgggaaatcagggctccttcttaactaaaggtccatccaagctgaatgatcgcgctgactcaagaagaagcctttgggaccaaggaaactttcccctgatcatcaagaatcttaagatagaagactcagatacttacatctgtgaagtggaggaccagaaggaggaggtgcaattgctagtgttcggattgactgccaactctgacacccacctgcttcaagggcagagcctgaccctgaccttggagagcccccctggtagtagcccctcagtgcaatgtaagagtccaggggtaaaacatacanggggggaagccctctcgtgtctcactggactcaagatatgcactggactgcctgtctgcaaaccaagaagtgagtaaataacacgggtgtactttcaaagctcactaactataagaagggaagtgattccttcatgctaa

SEQ ID NO: 98157 - DNA, 1193 bp, Homo Sapiens
gagacccatgtggaggcacgggagcaccagcctgagccggaggaggagaccgagcaacccacactggactacaatgaccagatcgagagggaggactatgaggactttgagtacattcggcgccagaagcaacccaggccacccccaagcagaaggaggaggcccgagcgggtctggccagagccccctgaggagaaggccccggccccagccccggaggagaggattgagcctcctgtgaagcctctgctgcccccgctgccccctgactatggtgatggttacgtgatccccaactacgatgacatggactattactttgggcctcctccgccccagaagcccgatgctgagcgccagacagacgaagagaaggaggagctgaagaaacccaaaaaggaggacagcagccccaaggaggagaccgacaagtgggcagtggagaagggcaaggaccacaaagagccccgaaagggcgaggagttggaggaggagtggacgcctacggagaaagtcaagtgtccccccattgggatggagtcacaccgtattgaggacaaccagatccgagcctcctccatgctgcgccacggcctgggggcacagcgcggccggctcaacatgcagaccggtgccactgaggacgactactatgatggtgcgtggtgtgccgaggacgatgccaggacccagtggatagaggtggacaccaggaggactacccggttcacaggcgtcatcacccagggcagagactccagcatccatgacgattttgtgaccaccttcttcgtgggcttcagcaatgacagccagacatgggtgatgtacaccaacggctatgaggaaatgacctttcatgggaacgtggacaaggacacacccgtgctgagtgagctcccagagccggtggtggctcgtttcatccgcatctacccactcacctggaatggcagcctgtgcatgcgcctggaggtgctggggtgctctgtggcccctgtctacagctactacgcacagaatgaggtggtggccaccgatgacctggatttccggcaccacagctacaagggacatgcgccagctcatgaaggtggtgaacgaggagtgccccaccatcacccgcatttacaggctgggcaaagagctcacgaggcctcaagatctatgccatggagatctcagacaacctg

SEQ ID NO: 98158 - DNA, 653 bp, Homo Sapiens
tacgaaggaatttcatcttaagaaaaaataatattacaaaaccaaataagataatatacaagccattcaaaggtattgtgaataagcagtatatatctcaaaaagtaaaaagcagtaggcaactaagaattagaaataaaacctttaagagtcaaaagacacgtaaatcatatcacggaacctagaagcctacagactccagtgaagtatcataggaattttattgactgcagattcatgtctcgctcaggagaatgaatcacagtaagaggtaatagatgggggcggcttaattgggattcggctccaggcatagcgaagcagcccatctagctttcagcctccgtgcggagaaatttcccacctctcaggcagcggtggatggggcacagcgcgaccacgcagcggcggcggcggcagcttccatcaccgggaggatgcccgggcggacagcgcaggcaacccccgccgctccgcagcatccgactggaccaaaggaccccgaacacacagctctaggcaaggaaacccaggtgtgcagcactgcccgacccgacccaacccgcccccggtaccagcgcttctggccaacgaggtatttaagcaaagaaagaccccgccgcagccgccgccgccgcgcgaaagcggcgccc

SEQ ID NO: 98159 - DNA, 891 bp, Homo Sapiens
  misc_feature (880)..(880): n is a, c, g, or t
aggaggaggtggaggttcagcatctgcagactggctctctgttatctccaggcttcccttagactttgttctcctcagctctccctggatgccattatccatgatcttcacagttatctgcccatctgaaacttctggtcgaaggaagggaggtctgattacaattgtcttctctttctttggtctccccaaatacctgggtgctggagaactgcagagaacacggctgacattgttacagcagccattggtgaaggggttcacacctccccggaatttacccgtaacctgttcattggttgtgcgtcccctggccaccagaaccacgtgaaatcccgtgaggccagctacagggatgaagaataagccagccacacacattactgccattgtgacagccgtgcggacccctgagagttcctctatgtggtagaggacataaaggaggccaaagccaaacacacccataatgtgggctgtcagggaaaggaggaaaaggaaaaaataacggtagttccggcgaccaatacagttattcacccaggggcagtgatgatcaaattcctccacacagttgtcacagacactgcagtgggaacatcgagggggacggtaaaagcggcaggtggcacaccatttcatgcgcacctggatgccctttatctccactgttttgtaaaggggagctcggaaatcatcttccttgtcctcatcctcctcagctcgagggaaaatccctgggtccatgaaggtggccatgctgaagttggccaacacaaagagaaacataattgcattgtagatgggcactgcaggtgacacatacaggcttagtcctggacacgtaaaggcaaagaagagtgtcgtagctccccactanggaagatggcg

SEQ ID NO: 98160 - DNA, 1763 bp, Homo Sapiens
  misc_feature (23)..(23): n is a, c, g, or t
gggctcgatgaaggggaaggtcnggggtcccccacactcatgctcttcatctgcagcaccaacgagtccagggccaccctccgaatttctgggacggggtagggggcgaaggcatcatagtccgattcggcatagaggcggaagcagactccggggcccgtgcggcccgcccggcccttccgctgctctgcgctggcctgactaatccagaactcctgcagccgttgcagcttggcctgcggatcgtagctcatctccttcacctttccggaatctactacgaagcggatcccgtcaatggtgactgaggtctcagcaatgttggtggagaggatgcatttccggactccagggggtgccacatcaaataccttgtcctggtcggccacagacagggcgctgtgcagtggcagtaccacccagcgctgggtgtggctggcataggtctgggcagcctccagcacggcgctgatctccgccatgccgctgaggaagacgaggaggtcaccccgctcctcaggcgggtacttgtggtcaatggactccagcaccctcaggaaaggccgcgggtccagcttctctgacttggacgtggtcggctccgcctcctgcggctggtacacaaccgtgatggggaacagcctcccagggcacctgtaccacaggggcattgctgaaatagctggagaagagcgagatgttgatggtggccgacatgaggatgaccttgaggtcaggccgcgtgggcaacaggcgctggaggacgcccaggaggaaatcgttgtggagatgccgctcatggacttcatccacaatcaggacctcatactggggcaggctgggttcccgctggatttgtcgcaggagcagccccactgtcaggaatacaatcttggtggccgccgaacgtgtgctctcaaagcggatctggtagccgacctgtgagccatactgactgaggctctcaaagcccacacgcttggccagtgagatgcaggcgatccgccggggctgggtgcacgccacatgactgaagccagcagccagcaggtactggggcacctgagtggacttgccacagccggtgtcaccggccactaccaccacctggtgctccttcagcgtctgcaggatgcggttcccatactgggcgatggggagggctgcccgctcacgctgcagcttggccagacgcccaaatgcctgcttctggccaaagtccaggtagtgcaacagggctcggcggaactcagccactctctccgcgggcaagtgcctgcccagtccctgagagccccgcgtggcagggccaagaacagagaggttgatgcggtaacgtgggtcgtaagtgcgaggtaggtcggccagcgctgggatgctgtgcttgggctgtccagggtctttctcctccttcctggaggtcttgagattctggaatctctgcaggcgttcaaagaaggtccaaaacttctgacattcctcagaaccctgacggatgtaatcctcttcacggaagaaggcatcttccaagaggcgacgcgtctctggacaattccagtcccatttctccaaggcctcttcctcgctgggagcccagtggtggtctcggcgatccctgccctcccttgttctaggaggaggcatgttactaatccacaataggagtctcagttctgatcacccaaaacaaatattctcatccattccccacctgcaacaatcctcgtgccgaattcggcgcgccgtcgacttcatactctgtc

SEQ ID NO: 98161 - DNA, 845 bp, Homo Sapiens
caccacttgggctccttcagcgtctgcaggatccggttcccatactggcgatgggaaggctgcccgctcacgctgcagcttggccagacgcccaaatgcctgcttctggcccaaagtccaggtagtgcaacagggctcggcggaactcagccactctctccgcgggcaagtgcctgcccagtccctgagagccccgcgtggcagggccaagaacagagaggttgatgcggtaacgtgggtcgtaagtgcgaggtaggtcggccagcgctgggatgctgtgcttgggctgtccagggtctttctcctccttcctggaggtcttgagattctggaatctctgcaggcgttcaaagaaggtccaaaacttctgacattcctcagaaccctgacggatgtaatcctcttcacggaagaaggcatcttccaagaggcgacgcgtctctggacaattccagtcccatttctccaaggcctcttcctcgctgggagcccggtggtggtctcggcgatccctgccctcccttgttctaggaggaggcatgttactaatccacaataggagtctcagttctgatcacccaaaacaaatattctcatccattccccacctgcaacaatttaagaggccagtgcctgcaatagagaactactttctcttcaaagagctaatttttcctcctggtcacggcacaggaccaccacagatgataaagtggccagaggcctgcttgagctggtgacacaaagggtacctcatgacatctgcagtgatctctgggatggacacaagttcattctgggttttcaggcctggattcacacgccgcgaacgccttaacttccgg

SEQ ID NO: 98162 - DNA, 694 bp, Homo Sapiens
  misc_feature (583)..(583): n is a, c, g, or t
  misc_feature (620)..(620): n is a, c, g, or t
tccgcaaggactccgaggtctccccagttctcccggcagccggaccctcccagcctcggccgccgggccgccctccgcatcccaagcccgcctcccgtgcctccccgggggcgcaccggcagcgaggagcggctcggcgagggcgcgcagcggcggcccaggcccaggccttggggctggggctgagggggtgagagcaggcgcggccggcgggcaaggggaaccggacgaggcgcagaggaacaagaaaaagaaaaagaaggtgtcctgcttttccaacatcaagatcttcctggtgtccgagtgcgccctgatgctggcgcagggcacggtgggcccctacctggtgagcgtcctgaccaccctggagcgtaggttcaacctgcaaagcgctgacgtgggtgtgatcgctagcagcttcgagatcgggaacctggcgctcatcctcttcgtgagctacttcggggcacgcgggcaccggccgcgcctgatcggctgcggcggcatcgtcatggcgctgggcgcgctgctgtcggcgctgcccgagttcctgacccaccagtacaagtacgatgcgggcganatccgctggggcgccgagggccgcgacgtctgcgcanccaacggctcgggcggcgacgaggggcccgaccccgacctcatctgccgcaaccggacggctaccaacatgatg

SEQ ID NO: 98163 - DNA, 1269 bp, Homo Sapiens
  misc_feature (72)..(83): n is a, c, g, or t
  misc_feature (159)..(159): n is a, c, g, or t
  misc_feature (165)..(196): n is a, c, g, or t
  misc_feature (304)..(313): n is a, c, g, or t
  misc_feature (335)..(343): n is a, c, g, or t
  misc_feature (362)..(422): n is a, c, g, or t
ccccctgggaggggtgcttgcacataatgggggggcgaccaccccgccccaggtgtgggggtgagaaagaannnnnnnnnnnntttcccaccccgggttcaacagttataggtggatcggcggttggggttacccccccgcggtggtttttggtctttnggagannnnnnnnnnnnnnnnnnnnnnnnnnnnnnnnacaccgggggtggggtgtattattaaaaaaaggggggcctttgttgcccccccgcccaaaaagtgggtgggtcccccaggggggaaaaaggttgtgtgttgggccccnnnnnnnnnnccccacagggggccccccagtnnnnnnnnnataaaatttaaggggtgannnnnnnnnnnnnnnnnnnnnnnnnnnnnnnnnnnnnnnnnnnnnnnnnnnnnnnnnnnnnataaaatttccgtttcctttaaggggaggtgccccgggaaatttggattccaaggttgcgaagtgaaaaaggggggttcttttttgtttcccaccagggggttctttcccgggtagccacccagtgccaggggaccctcaaacgcccaatgcctatattgctttatccatgttgcttagggaaaacgttgttagctgaaaagggtttcctcttctcggtaaactcatgagccagacagatgcgccagccaaagggaggcacctggtagcccatagctttaccctcataggaaaccatcagctgcccagagtcctccggattgcagcagtccgtctcttttgggggtcggctgtcttcgggactcttacagtctgtaacctgcacatccttggtgccgccagtctcttcagggcaataaacttgtggatcctctttggcacagcttatctgctccgaggctgggacgccggttcccatgttccctggatcctgggtccccatgacctcgatggcgccaagtcccgagccctcggatactaagtatctcgccagcctattccagatgcgggcgccggtcgttgttaggtatcgtcccggagggccggtcgttggggaaagcttaaatgagctggtgtttcagtggagccggggagctcttgcttcagtgggggcggcgacagcaaagaagccgccttgggctctccttcggttgtctctgtaggtcctggacgggaagggtcgggcctcgtcgtcattgagccgacgattagctcgcccggccaaagggcgacatcccgggaattccggaccggtaccagcttgttttatttttccaggggggtagaaa

SEQ ID NO: 98164 - DNA, 1140 bp, Homo Sapiens
  misc_feature (1127)..(1127): n is a, c, g, or t
cataggaagcgaggcctgggtggcgatttcggcacgagggggcgcccgagccggctgctcgtgccatggagcggagtcccgacgtgtcccccgggccttcccgctccttcaaggaggagttgctctgcgccgtctgctacgaccccttccgcgacgcagtcactctgcgctgcggccacaacttctgccgcgggtgcgtgagccgctgctgggaggtgcaggtgtcgcccacctgcccagtgtgcaaagaccgcgcgtcacccgccgacctgcgcaccaaccacaccctcaacaacctggtggagaagctgctgcgcgaggaggccgagggcgcgcgctggaccagctaccgcttctcgcgtgtctgccgcctgcaccgcggacagctcagcctcttctgcctcgaggacaaggagctgctgtgctgctcctgccaggccgacccccgacaccaggggcaccgcgtgcagccggtgaaggacactgcccacgactttcgggccaagtgcaggaacatggagcatgcactgcgggagaaggccaaggccttctgggccatgcggcgctcctatgaggccatcgccaagcacaatcaggtggaggctgcatggctggaaggccggatccggcaggagtttgataagcttcgcgagttcttgagagtggaggagcaggccattctggatgccatggccgaagagacaaagcagaagcaactttctggccgacaagaagatgaaacagctcacagaggagacggaagtgctgggcacatgacatccgagcggctgcagatggagatgaaggaggacgacgtttcttttctcatgaaacacaagagccgaaaacgccgactcttctgcaccagggaaccagaaccagcccagccccgcaggcttatcaatgcctgcaagtacctgggctccctgcagtaccgcgtctggaagaagatgcttgcatctgtggaatctgtacccttcagctttgaccccaacaccgcagctggctggctctccgtgtctgacgacctcaccagcgtcaccaaccatggctaccgcgtgcaggtggagaacccggaacgcttctcctcggcgccctgcctgctgggctcccgtgtcttctcacanggctcgcacgcct

SEQ ID NO: 98165 - DNA, 1495 bp, Homo Sapiens
  misc_feature (1451)..(1451): n is a, c, g, or t
gggggagagagtatgaagtcgaggcgcgccgaattcggcacgaggacgcactgtctgcactggcccgggccagcaccaagcagtgccagcaggagatcgccaatgtggtgtgcctgcaccaggctgggagcctcatgcccaaggctgtgccccggcactgtcagctgactgggaagatgagccccggcatccagtgggatgagagccaagcccagcagcccatggatggccccccggtgcgaatcgcctacatgctggtggttcacggccgcgccatccgccagctgaagcgtctcctcaaggccgtttatcacgagcagcacttcttttacatccatgtggacaagcgttccgactacctgcaccgggaggtggtggagctggcccagggctatgataacgtgcgggtgacgccctggcgcatggttaccatctggggcggggccagcctcctgaggatgtacctgccgaacatgcgggacctgctaaaagtgcctggctgggcctgggacttcttcatcaacctcagtgccactgactatccaaccaggaacaatgaagaactggtggcattcctatccaagaaccgggacaagaatttcctcaagtcacatggccgggacaactccaggttcatcaagaaacagggcctggaccggctcttccatgaatgccactcacacatgtggcgcctgggcgagcggcagatcccagcaggcattgtggtggatggcggttctgactggttcgtgctgacacgcagctttgtggagtatgtggtgtacacagatgacctgcttgtggcccagctgcgccagttctacacatacacactgctcccagccgagtccttcttccacacggtgctggagaacagcctggcctgtgagaccctcgtggacaacaacctgcgggtcaccaactggaaccgcaagctgggctgcaagtgccagtacaagcacattgtggactggtgtggctgctcccccaacgacttcaagccacaggacttcctccggctgcagcaagtctccagacccaccttcttcgcccggaagttcgagtcgactgtgaaccaggaggtgctggaaatcctggacttccacctgtacggcagctacccccccggcacgccagccctcaaggcctactgggagaacacctacgacgcggctgatggccccagtgggctcagtgatgtcatgctcactgcttacacagccttcgcccgcctcagcctgcaccatgccgccactgctgcacccccaatgggcaccccactctgcaggtttgagcccaggggcttgccgtccagcgtgcacctgtatttctatgacgaacatgtccagggctacctggtgacgcaggcggtgcaaccctcagcccaggggccggcagagacgcctgagatgtggctgatgccccagggtcgctgaagctgttgggcgcantgacaaggcagccggctcagagtctggagttggccctaatggaa

SEQ ID NO: 98166 - DNA, 849 bp, Homo Sapiens
  misc_feature (825)..(825): n is a, c, g, or t
gtggcgagcgcgcgagtgcacaagctggtgcggcgctacaagctggcgattgccacggcgctggccatcctgctgctgcagggcctggtagtgtggagcttcagcggcctggaggaggacgaggcgggcgagaaaggaaggcagaggaagccacggccactggaccctggcgagggttccaaggacacagacagttcagcagggcgacggggcagcacaggcagaaggcatgggcgctggcggggccgtgctgagagcccaggagtgcccgtggccaaggtggtacgggcagtaaccagccggcagagagccagccggcgggtcccacctgccccacccccggaagccccaggccgccagaacctgagtggggcagcagctggggaggcgctggtaggggcagctggcttcccaccacacggagatacagggagcgtggagggcgccccccagcccacggacaatggcttcacccccaagtgcgagatcgtgggcaaggacgcactgtctgcactggcccgggccagcaccaagcagtgccagcaggagatcgccaatgtggtgtgcctgcaccaggctgggagcctcatgcccaaggctgtgccccggcactgtcagctgactgggaagatgagccccggcatccagtgggatgagagccaagcccagcagcccatggatggccccccggtgcgaatcgcctacatgctggtggttcacggccgcgccatccgccagctgaagcgtctcctcaaggccgtttatcacgagcagcacttcttttacatccatgtgggacaagcgttccgactacttgccaccggnagggtgggtggaaactggcccccg

SEQ ID NO: 98167 - DNA, 1694 bp, Homo Sapiens
  misc_feature (1252)..(1252): n is a, c, g, or t
tctgccttgagcctggtatctcctacaagctgcatctgaagctggtacggacagggggaagtgcccagcctgagactccctactctggacctggcctgctcattgactcgctggtgctgctgccccgtgtcctggtgctagagatgtttagtgggggtgatgctgctgccctggagcgccaggccacctttgaacgctaccaatgccatgaggagggtctggtgcccagcaagacttctccctctgaggcctgcgcacccctcctcatcagcctgtccaccctcatctacaatggtgccctgccatgtcagtgcaaccctcaaggttcactgagttctgagtgcaaccctcatggtggtcagtgcctgtgcaagcctggagtggttgggcgccgctgtgacctctgtgcccctggctactatggctttggccccacaggctgtcaagcctgccagtgcagccacgagggggcactcagcagtctctgtgaaaagaccagtgggcaatgtctctgtcgaactggtgcctttgggcttcgctgtgaccgctgccagcgtggccagtggggattccctagctgccggccatgtgtctgcaatgggcatgcagatgagtgcaacacccacacaggcgcttgcctgggctgccgtgatcacacagggggtgagcactgtgaaaggtgcattgctggtttccacggggacccacggctgccatatgggggccagtgccggccctgtccctgtcctgaaggccctgggagccaacggcactttgctacttcttgccaccaggatgaatattcccagcagattgtgtgccactgccgggcaggctatacggggctgcgatgtgaagcttgtgcccctgggcactttggggacccatcaaggccaggtggccggtgccaactgtgtgagtgcagtgggaacattgacccaatggatcctgatgcctgtgacccccacacggggcaatgcctgcgctgtttacaccacacagagggtccacactgtgcccactgcaagcctggcttccatgggcaggctgcccgacagagctgtcaccgctgcacatgcaacctgctgggcacaaatccgcagcagtgcccatctcctgaccagtgccactgtgatccaagcagtgggcagtgcccatgcctccccaatgtccagggccctagctgtgaccgctgtgcccccaacttctggaacctcaccagtggccatggttgccagccttgtgcctgccnacccaagccgggccagaggccccacctgcaacgagttcacagggcagtgccactgccgtgccggctttggagggcggacttgttctgagtgccaagagctccactggggagaccctgggttgcagtgccatgcctggtgaatgtgactcctcctggaaataaatacccctcaggtgtccaccgctttcaaacggacccttggccaacttccctccccacagggatggccctgccttcaccccaaaacagaacatgcaaataccacgccccatcccttcctgcagcgaaatcacctctttcaacttaaaatcagacactcccccacaaccgcgaacaagcaatcagacattaagcaacaagagaaacctataataaacccctacactacacgcacacatagtagtacaaaaatataaaggatagcaaagaccagcggacacac

SEQ ID NO: 98168 - DNA, 680 bp, Homo Sapiens
cgggcgactcgggctggcgccgccgaggagccaggagtccggggcctcctggcgtcactcttcgccttcaagtctttccgggagaactggcagcgggcttgggtgcgagcgctgaacgagcaggcctgcagaaacgggagctccatccaaatcgcctttgaggaggtgccccaactcccacccagagccagcatcagtcatgtgacctgcgtagaccaatctgagcataccatggtgctgcgttgccagctctctgctgaggaggtgcggttcccagtctctgtgacccagcagtcccccgctgccgtctccatggagacctaccacgtcactctgacactgccaccaacacagttggaagtcaacctggaggaaatccctggtgaggggctgctcatatcctgggccttcactgatcgcccagatctcagcctaacggtgcttcccaagcttcaggccagggagagaggtgaagaacaagtggagctctccacaattgaggaactgatcaaggatgccatagtcagcacccagccagccatgatggtcaacctcagggcttgctctgccccaggaggcctggtacccagtgagaagccacccatgatgccccaggctcagccagccatcgccagacctaaccggttattcctacggcagcttcgggcatctcacttggg

SEQ ID NO: 98169 - DNA, 1431 bp, Homo Sapiens
  misc_feature (563)..(600): n is a, c, g, or t
  misc_feature (1025)..(1025): n is a, c, g, or t
  misc_feature (1184)..(1184): n is a, c, g, or t
taggtagcgaggcctgggtggcgaattcggcacgaggtctcctcggggtcggagcaggaggcacgcggagtgtgaggccacgcatgagcggacgctaaccccctccccagccacaaagagtctacatgtctagggtctagacatgttcagctttgtggacctccggctcctgctcctcttagcggccaccgccctcctgacgcacggccaagaggaaggccaagtcgagggccaagacgaagacatcccaccaatcacctgcgtacagaacggcctcaggtaccatgaccgagacgtgtggaaacccgagccctgccggatctgcgtctgcgacaacggcaaggtgttgtgcgatgacgtgatctgtgacgagaccaagaactgccccggcgccgaagtccccgagggcgagtgctgtcccgtctgccccgacggctcagagtcacccaccgaccaagaaaccaccggcgtcgagggacccaagggagacactggcccccgaggcccaaggggacccgcaggcccccctggccgagatggcatccctggacagcctggacttnnnnnnnnnnnnnnnnnnnnnnnnnnnnnnnnnnnnnntggcctcggaggaaactttgctccccagctgtcttatggctatgatgagaaatcaaccggaggaatttccgtgcctggccccatgggtccctctggtcctcgtggtctccctggcccccctggtgcacctggtccccaaggcttccaaggtccccctggtgagcctggcgagcctggagcttcaggtcccatgggtccccgaggtcccccaggtccccctggaaagaatggagatgatggggaagctggaaaacctggtcgtcctggtgagcgtgggcctcctgggcctcagggtgctcgaggattgcccggaacagctggcctccctggaatgaagggacacagaggtttcagtggtttggatggtgccaagggagatgctggtcctgctggtcctaagggtgagcctggcagccctggtgaanatggagctcctggtcagatgggcccccgtggcctgcctggtgagagaggtcgccctggagcccctggccctgctggtgctcgtggaaatgatggtgctactggtgctgccgggccccctggtccccccgggccccgctggtcctcctggcttccctggnggctgttgggggctaagggtggaagcttggtccccaggggcccccaaggctctgaaaggtccccagggttgtgccctggtgaaccctgggcccccctgggcccccgctgggtgctgctgggccctggctggaaacccctgggggctgaatggaacaccctgggtggtaaaaggggcccaaggggcgctccctggaaattgcctggggctccctgggctttcccccgcgggcccccaaaggcctcctc

SEQ ID NO: 98170 - DNA, 974 bp, Homo Sapiens
  misc_feature (22)..(22): n is a, c, g, or t
cgcagttgcgccggacgccacngcaataccgacagtccaccaggaaaatgcagcgcagtgctcgggtcacccgcacatgagacatctgccgtaccaacaccacgatggcctcgacaaactgcaccaccagcaccgaggtcttgaccatggtccgcttgtgccggatgaaggtgtggaggcccagccagcgtaacttcatgcagagttcaaacactaccaccatcagggcaaacagctccagggtggcgtggacatagatgccaagccggagtgcggggacggcgggggcctcgcacaagggagagcaacagcagcagcagggccgtggccagctccatcaggtagaagaggtgattgtgtgcaaagaggtaggccgccagcgccttggcatccttgggatgggtgaagaacttgtcgttgttctcgccttcctggaggtagattgctgcctcttggtaattcatctcccagttgtgtgcggggctggagggggaactctcacccccagagctgagactgggggcctgggagtcgtggatggcatagctgccgccatttttgctaggtagctcttcttggcccaggccgttggagggagccagtggggcactgccaccctcatccaaggtcaggatgagcggcacgtcgtcatccaaactcacagccatgttctcttctcctgtggccctcaggatatgatatccagggcttgaaatagtctctggtttgagctccctttcaaagccactgggccaggggtgctgctcagaaactcctccattagaggcatcttacgaaaagccccagcaacccggaccgcgcgccggggtccgcaccgcgcagcctagcccgccggcgccgccgccaaaacaaaagagcccgaagctgttgcagccgccgcagccgccgaagcaaaagccacttcagccactgccctcgtgccgaattcggcgcgccgtcgacttcatactctc

SEQ ID NO: 98171 - DNA, 934 bp, Homo Sapiens
ttgggagctccctggggcatggcagacccctgggcagctccttggttgtttcctgatatgtcctgttgcctgatgaagcagggcgaggcccccgcaatgtcgcttgggcaccagatctgtgttcgaaaaagtaggtggagaaaaagctctgccgtactcgaaaaagcaacccgagtatggtcgtctttcccaatgcaacagcacaagagcttgattctggtttcccacacgcttgtagctgctgtcttgaggccattaagtaactggcttgaatcatgactatccaggtggctggggccggcagaggaatatggagccattttccccccaagagggtcaaagacaatgataatggaaaccactgtggcagcgatgatgatccaactgaccacgacggttgcgatgatgccgtttacaactgtcctgtcgcactgaacaccatctgccacccaggcagcccccagagaggcccagaccatctctggaaaaaacagcgccaggcggatgtaaagcagcttagacatagacttccgcggtccagggttacaaatcgttcctctcatgctgacacacatgatggctgacacagtacatatgacaactgccaggagaatcatgaggacgatcaagtaactgctgagcaaggctccaccagcacagtccagctttcctctgtgcatgagatacaacgtcagaatgccaatccaccacagcactcgcacgaccagctcgaagaaccctgggaagaccaagtcgtcgctggcgatggcccagcgccggccgaagagtaccatccccggcatggcgaaggtcccgtagctcgcactcaggagagaccccgcgcgccgttcaccgagaacaaaccagcaccctccggacgccgccaccaaattatcggcgctcaagcgcaaacgcagcgagggcggggacctgc

SEQ ID NO: 98172 - DNA, 1121 bp, Homo Sapiens
  misc_feature (992)..(992): n is a, c, g, or t
ggagagagtatgaagtcgacggcgcgccgaattcggcacgaggctggcaagcagggcaccgcggtgcgctgaagctagagattccgaaagggggttcgggtagttcgctccggagaagtctgagaagggtggctccggtgatcccagccctagctgtttcccatattcctttatccacctgcctttgaaggagaccagacgtccggctccgacccggccccgtgaccgggtgggtctgcgtgccccgcagtctcgtgaccaagctcctcgcgagtgatcaggcctgccctacgggtgcacccgcgggtcccaacgtgggggatccctccatccgcaaagccagggtcctaaagatcgctctgggaaaagggaaggatgccgctcttcttccggaagcggaaacccagtgaggaggctcggaaacgcctggagtaccagatgtgtttggcaaaagaagctggggcagatgacattctcgacatctctaaatgtgagctctcagagattccatttggagcttttgcaacatgcaaagttctgcagaagaaggtgctgatcgtccacacgaatcacctcacttccctgcttcccaaatcctgcagcctcctgagtctggcaaccattaaggttctagatctccacgataatcagctgacagcccttcctgacgatctggggcagctgactgccctccaggtcttaaacgtggaaaggaatcaactgatgcagctcccacgttccattgggaacctgacccagctccagactctcaatgttaaagacaacaagctgaaggagcttccagacaccgtgggggagcttcgaagcctgcgtaccctcaacatcagtggaaacgagatccagagattgccgcagatgctggctcacgttcgaaccctggagatgctgagccttgacgcctcggccatggtctacccgccgcgggaggtgtgtggtgccggcactgcggccatcttgcagttcctctgcanagagtcagggctggaatactaccccccttctcagtacttgctgccaattctggagcaagatggaatcgagaactctcgggacagccctgatgggcccacggacagattctcaagggaggagttagagtg

SEQ ID NO: 98173 - DNA, 654 bp, Homo Sapiens
  misc_feature (601)..(601): n is a, c, g, or t
  misc_feature (634)..(634): n is a, c, g, or t
gcgattcctgcggacccagctgcggcgacgccaggagaccccaagctgcatcgccgagtggaagcaactagaactccagggctgtgaaagccacaggtgggggctgagcgaggcgtggcctcaggagcggaggacccccccactctccctcgagcgccgcagtccaccgtagcgggtggagcccgccttggtgcgcagttggaaaacctcggagccccgctggatctcctggctgccacccgcaccccccgccagcctacgccccaccgtagagatgccttcttcggtgacggcgctgggtcaggccaggtcctctggccccgggatggccccgagcgcctgctgctgctcccctgcggccctgcagaggaggctgcccatcctggcgtggctgcccagctactccctgcagtggctgaagatggatttcgtcgccggcctctcagttggcctcactgccattccccaggcgctggcctatgctgaagtggctggactcccgccccagtatggcctctactctgccttcatgggctgcttcgtgtatttcttcctgggcacctcccgggatgtgactctgggccccaccgccattatgtcnctcctggtctccttctacaccttccatgagccngcctacgctgtgctgctggc

SEQ ID NO: 98174 - DNA, 846 bp, Homo Sapiens
gggagagagtatgaagtcgacggcgcgccgaattcggcacgaggcggcacgagggaactccagggctgtgaaagccacaggtgggggctgagcgaggcgtggcctcaggagcggaggacccccccactctccctcgagcgccgcagtccaccgtagcgggtggagcccgccttggtgcgcagttggaaaacctcggagccccgctggatctcctggctgccacccgcaccccccgccagcctacgccccaccgtagagatgccttcttcggtgacggcgctgggtcaggccaggtcctctggccccgggatggccccgagcgcctgctgctgctcccctgcggccctgcagaggaggctgcccatcctggcgtggctgcccagctactccctgcagtggctgaagatggatttcgtcgccggcctctcagttggcctcactgccattccccaggcgctggcctatgctgaagtggctggactcccgccccagtatggcctctactctgccttcatgggctgcttcgtgtatttcttcctgggcacctcccgggatgtgactctgggccccaccgccattatgtccctcctggtctccttctacaccttccatgagcccgcctacgctgtgctgctggccttcctgtccggctgcatccagctggccatgggggtcctgcgtttggggtcctgctggacttcatttcctacccgtcattaaagcttcactctgctgtgcctcccatcgcttggaaattagaactgcgggactcgacatccagcgtctctgcagtgtcaacttccagatgaaacagtaggacctctgggtgctctctcttcaggtaag

SEQ ID NO: 98175 - DNA, 1114 bp, Homo Sapiens
ctcgccagtgtccaggccctgcaacgcaagcatgagggcttcgagagggacattgcggctctcggtgacaaggtatactcccttggtgaaacagcagagcgcctgatccagtcccatcccgagtcagcagaagacctgcaggaaaagtgcacagagttaaaccaggcctggagcagcctggggaaacgtgcagatcagcgcaaggcaaagttgggtgactcccacgacctgcagcgcttccttagcgatttccgggacctcatgtcttggatcaatggaatacgggggttggtgtcctcagatgagctagccaaggatgtcaccggagctgaggcattgctggagcgacaccaggaacaccggacagaaatcgatgccagggctggcactttccaggcatttgagccgtttggacagcagctgttggctcacggacactatgccagccctgagatcaagcagaaacttgatattcttgaccaggagcgtgcagacctggagaaggcctgggttcagcgcaggatgatgctggatcagtgccttgaactgcagctgttccatcgggactgtgagcaagctgagaactggatggctgcccgggaggccttcttgaataccgaagacaaaggagactcactggacagcgtagaggctctgatcaaaaaacatgaagactttgacaaagcgattaacgtccaggaagagaagattgctgctctgcaggcctttgccgaccagctcatcgctgccggccattatgccaagggagacatttctagccggcgcaatgaggtcttggacaggtggcgacgtctgaaagcccagatgattgagaaaaggtcaaagctaggagaatctcaaaccctccaacagttcagccgggatgtggatgagattgaggcttggatcagtgaaaaattgcaaacagcgagtgatgagtcgtacaaggatcccaccaacatccagagcaagcaccagaagcaccaggcttttgaagcagagctgcatgccaacgctgaccggatccgtggggttatcgacatgggcaactccctcattgaacgtggagcctgtgccggcagtgaggatgctgtcaaggcccgcctggctgcct

SEQ ID NO: 98176 - DNA, 1358 bp, Homo Sapiens
  misc_feature (1287)..(1287): n is a, c, g, or t
gggcgaaagagtatgaagtcacggcgcgccgaattcggcacgaggggctctgtgactgaggcggcggcggtggcggccaagcgggatacgggcggcgggagctggggaacaggcatggacgtttccgggcaagagaccgactggcggagcaccgccttccggcagaagctggtcagtcaaatcgaggatgccatgaggaaagctggtgtggcacacagtaaatccagcaaggatatggagagccatgttttcctgaaggccaagacccgggacgaatacctttctctcgtggccaggctcattatccattttcgagacattcataacaagaaatctcaagcttccgtcagtgatcctatgaatgcactccagagcctgactggcggacctgctgcgggagccgctggaattggcatgcctcctcggggcccgggacagtctctgggcgggatgggtagccttggtgccatgggacagccaatgtctctctcagggcagccgcctcctgggacctcggggatggcccctcacagcatggctgtcgtgtctacggcaactccacagacccagctgcagctccagcaggtggcgctgcagcagcagcagcaacaataagcagttccagaaccatcagcaagcggcgctacagcagcagcaccagctagcagcaaccacaacaagctccacggcttcatcactattgcccttggctacacacactttccaatgccataatcgcacccaccagtaagcctacttccacccgacaggtcagcagcagccacggtagccatccaaattaaagttggcactccattcccacatccaaccaaaccgaaaacatccacccagccacacatccaatctgtgcaagcgaaattattcacacgactggcaagttcccaacaaacaggcccagacggcaaccagccaacccacctgacacattctatccaccaagctaatcaatgtaatggttttttacaaggcaccccactcccccctattttctgggtaaggcaccccccacagtaatgattaagcctaataatcctctatgcgcctaccctcccaaagtgtcttccttatccacccaaccaaactcttgctccgccccaaaatgtgtgattcatccatccacgatagtaccacccacacctggttcgcgcccataacccacaactggcccccctatagaaagccctttcccacggccagggcctttctaaaaaatacagtactcagcttccaatacatatcacagccccacataaaattgagccgtgngaggaagctccgaaggcgacttttaggggggggagcacaccaaagggggagcgacaaaacacgggttacag

SEQ ID NO: 98177 - DNA, 1248 bp, Homo Sapiens
  misc_feature (263)..(293): n is a, c, g, or t
  misc_feature (308)..(329): n is a, c, g, or t
  misc_feature (788)..(848): n is a, c, g, or t
gggaagtataaataagaagggctcggcagcccactcggtgcttcccggggtggggaggaggcaggaggcggctgcgcggggctggcgcgggcaagggcggaggacgggcgcacgcgggccggggccagctgctcgcgctcggctcgggggcggcggcgcgggaggagcgggctgcgccagccagaggggccgccgggggagcgccagcacctgcccgcgcctggcgggcttcttccctctcctgcgcgcagccaccgccgcannnnnnnnnnnnnnnnnnnnnnnnnnnnnnnggtggcctccgctcnnnnnnnnnnnnnnnnnnnnnncgctggcccgcggcgccccggcccggcccgcagccggggggcaggcctcggagctggtggtgcccacgcggttgcccggcagcgcgggcgagctcgcgctccacctgtccgccttcggcaagggcttcgtgctgcgcctggcgcccgacgacagcttcctagcgcccgacttcaagatcgagcgcctcgggggctccggccgggcgaccgggggcgagcgggggctgcgcggctgcttcttctccggcaccgtgaatggggagcccgagtcgctggcggcggtcagcctgtgccgcgggctgagcggctccttcctgctggacggcgaggagttcaccatccagccgcagggcgcggggggctccctggctcagccgcaccgcctgcagcgctggggtcccgccggagcccgccccctcccgcgaggacccgagtgggaggtggagacgggagagggtnnnnnnnnnnnnnnnnnnnnnnnnnnnnnnnnnnnnnnnnnnnnnnnnnnnnnnnnnnnnncagaaggcgctagcgagccgccaccgcccctgggggccacgagtaggaccaagcggtttgtgtctgaggcgcgcttcgtggagacgctgctggtggccgatgcgttcatggctgccttctacggggccgactctgcttaaccacattctgtacgtaatgtctgtggctgccctaatcttcaatcctccaacttctaaattctatttaacttgaggtggtaatgtgctgattagtaaaatgataatgtgcttaaagtgtcgacatgtgggctactctgcttatttcttaattgctcagtttcaacatcatttccgcacatattgtaaactgctctgttataattatttttgtatggtgttctttgttttcactgtatttaactttttgtgtatctttgcaa

SEQ ID NO: 98178 - DNA, 946 bp, Homo Sapiens
  misc_feature (257)..(318): n is a, c, g, or t
cgggggcgagcgggggctgcgcggctgcttcttctccggcaccgtgaatggggagcccgagtcgctggcggcggtcagcctgtgccgcgggctgagcggctccttcctgctggacggcgaggagttcaccatccagccgcagggcgcggggggctccctggctcagccgcaccgcctgcagcgctggggtcccgccggagcccgccccctcccgcgaggacccgagtgggaggtggagacgggagagggtcagaggnnnnnnnnnnnnnnnnnnnnnnnnnnnnnnnnnnnnnnnnnnnnnnnnnnnnnnnnnnnnnncgctagcgagccgccaccgcccctgggggccacgagtaggaccaagcggtttgtgtctgaggcgcgcttcgtggagacgctgctggtggccgatgcgtccatggctgccttctacggggccgacctgcagaaccacatcctgacgttaatgtctgtggcagcccgaatctacaagcaccccagcatcaagaattccatcaacctgatggtggtaaaagtgctgatcgtagaagatgaaaaatggggcccagaggtgtccgacaatggggggcttacactgcgtaacttctgcaactggcagcggcgtttcaaccagcccagcgaccgccacccagagcactacgacacggccatcctgctcaccagacagaacttctgtgggcagggagggctgtgtgacacccttggtgtggcagactccgggacttttgtgaccccacaaaactgctcgtgatcaagattaggggctcaggcggccaaccctggccctgaataggggattttctacttgcccaaaaaaccaacccttgaagggtttttgtcttgggaaaacatgttggcccttttttcccaaacaactccctgtcccggcccttctttcaaatttgggggggaaaattttttacct

SEQ ID NO: 98179 - DNA, 875 bp, Homo Sapiens
tggcaatctacaaggtggcagcgatcgcccaaatgctcatgtgtcagtgacagccagcgccggagctgtggagggcaggcgcagcaggcatcagagacagttcgtgccgcgtccagaactcgtgagatacatgcgtgcaggggaccaggcagcgtctgttcagtggacgaacagcggtgccatcacgtggtgcttgcccatgggcccgaagagccgtgtgcagggcttggagtcgtcgtggggcatgctgaggacgtgccctagttcatgggccagggtgtgggccgcctggagcccctcatcctcgatcacggagcagcttttgttggggtcacaaatggtcccgatgtctgccacacccagggtgtcacacagcccctcctgcccacagaagttctgtctggtgagcaggatggccgtgtcgtagtgctctgggtggcggtcgctgggctggttgaaacgccgctgccagttgcagaagttacgcagtgtaagccccccattgtcggacacctctgggccccatttttcatcttctacgatcagcacttttaccaccatcaggttgatggaattcttgatgctggggtgcttgtagattcgggctgccacagacattaacgtcaggatgtggttctgcaggtcggccccgtagaaggcagccatggacgcatcggccaccagcagcgtctccacgaagcgcgcctcagacacaaaccgcttggtcctactcgtggcccccaggggcggtggcggctcgctagcgccttctgcctcctcttcttggctctcctcctcgctgtcctcctggtggtctcctctctcctgccctcgtgccgaattcggcgcgccgtcgacttcatactctctccccc

SEQ ID NO: 98180 - DNA, 900 bp, Homo Sapiens
  misc_feature (769)..(769): n is a, c, g, or t
cttgtgttagagagtatgaagtcgacggcgcgccgaattcggcacgaggggagacgctgctggtggccgatgcgtccatggctgccttctacggggccgacctgcagaaccacatcctgacgttaatgtctgtggcagcccgaatctacaagcaccccagcatcaagaattccatcaacctgatggtggtaaaagtgctgatcgtagaagatgaaaaatggggcccagaggtgtccgacaatggggggcttacactgcgtaacttctgcaactggcagcggcgtttcaaccagcccagcgaccgccacccagagcactacgacacggccatcctgctcaccagacagaacttctgtgggcaggaggggctgtgtgacaccctgggtgtggcagacatcgggaccatttgtgaccccaacaaaagctgctccgtgatcgaggatgaggggctccaggcggcccacaccctggcccatgaactagggcacgtcctcagcatgccccacgacgactccaagccctgcacacggctcttcgggcccatgggcaagcaccacgtgatggcaccgctgttcgtccacctgaaccagacgctgccctggtccccctgcagcgccatgtatctcacagagcttctggacagcgggcacggagactgtctcctggatgcccctgctgcggccctgcccctcccacaggcctcccgggccgcatggcctgtacagctggacagcagtgcagcagatctttgggcggatttcgcactgcnccacactctgctcagagtcgcgccagcttgtgcacatgatggctgagcctgtgccacagatgcactgcctggtgacgcccgtgcgctgcactcgtcaagactgtacgagagaatgaagcacggcagagcgc

SEQ ID NO: 98181 - DNA, 866 bp, Homo Sapiens
cgggggagagagtatgaagtcgacggcgcgccgaattcggcacgaggggcagaaggcgctagcgagccgccaccgcccctgggggccacgagtaggaccaagcggtttgtgtctgaggcgcgcttcgtggagacgctgctggtggccgatgcgtccatggctgccttctacggggccgacctgcagaaccacatcctgacgttaatgtctgtggcagcccgaatctacaagcaccccagcatcaagaattccatcaacctgatggtggtaaaagtgctgatcgtagaagatgaaaaatggggcccagaggtgtccgacaatggggggcttacactgcgtaacttctgcaactggcagcggcgtttcaaccagcccagcgaccgccacccagagcactacgacacggccatcctgctcaccagacagaacttctgtgggcaggaggggctgtgtgacaccctgggtgtggcagacatcgggaccatttgtgaccccaacaaaagctgctccgtgatcgaggatgaggggctccaggcggcccacaccctggcccatgaactagggcacgtcctcagcatgccccacgacgactccaagccctgcacacggctcttcgggcccatgggcaagcaccacgtgatggcaccgctgttcgtccacctgaaccagacgctgccctggtccccctgcagcgcatgtatctcacagagctctggacggcgggcaggagatgtctcctgaagccctgctgggcctgccctccaaagcctccggtcgatgccctgacactgacacatgagcgatttgggcgattcgccgcccaacttgtagagctgccattggccagtggtaacctgcacaaagcc

SEQ ID NO: 98182 - DNA, 970 bp, Homo Sapiens
tgaagagtgcacctggccagcacagggctcttgcgctggtagtcgaagaggccaaagccatgactggtgccaaaagccacgaggctccactcggtgtggagtgtgacagcggttacagcagctggcggcaggcactgcaccaggacacggggctggaagccagcaggccagggcagcggccccgtgcgtgggctcagccgctcgtggcccttccatgtgaagccctcgcggtcctggaggaggtctatgatggccacgctgaccgcctgctccaccggcacatcactaagctccagtaccagcacctggcctgcagtgccagccaccaccatctgggctgtatacttgcagagagcaaccttctgcacgccaagccggggatcgtcactgtagggatcgaagcagcccaccttgcggaagggtggccagtcgtcctcggcagcctgggccaggcggtcagcgtgctcacagtctgtctggaagaggccagctgtgctcagcttatagagcggccgcagcgccacacccgaggcatcccagaacctcacggtgccgtcctcagggcccgtcagcagcagccctcgctgtgacggctcctgggccaggtttcggcccccagtgatgggccagctcaaggcactggagacaggctgggggctctgctgctcgccagcgctcacaatgcgggcccacagcttggcggggacactggccacgtgggccgagcaagtgattgcagaggagtgcagcggggccaggtatggggcaggcacagctggccagccaggagtctgcaggtccagcaccaccagctcctcttccagcagcacagccagggcctgggggtcatcaaattcatcctcgggccgtgtgctgtgcactgtgaagaagtcgatgatgcgggaagtgaagtccagcgtcaccaatgtctccctcgtgccgaattcggcgcgccgtcgacttcatactc

SEQ ID NO: 98183 - DNA, 843 bp, Homo Sapiens
gggaaggcctgggcccgtggagtcactccaggacacctgcgggaccccacaaatgattggcattggctacagccggggcctgctggtcatctggaaccaggcctcgcagtgtgtggaccacatcttcctggggaaccagcagctggagagcctatgctgggggcgtgatagcagcactgtggtcagctcacacagcgatggcagctatgctgtctggtctgtggatgccggcagcttcccaacgctgcagcccacggtagccaccacaccttacggcccctttccctgcaaggccattaacaagattctgtggcggaactgtgaatctgggggccactttatcatcttcagcggtggcatgccccgtgccagctatggtgaccgccactgtgtaagtgtgcttcgagccgagacattggtgacgctggacttcacttcccgcatcatcgacttcttcacagtgcacagcacacggcccgaggatgaatttgatgacccccaggccctggctgtgctgctggaagaggagctggtggtgctggacctgcagactcctggctggccagctgtgcctgccccatacctggccccgctgcactcctctgcaatcacttgctcggcccacgtggccagtgtccccgccaagctgtgggcccgcattgtgagcgctggcgagcagcagagcccccagcctgtctccagtgccttgagctggcccatcactgggggccgaaacctggcccaggagccgtcacagcgagggctgctgctgacgggccatgaggacggcaccgtgaggtctgggatgctcgggttgtgacgctgggggcatctagagtatcc

SEQ ID NO: 98184 - DNA, 1327 bp, Homo Sapiens
  misc_feature (52)..(105): n is a, c, g, or t
  misc_feature (206)..(206): n is a, c, g, or t
  misc_feature (315)..(409): n is a, c, g, or t
  misc_feature (1075)..(1101): n is a, c, g, or t
gggagcccagaaaaagaccatgtggtttaaaaaatgtttaaatcaatctgtnnnnnnnnnnnnnnnnnnnnnnnnnnnnnnnnnnnnnnnnnnnnnnnnnnnnnngatgaagctggagagagaggaaccagttgccaaggtagagagctgcccgctcctgccctctggatgacataggggacatcaacaagacggctgccaacctngagaagtcaccaaaccacaaaaataaccttacagccttcagggaaagactaccagctctgtctttctaccctctaatttaacaatgcataagagtcaataaaccctacnnnnnnnnnnnnnnnnnnnnnnnnnnnnnnnnnnnnnnnnnnnnnnnnnnnnnnnnnnnnnnnnnnnnnnnnnnnnnnnnnnnnnnnnnnnnnnnccatttcctcacatgtccacgagatgcttgggttgcttttccaggggctagtttggcttttccaagtgggttttctttggagaatctgatgccatgcaattggcatgacacctgccatgccactatctttggcatccatggggcttatatgagacatgaagcattggctcagaagtagagggagaagaggaacccagttcccttgacttcccttttgagagcacacgttctgctgggtagctcaaatgccagcctctgtcatgagaaggtatagccccatcttgatagaagagttactccgagctttatcatggaccagaggaaaaccagaaaactgaaaacattcctctgtcttgtggccagtttggcctttcactgcactattctgatggtgcctgactgaatccaaatatcctagctggctcttactatttttcacaaatgagtattcacatataagagatgaacatccatgtgagatcatcccaatcagaatataagactcaaggagtttgacttggtggccaatacctgccttccaaagagatcctacctttgcagatttgctcctttcccattgccttgaaggtctggcaatccctgttctttcatttgacaagtacttactgagtactcactatatacaaatcattaggttaaaacagnnnnnnnnnnnnnnnnnnnnnnnnnnnagacctgggcccttaagtttacagtccagcaggaaatgttaacctccattcagctacgcccccttgttatctagaccttcgggatcatctaagaaatgtagctgaaacccaaggagccagctagcaacagaagcttttgattagatgcacaatacagtgggggcagaagatctgggatcattaagatggcgcctgaaggactatggaatcttgcttgtcaggaatg

SEQ ID NO: 98185 - DNA, 558 bp, Homo Sapiens
gtgactacacacttctgtatctgcaccacggcctgaccagcgacaacaagccctccctcagctggctccgtgatgcctaccgggagtttgaccgcaagtacaagaagaacatcaaggccttgtacatcgtgcatccaaccatgttcatcaaaactctgctcatcctcttcaagcccctcatcagcttcaagttcgggcagaagatcttctatgtgaattacctgagcgagctgagcgagcacgtgaagctggagcagctggggatccctcgccaagtgctcaaatatgacgacttcctgaaatccacacagaagagccccgcgacagcccccaagcccatgccccaacggacccccctgcccaaccagcagtttggagtctcgctgcagcacctccaggagaagaatccagagcaggagcccattcccattgtactcatggagactgttgcctacttacaggcccacgctctcaccaccgagggcatcttccggaggtcggccacaccctaagtggtccgggaagtgcatcataagtacaacatgggggctgcctgtg

SEQ ID NO: 98186 - DNA, 925 bp, Homo Sapiens
tagcggcgtatgcacttccgatcaagaatgcctgttgatcttctgagtgtgagagatcaattctgttgcagggggcgggggcatggctgggccgtcgcgggctctctgtgtgattcagaagtctcatattgagcacttgcgaggatcccagctgctccagcttcacgtgctcgctcagctcgctcagtaattcacatagaagatcttctgcccgaacttgaagctgatgaggggcttgaagaggatgagcagagttttgatgaacatggttggatgcacgatgtacaaggccttgatgttcttcttgtacttgcggtcaaactcccggtaggcatcacggagccagctgagggagggcttgttgtcgctggtcaggccgtggtgcagatacagaagtgtgtagtcactctccacgtactggtccagggtgtgcttcaggtaccccaggagcttgctgtggtcgagctggtggctggggggcattcgacaggcactaaacacaatgatcttccgcccatacttgtcatctcctgccacctccacgatctggtgccgggcgatgtcatagtatgggtcatcccacttcaggtgtgtgacaagttccggggagctgcttttggagtcatctgacttggggaagtcaggcatttcatccgagggccagttcttctcatcgatggaggccagcttcagctggttcagagcctcgctggtgtcatccaaggtcagatcatcctgcagctctgagagcggatccatggccaagcctgtcccagacagccttgccctgcagaaccttaagagaaaccgcgctcgggcactgctccctctgccacgcctgtcaaggctcggcaaacatccggctccgcggtggaacgggaaccgccccctcccgctctcttctatcccccacggctaaggtggg

SEQ ID NO: 98187 - DNA, 905 bp, Homo Sapiens
cttctcattctcttagttgtctgggctccaaggtatgggtgtgtctatcagctgcgaactgccccagatgaagggccagatactggaagtcatccagaccccacactccctggctgccggctggctccatcctgtatgttttctggagtttccgcataacctcaaggtaccgattgtacaccttgaagaccaatagctatttggtcatccacccggagcaccccaatcttgcagagacagcagaggaaagcagcgaaggctgcctcatgccctgtgccgtagtcaatgcgcgtggagttccccactgactcctttaggtaaacagccacctcaggcacagcagctgccagatgggtagggaccactgtggccaccaagttttctgcttcctcatcaagtttggcataccaggtcctgtatgccttattcccaaaccgagagggctggtccactggaggagtctcatcaatccacctgtccagcgtgttgagaagagcgactagtttctcaatggcctcggagactctgtactcgaaggtcagcttcttccccttcacaccttcgttgagggtaaggatgaatccgatgtagtcagcgtatgcctgagaacgcttccatttgcccatgtctggaactgtgtggatctccttttttggaatgatgaagttctgagtggctggaggggcctcctctgaagaatctggcggcggctgccgctcgccctcagccatcttgctccggccaggagccgacccggatgcttgcagtcccctctcgcctttcactcttgcacccacccttcctctccccggctccaccaaaggctccgagcttcctgaagacaagtgagcgccggccggctataaccgaaaaccgagagatcccgggaattccggaccggtcca

SEQ ID NO: 98188 - DNA, 544 bp, Homo Sapiens
cccaggtatgctggcataggcagacacggtgccaccagcaatgaggtgccgaggccctctgggtgtgcctgctacagccgtcaggcactggtaggtgtcatcaatcatggagcggcgggcagcatcgtccgggtccccccgggctgtgaggaaggtgctaagaatgggaatcttgttcaggacttggggatgggcggccagttcagggtcactgcagaagcaggccagcagggccacacccaaagcccgcagaacatggtcagggcagccatccggcgcctccttggtggtcaggagacgattggggaaggtgaagccgacagcatcgaagatccgccgccgagttttggcatctatgtcacctgctttgactgccttggtcacctatagggggtatgtgctatcatcaggatgaaaggaagaagtgggaaagactgtccctctcctgcatcctggggcactgaggactagcaagatgaggttatgcaacaggactcatctgaggtcatttcatccagctccttttttctccttagaggcagat

SEQ ID NO: 98189 - DNA, 1261 bp, Homo Sapiens
tgggtggtgcatgcgctcgcatcatggcggctgagtgggcttctcgtttctggctttgggctacgctgctgattcctgcggccgcggtctacgaagaccaagtgggcaagtttgattggagacagcaatatgttgggaaggtcaagtttgcctccttggaattttcccctggatccaagaagttggttgtagccacagagaagaatgtgattgcagcattaaattcccgaactggggagatcttgtggcgccatgttgacaagggcacggcagaaggggctgtggatgccatgctgctgcacggacaggatgtgatcactgtgtccaatggaggccgaatcatgcgttcctgggagactaacatcgggggcctgaactgggagataaccctggacagtggcagtttccaggcacttgggctggttggcctgcaggagtctgtaaggtacatcgcagtcctgaagaagactacacttgccctccatcacctctccagtgggcacctcaagtgggtggaacatctcccagaaagtgacagcatccactaccagatggtgtattcttacggctctggggtggtgtgggccctcggagttgttcccttcagccatgtgaacattgtcaagtttaatgtggaagatggagagattgttcagcaggttagggtttcaactccgtggctgcagcacctgtctggagcctgtggtgtggtggatgaggctgtcctggtgtgtcctgacccgagctcacgttccctccaaactttggctctggagacggaatgggagttgagacagatcccactgcagtctctcgacttagaatttggaagtggattccaaccccgggtcctgcctacccagcccaacccagtggacgcttcccgggcccagttcttcctgcacttgtccccaagccactatgctctgctgcagtaccattatggaacgctgagtttgcttaaaaacttcccacagactgccctagtgagctttgccaccactggggagaagacggtggctgcagtcatggcctgtcggaatgaagtgcaaaaaagtagcagttctgaagatgggtcaatggggagcttttcggagaagtctagttcaaaggactctctggcttgcttcaatcagactacccattaactatactcgtggaaacggtcggcgctgctggacccacaaaactttacctggacaaacgcctcggccgacggcgtttccgtgtctgaaaagatacctgggtacggctgggtaaa

SEQ ID NO: 98190 - DNA, 796 bp, Homo Sapiens
cctgcctagtgaggtcctgaggcacgtgtttgccttcctcccggtggaagacctctattggaacctgagcttggtgtgccacttgcggagggagatcatcagtgacccgctgttcattccttggaagaagctgtaccatcgatacctgatgaatgaagagcaagctgtcagcaaagtggacggcatcctgtctaactgtggcatagaaaaggagtcagacctgtgtgtgctgaacctcatacgatacacagccaccactaagtgctctccgagtgtggatcccgagagggtgctgtggagtctgagggaccaccccctcctccccgaggctgaggcgtgtgtgcggcaacacctccccgacctctacgctgctgccgggggtgtcaacatctgggccctggtggcggctgtggtgctcctctccagcagtgtgaatgacatccagcgactgctcttctgcctccggagacccagctccacggtgaccatgccagatgtcaccgagaccctgtactgcatagccgtgcttctctacgccatgagggagaaggggattaacatcagcaataggattcactacaacattttctattgcctatatcttcaggagaattcctgcactcaggccacaaaagttaaagaggagccatctgtctggccaggcaagaaaaccatccaacttacacatgaacaacagcttgattctggaatcacaagatgggaacctcttccaggggggtggaaaatttatgggcctttgccggcactggggaagacctcaacggttggttcaagt

SEQ ID NO: 98191 - DNA, 1155 bp, Homo Sapiens
  misc_feature (1071)..(1071): n is a, c, g, or t
  misc_feature (1103)..(1103): n is a, c, g, or t
ggtcgaatgcacagttcatagggagcttgtagccagcatcacatttgtcccagtccgaccatgtggcagtcagacatcacaggacaccgtcctgtgtgctgaggagacagggtcgacagcaggagtctccgtaggtcaccatccccagtctccatgcgcggcgtgaagtctgcaggccattggtctgattttggagtgggtaggggtgtcataatgaccagcaaagaagttaaggatggggcccgtcacgttcagggcataatcgccgtggcccgccgcaatggcactgggccgggcccagatccggatcaagacaccattggatgcctgcttctccacgtagtcgaactcactgacaatgaaggccagcaagtacgtggacatcttgggcgtggtgtggaactcagtgacattccagttggggtcttctggaagtggggtgctgggacctttgggaagcatgttggacagggctgtcaggtccttggggtggataagcgtgatgttgaactcggccttcatggccggctcatcgaagcatgggaaggacttccgggcatctgcagcctgcatctgtgtagtggccaccacctttctgacattgccctccatgtactcgctgcggtagaagcccgccaggtcatctgccaactccccctcgaactcgctgtccatctcatactggctgtccttcaccagggagcccttgaggtgcaccaccaggtactcggtgggctccaccagctcagtcttgtcaatgtcggggggctgggagcctcccacaccacgcaggaccaccctgtgcccctggctgagggtgtagttgagcttcttgctgtggatgatgatgacgtcagtggcctccttgcaggtgaaacggacggtgctggagcccttaaaaacgtacaggcccctgtcattgggggtgaggtacggtctcagcgtcacctggtaggaatcgggtttcagcgtgttggggaggcggtaacgattccacgctttactttggtccaaggtggtggccgaggcggggttggtggtggctgaggcggacggggtggtggaggccancgggggagctgttggcgttcttgttcttctcnctgggagtacacctcgtgccgaattcggcgcgccgtcgacttcatactctct

SEQ ID NO: 98192 - DNA, 1143 bp, Homo Sapiens
agagtatgaagtcgacggcgcgccgaattcggcacgaggcaacgtgctatgggaagagggcaaggcagccttggagcagctgcttaagttcatggtgcaccctgccatctcctccatcaacctgaccacagcgctgggctcccttgccaatatcgcccgccagagacccatgttcatgtctgaggtgatccaggcctatgaaactctgcatgccaacctgcccccgacgctggccaaatcgcaggtgagcagtgtgcgtaagaatctgaagctgcacctgttgagtgtgctgaagcacccggcttccttggagttccaggcccagatcaccaccctgctggtggacctgggcacacctcaggccgagatcgcccgcaacatgccgagcagcaaggacacccgcaagcggccccgcgatgactcggactccacactcaagaagatgaagctggagcccaacctgggggaggacgatgaggacaaagacttggagccaggcccgtcggggacctcgaaggcctcagcgcagatctccggccagtcagacacggacatcacagctgagttcctgcagcctctgctgacgcctgataatgtggctaatctggtcctcatcagcatggtgtacctacccgaggccatgccagcctccttccaggccatctacacccccgtggagtcagcaggcacggaagcccagatcaagcacctggctcggctcatggccacacagatgacagctgccggactgggaccaggtgtagagcagaccaaacagtgcaaggaggagcccaaggaggagaaggtggtgaagacagagagcgtcctgatcaagcggcgcctgtcagcccagggccaagccatctcggtggtgggttccctgagctccatgtcccccctggaggaagaggcaccgcaggccaagaggaggccagagcccattatccctgtcactcagccccggctggcaaggcgctggtgggcgcaagaaaatttcccgctctcagcgacgtgctgaaagccccttaccgatgcccaggtggaagccatgaagctgggcgccgtgaaccggattcctgcggggctgagaaggctgtggccttgcagcggggcagcccaggccccgtaaagatcctggcacct

SEQ ID NO: 98193 - DNA, 1345 bp, Homo Sapiens
cttggccagtgtgatgttgtaatagctgaagagcgtcggccagtggcggaaggacaatttcctccaaagttcctcatcctcaggcccccaggttacctctgggactgggctgtcatggacaacctctgctggacctccacgctcaggtgactcgcctggcgacgtctggttctcaggtagcttaggggcatcaggtgggaagatggagaaggcagggtccgggtggctggggggcagcatgccactaggcacgggcatgggagccagggctccctcacccaatgggctctgttccgtcacctgggcagcgaggtagttgcgcagccctgctgggtctgtgtataccaggatgccaatccagacaacggtgccagccatgatgaggcgctgtgccaggcgggtgcgggccaggaagtagacaacacgcagcctcttggggagccgcaggtttcggaaggaagacggctgcaacgtgatggtgtggggtgtggacggcctcacagccagctgccgctcgtagcgcgttggctgccccactggcttggctgagggcaggcaggcctcagggggcagtcgcttgttcaggtctgctagctccatccggcgaatgtcaatggacaggacagtggtgaaaaacagcatctgaaggaagaagtcagacaccagccccacgacagcaaagagacagaactcctggatggcgggcactagggtgaagtagccgatgaggatgatgcccagctccgtggccatgttcttcatgatggaccagctctcgctgcttaggccttgggcgatccgcagcttcacctccaggtctaccggggttgagaccacagacttggtgagcaccaacacattctctaacccaataaccaccacaaggtaggggaaaatctcgccgccattgagggtgggcgtcaggccgaagagtgtgcagagtcccacagacatgagcagcgagctgagcactgtgaccacggcagccagggccagcccccacttggacttgaccatgtcgatcttccgcgtggagaagtagatgtaggcaaacaagatgatgtaggtggtcacaagggggatgagctcagcgacaccaatctcctccttgaagtgcacgtggaccaggctctccgcccgaaggctgcagttggggctggggtgcagaagcatcaggcgggcacgcaggctgcccaggaacttggcatggtagtgctggaagaccagggtgatggtgtaggagaccatcctcttcctggtgtagaggctcaccccgctgtacttcccaggaacaccaaataacaagtctttgagtgtggctgaagtctgcagggttttaggctcg

SEQ ID NO: 98194 - DNA, 673 bp, Homo Sapiens
  misc_feature (117)..(180): n is a, c, g, or t
  misc_feature (651)..(651): n is a, c, g, or t
agggcctgaagagacagggaggttgtgccaggctggaggaggcttgtctttccgaagctggagaggatcttacgggggttcgcttttccctgcctgggaagaatttcccctgtggtnnnnnnnnnnnnnnnnnnnnnnnnnnnnnnnnnnnnnnnnnnnnnnnnnnnnnnnnnnnnnnnnccaccaccaccactacctcctcttctggggcacaagacagaatgcctgtgctagagcgatatttccacccagcagagctaggcaggaggtggacaggcccagaaggtgtgctgccctcctccccgggaagccggccggggtgccagcaggggccgctgccctgggacttgccagagatgatcaggatggtaaagctggtttggaaatccaaaagtgagctgcaggcgaccaaacagagaggcattctggacaatgaagatgctctccgcagctttccaggagatatacgactaaggggtcagacgggggttcgtgctgaacgccgtggctcctacccattcattgacttccgcctacttaacagtacaacatactcaggggagattggcaccaagaaaaaggtgaaaagactattaagctttcaaagatacttccatgcatcaaggctgcttcgtggaattataccacaangccctctgcacctgctggatga

SEQ ID NO: 98195 - DNA, 694 bp, Homo Sapiens
  misc_feature (659)..(659): n is a, c, g, or t
tgagttccactgtgctgtgcccagcgaccggggtacccagctccgttggttcaaggaagggggtcagctgcctccgggtcacagcgtgcaggatggggtgctccgaatccagaacttggaccagagctgccaagggacgtatatatgccaggcccatggaccttgggggaaggcccaggccagtgcccagctggttatccaagccctgccctcggtgctcatcaacatccggacctctgtgcagaccgtggtggttggccacgccgtggagttcgaatgcctggcactgggtgaccccaagcctcaggtgacatggagcaaagttggagggcacctgcggccaggcattgtgcagagcggaggtgtcgtcaggatcgcccacgtagagctggctgatgcgggacagtatcgctgcactgccaccaacgcagctggcaccacacaatcccacgtcctgctgcttgtgcaagccttgccccagatctcaatgccccaagaagtccgtgtgcctgctggttctgcagctgtcttcccctgcatagcctcaggctaccccactcctgacatcagctggagcaagctggatggcagcctgccacctgacagccgcctggagaacaacatgctgatgctgccctcagtccgaccccaggacgcangtacctacgtctgcaccgccactaaccgccagggc

SEQ ID NO: 98196 - DNA, 1107 bp, Homo Sapiens
  misc_feature (719)..(774): n is a, c, g, or t
caggtgtacggcctggggttatcgggattgcggcgcggcgatcggctgcagggacgcgcgcaaggtgaacacgggggctgcggcgcgcaggctcatccagtgaggactggaaggtgggggctttaggcccaggcatcggagtagaccatggcctccagcccatggggctgtgtatgtggccttctgctgttgctgctgccactcctggggactggccctgccctggggaggggctttcccaggccacttgaaaactccgaaatccctatgatccctcggagcccaccccaagggctctgtgggctcagagccccaggcctttgacgtgttcccggagaaccccagagctgacagtcacaggaactctgatgtccgccacgcccctgctgaagagatgcctgagaagcctgtagcctctccccttggcccagccctgtacgggcccaaagcagcacaaggagctcagagagaacgactcccagtaactgatgacctccagatggctcaaggaccaagctcccacggctggacaggacctctggactcacaagagcttctggagcaagaagcagtggctccccacccagtgggccaccctcatctcactttcatccccacaactcccagacgtcaactcagggtagccacagttcctccctccctgcagcatgaaaggccaagagggacagtggccacctagagatgagggtctgaaggcnnnnnnnnnnnnnnnnnnnnnnnnnnnnnnnnnnnnnnnnnnnnnnnnnnnnnnnnacacccttgttttccactcaggtactgtccaaaggccagtgctggaaggaacgggggggttttgaggacaccttgccggaaggcccctcaaagggcccccgctccccccgccatggatccgtacccccctgtattttgcctctccaaccccccatttcgaacgccccgccctcctccaacgcctccgtggtcaccggtcccaattattgcacttcgccccatgaaagtacatatcgcagcttaccctctctccgccgcgatgaacaaccccttcgccagcccgcgcccacttaatttgcagcctcggagaaaatcaacttcccccccttctcc

SEQ ID NO: 98197 - DNA, 661 bp, Homo Sapiens
  misc_feature (624)..(624): n is a, c, g, or t
agacctcgccctaccccgtcatcctctccttcgagaaccatgtggactcggcaaagcaacaggcaaagatggctgagtactgccgctccatctttggagacgcgctactcatcgagcctctggacaagtacccgctggccccaggcgttcccctgcccagcccccaggacctgatgggccgtatcctggtgaagaacaagaagcggcaccgacccagcgcaggtggcccagacagcgccgggcgcaagcggcccctggagcagagcaattctgccctgagcgagagctccgcggccaccgagccctcctccccgcagctggggtctcccagctctgacagctgcccaggcctgagcaatggggaggaggtagggcttgagaagcccagcctggagcctcagaagtctctgggtgacgagggcctgaaccgaggcccctatgttcttggacctgctgaccgtgaggatgaggaggaagatgaggaagaggaggaacagacagaccccaaaaagccaactacagatgagggcacagccagcagcgaggtgaatgccactgaggagatgtccacgcttgtcaactacatcgaacctgtcaagttcaagtcctttgaggctgctcganagaggaacaaatgcttcgagatgtcgtcctttgtgga

SEQ ID NO: 98198 - DNA, 557 bp, Homo Sapiens
ggtgggaagccaggctgacgagtggaccaaatcccccacccagacttagctgctcagcacaggcccgggagcagcctcggctgagttccaggagggcacggacgagggctaaggtcagtgcagcatctggggcagtggccaggagctcgcccagcggacgcactgctccctgctgtgccaaggccaggcggtgctggggtgagtctgccaggttacggagggcacgcaccacgctctgtaggcactgcgagtcctggcaggctgtcaggctctccacaagcaggggaacagcaccagcacagtggatgtccccacagctctcaggttccatggctaagttccccagggcacgggccgttcggttctggatgctgtctgtcctcatgcactgaagaatggtcaccaaagggagtatgcctccgagtctgcgcacttcggtccggcacgccccttccgtacagcaatcggctaggatgctgagcgccaagtccagcgtcttgcgcaggcgcactggcggcgtaggactagacgacgacacagcggagggggcggggccc

SEQ ID NO: 98199 - DNA, 643 bp, Homo Sapiens
  misc_feature (566)..(566): n is a, c, g, or t
gatggcggcgcccagggcggtagcgtgaaacttggtggaagacgctgaccagtcgtgttggaatcaaaacagcggggaccctgcgccatgtcgcgactgatcgtgaagaatctcccgaatgggatgaaggaggagcgtttcaggcagctgtttgccgccttcggcacgctgacagactgcagcctgaagttcaccaaagatggcaagttccgcaagtttggttttattggcttcaagtccgaggaagaggcccagaaggcacagaagcatttcaacaagagcttcatcgacacatcccggatcacagtggagttctgcaagtcattcggggacccggccaaacccagagcctggagcaaacatgcccagaaaccaagccagcccaagcagcctccaaaagactctactactccagaaattaagaaagatgagaagaagaaaaaggtggcaggtcaactggagaagctgaaggaggatacagagttccaggagtttctgtcagttcatcagaggcgggcgcaggcagccacttgggcgaatgatggcctggatgctgagccctcganagggaagagcaagccggccagtgactacctgaacttcgactccgattctgggcaagagagtgaggaggagggagccg

SEQ ID NO: 98200 - DNA, 1137 bp, Homo Sapiens
  misc_feature (39)..(39): n is a, c, g, or t
ccggggtcccgtggattcccatccccggatggtcatcanccaacccgtggggggagcccccctcgttggcacaggtagtgggctggagtcggccctcagggcggaaaatagccgtccaccagcggcacgaagggacagcgccgcagcccgggaaggcaagctcagctccaggcacttgttgtcctgccggtgggatgctgacacaggtgctctttcagcaccacgtgggtgatgtcccggaagtcacagaagtaggcccacagtggctcccgcggcctgtctgccggctggccgactgccttgtgagccttggccttcttcccaaacaggctggcttgggggttcctgccactgctgccactagaaccctcctccttgttcacctcctcctctactggccaccactggatgccaccagtgcctgtcaccagcacctcgtgggttgggggcccagcagcagactcagggccagggtctgtaggggccaccccactgtcccggatgtagcagggctccccctcggcctgggccagcagcctcaggtggcacacgggcacacgctctgtgccgaagcggggtgccagccgctcgagtgtggctaggtatttgaccatgaccatctgctgggagagtcggcccggctggaagtcccgcaggaacctgcggaagacgttccgaaggcgcagccgggtcagggcgctgtgctgccggatatgccggcggaaggagcgcgggatgcagtccttgaagctggtcttcttggccacctcctccagggggatgccatggcggagagcgaggtgacagaggtgcagaaaggccatgcccaggctctcattcttaaagtggtggatctcctcctcggtcgacagctcccacagtgatgccacgtcattcacaaactcatgcttgccctgctcaaagaggtactcaaatgaggctgggtccaggagttgcatcccctgtgctgtctgatctgaggatgcctcggttcctgggggcccacaacggtacacagccggttcccgaggattcatgccatgccagttccggaaataaaaccttatgcggaaatatagcatcaggcttgcatctctggggatctctaggatgtggttgggggcaaccagacatccc

SEQ ID NO: 98201 - DNA, 576 bp, Homo Sapiens
aaagtaccaaaccaggaagaggcagaaggactgctaagtcttcagccaatgacttgcttgcatcagacatctttgctcctcccgtctcagaaccttcaggccaggcgtcacccacaggacaacctacagccctgcagcccaaccctctggatctcttcaaaacaagtgctcctgccccagtggggcccctggtgggtctaggtggtgtaactgtcacactccctcaggcaggaccatggaacacagcatctttggtcttcaatcagtccccttcaatggctccgggagccatgatgggtggtcaaccttcaggttttagtcagcccgtcatttttggtacaagtccagctgtttcaggttggaaccagccttcaccctttgcagcctcaactccccctccagtgcctgttgtctggggcccttctgcatctgtggcacccaatgcttggtcaacaacaagccctttggggaatccttttcagagcaatatttttccagctcctgctgtgtccactcagcccccatccatgcactcctctctcctggtcactcctcctcagccacctcccagagctg

SEQ ID NO: 98202 - DNA, 569 bp, Homo Sapiens
  misc_feature (461)..(461): n is a, c, g, or t
  misc_feature (550)..(550): n is a, c, g, or t
gccatccgcacagattcaggcctcatcttggagtgggaagaagtgatccccgaggcccctttggaaggccccctgggaccctacaaactgtcctgggttcaagacaatggaacccaggatgagctgacagtggaggggaccagggccaatttgacaggctgggatccccaaaaggacctgatcgtacgtgtgtgcgtctccaatgcagttggctgtggaccctggagtcagccactggtggtctcttctcatgaccgtgcaggccagcagggccctcctcacagccgcacatcctgggtacctgtggtccttggtgtgctaacggccctggtgacggatgctgccctggccctcatcctgcttcgaaagagacggaaagagacgcggtttgggcaagcctttgacagtgtcatggcccggggagagccagccgttcacttccgggcagcccggtccttcantcgagaaaggcccgagcgcatcgaggccacattggacagcttgggcatcagcgatgaactaaaggaaaaactggaggatgtgctcatcncagagcagcagttcaccct

SEQ ID NO: 98203 - DNA, 1045 bp, Homo Sapiens
gggtccggaattcccgggatctccaggatgatggagacagagcgacttgtgctaccccctccagatcccctggacctaccccttcgggccgtggagctcggatgcacggggcactgggagctgctgaacttgcctggagctccagagagtagccttccccatggcctccctccttgtgccccagatctgcagcaagaagcagaacagttgtttctgtcatccccagcctggctgcctctgcatggtgtggagcactcagcccgaaaatggcagaggaagacggatccctggtctcttttggctgtcctgggagccccagtcccatccgacctacaggcccaaagacacccaaccacaggccagatactgggttacaaagaggtcttgctggagaacacaaatctctcggctacaacctccttgtctcttcgccggcctccagggccagcctcccagtccttatggggaaatccaactcagtatcccttctggccaggggggatggatgaacccaccataacagatctgaacacacgggaggaggctgaggaggagatagactttgagaaagatcttcttactattccacctggtttcaagaaaggcatggactttgcaccaaaagattgtccaactccagctcctggactactaagccttagctgtctgttggagcctctggatttgggtgggggtgacgaggatgagaatgaggcagtgggacagccaggaggtcccagaggggacactgtttcagcctctccctgcagtgctcccctggcccgagcaagcagcttggaagacctagtgttgaaggaagcgtccacagctgtatccaccccagaggccccagagcctccatctcaggagcaagtgggccatccctgtggacgccacctcccctgttggtgatttctatcgcctcattccccagccagtcttccagtgggcatttgagccagatgtgtttcagaaacaggccatcctgcacttgggagggcatgactctgtctttgtcgcagctcacacatctggaggaaaaaca

SEQ ID NO: 98204 - DNA, 832 bp, Homo Sapiens
  misc_feature (455)..(455): n is a, c, g, or t
  misc_feature (775)..(783): n is a, c, g, or t
aggggagagagatgaagtaacggccgccgaattcggcacgaggccactgagcatcctcccgccacacagaaacccgcccagccggggccaccgaccccaccccctgcctggaaacttaaaggaggccggagctgtggggagctcagagctgagatcctacaggagtccagggctggagagaaaacctctgcgaggaaagggaaggagcaagccgtgaatttaagggacgctgtgaagcaatcatggatgcaatgaagagagggctctgctgtgtgctgctgctgtgtggagcagtcttcgtttcgcccagccaggaaatccatgcccgattcagaagaggagccagatcttaccaagtgatctgcagagatgaaaaaacgcagatgatataccagcaacatcagtcatggctgcgccctgtgctcagaagcaaccgggtggaatattgctggtgncacagtggcagggcacagtgccactcagtgcctgtcaaaagttgcagcgagccaagtgggtcacgggggcacctgcagcaggcctgtactctcagattcgtgtccagtgccccgaagattgctgggagtgcgtgaatagataccaggcacgtgctacaggacagggctcgctacgggcccgggaccaaacgaaaggggccaatgccaacgggaaaccccttgggccaaaccctaacggggggggaaaccctaggtgggcggggaacactttgggaaccttttaaataacccgtgtgcttttgggggaaaacccaaatttnnnnnnnnntcagaaaaattctttttggggggccctgggccccccaggggggtcctcc

SEQ ID NO: 98205 - DNA, 895 bp, Homo Sapiens
cgcgctgtgcgactctcgcgatcagagcggccgtggagttggcagaggacatcaaggcgcagttctggcagcagtgtgcgatcgaggactccccctaagagagcacaggcttggtctgatctggttcgcagtagtgtgttcccagcccagctgatgcgtctgcctcgcccgctgtaggcttctggccaacgcgctgctgtccagtggtgcactcggcgccactctccgctgtgctccacgtgcccctgtagctgatgccctggtcctcgtagcacgtggccctggtatctatttcacagcacttcccagcaaatccttcggggcactggcacacgaaatctgagaagtacagggcctgctggcaggtgcccccgttgaaacaccttggctcgctgcaacttttgacaggcactgagtggcactgtgccctgccactgttgcaccagcaatattccacccggttgcttctgagcacagggcgcagccatgactgatgttgctggtatatcatctgcgttttttcatctctgcagatcacttggtaagatctggctcctcttctgaatcgggcatggatttcctggctgggcgaaacgaagactgctccacacagcagcagcacacagcagagccctctcttcattgcatccatgattgcttcacagcgtcccttaaattcacggcttgctccttccctttcctcgcagaggttttctctccagccctggactcctgtaggatctcagctctgagctccccacagctccggcctcctttaagtttccaggcagggggtggggtcggtggccccggctgggcgggtttctgtgtggcgggaggatgctcctcgtgccgaattcggcgcgccgtcgacttcatactctctcccccctag

SEQ ID NO: 98206 - DNA, 1101 bp, Homo Sapiens
  misc_feature (941)..(941): n is a, c, g, or t
  misc_feature (990)..(990): n is a, c, g, or t
  misc_feature (1037)..(1037): n is a, c, g, or t
ggaccggtccggaattcccgggatctgagcatcctcccgccacacagaaacccgcccagccggggccaccgaccccaccccctgcctggaaacttaaaggaggccggagctgtggggagctcagagctgagatcctacaggagtccagggctggagagaaaacctctgcgaggaaagggaaggagcaagccgtgaatttaagggacgctgtgaagcaatcatggatgcaatgaagagagggctctgctgtgtgctgctgctgtgtggagcagtcttcgtttcgcccagccaggaaatccatgcccgattcagaagaggagccagatcttaccaagtgatctgcagagatgaaaaaacgcagatgatataccagcaacatcagtcatggctgcgccctgtgctcagaagcaaccgggtggaatattgctggtgcaacagtggcagggcacagtgccactcagtgcctgtcaaaagttgcagcgagccaaggtgtttcaacgggggcacctgccagcaggccctgtacttctcagatttcgtgtgccagtgccccgaaggatttgctgggaagtgctgtgaaatagataccagggccacgtgctacgaggaccagggcatcagctacaggggcacgtggagcacagcggagagtggcgccgagtgcaccaactggaacagcagcgcgttggcccagaagccctacagcgggcggaggccagatgccatcaggctgggcctggggaaccacaactactgcagaaacccagatcgagactcaaagccctggtgctacgtctttaaggcggggaagtacagctcagagttctgcagcacccctgcctgctctgagggaaacagtgactgctactttgggaatgggtcagcctaccgtggcacgcacagcctcaccgagtcgggtgcctcctgccctcccgtggaantccatgatccctgatagggcaagggtttacacagcacagaaaaccccantggcccaaggcactggggcctggggcaaaacataattactggccggnaattccttgatgggggaatgcccaagccccttgggtggccaccgtggcctgaagaaaccccccg

SEQ ID NO: 98207 - DNA, 814 bp, Homo Sapiens
  misc_feature (792)..(792): n is a, c, g, or t
  misc_feature (804)..(804): n is a, c, g, or t
ctacaggagtccaggctggagagaaaacctctgcgaggaaagggaaggagcaagccgtgagagtttaagggacgctgtgaagcaatcatggatgcaatgaagagagggctctgctgtgtgctgctgctgtgtggagcagtcttcgtttcgcccagccaggaaatccatgcccgattcagaagaggagccagatcttaccaaggttgcagcgagccaaggtgtttcaacgggggcacctgccagcaggccctgtacttctcagatttcgtgtgccagtgccccgaaggatttgctgggaagtgctgtgaaatagataccagggccacgtgctacgaggaccagggcatcagctacaggggcacgtggagcacagcggagagtggcgccgagtgcaccaactggaacagcagcgcgttggcccagaagccctacagcgggcggaggccagatgccatcaggctgggcctggggaaccacaactactgcagaaacccagatcgagactcaaagccctggtgctacgtctttaaggcggggaagtacagctcagagttctgcagcacccctgcctgctctgagggaaacagtgactgctactttgggaatgggtcagcctaccgtggcacgcacagcctcaccgagtcgggtgcctcctgcctcccgtggaattccatgatcctgataggcaaggtttacacagcacagaaccccagtgcccaggcactgggcctgggcaaacataattactgccggaatcctgatggggatgccaagccctggtgccacgtgctnaagaaccgcagnttgacgtggg

SEQ ID NO: 98208 - DNA, 1723 bp, Homo Sapiens
  misc_feature (1498)..(1517): n is a, c, g, or t
cgcccaacttatacaatgagaattgaaataacgaaagtccgttgaaataagaaatctatcataagtaaaataaaattatgaatcaaaggataaacagtgagacatagtaattcaatgacattaagggcggcacaaacatgcttttatttaacctactaaaatctatatataatgtaataagatacgtcgtctataggcaatggccaaaaatcaatagatagctataggacggatatcaaccaggagaaaaaatccaattcactataggtcatgttacacacatattcatggttctatttcataacaaagttataaagcaacgggatagcttctaaagcaccgcatgagccataatatgctggtataaccccatagtgtaatgtcaagcgagtgatcaatcggagcccaccggcatgagggcgtaaacgttgccacgcttttgggtaatgctgacactctttcagagtggattgtagtaccctgtgcgcgggccacaccggcaaaagaggcagagggatgaatgaggatgggttgcggcccgcgggccaggtaggcccctgcctggccccacgtggggcctctcccagggtggcagcccctaccctggtcccggccgttgcggggcagtgtgaccgcgctgcgactccgagcaaggaaggagagagtgggcgtcatcagacgatccacgatgctgctctcccatgcgctcagctgcaggctgcgattggtcttatgtcctggagagctgtggtgcagggcccctgcccaggaccagcgctgctgccggatttcggcccacgtcttcttcactgaccgttggatggctgcttcatagcgctcattgtttttctcgagcttctgccgctgccgttcctccagggctgcacggcgttgctcggctttaagacgttgctcctccagccggcgccggcgctcctggagctgcttctcccgcagcgccttggccttctcctccttctccagccacactgccttcttggccgccaggtacttggcccgctcttctcgccgctcctttgccagcttgtgtctctctcctgccttcttcacctcttgcttggtgggagggctgtcggaggctggcactgctgttggagatggctggctgctccttcgaggaggtctggcatcccgtgggcccatggctggtggggtgggtcctctgctctttgcttcagaggaaggggactcttcctgcgggggggctggcctaggcccgacctgccctgaggggctctctggttccagtgggagctgcttagagctagtggcattcttcatggcaggaggggtgtccgggggagtgtcggggaccagggatgacattggtggtggtgggggggaagggtcaccttctggagaaggtattggctctgggggggtcctggcgaccacagctgggggtgcgcccgcccccagctccgcacgcgggccgctctccatggctgcggcgtcactgggggtctcggggtctcannnnnnnnnnnnnnnnnnnncagtggccaggacaggggtcccgcggcgcatcacgcccggcccggcccggcccggcaagtagcgactcggaggcgggggcgctccggggaaggtcgaggcaggtggcccgcgagtctcggaggtgccggtcgcccggggtctctcggctgcggtcgcgaacccgcctcgtgccgaattcggcgcgccgtcgacttcatactctccc

SEQ ID NO: 98209 - DNA, 919 bp, Homo Sapiens
gcgcactccaagatctaaaccgagaatcgaaactaagctggggtccatggagcctgcacccgcccgatctccgaggccccagcaggaccccgcccggccccaggagcccaccatgcctccccccgagaccccctctgaaggccgccagcccagccccagccccagccctacagagcgagcccccgcttcggaggaggagttccagtttctgcgctgccagcaatgccaggcggaagccaagtgcccgaagctgctgccttgtctgcacacgctgtgctcaggatgcctggaggcgtcgggcatgcagtgccccatctgccaggcgccctggcccctaggtgcagacacacccgccctggataacgtctttttcgagagtctgcagcggcgcctgtcggtgtaccggcagattgtggatgcgcaggctgtgtgcacccgctgcaaagagtcggccgacttctggtgctttgagtgcgagcagctcctctgcgccaagtgcttcgaggcacaccagtggttcctcaagcacgaggcccggcccctagcagagctgcgcaaccagtcggtgcgtgagttcctggacggcacccgcaagaccaacaacatcttctgctccaaccccaaccaccgcacccctacgctgaccagcatctactgccgaggatgttccaagccgctgtgctgctcgtgcgcgctccttgacagcagccacagtgagctcaagtgcgacatcagcgcacagatccagacagcgacaggaggagcctggacgccaatgactgcaggcgcttgcaggagcagcgatagtgcctttggccgccgttcacagcgcacaatgcacagcgggcgatcggccagatgggcccgagcacgcgtgccgtagacccgacggagctgaatcccgcacacgccttgcgac

SEQ ID NO: 98210 - DNA, 1688 bp, Homo Sapiens
agtgcgtcttttgctgttttgcttgtgctttgtccggtggtcctttgtgttgtctttggttttctccggtgcgttgtgtgttgtggttcatcctgtctttcttttcaccatcttgtggtgttcctgtcccggtgcttctttcggtgtgtctgcggagggatagatccggtctttgatattctcctggttgcctctgggccgatggggctgttttggtcctggatacggacgtgcgttccctgtagctcttccgggtcccctgttctcgtgcatttctttgctagctgtccttttgttgggattcctgtctggccttatggctgtatcacatgctggacatgctgtttgcttgctgggtacctaccacagatggctgctgctggccagtgcaagaacttcagagaaaggcaaaatataggagtctgcaatgacaaccgggacacagccagcttgtaacacatcgctcaatactgcctggcccagccgagctccacgaagaaccacacagaaagtagcctcctgtagcacctgtgggtaatcgaagacctggtgcttgtggcagcgcttacggacagaaaggacaccctctgagaggttggtgcatttatcgagtactaacactgactctccatgtttgacctggagggcttctaggtcctctctgtactcaggatggagacccacctgagatgacaggaggaagtattgccgtggacctggtcctttctctggaagatccacctcagctgacagtggactatagacaggaatgctgacatcgtagccttgccggtaagtccacgtagaaaagccgccaccagccaacagggccctgtctctggggacatccagggctgtgttataatctgggggacctccaggcaacatgttgaacaacaggtgattcgtacctcgatcccacctagagagctgggccatcgcttgtgctgtctccttgatgcgcagtgtgttctggttaagcacatcgatggagggaacaaacagacaggcccggttgatgtcatcagtgtagtagtcactgtctgagatggccatgagcagttcattatactcccgggagatggtgttgctgacagagacgccaaagtcatccacgtactttttcagagcatagatatacaccttgattttgttctttgggttgaagccacagcgatagacatcaaaacacgtgtgcattctgcaactgagatccccccgctctgggatgggactgtcggctggcagcctaacaaccggcacatcacggatgctgcgcttctctacattccagtcatttgaggactcgatagaatggggccaaaactgaaacatgccagtggcaatgaggcccaggaggacaatggagaagagggtgatatagtagattcggtgcttggtcttcattcttgggatgagggcaggaccccggatattatacttgaccgacgcacacataatgacacagacagcctcttcctcacactcctcggccacggctgcctcccgctcggccccgagcttggtcaccggctcatgccgcggggcgcgggccacctccgcccaggtcggatcggtccgaatcgccagccgccactgccagggccgagtctgggctggcgagcagcgagcgaggggccggtaaccggcctcgtgccgaattcggcgcgccgtcgacttcatactct

SEQ ID NO: 98211 - DNA, 241 bp, Homo Sapiens
gtggttgaccgtggcttgtggttgaccgtggcttgtgggttgaccgtggcttcagctaaggccagtgggaagaagctgcagaaggtgactctgaaggtgtcgccacggggaattattctgacagacaacctcaccaaccagctcattgagaacgtgtccatatacaggatctcctattgcacagcagacaagatgcacgacaacggtgtttgcatacatcgcccaaagccacgtaaaccgg

SEQ ID NO: 98212 - DNA, 665 bp, Homo Sapiens
cacaccccgggccctgcagtgcgcaccctttaactcccaggaattcatgggccagctgtatcacgtgggagcccttcactgaagtccagggctcccagcgctgtgaactgaactgccggccccgtggcttccgcttctatgtccgtcacactgaaaaggtccaggatgggaccctgtgtcagcctggagcccctgacatctgtgtggctggacgctgtctgagccccggctgtgatgggatccttggctctggcaggcgtcctgatggctgtggagtctgtgggggtgatgattctacctgtcgccttgtttcggggaacctcactgaccgagggggccccctgggctatcagaagatcttgtggattccagcgggagccttgcggctccagattgcccagctccggcctagctccaactacctggcacttcgtggccctgggggccggtccatcatcaatgggaactgggctgtggatccccctgggtcctacagggccggcgggaccgtctttcgatataaccgtcctcccagggaggagggcaaaggggagagtctgtcggctgaaggccccaccacccagcctgtggatgtctatatgatctttcaggaggaaaacccaggcgttttttatcagtatgtcatctcttcacctcctccaatc

SEQ ID NO: 98213 - DNA, 1667 bp, Homo Sapiens
  misc_feature (1144)..(1144): n is a, c, g, or t
  misc_feature (1205)..(1205): n is a, c, g, or t
  misc_feature (1557)..(1557): n is a, c, g, or t
ggatgaagttacggccggcgccgaatccgcgacgagccagggccaacgtctctaagaaggtgtcctggtccggccgggaccgggacgacgaggaggcggcgccgctgctgcggaggacggcgcggcccggcggggggacgccgctgctgaacggggctgggcccggggctgcgcgccagtcaccacgttctgcgcttttccgagtcggacatatgagcagcgtggagctggatgatgaacttttggacccggatatggaccctccacatcccttccccaaggagatcccacacaacgagaagctcctgtccctcaagtatgagagcttggactatgacaacagtgagaaccagctgttcctggaggaggagcggcggatcaatcacacggccttccggacggtggagatcaagcgctgggtcatctgcgccctcattgggatcctcacgggcctcgtggcctgcttcattgacatcgtggtggaaaacctggctggcctcaagtacagggtcatcaagggcaatatcgacaagttcacagagaagggcggactgtccttctccctgttgctgtgggccacgctgaacgccgccttcgtgctcgtgggctctgtgattgtggctttcatagagccggtggctgctggcagcggaatcccccagatcaagtgcttcctcaacggggtgaagatcccccacgtggtgcggctcaagacgttggtgatcaaagtgtctggtgtgatcctgtccgtggtcgggggcctggccgtgggaaaggaagggccgatgatccactcaggttcagtgattgccgccgggatctctcagggaaggtcaacgtcactgaaacgagatttcaagatcttcgagtacttccgcagagacacagagaagcgggacttcgtctccgcaggggctgcggccggagtgtcagcggcgtttggagcccccgtgggtggggtcctgttcagcttggaggagggtgcgtccttctggaaccagttcctgacctggaggatcttctttgcttccatgatctccacgttcaccctgaattttgttctgagcatttaccacgggaacatgtgggacctgtccagcccaggcctcatcaacttcggaagggttgactcggagaaaatggncctacacgatccacgagatcccggtctttcatcgccatgggcgtggtgggcggtgtgcttnggagcagtgttcaatgccttgaactactggctgaccatgtttcgaatcaggtacatccaccggccctgcctgcaggtgattgagggccgtgctggtggccgccgtcacggccacagttgccttcgtgctgatctactcgtcgcgggattgccagcccctgcaggggggctccatgtcctacccgctgcagctcttttgtgcagatggcgagtacaactccatggctgcggccttcttcacaccccggagaagagcgtggtgagcctcttcacgacccgccaggctcctacaaccccctgaccctcggcctgttcacgctggtctacttcttcctggcctgctggacctacgnggctcacggtggtctgccgggggtccttcatccccgtcccctgcttcatcgggggcttgccctgggggaccgggctcttttgggaatctcccctgttccctacccttccc

SEQ ID NO: 98214 - DNA, 1413 bp, Homo Sapiens
  misc_feature (14)..(14): n is a, c, g, or t
  misc_feature (1221)..(1221): n is a, c, g, or t
  misc_feature (1385)..(1385): n is a, c, g, or t
cgcacccgacctanatcccagccctgccctttgctctcctgcttttcactgagtcccgaggctctggagggtgggcgtgagggtagccctggctgaggctcggaggtcctcccgggctgttcagagggccccaagcggtagccacgttctgatactggctagaagccaggggagggagcttggggtaaggggagggccctgagggaggggtcagacgctttaggaaagagttaatgcgaagacggggaggggataggacgaagaaaccgaagggaaagctcagggccgccaacttccagctgcagcggcgactttcagtttcatttccacggaccctcctgcctgggccgcagccgccgccgcgatgcccagtaagttcagctgccggcagctccgggaggcgggccagtgtttcgagagtttcctggtcgttcggggactggacatggagacagatcgcgagcggctgcggaccatttataaccgcgacttcaagatcagctttgggacccccgcccctggcttctcctccatgctgtatggaatgaagattgcaaatctggcctacgtcaccaagactcgggtcaggttcttcagactcgaccgctgggccgacgtgcggttcccagaaaagaggagaatgaagctggggtcagatatcagcaaacaccacaagtcactgctagccaagatcttttatgacagggctgagtatcttcatgggaaacatggtgtggatgtggaagtccaggggccccatgaagcccgagatgggcagctccttatccgcctggatttgaaccgcaaagaggtgctgaccctgaggcttcggaatggcggaacccagtctgttaccctcactcacctcttcccactctgccggacaccccagtttgctttctacaatgaagaccaggagttgccctgtccactgggccccggtgaatgctatgaactccatgtccattgtaagaccagctttgtgggctacttcccagccacagtgctctgggagctgctgggacctggggagtcgggttcagaaggagccggcacattctacattgcccgcttcttggctgccgtcgcccacagccccctggctgcacagctgaagcccatgactcccttcaagcggacccggatcaccggaaaccctgtggtgaccaatcggatagaggaaggagagagacctgaccgcgctaagggctatgacctggnagttaagtatggcgctggggacatactaacccacctccccgcctcaggcagctgctccccatgcttcttcagggaacaagtatcttcactgccccctaaggagatcgcagagatcaaggcccagctggagacagcccctgaagtggagggaacttatgaggtgnaagctgccggctgctggctgcaccctgg

SEQ ID NO: 98215 - DNA, 1030 bp, Homo Sapiens
ctcactgaaggtgcccagtgtgtgtccccaggcaggtaccaggtggtgcaggacactatcgaggatcttgatgaatctctgcaggaggacagctctgcggtacagtacttcagggtcggtgccttctaggcgtggatatcgcaccagactagttggctggaacaggtctgcattcaaccctagttcccgctgtctagatgacttgatcttgacccctcggagacgaacatcaatcccatcatctcggcactccacgatgcggatctcgatgatcgggaggtggacggtcatgtcctccaggacacagacatccccgatgagggtctcgtcaatgctcacgtcactcagcttcttcaggttgtccccttcacccccatagaccaccacccgctttggcataaagttgtcatctgtggtatccactgtgagtagcagcttcttgacaatggtgcccttcatcatagtaagccgtacccagtgttggcactgggacccatcgctctcccagtaggtatcggcattgctgtctgtcaggcaggacacgttgaactcctccgtgtaggaggaaacgtctatgctctccacatactgcttcacgctacccaggttctcatcctccttgcccaggtggtcatacaagaagtggatcaggtcctcgtcgcactcgtaggtccatgtcgggggtacatagagtagcctttgtacagcttctgcgtatgcctctgccggctgaggtctcgatcccaggcgatgtgagtatgtcaggtccaccacctgttcccacctgagcaccggccgataatccacgccaaagagctgctgctgccgctggaggtggttgggagtgtcgatgggtaccaggcgggctccgccctccgccgggcggcacaccagcagccagccttcctgcagcccgcagtcgcccaggtgctctgccagctgctcctttgtcagcttcacccagagcccgtggccattgcacagctcctcgcccctcgtgccgaattcggcgcgccgtgacttcatactc

SEQ ID NO: 98216 - DNA, 1129 bp, Homo Sapiens
  misc_feature (251)..(261): n is a, c, g, or t
  misc_feature (498)..(544): n is a, c, g, or t
  misc_feature (1107)..(1107): n is a, c, g, or t
cccgcagcctctcctccccttcctccccgccgcacggccccgtaggtgctcggggacccaccttccacctagcacgggttcgttcccctctcccggcctggcccgggctccccggtggccgccgccccctcgccgcccccgccttctcccggggagggggtcaggtgggcgggcactattgttgtaggagccggcgccagattcctcagccgcgctcggggtgggaccggctgggtttgggggggtggggnnnnnnnnnnnccagccacccatcactaacctcctaacccccctcccccacctcgcccacgtttgccctgccgcccgggcacgcggccctctccacctcacgtcaaaccaaaacactaacccagatcccagacactcaaacgaccaccatacaacgcgaaaacaccccagagagcgaaatacacagcataagtattacgaacacccacagaaacaccaccccacatcagaaacgaaagagaggacatnnnnnnnnnnnnnnnnnnnnnnnnnnnnnnnnnnnnnnnnnnnnnnngacaacaggaagaaagcataacaactagctcaataaccccccaccacagcgaaggagataacaccgaaaagattaaagcttgcaactaacacaaaacgaacctcgactcaccctgctcaccctaccacgctcacttacctccaacgaccacaaatacaataccccgctctttactctactctatcgttcttcgaaagatgtcacacgcacgtcgttactggaaccacgcccagcagatcacaatcatgcacaatccaaccccgatacacctcccacgaccccacaacataaacgcgagcctcctaatttttactgctgcccgaccactatcctagtacaacatccgcgcgcgcatcagaccaatctatacgctccacccgaatcgaccaacaccaaacgcacagacaccacggagataacacaccgaccagagctttaagacaacccaagagtataaaccgccaatagagtaagagaaagacagaaccatacaaacatacgatagacagtgcggcactaacacaacaccacacaaaccgcaagaactcaccgtccctataccncctcatactgatacccgcatcc

SEQ ID NO: 98217 - DNA, 854 bp, Homo Sapiens
gggaagagtatgaagtcgacggcgcgccgaattcggcacgaggataacgctccggttttccaccaggcgtcctacttagtcagtgtacccgaaaacaaccctcctggggcctccatcgcgcaagtctgcgcctcggacctggacttggggttgaacggccaagtctcctactctatcatggccagcgacctagagcctctggcactggcctcttacgtgtccatgagcgcgcagagcggggtggtgttcgcgcagcgcgccttcgatcatgagcagctgcgcgccttcgagctcacactgcaggcccgcgaccagggctcgcccgcgctcagcgccaacgtgagcctgcgcgtgttagtgggcgacctcaatgacaatgcgccacgggtgctgtaccccgcgctggggcctgatggctccgccctcttcgatatggtgccacgcgccgcagagcccggctacctggtgaccaaggtggtggcggtggacgcagactcaggacacaacgcttggctgtcctaccacgtgctgcaggccagcgagcccgggctcttcagcctggggttgcgcacgggtgaggtgcgcacagcgcgtgccttgggcgacagggacgcggcccgccagcgcctgctgggcgctgtgcgtgatggaggacatcctcactctctgcaccgacactctgcaatttgtctttgctgacacttgcatgagtgctacagaatatttgatcgcctttactactgacccatgttgactgtattatctattgggcttttcatgtctctcctctctcatgccatttcagatttctatacactaaaactaccgttcttgaattcatctgttattctaac

SEQ ID NO: 98218 - DNA, 1244 bp, Homo Sapiens
  misc_feature (403)..(434): n is a, c, g, or t
gcgtccggaattcccgggatcaaatgggggtggggacgtgcaagtttcagactccgactaactacgcggggactccgaggcgctcagaaaaatgaagccgacccggccctgccccgagggacgctccaagagggcggaggtgcagggagggccccgccacaattcgcggtaacgcaagccaggctcgggcggaagggcggccggagccgatcaaaggctggctccgggcaggggcagcgagggagcgagggggagctctccgcaggccggtgtcccggaggaggcataattggagcagggcttccaaggtcacggagagacgccgggcaagacctcttaaggatcctcttccgggcttgaaaggcaggcgtcctcccgaaccgcgcgacccagccaagaagannnnnnnnnnnnnnnnnnnnnnnnnnnnnnnncgactcgggaatcttcggccgaggctcggcaatccccccatcctccgtccggggcctccagcccggggccgatccggaaacagccgagcggatccggaaacagccgagaggacccggaaccggtgcgctccgtcaccagggagtgcgggaatccgccgtttgcgctgaagcaatggcggcacctgccccggtggcccgcggacaaccattgaccggacgccggcgccccgggggctgcccatggcaggacctcccggtgccccggaaagggttcaaacctgttgagcggcctcgcttcccaccggctccttaaacaaaaacgcgtcccgtacaaccgcgttcgctaagcgatacgcttctgccctatatgaagacatgcctctatacacaagcgttgtcgacgcaaacatttatctaggcgtagcatcccgcttgagcggcgcgccgatcgtactccgtgaaggcaatacggtcgcagtttactgtacaccattctatacttcagtggagaacgccatcccttgtacgtcatcaggatcgctcgctcacgcccctccgactcccattactatcctatgtacaacagtaaagcgaccggcgaacgcaccatattcttgacgcgctgtagtcacacgtgacctagcagcttatggacgccacgcgtaccttctgccccacgcggcttcagctcccctattgcgtcctcaggtcttctcaggcctcaacaatcactatccttaccataacgatcccataacgtaatttgacaccctaagaaccaacataagtcagctaggcttaatatattcc

SEQ ID NO: 98219 - DNA, 918 bp, Homo Sapiens
tcataacgctcgcgccaacgcccctaaggtagcgaggcctgggtggcgattccagacgaggccgcttctaacccgagatgctgctgccggcgcccgcgctccgccgcgccctgctgtcccgcccctggaccggggccggcctgcggtggaagcacacctcctccctgaaggtggccaacgagcccgtcttagccttcacgcagggcagccctgagcgagatgccctgcaaaaggccttgaaggacctgaagggccggatggaagccatcccatgcgtggtgggggatgaggaggtgtggacgtcggacgtgcagtaccaagtgtcgccttttaaccatggacataaggtggccaagttctgttatgcagacaagagcctgctcaacaaagccattgaggctgccctggctgcccggaaagagtgggacctgaagcctattgcagaccgggcccagatcttcctgaaggcggcagacatgctgagtgggccgcgcagggctgagatcctcgccaagaccatggtgggacagggtaagaccgtgatccaagcggcagattgacgctgcagcggaactcatcgacttcttccggttcaatgccaagtatgcggtggacgctggaggggcagcagcccatcagcgtgcccccgagcaccaccagcacggtgtaccggggtctggagggccttcgtggcggccatctcgccctttaccttcactgcaactcggcggccacctggcggtggcaccggccctgatgggcaacgtggtcctatggacagcccagtgaccctgccatgctggccagctatgctgtctaccgcatccttcgggaggctggcctgccccccaacatcatccaggtcgtgccagctgatgggcccctatttggggacactgtcacagctcagagcccctg

SEQ ID NO: 98220 - DNA, 911 bp, Homo Sapiens
  misc_feature (892)..(892): n is a, c, g, or t
agacaggatgtgtatgggccccaaccccaggttcgggtaggtgggagcagcgtggatctgcatcgctttcatccagagccttatgggctagaggatgaccagcgtagtatgggctatgatgacctggattatggtatgatgtctgattatggcactgcccgtcggactgggacaccctctgaccctcgtcggcgcctcaggagctatgaagacatgatgggtgaggaggtgccatcggatcaatactactgggctcctttggcccagcatgagcgaggaagtttagcaagctgggatagcctgcgcaaaggagggcctccacctcctaattggagacagcaagagctgcaagaggtgatcgccatgcttggattccgcttggatgctgtcaagtccaatgcagctgcatacctgcaacacttatgctaccgcaatgacaaggtgaagactgacgtgcggaagctcaagggcatcccagtactggtgggattgttagaccatccaaaaaagaaagtgcaccttggagcctgtgaagctctcaagaatatctctttgggacgtgaccagaataacaagattgccataaaaaactgtgatggtgtgcctgcccttgtgcgattgcttcgaaaggctcgtgatatggaccttactgaagttattaccggaaccctgtggaatctttcatcccatgactcaatcaaaatggagattgtggaccatgcactgcatgccttgacagatgaagtgatcattcctcattctggttgggagcgggaacctaatgaagactgtaagccacgccatattgagtgggaatcggtgctcaccaacacagctggctgccttaggtaacagtagggactttgagaatatgaagatgaatttttgaggnctgacaaaaatatcctaaa

SEQ ID NO: 98221 - DNA, 980 bp, Homo Sapiens
  misc_feature (899)..(907): n is a, c, g, or t
catggtgaatatagaaagtggtcataaagcaggctggtacccggtccggaatcccgggatatcgtcgacccacgcgtccgccacgcgtcgggggctgcttctgaggaatcagcttgactggccagcaagttcagctccggcaagtcatttgattcacccggtgatgaaatgggggtcaaccagtctgtgggctttccacctgtcacaggaccccacctcgtaggctgtggggatgtgatggagggtcagaatctccaggggagcttctttcgactcttctacccctgccaaaaggcagaggagaccatggagcagcccctgtggattccccgctatgagtactgcactggcctggccgagtacctgcagtttaataagcgctgcgggggcttgctgttcaacctggcggtgggatcttgtcgcctgcctgttagctggaatggcccctttaagacaaaggactctggataccccttgatcatcttctcccatggcctaggagccttcaggactttgtattcagccttctgcatggagctggcctcacgtggctttgtggttgctgtgccagagcacagggaccggtcagcggcaaccacctatttctgcaagcaggccccagaagagaaccagcccaccaatgaatcgctgcaggaggaatggatccctttccgtcgagttgaggaaggggagaaggaatttcatgttcggaatccccaggtgcatcagcgggtaagcgagtgtgtacgggggtgaagatcctgcaagaggtcactgtgggcagaatgtcttcaacatcttgctgggggttggatctgatgacttgagggcaatttggactgagcggtggtggatggaattctttgggggcccgtatctggttggcaggaaaccattcnnnnnnnnncggagtggggtcttgaaggataaccaggcaggactgttttaaggagatcaaggggggttgaaaaggcaaagac

SEQ ID NO: 98222 - DNA, 1077 bp, Homo Sapiens
  misc_feature (856)..(856): n is a, c, g, or t
  misc_feature (876)..(876): n is a, c, g, or t
  misc_feature (896)..(896): n is a, c, g, or t
  misc_feature (922)..(922): n is a, c, g, or t
  misc_feature (932)..(932): n is a, c, g, or t
  misc_feature (956)..(956): n is a, c, g, or t
  misc_feature (965)..(965): n is a, c, g, or t
  misc_feature (972)..(972): n is a, c, g, or t
  misc_feature (994)..(994): n is a, c, g, or t
gggaagagtatgaagtcgaggcgcgccgaattcggcacgaggggggtcccacacgcctggagccgagggtctgtgtcaagagcggcaggggctgcaggagataagagaaacgggctgccgtggggtgtgtgtaggcttcagagacatgggatcacggaagactgaagcagaaacagtggattaagacttcctgagcgatagctggcactgccttccccacaatggcagaggtggtggctgaggtggccgagatgccaacacagatgtcaccaggggcagtggagatgtcaacacctatgtcggcagagatgatggagatgtcaacagaagtgactgagatgacacctggggaggcccttgcctcatccctcttcttccagcatcaccagttcatgtgctctgagtgtggcagcctctataacacactggaggaagtcctctcacaccaggagcagcacatgcttgctgtctcagaggaggaggcactgaccacacagaatgttggcctggagccggagctggtgccgggtgctgaggggcccttccagtgtggtgaatgcagccagctcatcctctcccctggggagctcctggcccaccaggatgcccacctccgagagtctgcaaaccagatccaataccagtgctgggactgccaggagctgttcccctcgcccgagctgtgggtggctcatcgaaaggcccagcacctttctgctacggtagctgagccaccagtgccacctcctttgcctcccccaacaccactgcctccacctttctcccccatccgaaagtcaagatggagcccctatgagtggtcctgagtgctctaaccctctgcgccacccctgangagttcttggagcatcaggncacccactttgactccctanagaaagaggagcgcaatgggttgggnagagaggaanaagacgatgaggaggatgaagaanatgatgaanagatggnaggatgagagggccatggccanaagtcggtgatgattgctgttgggaaggtgaccaattccacagctggctgggccttcaaggcctgccggggactgtcccccct

SEQ ID NO: 98223 - DNA, 1060 bp, Homo Sapiens
agaagcggaggacaggattgggatccttgaaacccgaaacccagaaacagcatcggagcggaaaccagaggggaaaccttgaactcctccagacaattgcttccggggagttgcgagggagcgagggggaataaaggacccgcgaggaagggcccgcggatggcgcgtccctgagggtcgtggcgagttcgcggagcgtgggaaggagcggaccctgctctccccgggctgcgggccatggccacggcggagcggagagccctcggcatcggcttccagtggctctctttggccactctggtgctcatctgcgccgggcaagggggacgcagggaggatgggggtccagcctgctacggcggatttgacctgtacttcattttggacaaatcaggaagtgtgctgcaccactggaatgaaatctattactttgtggaacagttggctcacaaattcatcagcccacagttgagaatgtcctttattgttttctccacccgaggaacaaccttaatgaaactgacagaagacagagaacaaatccgtcaaggcctagaagaactccagaaagttctgccaggaggagacacttacatgcatgaaggatttgaaagggccagtgagcagatttattatgaaaacagacaagggtacaggacagccagcgtcatcattgctttgactgatggagaactccatgaagatctctttttctattcagagagggaggctaataggtctcgagatcttggtgcaattgtttactgtgttggtgtgaaagatttcaatgagacacagctggcccggattgcggacagtaaggatcatgtgtttcccgtgaatgacggctttcaggctctgcaaggcatcatccactcaattttgaaagaagtcctgcatcggaaattctagcagctgaaccatccaccatatgtgcaggagagtcaattccaagttgtcgtgagagggaaacgggtttccgacatgcgcggcaaacgtggaccagggtcctcttggaggtttccagatcatgacttcggtcacacttcaatgaaaagcc

SEQ ID NO: 98224 - DNA, 740 bp, Homo Sapiens
  misc_feature (164)..(164): n is a, c, g, or t
gggcccgaagaaagggactgggtcttcccctccttttgagtcttgggtgtagttgcatcgaccgttatttcaccgctctcgctgattcgcttgcacggtacatagccgagtacgtctaggcactcttctgagtagacacggtcgcccacagctctcacgtctcntgggcgagagtcgcagctcgaaagtggcgtgcactgcagcccacaaaggctgcggtgtagcaggtgtaaactgtggttcggcgcagcagccggtagttgctttccggggctggcttctcctcggggcccctgtcgatgtggattttgtgcagcagatctttgtagagccccgagtctttgtgcacggtgtggtacacatgaccgtcgctcctggtgtggccgtcgaagccgaaggtgccgttggagatgggcgatttcacagagccatgggtcatggacagtgctcttccgtatgcagcccgagggtggctgcccgcagaagtgccttccgaggtccccagtgtctcccctgctgctcccgtgagcgggatggtgctgtcatcattagccttggcacctggtagctctttaaatactggggactctgcttcctgaaccttactgaggctttcgtcagatactcgtgataaagcaccttctttttgtaatttgcctgttattttcctccgcatccacggacacacgaagagccctcgtgccgaattcggcgcgcctcgacttcatactctctcccct

SEQ ID NO: 98225 - DNA, 873 bp, Homo Sapiens
taggggcgaagagtatgaagtcgacggcgcgccgaattcggcacgagggggaagatggcggagtccggcggtagcagcggtggtgctggtggcggcggcgctttcggcgcgggcccgggccccgagcgcccgaacagcacggccgacaagaacggggccctcaagtgcaccttctcggcacccagccacagcaccagcctcctgcagggcctggccaccctccgcgctcagggccagctcctcgatgttgtgctgactattaacagagaggcctttcctgcacacaaggtcgtcctggctgcctgcagcgactacttcagggccatgttcaccggcggcatgcgggaggcaagccaggacgtcatcgagctgaagggcgtgtcggcccgtggcctgcggcacatcatcgacttcgcctacagcgccgaggtgacactggacctggactgcgtgcaggacgtgctgggcgcggccgtgttcttgcagatgctgcccgtggtggagctgtgcgaggagttcctgaaagcggccatgagcgtggagacctgcctcaacatcggccagatggccaccaccttcagcctggcctcgctgcgagagtcggtggatgccttcaccttccggcacttcctgcagatcgccgaggaggaggatttcctgcgcctgccactggagcgcctggtcttcttctgcagagcaccggctgcaagctgtgcgagatcgacctgttcgcgcggcgtcgctgctgcactgactcgccggcgcccgcgcagcactgctctgcaatcgctcccctagcgcctcgactgtgaacgtgaactgaattgggaagatttgtcccatatgtgagttaaacagtggcctcgaaaataa

SEQ ID NO: 98226 - DNA, 784 bp, Homo Sapiens
ggatgaagtcgaggcgcgccgaattcggccgaggtggggtgccacacttaggctgagctgcaggttttcgcacagtcgcgagttaacctctgcttgctccagaggcctcgtcctaatccacctcggctgacggcgcgggatccctggctccgcgagcctcagcctcaccatgtgtgtcaggagctgtttccagtccccccgtctccagtgggtgtggagaacagccttcctgaaacacacccagcgcaggcaccaggggtcccaccgatggacacaccttggaggcagcacctacagagcggtgattttcgacatgggcggagttctcattccttctccagggagagtcgctgcagaatgggaggtacagaatcgtatcccttctggaactatattaaaggccttgatggaaggtggtgaaaatgggccctggatgagatttatgagagcagaaataacagcagagggttttgtacgagaatttcgggagactttgctctgaaatgttaaagacctccgtgcctgtggactcatttttctctctgttgaccagtgagcgagtggcaaagcagttcccaggtgatgactgaggccataactcaaattcgggcaaaaggtcttcaaactgcagtcttgaacaataattttaatcttcccaagcagaaaagctttttgcccctggaccggaaacagtttgatgtgactgtgagtctgcatggaaggattgtagccaacccaagattacagctgtgttggacactcgactgacctcgaatcacttttg

SEQ ID NO: 98227 - DNA, 781 bp, Homo Sapiens
  misc_feature (660)..(660): n is a, c, g, or t
  misc_feature (679)..(679): n is a, c, g, or t
  misc_feature (682)..(682): n is a, c, g, or t
gagagtatgaagtcacggcgcgccgaattcggcacgaggtgcaacaagttaagctgaagaccgaagcaagagctggttcaggtggcagccacagcagcctcagggacctcagcaactatggcctcctgcccagactctgataatagctgggtgcttgctggctccgagagcctgccagtggagacactgggcccggcatccaggatggacccagaatctgagagagccctgcaggcccctcacagcccctccaagacagatgggaaagaattagctgggaccatggatggagaagggacgctcttccagactgaaagccctcagtctggcagcattctaacagaggagactgaggtcaagggcaccctggaaggtgatgtttgtggtgtggagcctcctggcccaggagacacagtagtccagggagacctgcaggagaccaccgtggtgacaggcctgggaccagacacacaggacctggaaggccagagccctccacagagcctgccttcaacccccaaagcagcttggatcagggaggagggccgctgctccagcagtgacgatgacaccgacgtggacatggagggtctgcggagacggcggggccgggaagccggcccacctcagcccatggtgcccctggctgtggagaaccangctgggggtgagggtgcangcngggagctgggcatctcctcaacatgtgcttccttgggccctggtctgcttgcctggggtcctctctctcaagggctctcaaagtcgaactgggccatga

SEQ ID NO: 98228 - DNA, 1075 bp, Homo Sapiens
  misc_feature (41)..(106): n is a, c, g, or t
tttccaggatgccggtccacgcgcagccattcggccgcctnnnnnnnnnnnnnnnnnnnnnnnnnnnnnnnnnnnnnnnnnnnnnnnnnnnnnnnnnnnnnnnnnnagcccgcccggcgcccccggtgaccgtgaccctgccctgggcgcggggcggagcaggcatgtcccgcccggggaccgctaccccagcgctggccctggtgctcctggcagtgaccctggccggggtcggagcccagggcgcagccctcgaggaccctgattattacgggcaggagatctggagccgggagccctactacgcgcgcccggagcccgagctcgagaccttctctccgccgctgcctgcggggcccggggaggagtgggagcggcgcccgcaggagcccaggccgcccaagagggccaccaagcccaagaaagctcccaagagggagaagtcggctccggagccgcctccaccaggtaaacacagcaacaaaaaagttatgagaaccaagagctctgagaaggctgccaacgatgatcacagtgtccgtgtggcccgtgaagatgtcagagagagttgcccacctcttggtctggaaaccttaaaaatcacagacttccagctccatgcctccacggtgaagcgctatggcctgggggcacatcgagggagactcaacatccaggcgggcattaatgaaaatgatttttatgaaccaaccctggtgcgccgctaacaacatgcccccagacatgggattggaaatggaggggccagcgcctggacaagactccctgggggtcataacccaacggaaggcaattcccatacggcccacctgaccgcgctctccgctgataaggggacgggcgggccgtggacaggaaaggcgcggaggccagcagagaagcggcgccgccccgacagggccgcgcacgctggagaaaccgacgccccgcccattgcgctcctgcgcaagtatgtcacggcatatcgcatagctgacaccctccctcgcctcccgcatgcggtcggcgtcctgtgagtccctctcgttcgatatctacccagtcagccacatct

SEQ ID NO: 98229 - DNA, 861 bp, Homo Sapiens
agagagtatgaagtcgacggcgcgccgaattcggcacgagggctgagctgggctgccggggccgggccatcacccgaggcctgcgggccacagtgatgcggggccactgccacgcgcccgatgagcaaggcctggaggcccggcgccagagggagaaactgcccagcctggccctgccagagggcttgggagagccccagggtcctgagggccctggaggccgagtggaggagcccctggagggggtgggcccgtggcagtgccctgaggagcccgagcccactcctgggctggtgctgagcaagccggccctggaggaggaggaggcaccccgagccctgtcactgctgagcctgccgcccaagaagcgctcgatcctggggctgggacaggcccggcccctcgagttcctgaggacgtgctacgggggcagcttcctggtacacgagtcgttcctctacaagcgggagaaggctgtcggggacaaggtgtattggacctgccgggaccacgcgctggcacggctgccggaaccgggccatcacccagggacagcgggtgactgtgatgcatgggcactgccaccagcccgatattggagggcctggaagcccggcggcagcaagaaaaggcctggagacgctgcatgctgggcaggacggccctggagccaagtggaacgctgctccaggcgtgatatttgctctacgcaaggtccggtccctgatcccccggctcggcctaaactagcaagtctaaacagtatgctaccttccaggccctcaccctgattgtcatcctgagccctatctatacctgggtgttcttttaatcttcttcgtttatcgttttaatgttacc

SEQ ID NO: 98230 - DNA, 901 bp, Homo Sapiens
ggagagagtatgaagtcgacggcgcgccgaattcggcacgaggagaagaagcctttgctgaaggaggtagaacagcctcgccctcaagactccaatctcagtctgacagtaccagcccccactgtggctgccacaccacaacttgtcacctcctcctcacccctgcctcctcctgagcataaacaagaggccctgtcaggaagtctcgctgaccatgagtacaccgctcgtcccaatgcctttggcatggcccaggcaaaccgcagcaccacacctatggcccccggtgtcttcttgacccagcggcgcccttcagttggctcccagagcaatcaggcaggacaagcaaagggtcccaaaaagggcctggccacagcaaagcagagactcggccgtatcctgaaaatccacagaaatggcaaactacttctgtgagccctcctgtgtcccacccctcacccctttacccccattgccttctccattgtcaactcttggggcactcctggatcctatctgccctggacaaggtgctgaggtgcattgtcctgctttcttgggacttaccaaaggcacggacccctccaccgactccttctagttcccttccccactttcactagagcatcctgcctgccttctccactgaggagcaggtaaatgggagaggtttccagctgactagaaccctctttctactcgtccaaacactcccgtcacctgccctgtctgttcttattctcatccccgctagactggaagcagatgagagagtatgaagagctgagcatgagtggaagccatgctgaacttcgcactcagctaatcagagctgcactcacatctgtgccattccatcatgatgccatcgatgctagaagtggtctgcttgcagtagata

SEQ ID NO: 98231 - DNA, 1102 bp, Homo Sapiens
gagagagtatgaagtcgacggcgcgccgaattcggcacgaggcgagctggccaaccgcacaggcagtgtgccgcgcttccgcctcctggagggaccccggcatggccgcgtggtccgcgtgccccgagccaggacggagcccgggggcagccagctggtggagcagttcactcagcaggaccttgaggacgggaggctggggctggaggtgggcaggccagaggggagggcccccggccccgcaggtgacagtctcactctggagctgtgggcacagggcgtcccgcctgctgtggcctccctggactttgccactgagccttacaatgctgcccggccctacagcgtggccctgctcagtgtccccgaggccgcccggacggaagcagggaagccagagagcagcacccccacaggcgagccaggccccatggcatccagccctgagcccgctgtggccaagggaggcttcctgagcttccttgaggccaacatgttcagcgtcatcatccccatgtgcctggtacttctgctcctggcgctcatcctgcccctgctcttctacctccgaaaacgcaacaagacgggcaagcatgacgtccaggtcctgactgccaagccccgcaacggcctggctggtgacaccgagacctttcgcaaggtggagccaggccaggccatcccgctcacagctgtgcctggccagggccccctccaggaggccagcctgacccagagctgctgcagttctgccggacacccaacctgcccttaagaatggcagtactgggtgtgaggcctggcctgggcccagatgctgatcggggcaggcacaggcttgcccatgtcccgggccccattgcttccatgcctggtgctgtctgagtatccccagagcaagagagacctggagacaccaggggtggagggtcctgggagatagtcccagggtcccgggacagagtggagtcaagagctggaacctccctcagctcactccgagcctggagaactgcatgggggccaaggtggaggcaggcttaagttcagtcctcctgcctggagctggtttgggctgtcaaaaccagggtaaccactacag

SEQ ID NO: 98232 - DNA, 2396 bp, Homo Sapiens
  misc_feature (1400)..(1400): n is a, c, g, or t
  misc_feature (1407)..(1407): n is a, c, g, or t
  misc_feature (1429)..(1429): n is a, c, g, or t
  misc_feature (1573)..(1574): n is a, c, g, or t
  misc_feature (1582)..(1582): n is a, c, g, or t
  misc_feature (1608)..(1608): n is a, c, g, or t
  misc_feature (1612)..(1612): n is a, c, g, or t
  misc_feature (1616)..(1616): n is a, c, g, or t
  misc_feature (1625)..(1625): n is a, c, g, or t
  misc_feature (1636)..(1637): n is a, c, g, or t
  misc_feature (1642)..(1643): n is a, c, g, or t
  misc_feature (1655)..(1655): n is a, c, g, or t
  misc_feature (1659)..(1659): n is a, c, g, or t
  misc_feature (1668)..(1668): n is a, c, g, or t
  misc_feature (1670)..(1670): n is a, c, g, or t
  misc_feature (1674)..(1674): n is a, c, g, or t
  misc_feature (1676)..(1676): n is a, c, g, or t
  misc_feature (1686)..(1687): n is a, c, g, or t
  misc_feature (1702)..(1702): n is a, c, g, or t
  misc_feature (1705)..(1705): n is a, c, g, or t
  misc_feature (1713)..(1713): n is a, c, g, or t
  misc_feature (1733)..(1733): n is a, c, g, or t
  misc_feature (1770)..(1770): n is a, c, g, or t
  misc_feature (1776)..(1777): n is a, c, g, or t
  misc_feature (1850)..(1850): n is a, c, g, or t
  misc_feature (1860)..(1860): n is a, c, g, or t
  misc_feature (1922)..(1922): n is a, c, g, or t
  misc_feature (1926)..(1926): n is a, c, g, or t
  misc_feature (2016)..(2017): n is a, c, g, or t
  misc_feature (2024)..(2025): n is a, c, g, or t
  misc_feature (2074)..(2074): n is a, c, g, or t
  misc_feature (2088)..(2088): n is a, c, g, or t
  misc_feature (2104)..(2104): n is a, c, g, or t
aggggagagagtatgaagtcgaggcgcgccaattcggcacgagggtggtcaccaccttctacgtcatggtggggtttttcggctacgtcagcttcaccgaggccacggccggcaacgtgctcatgcactttccctccaacctggtgacggagatgctccgtgtgggcttcatgatgtcagtggctgtgggcttccccatgatgatcctgccatgcaggcaggccctgagcacgctgctgtgtgagcagcagcaaaaagatggcacctttgcagcagggggctacatgccccctctccggtttaaagcacttaccctctctgtggtgtttggaaccatggttggtggcatccttatccccaacgtggagaccatcctgggcctcacaggagcgaccatgggaagcctcatctgcttcatctgcccggcgctgatctacaagaaaatccacaagaacgcactttcctcccaggtggtgctgtgggtcggcctgggcgtcctggtggtgagcactgtcaccacactgtctgtgagcgaggaggtccccgaggacttggcagaggaagcccctggcggccggcttggagaggccgagggtttgatgaaggtggaggcagcgcggctctcagcccaggatccggttgtggccgtggctgaggatggccgggagaagccgaagctgccgaaggagagagaggagctggagcaggcccagatcaaggggcccgtggatgtgcctggacgggaagatggcaaggaggcaccggaggaggcacagctcgatcgccctgggcaagggattgctgtgcctgtgggcgaggcccaccgccacgagcctcctgttcctcacgacaaggtggtggtagatgaaggccaagaccgagaggtgccagaagagaacaaacctccatccagacacgcgggcggaaaggctccaggggtccagggccagatggcgccgcctctgcccgactcagaaagagagaaacaagagccggagcagggagaggttgggaggaggcctggacaggcccaggccttgcaggaggcggctgatcttcctgaagatccccacaaagttccagaagcagatggtcagccagctgtccagcctgcaaaagaggaccctggggctcaagagacacgggccccgcatcccttcggcccccagtcaatgtttgccttgaaccaaccataaccgttcctggaaagcacgggtcggcaagcggtataatggccttagggagggggcagaacccacctcacaagccaaaagacgtactgtcttgggggacaccgcgacacgggcacccctaccccgtatgcataagggacacaggcccacacactgcatccggaatacgaggagaaaaatccccctctctacacgcaggtttcccgncagggcnctgtgtgtacgcgtaagtcacnccgacccgcgccttatctgcttctggcggcggggcacaccacgttgggcaggggagcgaccaattcaaccacccccagccccagcacaagttgacgggacccgacgcgtgccccagcgctccggggaatgggctcgcgggaagnngttttgtncgtcagtgttatgcattgagaggtcncgangccnccccaccgncccgtgcaacnncggannaacccgccgggngggnaaaatatanantttnancgcacgcagnnaagagaaaattgaanacngcagaggnggaggcatggaaggggacgnctctttcagagcccggcgccgaatctccagtgcccgngttttnncctgtgggggtatatttctctctgcccacgcaaacctccgcgcggcgttgcattaacgcgaggagagcggaanccgggcccanacgtcgcacacagcctttctcccccaccgtttccggacatttacccgcgcctcgcccccccngccnattgtctccccttcctcggcgggcggagaattacccggctcactacacttcgttgggagacgctgccagtcaacccgccaccagacggcnntttggtnnaccgccggcaaagggtcccacccgcctaactgccgggcctcgtgggttnagctggtgcgcaantacccaaacaattatnctcacacctccctaattacgacccctttttcagcttctaccctcgccgcccaccaacacccctcggctccaccgaccctcgggactcgaagaacaattccgaggcccttattctgtcctgaccgccctgagaaatgcctttgtctcgtgaactaagttccccatcacctcctcacgtccgccgcctttttccaaccatcatcataacaatccgccgaccgccgccgcaacacgccacccacggtacgtatcgactctttgacgctctgatcaactatgtatgtatacatgag

SEQ ID NO: 98233 - DNA, 860 bp, Homo Sapiens
  misc_feature (800)..(801): n is a, c, g, or t
agggggagagagtatgaagtcgacggcgcgccgaattcggcacgatgtcggaaacaaaacagcggctggtctggaaggaacctgagctacgagccgcggcggcagcggggcggcggggaagcgtatacctaatctgggagcctgcaagtgacaacagcctttgcggtccttagacagcttggcctggaggagaacacatgaaagaaagaacctcaagaggctttgttttctgtgaaacagtatttctatacagttgctccaatgacagagttacctgcaccgttgtcctacttccagaatgcacagatgtctgaggacaaccacctgagcaatactaatgacaatagagaacggcaggagcacaacgacagacggagccttggccaccctgagccattatctaatggacgaccccagggtaactcccggcaggtggtggagcaagatgaggaagaagatgaggagctgacattgaaatatggcgccaagcatgtgatcatgctctttgtccctgtgactctctgcatggtggtggtcgtggctaccattaagtcagtcagcttttatacccggaaggatgggcagctaatctataccccattcacagaagataccgagactgtgggccagagagccctgcactcaattctgaatgctgccatcatgatcagtgtcattgttgtcatgactatcctcctggtggttctgtataaatacaggtgctataaggtcatccatgcctggcttattatatcatctctattgtgctggtcttttttcatcattacttgggggagtgnnttaactatacgttgcgtgactattactgtgcctctgattggatttgtgtgtggaagatt

SEQ ID NO: 98234 - DNA, 941 bp, Homo Sapiens
agtgtgaaagagtatgaagtcgacggcgcgccgaattcggcacgaggtcagcggccgggcccacggccccgagcagccatgctgggcgcgcgggcctggttgggccgcgtccttctgctgccccgcgccggtgcaggcctcgccgcgagccgcaggtctgcctgcagtcccacttccaggctgaactccctgaggtctctgattccctaggtgtcctggagtctggcccaggacctggccccacaggagtcccagcaggggtagctcctcccgggacaaggaccgaagtgcgacggtcagtagttcagtgcccatgcctgctggagggaaaggaagccatccttcatctacaccccagagggtccccaaccgcctgatccacgagaagtcaccatacctcctacaacatgcctacaatcctgtggactggtacccctggggacaggaagccttcgacaaggccaggaaggaaaacaagccgattttcctctcagtcgggtactccacctgccactggtgccacatgatggaagaggagtccttccagaatgaggagattggccgcctgctcagtgaggactttgtgagtgtgaaggtagaccgtgaggagcggcctgacgtggacaaggtgtacatgacgttcgtgcaggccaccagcagcggcgggggctggcccatgaatgtgtggctgactcccaacctccagccctttgtcgggggcacctatttccctcctgaggatggcttgaaccgagtcggcttccgcacagtgttgctgagaatacgagaacagtggaaacagaacaagaacacccgtgctagaaaatagccagcgtgtcaccaactgcccggctggcccgatcaaagatcagcgtggggtgaccgccagctgccgcctctggcgccacgggaacaatcggggttccagcaggtggaagagg

SEQ ID NO: 98235 - DNA, 1019 bp, Homo Sapiens
  misc_feature (992)..(993): n is a, c, g, or t
gttgggtcccccgttgggcggccccctcgacctttgcggtccaccttttggccggacctctgtctgcgtggggcccatgggcccggcctcccggttcccggtgggaacttggggcccacgggagcccggtttcctcttcatgccctcttccactgctggaacagcgattgttcacggtgcggccagaggcgcagctggcggtcacccacgctgatctctgatcgggccagcagggcagtggtgacacgctggctattttctagcagggtgttcttgttctgtttccactgttctcgtattctcagcaacactgtgcggaagccgactcgggtcaagccatcctcaggagggaaataggtgccccccgacaaaggggctggaggttgggagtcagccacacattcatgggccagcccccgccgctgctggtggcctgcacgaacgtcatgtacaccttgtccacgtcaggccgctcctcacggtctaccttcacactcacaaagtcctcactgagcaggcggccaatctcctcattctggaaggactcctcttccatcatgtggcaccagtggcaggtggagtacccgactgagaggaaaatcggcttgttttccttcctggccttgtcgaaggcttcctgtccccaggggtaccagtccacaggattgtaggcatgttgtaggaggtatggtgacttctcgtggatcaggcggttggggaccctctggggtgtagatgaaggatggcttcctttccctccagcaggcatgggcactgaactactgaccgtcgcacttcggtccttgtcccgggaggagctacccctgctgggactcctgtggggccaggtcctgggccagactccaggacacctgcggctcgcggcgaggcctgcaccggcgcggggcagcagaaggacgcggcccaaccaggcccgcgcgcccctcgtgccgaatatcgccacccaggcctcgctactttggaccgttaannactttatagggttgggaaaagaaagg

SEQ ID NO: 98236 - DNA, 1536 bp, Homo Sapiens
  misc_feature (122)..(122): n is a, c, g, or t
aaggacgttagctttccacactcgttcacttgtgagactggccaggcgcgccaggcagaggcatgaggcagcagagcagagatgccaccagcagccgagagatgcgtcgggctccctcggcnttgccacgggctgctgcctctgggctccagctccaaactgctgaagttggtgggaggtgggccaggcggccaccagggggctggcgggaaggtgcctcccagtgccggagaggaattgttcaccacatcagagatgaaggagatttcgctgaagagtaaccagggccccgcaaagaggaagcggcactgcagaaagcgagccacacggccgccaaggggcactgagacagcccgggctctggggtcccccaggttgccccctaggttgtggcgcatgggctccccctcccaggccatggcagggccacgccggaagcgacattccaccccgccaggcagacgggctcccagcgtgtgcatgttgttacagtggacctgcatagcctggaaggccctcagccggtcaaactcaaactccatctccacatagccactggagaagctgtggttgctccatcccacatagtcatagcctggccagacccgcagctcctgactcttcctaaagtcatccagccccaccacaccatctgccagctggcccagacccccatactgcagtccgcccacggtatgtccgtcataggtggagtcgttgaggtacacggcctcagataaatacattgtctgccccacaggggcggtgtaagacaggagtccatccctccagaggcagccatagagctctacccgcagacagacgctcatgacccggtcagcccgggggtagaagcgaaccagtcgggcaaccatggggggcccaaggtccttcagcaccactccctcagggtcctcattgcctgagatcacctcctgaccccagcggtccttccagcccatccagcggcgaccatcccgggagtaacgcagccggtagctccgggagaactccttgcccaggcccccggcatgccgtccctgggtgcccaccagagccaccaggtgcagtcgttgtagatccacctgcaagtactcctcctccttgggaaacaccgaccctgcggggcaccaggccccatccccgtcactgctctccaacctgctgtggcgggcggcagtggaatctgaccaggagctggaagcagagatgtcactgtctgggatggtccggtcctgcatgcccagggcatagcggcacttggcaggatcaaaatgtcccttcatgtcagcatctccacttgccaccaagagcagcagcagtaaagatgacagggcctctggtcccatagctccggatccctcgggcctaagggggtgggggcagcatctcttggcattccttcaagtccaaccccatcgctcagtgaatagccaccttcagacacctctcatcgctcttcccggcagacccaggcgtccgacccgggcctcgtgccgaattcggcgcgccgtcgacttcatactctttaagacc

SEQ ID NO: 98237 - DNA, 2552 bp, Homo Sapiens
agagtatgaaagtcgacggcgcgccgaattcggcacgaggccggctggagaaacggctgggccggagtgagcccagcgccttcctcagggggcatggcagcaggaaggagagctcagcagtgctgagccggatccagaaaattgaacaggtcctgaaggagcagccgggccgggggctcccccagctccccagcagctgctacagcgtggaccgggggaaaaggaacactggaaccttgggctccttggaggagccggcagggggcgcgagtgtgagcgctggcagccgggcagtcggagtggctggtgttgctggggtgaggcgggcccacccccagagagggaaggcagaggttccactaagcccgggacccctggaaatagccctagctacccagcggctgacatcgaagagttccctcgatcccgctgtgaaccctgtccccaaacccaatgcgcacctttgaatacgaggctgacaagaaccccaagagtaagcccagtaatggtctacctccttcacccacacctgctgctccacctcccttgccctccaccccagccccgccagtcacccggagacccaagaaggacatgcgtggtcaccgcaagtcccagagcagaaaatcctttgagtttgaggatgcatccagtctccagtccctgtacccctcttctcccactgagaatggtactgagaaccaacccaagtttggatccaaaagcactttagaagaaaatgcctatgaagatattgtgggagatctgcccaaggagaatccatatgaggatgtggacttaaagagccgaagagcaggacgaaaatcccagcaactgtctgagaactccttggactctttgcacaggatgtggagtcctcaggacaggaagtacaacagcccgcccacacagctttccctgaaacccaacagccagtccctgcgcagtgggaactggtcagaaaggaagagccaccggctgccacgattacccaagaggcacagccatgacgacatgctgctgctggctcagctgagtctgccgtcctcaccctccagcctcaatgaagacagcctcagcaccaccagcgagctgctgtccagccgccgggcccgccgcattcccaagcttgtccaaagaattaactccatctacaatgccaagagaggaaagaagagattaaaaaagttgtctatgtccagcattgaaacagcatcactgagagatgaaaacagtgagagcgagagcgactctgatgacaggttcaaagcccacacacagcgcctggtccacatccagtcgatgctgaagcgcgcccccagctatcgcacgctggagctggagctgctggagtggcaggagcgggagctttttgagtactttgtggtggtgtccctcaagaagaagccatcgcgaaacacctacctccccgaagtctcctaccagtttcccaagctggaccgacccaccaagcagatgcgagaggcagaggaaaggctcaaagccattccccagttttgcttccctgatgccaaggactggcttcctgtgtcagagtatagcagtgagaccttttctttcatgctgactggggaagatggcagcagacgctttggctactgcaggcgcttactgccaagtgggaaagggccccggttgccagaggtgtactgtgtcatcagccgccttggctgcttcggcttgttttccaaggtcctagatgaggtggagcgccggcgtgggatctccgctgcattggtctatcctttcatgagaagtctcatggagtcgcccttcccagccccaagggaagaccatcaaagtggaagacattcctgccaggtgctggcaatgagtaccctctccagctgctcccacgcggtggtggccttgctctaccccttctcctggcagcacaccttcattcctgtcctcccggcctccatgattgacatcgtctgctgtcccacccccttcctggttggcctgctctccagctccctccccaaactgaaggagctgcctgtggaggaggcgctgatggtgaatctgggatctgaccgattcatccgacagatggacgacgaagacacgttgttacctaggaagttacaggcagctctggagcaggctctggagaggaagaatgagctgatctcccaggactctgacagcgactccgacgatgaatgtaataccctcaatggcctggtgtcggaggtgtttatccggttctttgtggagaccgttgggcacctactccctctttctgacacagagtgagaaggaagagaggccctttcagcgagagcccttccccaaatctgtggcctccaaaagcatccgccgctttcttgagatttttatggagtctcagatgtttcctggcttcatccaagacagggagctaagaaagtgtcgggcaaagggccttttggagcagcgagtggaccagtacttagaagaactcccagacactgagcagagtggaatgaataagtttctccgagtttggcaacaaaatgaagttctccacaagaagaataagcctc

SEQ ID NO: 98238 - DNA, 867 bp, Homo Sapiens
agggggagagagtatgaagtcgacggcgcgccgaattcggcacgaggagaacatccagccagggcaggagtataacttcctgaagatggagcctcaggaggtggagtccctgggggagacctatgacttcgacagcatcatgcattacgctcggaacacattctccaggggcatcttcctggataccattgtccccaagtatgaggtgaacggggtgaaacctcccattggccaaaggacacggctcagcaagggggacattgcccaagcccgcaagctttacaagtgcccagcctgtggagagaccctgcaagacagcacaggcaacttctcctcccctgaataccccaatggctactctgctcacatgcactgcgtgtggcgcatctctgtcacacccggggagaagatcatcctgaacttcacgtccctggacctgtaccgcagccgcctgtgctggtacgactatgtggaggtccgagatggcttctggaggaaggcgcccctccgaggccgcttctgcgggtccaaactccctgagcctatcgtctccactgacagccgcctctgggttgaattccgcagcagcagcaattgggttggaaagggcttctttgcagtctacgaagccatctgcgggggtgatgtgaaaaatgactatggccacatcaatcgccaactaccagacgataccggccaacaagtctgctctggcgatcagggtcgaggcttcagtgggctacttcagtcttgagatgacgcccacgctggctacattctgaggccacggcaggaaaaccctctcggcacgtggtaaagctgtgataaactcacgcttgcatttctaagtctaaacgtttctattaa

SEQ ID NO: 98239 - DNA, 1224 bp, Homo Sapiens
  misc_feature (386)..(398): n is a, c, g, or t
  misc_feature (901)..(901): n is a, c, g, or t
  misc_feature (978)..(978): n is a, c, g, or t
gagagagtatgaagtcgacggcgcgccgaattcggcacgaggtgagcggtccccctcggagacgtcggagcagccgcggtacaggcggcgcacacagtcgtctggacaggatggcaggccgcaggaggagccacccacggatgccgacggccgggcccctccccgacaagcctcccagggccccggcaccccggtcggcagcctgcccctgtgagacccaccctcccgagcggccaatcgcatttgagtccttatttggcacagagacggaagcacgtgtgtgccgttttaggaaaagaacaaaaaagacacaaacaaaccaaccagagggagaagagcccctgcccactgcactctttggttctctgctgtgcctgcctgtgtcnnnnnnnnnnnnncctaagacggaagcacgtgtgtgccgttttaggaaaagaacaaaaaagacacaaacaaaccaaccagagggagaagagcccctgcccactgcactctttggttctctgctgtgcctgcctgtgtcctgaggaagaagccaggctgttcgcggtggcctctggggacctgagccccgggggccccatcggcctgcagaggggacggctggggtcccgagcaactctgcctccatccacgtgggaagcggaccctcctgccctcagcttgggtttgggggcctcagtgcaggacatctggcctgaacatcgactgtggggacagccctcgccctgccagcactgcggccactcagcagctatgttcccgccgcagtggggccctgacgcccacctcccaggtgcccctcgagcaaaaacctctggcgcctccaatccagacccaacacagctggagggccaggcctcctcttccccaggctgccacccacgctggcggagctcanggctggggacttgtccttctcttccaacgtaggccactcagcaactggcatggagggcccaggcaacggagacgttntctccatggcaggacagagcgggatgccgggccttgggcccatgagaccagcttatggcggattgctatgctctcgcactctctacgtgtagacttggactaagttgcaaggacatgtctaaacgaaacgcacttcagatagtggagtagtcagctacctctttttgataatctataaatatctctaaaagtgtaatagattgttatcaacacttacttacatgagcatcatctcatagtgaattt

SEQ ID NO: 98240 - DNA, 724 bp, Homo Sapiens
agagtatgaagtcgacggcgcgccgaattcggcacgaggtttcacctgctcctccttgtgcctcagctgtggggttggatgtaagaaaagcatgaatcatgggaaggaaggagtgcctcatgaagccaagagccgctgcagatactcccaccagtatgacaaccgagtgtatacctgcaaggcctgctatgagagaggcgaggaagtcagtgtagtgcccaaaacatctgcttccactgactccccctggatgggtctcgcaaaatatgcctggtctgggtatgtaatcgaatgtcctaactgtggcgtggtctatcgtagtcggcagtactggtttggaaaccaagatcctgtggatacggtggtgcggacagagattgtgcatgtgtggcctggaactgatgggtttgtgaaggacaacaacaatgctgcccagcgcctgttggacgggatgaacttcatggctcagtcggtgtccgagcttaaccttggacccaccaaggctgtgactccctggctgacagaccaaatcgcccctgctactggaaggccaactcccaaatcggaattgcaaaagtgggccacgtcctttaaagaaacgaccttaacctcttggccaacctgggggaagggcttttgtaaacttttattcaaaatctgccaatgcctaacggggttgggcccttcccattggggttttaaaaattttataaaccaaaatctc

SEQ ID NO: 98241 - DNA, 387 bp, Homo Sapiens
  misc_feature (120)..(120): n is a, c, g, or t
  misc_feature (178)..(178): n is a, c, g, or t
tcactgtagaactggttactccagctgtcgattcattattcagcattaggaagtgtggagagtctggtggaagttgtgcctgagagccatctgcaatttgtggcacagcgccatctactnttcatccaggagcattctgggaaggatgaggcagcacagccaggctggacatggaacntaggcgtgcctggccctgatgcccatcggggcccagctcgggatgcccatcagcagccaggatggggtatgcatccgggccctcccgccgggggctgccccagttgttcctcaggatggtgcccgtcttctcctccttgaactgctgtcggtctgccccagtaccatgcggtgaagattcctcgggaagaccgacagcagttcaaggag

SEQ ID NO: 98242 - DNA, 843 bp, Homo Sapiens
ggggagagagtatgaagtcgacggcgcgccgaattcggcacgagggcttctgggagaggacagcccggtcagcaaactgcaggtcaagctggagccaggagtgaatcccagccacctgatgaacctgttcacctacgagaagggctactgcttcgtgtactacctgtcccagctctgcggagacccacagcgctttgatgactttctccgagcctatgtggagaagtacaagttcaccagcgtggtggcccaggacctgctggactccttccttgagcttcttcccggagctgaaggagcagagcgtgcactgccgggcagggctggaattcgagcgctggctcaatgccacaggcccgccgctggctgagccggacctgtctcagggatccagcctgacccggcccgtggaggcccttttccagctgtggaccgcagaacctctggaccaggcagctgcctcggccagcgccattgacatctccaagtggaggaccttccagacagcactcttcctggaccggctcctggatgggtccccgctgccgcaggaggtggtgatgagcctgtccaagtgctactcctccctgctggactcgatgaacgctgagatccgcatccgctggctgcagattgtggtccgcaacgactactatcctgacctccacagggtgcggcgcttcctggagagccagatgtcacgcatgtacacatccgctgtacaggactctgaccgggcctcagtcttccgctggagctctacaaccaggccgttgccccactggtaacatcataatcgtccggctggtccgcaaaccctcaacaaagaatgcagtgatacaa

SEQ ID NO: 98243 - DNA, 1363 bp, Homo Sapiens
  misc_feature (1269)..(1269): n is a, c, g, or t
agagtatgaagtcgacggcgcgccgaattcggcacgaggcagctccggagaggacatatccaatgatgatgatgacatgcaccctgcagcagccgggatggcagacggggtccacctcctagggttctctgatgagatcctccttcacatcctgagtcacgtccccagcacagatctgattctgaacgtccggcgtacctgtcggaagcttgcagccctgtgccttgacaagagcctcatccacaccgtgttgctgcaaaaggactatcaggcgagcgaggacaaagtgaggcagctggtgaaggagatcggccgggagatccagcagctgagcatggctggcagctactggctgcctggctccaccgtggaacacgtggcccgctgccgcagcctggtgaaggtgaacctctcgggctgccacctcacttccctgcgcctctccaagatgctctcggccctgcagcacctgcgctcgctggccatcgacgtgagccccggcttcgacgccagccagctgagcagcgagtgcaaggccaccctgagccgcgtgcgggagctcaagcagacgctgttcactccctcctacggcgtggtgccctgctgcaccagcctagagaagctgctgctctacttcgagattctggaccgcacgcgcgagggcgccatcctctcgggccagcttatggtgggccagagcaacgtgccgcactaccagaacctgcgggtcttctatgcgcgcctggcccccggctacatcaaccaggaggtggtgcggctctacctggctgtgcttagcgaccgcactcctcagaacctccacgccttcctcatctccgtccctgccagcttcgcggagagcggcgccaccaagaacctcctggactccatggcgcgcaatgtcgtgctggatgccctgcagctgcccaagtcctggctgaacggctcttccctcctgcagcacatgaaattcaacaacccgttctacttcagtttcagccgctgtaccctgtcaggcggccatctgatccagcaggtcatcaacggcgggaaggacctgcggagcctggccagcttgaacctcagcggctgcgtccactggctgtccccagactcgctgctccgcaaggcggaggacgacatcgacagcagcatcctggagacgctggtggcgtcctgctgcaacctgcgccaacctgaacctctcgggcgcccaccaccaaggctcgggaagggctggggccgccaccttctggcaaactccctggncccgggctggcgttacctgggggcttccctcttccctggcctgtcctggctccgtccgcctgaaattccggcggccgggagggccgaaacgggg

SEQ ID NO: 98244 - DNA, 1245 bp, Homo Sapiens
  misc_feature (134)..(190): n is a, c, g, or t
gagagtatgaagtcgacggcgcgccgaattcggcacgaggccgggccgcagcatggccgagccgctactcaggaaaaccttctcccgcctgcggggccgggagaaacttccccggaaaaagtcggacgccaagnnnnnnnnnnnnnnnnnnnnnnnnnnnnnnnnnnnnnnnnnnnnnnnnnnnnnnnnngctcccgaagggtcccaggccggagcagaggggccctccagccccgaggcatcaaggagccctgcacggggagcctacctgcaaagcctggagcccagtagccgccgatgggtgctgggtggggccaagccagctgaggacacctctttagggcctggggtacctggcactggggagcccgccggcgagatctggtacaaccccatccctgaggaagaccccagacctccagcacctgagcccccggggccacagcctggctcagctgagtcagagggcctggccccccaaggtgcagcccccgccagccccccaaccaaagcctcccgcaccaagtccccgggccccgccaggcgcctctccataaagatgaagaagctgccggaactgcggcgccgcctgagcctgcgaggcccccgggctggcagggagcgcgagagggctgcccctgcgggctccgtcatcagccgctaccacctggacagcagcgtggggggccccgggccggcagcagggcctgggggcacccggagcccgagggccggttacctcagcgacggggactcaccggagcgcccagctgggcccccatcacccacctccttccggccctacgaggtgggtcccgcagcccgggcacccccggccgcactctggggccgcctcagcctgcacctgtacggtctcggggggctgcggccagcgccgggggccacccccagggacctctgctgcctactgcaagtggatggggaggccagggcccgaacagggccactgcgaggggggccggacttcctgcggctggaccacaccttccacctggagctggaagccgcccggcatctgcgcgccctggtgcttgcgtggggaccttggcctgaaaaggcaccggccctttccccagggccccgtgttgctgcccacggcctttcgaggttgcaggcccaacacttgccgtccaccggacctcaagggctgctgttgccagttaccctgtcgacaatagaaacccctgcaacctgacccccgttttgggtgccctgccttccggt

SEQ ID NO: 98245 - DNA, 1247 bp, Homo Sapiens
ttatgtgtatagagaggtatgaagtcgacggcgcgccgaattcggcacgagggcacctgtcagggtccctgggagaggcagccctcggatctgcccctgcccacctcacgctgcgttccatgctggccccaggcgatgtcagtcctgctgcaggccaggactagttccacggccctgagcatgcgttagccccttcttgcctccatgcctcagtttacctcggagtgagctgcgggagacgtctccctgcctggccggggcggctctgtcgtagcggagggcagcggtggtgcagagccggagtccggagccggagccgcgccgcgccgcaccatggcgcccaccctggccactgcccatcggcgccgctggtggatggcctgcacggccgtgctggagaacctcctcttctcggcagtcctcctgggctggggctcgctgctcatcatgctcaagtcagagggcttttactcctacctgtgtaccgagccagagaatgtcaccaatggcacagtgggcggcacagcagagccggggcacgaggaggtgagctggatgaacggctggctcagctgccaggcccaggacgagatgctaaatttggccttcactgtgggctcctttctgctcagtgccatcaccctgcccctgggtatcgtcatggacaagtatggcccgaggaagctcaggctgctgggcagccgcctgcttcgcggtttcctgcttgctgattgcgtacggagcaagtaaaccaaacgctctctccgtgctcatcttcatcgccctggctctgaatggctttggtgggatgtgtatgaccttcacctcattaacactgcccaacatgttcggcgaccttcggtccacgtttattgccttgatgattgggtcctacgcctcctcggcagtcacctttccaggaatcaagctcatctatgatgctggtgtctccttcatcgtcgtcctcgtggtctgggccggctgctccgggctggttttcctcaactgcttctttaactggccacttgagcccttcccggggccggaagacatggactactcggtgaagatcaagttaacctgcatgggctttgaccccttaatctcatggtagctattttcatacaagtaacaacttgggactgaacataatatataaattatcttttaattccatggattctgttaattgctaatgttcataaacatgtatgtctaataataatttaagtatcatcaatctatta

SEQ ID NO: 98246 - DNA, 763 bp, Homo Sapiens
  misc_feature (629)..(630): n is a, c, g, or t
  misc_feature (724)..(724): n is a, c, g, or t
aaatgaagaatcgacggcgcccgattcggccgaggccggatgaggactgcagcgcctgcagctctcgcgccagcagctccaggtcacgggagacgccagcgagagcgccgaggacatcttcttccggcgggccaaggagggcatgggccaggacgaggcgcagttcagcgtggagatgccactcaccggcaaggcctacctgtgggccgacaagtaccggccacgcaagccgcgcttcttcaaccgcgtgcacacgggcttcgagtggaacaagtacaaccagacgcactacgactttgacaacccaccgcccaagatcgtgcagggatacaagttcaacatcttctaccccgacctcatcgacaagcgctccacgcccgagtacttcctggaggcctgcgccgacaacaaggatttcgccatcctgcgcttccacgcggggccgccctacgaggacatcgctttcaagatcgtcaaccgcgagtgggaatactcgcaccgccacggcttccgctgccagttttccaacggcatcttccagctgtggtttcacttcaagcgctaccgctatcggcggtgacggccctggggaacggcaggcagcactgaagccgggacctgctggcgcnncgatcgcactgcagaagagacctctgggacaccacatctgcaggactggccccactcacccgtgcggctggtgggtcatttcccgcacgggcangagggcgaggcacacggtgcacacccagtcgaatgccac

SEQ ID NO: 98247 - DNA, 930 bp, Homo Sapiens
gggacacgagagagaggaatcggggtttctgggtgacggtgatctcggggtgggcaggactccaaaggcccgtcgacccggtggtggactccttgcactgggattggacatatgcaagcgggagatttggggccggcgctcaaaatcggggggcgggggtggactcgggtttggaccccaggatccgatcagcggacccttgattcaacgtgaggtcccgaattgacgtccttccctcaaaacctccgggtctacaaaccaggaccctcaagacccttcagggctccagcgtgacatggctgaagcgcaccaggccgtgggcttccgaccctcgctgacctcggacggggctgaagtggaactcagtgcccctgtgctgcaggagatctacctctctggcctgcgctcctggaaaaggcatctctcacgtttctggaatgactttctcaccggtgtgtttcctgccagccccctcagttggcttttcctcttcagtgccatccagcttgcctggttcctccagctggatccttccttaggactgatggagaagatcaaagagttgctgcctgactggggtggacaacaccacgggctccggggggtcctggcagccgcgctgtttgcctcgtgtttgtggggagccctgatcttcacactgcacgtggccctgaggctgcttctgtcctaccacggctggcttcttgagccccacggagccatgtcctcccccaccaagaactggctggccctggtccgcatcttctctggccgacagcccgatgctggtcaggttaccagcgctccctggccacgccagcccgtgccctctgggccggacaccgtgcgcaagtacccggaggccgggccgggccaaactctccgacgaggaattcgcctgggccggggccgtgcgcagaaaaccggagg

SEQ ID NO: 98248 - DNA, 1064 bp, Homo Sapiens
gggacctgaaggctgagaacctcttgctggatgccgaggccaacatcaagattgctgactttggcttcagcaacgagttcacgctgggatcgaagctggacacgttctgcgggagccccccatatgccgccccggagctgtttcagggcaagaagtagcgaggcctgggtggcgaattcggaacgagggagaacctcttgctggatgccgaggccaacatcaagattgctgactttggcttcagcaacgagttcacgctgggatcgaagctggacacgttctgcgggagccccccatatgccgccccggagctgtttcagggcaagaaactgtgagagcatcctgcggagatttttggtgctgaacccagctaaacgctgtactctcgagcaaatcatgaaagacaaatggatcaacatcggctatgagggtgaggagttgaagccatacacagagcccgaggaggacttcggggacaccaagagaattgaggtgatggtgggtatgggctacacacgggaagaaatcaaagagtccttgaccagccagaagtacaacgaagtgaccgccacctacctcctgctgggcaggaagactgaggagggtggggaccggggcgccccagggctggccctggcacgggtgcgggcgcccagcgacaccaccaacggaacaagttccagcaaaggcaccagccacagcaaagggcagcggagttcctcttccacctaccaccgccagcgcaggcatagcgatttctgtggcccatcccctgcacccctgcaccccaaacgcagcccgacgagcacgggggaggcggagctgaaggaggagcggctgccaggccggaaggcgagctgcagcacccgcggggagtgggagtcaagggctgcccccctccagccccatggtcagcagcgcccacaaccccaacaaggcagagatcccagagcggcgggaagggacagcacgagcacccccaacaacctcccctcctagcatgatgacccgccagaaacacctaccgtttgcacagaaacgccccgggggcctggagcggcccg

SEQ ID NO: 98249 - DNA, 1159 bp, Homo Sapiens
gagagtatgaagtcgacggcgcgccgaattcggcacgaggttgagggcaagattgagcaagcacagcggtggattgataatcccacagtggatgaccgtggagtcggtcaggctgccatccgggggcttgtggccgaagggcatcgtctggctaatgttatgatggggccttatcggcaagatcttctcgccaagtgtgaccgagtggaccagctgacagcccagctggctgacctggctgccagaggggaaggggagagtcctcaggcacgagcacttgcatctcagctccaagactccttaaaggatctaaaagctcggatgcaggaggccatgactcaggaagtgtcagatgttttcagcgataccacaactcccatcaagctgttggcagtggcagccacggcgcctcctgatgcgcctaacagggaagaggtatttgatgagagggcagctaactttgaaaaccattcaggaaagcttggtgctacggccgagaaggcggctgcggttggtactgctaataaatcaacagtggaaggcattcaggcctcagtgaagacggcccgagaactcacaccccaggtggtctcggctgctcgtatcttacttaggaaccctggaaatcaagctgcttatgaacattttgagaccatgaagaaccagtggatcgataatgttgaaaaaatgacagggctggtggacgaagccattgataccaaatctctgttggatgcttcagaagaagcaattaaaaaagacctggacaagtgcaaggtagctatggccaacattcagcctcagatgctggttgctggggcaaccagtattgctcgtcgggccaaccggatcctgctggtggctaagagggaggtggagaattccgaggatcccaagttccgtgaggctgtgaaagctgcctctgatgaattgagcaaaaccatctccccgatggtgatggatgcaaaagctgtggctggaaacatttccgacccgggactgcaaaagagcttcctggactcaggatatcggatcctgggaactgtggccaaggtcagaagaagccttccaactcagaagctgaattccggcggctcaccaaacttgaccacttcgattaacgatgagctggtctcacacaacactctggctaagtgag

SEQ ID NO: 98250 - DNA, 781 bp, Homo Sapiens
agagtatgaagtcacggcgcgccgaattcggcacgaggggcgtatgagctgagcgtgctatgtgactgcgagatcgcactcatcatcttcaaccactccaacaagctgttccagtacgccagcaccgacatggacaaggtgctgctcaagtacacggagtacaatgagccacacgagagccgcaccaacgccgacatcatcgagaccctgaggaagaagggcttcaatggctgcgacagccccgagcccgacggggaggactcgctggaacagagccccctgctggaggacaagtaccgacgcgccagcgaggagctcgacgggctctcccggcgctatgggtcaactgtcccggcccccaactttgccatgcctgtcacggtgcccgtgtccaatcagagctcactgcagttcagcaatcccagcggctccctggtcacccattccctggtgacatcatccctcacggacccgcggatactgtccccccagcagccagcactacagaggaacagtgtgtctcctggcctgccccagcggccagctagtgcgggggccatgctggggggtgacctgaacagtgctaacggagcctgccccagccctgttgggaatggctacgtcagtgctcgggcttcccctggcctcctccctgtggccaatggcaacagcctaaacaaggtcatccctgccaagtctccgcccccacctacccacagcaaccagcttggagcccccaccgcaagcccgacctgcgagtcatcacttcccagcaggaaag

SEQ ID NO: 98251 - DNA, 1178 bp, Homo Sapiens
gacggatctccagatatttcaataatttgaattgaaccaagcgtgagctggaccatgttccagaagagtttgggcagtagcagcggccagaggcagctcagtgtcctaagtcaggcccctggatcatcttcacttgcacatcgagctcctggcttgagggtctgtaagaagaacggaacgcttcctcccacactggccagttggtactgtagacagccttgctctcctgagtcacatcctgaattgacagttgtaccatagggttgggttccttgttccctttcttcagctgtggtgggtacaattcagaggtcaccataggaagatcctgggcccgatccaggtagacaactaagatggcagctgacgggggatctggtcgagaggagactccccaattccactgtagaacctgctccagtttctctgcatctgacaaaagtgacagccattctagcctcaagtgaacttggccttgcccaccttgtagagggaaccaatcatccagaacgctagcctgtaacaccttccctacatccagcttcattctgcccagaaagtcatctttatctggatccttgtcgaacacctccacttcaatctcctgccctgggacctcgtgtaccatcacctcataagtctctccccactgtgggttgagttcttcatcaatgacacgactgcagaatgtctgggtacccaaacgcacaagtgcatatgggtctgacttgccctcaatcaggcccttcacatatttgtccttggaactcagccctcgagcagccagcaggtgaattcgaataatgcccctgggcagaggggaacgcaactgagccacatcttgaaggtcaggcacaaggggcaccagtaatcggttgggcaacacgaggaaggcagcaatggagtccatgatcatggtgtcagagagtgagctaagtcctgggatatccagcaggttggtcatccctgtccagttgatgtctagggtcgggcgtcggatgaagaacattgacacagcccccacgaagggaaggtccccaatgagtggctccagtatcacccgcaaaacgccatgtagctgcatgcccttgactcctgctttgcaaaaatatttcttcacttccacatcaatctgcacctcgtgccgaattcggcgcgccgtcgacttcatactctct

SEQ ID NO: 98252 - DNA, 865 bp, Homo Sapiens
gggggaagagtatgaagtcgacggcgcgccgaattcggcacgagggcggtggctgcggttgcgggaccggtggccgtctgcccggcccagcaccatgcacacgcttgtgttcttgagcacacggcaggtgctgcagtgccagccagctgcctgccaggccctgcccctgctgccacgcgaactcttccccctgctgttcaaggtggccttcatggacaagaagacagtggtactgcgcgagttggtacacacgtggcccttcccgctgctcagtttccagcagctgctacaggagtgtgcccactgcagccgtgccctcctgcaggagcggcctagcactgagagcatgcaggctgttatcctggggctgactgcccggctccacacctcagagcctggggccagcacacagcccctctgcaggaagcatgcgctgcgggtgctggacatgacgggcctcttggatgatggtgtggaacaggatcctggcaccatgagcatgtgggactgtactgctgccgtagctcgcacatgcattgcccagcagcagggtggggccgcagagcctgggccagcccccatccccgtggaggtgcgcgtggacctgcgggtgaaccgggcctcctatgcgttcctgcgggaggcactccgaagcagcgtgagcagcccgctgcggctctgctgccgggactgcgagctgaggacctgccatgcgcaacactgtgacctgctgcaactctggagcaagtgcctgcgcgcgtggactgccttcaaaattggcctgccgcttgtgtgtatccatctggccgttcaacctgtcactgtgtcaatttatggattagtccctcgatgaagaatcttttct

SEQ ID NO: 98253 - DNA, 763 bp, Homo Sapiens
gtgcgacagagtatgaagtcacggcgcgccgaattcggcacgaggcggcacgaggggcgccgcagcccttgccaccttccctgcacctgccctgcccggcctcatgtaccgcgcgctgtacgcgttccgctcggcggagcccaacgcgctggcgttcgccgcgggcgagaccttcctggtgctagagcgaagcagcgcgcactggtggctggccgcgcgggcgcgcagtggtgagacgggctacgtgccgccagcctacctgcgccgcctgcagggcctggagcaggatgtcctccaggccattgaccgggccatcgaggctgtacacaacacagccatgcgggatggtggcaagtacagcctggaacagcgtggagtcctccagaagctgatccaccaccggaaagagaccctgtcacgcagaggcccttcagcctccagtgttgcagttatgacctcatcaaccagtgaccaccacttggatgctgctgcagccaggcagcccaatggggtgtgtcgagctgggttcgagcggcaacacaacctacccagttctgagcatcttggggcagatggagcctctaccagatccacttccatcttcccgatcccaccaagcctcgcgaagcagaccaccaaaccgcccccacatgaagcccgagacgcaaggcctgaggcctcgggagggtgcccaaacccctgccttcgggggtactttgtgtcagggtcctcacacaacctcctgaaacctttaccgctccca

SEQ ID NO: 98254 - DNA, 860 bp, Homo Sapiens
tccttgcatggaaaccgcggcgcggctcggcgctccgggcctggcgttgtggcgccgcagcccttgccaccttccctgcacctgccctgcccggcctcatgtaccgcgcgctgtacgcgttccgctcggcggagcacaacgcgctggcgttcgccgcgggcgagaccttcctggtgctagagcgaagcagcgcgcactggtggctggcctgcgcgggcgcgcagtggtgagacgggctacgtgccgccagcctacctgcgccgcctgcagggcctggagcaggatgtcctccaggccattgaccgggccatcgaggctgtacacaacacagccatgcgggatggtggcaagtacagcctggaacagcgtggagtcctccagaagctgatccaccaccggaaagagaccctgtcacgcagaggcccttcagcctccagtgttgcagttatgacctcatcaaccagtgaccaccacttggatgctgctgcagccaggcagcccaatggggtgtgtccagctggggttcgagcggcagcacagcctacccagttctgagcatcttggggcagatggaggcctctaccagatccccacttccatcttccccagatcccaccacaggccttcgccgaacaggacccaccaaaccggcccccaccagtgaaagcgccgagacccgcgagggccctgaatggcctcctggggagtgggggggccaacaaacccatggccctcccgggggtgaacttctgtggtccagcggggtcccttaagtcaggcaagcaccttccctgtgggaccgccttctatacccaggtctcagacccaattctggaacccagggctcccaacttgtttca

SEQ ID NO: 98255 - DNA, 1115 bp, Homo Sapiens
  misc_feature (14)..(14): n is a, c, g, or t
  misc_feature (21)..(21): n is a, c, g, or t
cttttactttgcancaccgantttggcccttacggtctaagtagcgagcctgggtggcgaactcggcacgaggcccacctctactccaacctgaccaagccactcctggacgtggctgtgacttcctacaccctgcttcgggcggcccgctcccgtggagccggcacagcctggccctcggccatcgccggcctcgtggtgttcctcacggccaacgtgctgcgggccttctcgcccaagttcggggagctggtggcagaggaggcgcggcggaagggggagctgcgctacatgcactcgcgtgtggtggccaacaccgaggagatcgccttctatgggggccatgaggtggagctggccctgctacagcgctcctaccaggacctggcctcgcagatcaacctcatccttctggaacgcctgtggtatgttatgctggagcagttcctcatgaagtatgtgtggagcgcctcgggcctgctcatggtggctgtccccatcatcactgccactggctactcagagtcaggtgagaccccagggctccaagaggatccaggccaggggcctggtcccccataccgctgggtgctgaactcacgaagggcccaaactcagccagcccacccgcccacttcttgctgccggggccaactgaagccatggccgccaacctttgatgctttcagaaggttgaagctcgcccttgacccatccttggttgcctttttgccctcgggtggcacctcaacgcccttttgttacccactccggacaagaccccagaattggcaagtccaggaaaacctacagtgttacctttccccaagggagcagaaaaaccccttaaccccacctggtgccctggttcattcaaacccaacatgggtgattttagaaggaggggaagaaaagggtcgggaagaaacagggagattggaggacccccatcaaactcaacacaaacctcagggttatcccctacccccggtagacaaaactacccatagcgacctaagagagggccttatacaaagaacacagaggaaaaccaattatctaacctcagaatttgtgtgagggcagaaagattaagaaatgtgtaccggcggggt

SEQ ID NO: 98256 - DNA, 1001 bp, Homo Sapiens
  misc_feature (377)..(410): n is a, c, g, or t
  misc_feature (795)..(795): n is a, c, g, or t
gtgcgaggcctgggtggcgaattcggcacgaggcgggagcccagggcggtgccgggtgagacaaggccggggtttggctcggattcaccgcgaggtatctaggctgccatgatgccagggccaagacctcggaagggccctcaggccagaggccaaggggtggccgctgccaagcagatggggctctttatggagtttggccctgaggacatgctgctgggcatggatgaggctgaagatgatgaggacctggaggctgagctgctggctctcacaggggaagcacaaaccacaggcaagaagccagcacccaaggggcaggcccccctgcccatggcccacatcgagaagttggcggcagactgtatgcgggatgnnnnnnnnnnnnnnnnnnnnnnnnnnnnnnnnnnagatgcagagctgctgacggagctgcaggaggtcttaggggtggacgaggagactgagcccctggatggtgatgaggtagctgacccaggcggctctgaggaggagaacggcctagaagacactgaacctccagtgcagacagccgtcctgacagcttcagccccagcagctcaggccggagcatctcaggggctacacgctttgctggaggaacgggattcaccaactaccgagaggctgcggccagtgcccaaggaggcaggcgaaacaaccaaagcccaggccgctgcaagcgcggcctgaagaccttggagtcgcagctagcctctgtgaggagaggcagaaagatcaatgaggatgagatcccacctccagtggccttangaaagcgggcccctggcccccccagaaccagccaacaggagccccctgagacagaaccctcaagctccccctggccttggagtcaagacaaccccctccccaaccttgagacccagccctcccctgggcattttctgcccccagcccccgtttttccagaccttaaaaaccccaaaaccccggcggggggccccttggcttggtcc

SEQ ID NO: 98257 - DNA, 1112 bp, Homo Sapiens
  misc_feature (741)..(791): n is a, c, g, or t
  misc_feature (985)..(1045): n is a, c, g, or t
gagagtatgaagtcgacggcgcgccgaattcggcacgaggccgacagagcccccgacagcaggcccgaggaagccctggattcctcccggcagctccaggccgacatcttggccgccacccagaacctcaagtcccccaccagggctgcactgggcggtggggacggagccaggatggtggagggcaggggcgcagaggaagaggagaagggcagccaggagggggaccaggaagtccagggacatggggtcccagtggagacaccagaggcgcaggaggagccgtgctcaggggtccttgagggggctgtggtggccggtgagggccaaggggagctggaagggtctctcttgttagcccaggaagcccagggaccagtgggtccccccgaaagcccctgtgcttgcagcagtgtccaccccagtgtctaacagtcctcccgggctgccagccctgactgtcgggcccccaagtggtcacctccccgtgtatgaaaaggccttcagccctgactgcttcctgacactccctccttggcctccctgtggtgccaatcccagcatgtgctgattctacagcaggcagaaatgctggtccccggtgccccggaggaatcttaccaagtgccatcatccttcacctcagcagccccaaagggctacatcctacagcacagctcccctgacaaagtgagggagggcacgtgtccctgtgacagccaggataaaacatccctcaannnnnnnnnnnnnnnnnnnnnnnnnnnnnnnnnnnnnnnnnnnnnnnnnnntgctgacatctcttgataccaatagttctaaactaccctgtgcacatagttaagtcatctttttattaatatcatagttttcaattaaactttccttattaattatcattatattttcaatacaatttttatagcaaataacttcatttattatttagaggaaaataataattgttaaatttagaaatattagnnnnnnnnnnnnnnnnnnnnnnnnnnnnnnnnnnnnnnnnnnnnnnnnnnnnnnnnnnnnnttatctcattatactttaatttttctttttctttataatataattataaattcattttataccttat

SEQ ID NO: 98258 - DNA, 890 bp, Homo Sapiens
agagtatgaagtcgacggcgcgccgaattcggcacgaggagcgccttgggacagggggatttggaaatgtcatccgatggcacaatcaggaaacaggtgagcagattgccatcaagcagtgccggcaggagctcagcccccggaaccgagagcggtggtgcctggagatccagatcatgagaaggctgacccaccccaatgtggtggctgcccgagatgtccctgaggggatgcagaacttggcgcccaatgacctgcccctgctggccatggagtactgccaaggaggagatctccggaagtacctgaaccagtttgagaactgctgtggtctgcgggaaggtgccatcctcaccttgctgagtgacattgcctctgcgcttagataccttcatgaaaacagaatcatccatcgggatctaaagccagaaaacatcgtcctgcagcaaggagaacagaggttaatacacaaaattattgacctaggatatgccaaggagctggatcaggacagtctttgcacatcattcgtggggaccctgcagtacctggccccagagccactggagcagcagaagtacacagtgaccgtcgactactggagcttcggcaccctggcctttgagtgcatcacgggcttccggcccttcctccccaactggcagcccgtgcagtggcattcaaaagtgcggcagaagagtgaggtggacattgttgttagcgaagacttgaatggaacggtgaagttttcaagctctttaccctaccccaataatccttaacagtgtcctggctgagcgactggagaagtggctgcaactgatgctgatgtggcacccccgacagacggggcacggatcccacgtatggccccaatgctgtcataagcg

SEQ ID NO: 98259 - DNA, 1353 bp, Homo Sapiens
agagtatgaagtcgacggcgcgccgaattcggcacgaggtctgcataggggtgggaattaatcaaaaaccgcagaggctgaaattcctaatacctttcctttatcgtggttatagtcagctcatttccattccactatttcccataatgcttctgagagccactaacttgattgataaagatcctgcctctgctgagtgtacctgacagtaagtctaaagatgagagagtttagggactactctgttttagcaagagatattgtgggggtctttttgttttaactattgtcaggagattgggctaaagagaagacgacgagagtaaggaaataaagggaattgcctctggctagagagtagttaggtgttaatacctggtagagatgtaagggatatgacctccctttctttatgtgctcactgaggatctgaggggaccctgttaggagagcatagcatcatgatgtattagctgttcatctgctactggttggatggacataactattgtaactattcagtatttactggtaggcactgtcctctgattaaacttggcctactggcaatggctacttaggattgatctaagggccaaagtgcagggggggtgaactttattgtactttggatttggttaacctgttttcttcaagcctgaggttttatatacaaactccctgaatactctttttgccttgtatcttctcagcctcctagccaagtcctatgtaatatggaaaacaaacactgcagacttgagattcagttgccgatcaaggctctggcattcagagaacccttgcaactcgagaagctgtttttatttcgtttttgttttgatccagtgctctcccatctaacaactaaacaggagccatttcaaggcgggagatattttaaacacccaaaatgttgggtctgattttcaaacttttaaactcactactgatgattctcacgctaggcgaatttgtccaaacacatagtgtgtgtgttttggatacactggatgaccccaccccaaatctttgtattgtcccacattctccaacaataaagcacagagtgggatttaattaagcacacaaatgcctaaggcagaattttgagggtgggacgacaaaaaatggcacacgcagccacaaatggcacacccaccaccccgccagggacaaacgcctttcccgaacccaaaatggagcaactacgcctcgaaccattatcccccccggcacactccaacccgcgtgtgggaccccgccttgcccagcccaaccccctacgcccacagtcccggaccatggacgacccactccgaccgacgtcggcgtcgtgtaagcgagttcctc

SEQ ID NO: 98260 - DNA, 896 bp, Homo Sapiens
tttagggggagagggtatgaagtcgacggcgcgccgaattcggcacgaggactacgttccctctgcccctgagaggacctgccgagcaactttgatcaacgagtctccagtgctaagctacatggacctcgtgggcttcagctaccaggtggccaatggcatggagtttctggcctccaagaactgcgtccacagagacctggcggctaggaacgtgctcatctgtgaaggcaagctggtcaagatctgtgactttggcctggctcgagacatcatgcgggactcgaattacatctccaaaggcagcacctttttgcctttaaagtggatggctccggagagcatcttcaacagcctctacaccaccctgagcgacgtgtggtccttcgggatcctgctctgggagatcttcaccttgggtggcaccccttacccagagctgcccatgaacgagcagttctacaatgccatcaaacggggttaccgcatggcccagcctgcccatgcctccgacgagatctatgagatcatgcagaagtgctgggaagagaagtttgagattcggccccccttctcccagctggtgctgcttctcgagagactgttgggcgaaggttacaaaaagaagtaccagcaggtggatgaggagtttctgaggagtgaccacccagccatcctttcggacccaggcccgtttgcctggattccatggcctccgatctcccctggacgccagatccgtcctctatactgccgtgaagcccaaatgagggtgacaacgaatatatcatccccctgtctgacaccaaacccgaggttgctgacgagggccacaggagggtcccccagcctagccagttccacctgtatgaagaaacactacctaaccatctctt

SEQ ID NO: 98261 - DNA, 929 bp, Homo Sapiens
cgatagagtatgaagtcgacggcgcgccgaattcggcacgaggtgccccatcggagccgccggaggtggagtccgccccccggacccccgaactcctgtgcgtgcccctccatggtgctctaggctgtggagggcaaggccagtccccgggagcagggtgaggaaggggcccccacgcagccctgctgtggattggcgggaggaccccaggctgggccaacccagcagcccgcggccaggagcgggcatcccaatggggaaatcggccaggaggggctggggaagctggtgccttcgcccgcgccccgtgagctttacctccgtgcgacaagagcggtggctccgggcggggcccacgcagctggagcctccatctctcctgcgggaccagagcaccgggaagacctgaccgagacccaacgtccctgcccccgatctggggctctctgcaggccccaacttctgcgggactctccagtgggagcagcaagggttctcaggaacaacccctatacaaaccgggacagaggcacctcactactccttctgtgccccaccttctccactgaccctgccggagtgcagcacacacgagcaagcatttcaataaatcgcttgaaatggggaacatctgtactcggttaaagaaacgaccaggaattgggaactgcccggtgacgatcattcaccagttccagcaccaattgactgcacctgccatcctgcacgcctgctgcagccttcaggcagctggagaccagggacaccaggcagctatgcgttgctccagctccagacgtggccggccctgggaccctgcgcttcgctcccctgcgcttggcctcgttcttcgctccctgactgccctctgtccctgggtgggctctgctcgttgtgcccgtgcttccttgtgccggttcccctcagcc

SEQ ID NO: 98262 - DNA, 801 bp, Homo Sapiens
tagggcggagagtatgaagtcgacggcgcgccaattcggccgaggcggcagctgttgtggggcacgtgcgaggcttcgggccaggcttgacggccaggcgtctcctcccgctgcggttgcccccgcggccgcccgggccccggctggcgagcgggcaggcggccggcgccctggagcgggccatggacgagctgctgcgccgcgcggtgccgccgacgccggcctacgagctgcgcgagaagacaccggcgcccgccgagggtcagtgcgcggacttcgtgagcttctacggtgggctggccgagacggcccagcgggccgaactgctgggccgcctggcgcggggcttcggcgtggaccacggccaggtggcggagcagagcgccggcgtgctccatctgcgccagcagcagcgggaggcggcggtgctgctgcaggccgaggaccggctgcgctacgcgctggtgccgcgctatcgcggcctcttccaccacatcagcaagctggacggcggcgtgcgcttcctggtgcagctgcgggccgacctgctggaggcgcaggccctcaagctggtggaggggccggacgtccgggaaatgaatggggtgctgaaaggaatgctctcagaatggttttcctccgggttcctgaacctagaacgggttacctggcattcaccgtgtgaagtgcttcagaaaatcagtgaggctgaggctgtgcatcctgtaaaaaactggatggacatgaagcgccgcgttgggccctacagaaggtgttacttcttttctcactgttcgaccc

SEQ ID NO: 98263 - DNA, 757 bp, Homo Sapiens
gagagtatgaagtcgacggcgcgccgaattcggcacgagggcagcagccaccgagcgcggggcgaggtcgacgtcttctctcccttccccgcgcccacggtcgggcgagctggcgctggagcaaggtcccgggtccccgccgcagccctcggacctcagccagacccacccccttccgagcgagcccgtggggagtcaggaggacggcccccgcctccgagccgtgttcgatgccctggacggggatggggacggtttcgtccgcatcgaggacttcatccagtttgctacggtctacggggcagagcaggtgaaggacttaactaagtacttggatcccagtgggctcggcgtgatcagctttgaagacttctaccaagggatcacagccatcaaaaacggagatcctgatggccagtgctacggtggtgtcgcttctgcccaagatgaggagcccctggcctgcccggacgagttcgatgacttcgtcacctatgaggccaacgaggtgacgaacagcgcgtacatgggctccgagagcacctacagtgagtgtgagaccttcacggacgaggacaccagcaccctggtgcacctgagctgcacctgaagggacgccgacgtgccggcgctcggccgtgcctctgagtgctgacgcatggagagccgacatgtgcctgctgtgtcccagcagctcacccatggcgtcggcatccgggtcgggcgagaccttgagatcggaagctggtgcaattcc

SEQ ID NO: 98264 - DNA, 941 bp, Homo Sapiens
taggtatggcgtggaaggacacagcatctcctgagcatcatcgtatctgtctcagatgcgcagggtactgacacttcagagcagtgcagtctcaggctcttcccgcagctcgtcatcatctcgtcgtctgcagaacaggctgctgggatgacgccctggcgtacttcttagtgatctccacaaagtcatccagcgcgatgtagttcttggactcgctgctgaccaggcgctccagcatccgcctctgcttctgcagggacttgggcacggggcctggctgcgcccctccatcgtgctcgttgacctggccgacattctccagcagctccgccacggccacctgcttcttcttcttggggttgagcttccagtacatgaccagggctgccttgcgcacggccctctccaggtcggtctcggaggagagctgcctcacctcccgttcgttctcggacgtgatgcctcttctgtccgccaagcaccggcgaagcagcttcacagcctcgcgacggccctgcttcgcggcgaggaccagccagtccacagcggtgcagctgttgagttcttcatccgtgtcgccggccaactgcaggtagtgcttccccacctcagtctgtgccttggggtccccggccttggccctctccaggacttcttcaaaggggatttccatgtctccctttgtaggcccggtgccgtctgctctttcccggctcctggtatgctgggcctggggttcagcgggggccgctgcgtctctaacaccagggccagggccagcctggggtccgggtgctcggggcctttcgctcctctcctgctccaacgaggctgtggcattgagtcgggaacgcgcctggggctgcggtgctggcgggggctgtgggcaggaggggcccagccctcgtgccgaattcggcgcgccgtcgacttcatactct

SEQ ID NO: 98265 - DNA, 1045 bp, Homo Sapiens
aagcaacattgatagaggtatcagtcagagagcaaaaagaacgtaaacaccaatcgacagggagcatcttgctgaattggaagagagatgacgagagacaaggcaaaatggcataggatcagggttccagcagagtaaacttggctgtccacatccaggtgggctcgaagcgcagcagcaggtcggtgagggtgcggaagttctcccagggccttgctgtcctggaacaccttgagggtgcagatcaccatggagatgaaggacaggtagaagatgaccagcgggatgaagaaggcgaagaagtcgatggtgaggttgctgatgatgaagaagaagatgagcgcgttgatgtggtgcgtggggatgatggtggacagccagtgcatgcctgccctggaggccatgtcaatcaggtactccttgatctccatgatggcgtgcagggggtacttgaccaccttcagacgcagtggcaggtcctcagggctcttccccgccagctcgtcatcatcttcgtcgtcctgcaggaacaggctgctggggatgacgcccttggcgtacttcttagtgatctccacaaagtcatccagcgcgatgtagttcttggactcgctgctgaccaggcgctccagcatccgcctctgcttctgcagggacttgggcacggggcctggctgcgcccctccatcgtgctcgttgacctggccgacattctccagcagctccgccacggccacctgcttcttcttcttggggttgagcttccagtacatgaccagggctgccttgcgcacggccctctccaggtcggtctcggaggagagctgcctcacctcccgttcgttctcggacgtgatgcctcttctgtccgccaagcaccggcgaagcagcttcacagcctcgcgacggccctgcttcgcggcgaggaccagccagtccacagcggtgcagctgttgagttcttcatccgtgtcgccggccaactgcaggtagtgcttccccacctccctcgtgccgaattcggcgcgccgtcgacttcatactc

SEQ ID NO: 98266 - DNA, 1123 bp, Homo Sapiens
atggaagcatagctggccttggccatggagcagtaggggatgaagctgctgccgccctgtcactgctgtcatcgccatacacgtggatgatgcccccgggacgggcgccctccccagagtgggggatgtcttattggctcggagccccaggagctggcctcggtgcaggaccacagtctctgtcagggggatggagatgaccactccgttgccggtgcccacccagagccggctgcccgcgacaagcagggccgtgatgcgtacgaaggagaaacccagcttgccagtgcctagcatcttgctgacgtagggctcaatgtccacgtcctgtagatgctggtgcgtgtgtgcatggtagagcctcagggtggagtccaggcggatggacacccatacgccatcgccgatccacgccagctgccgcacctggctctcccgccgcgggtgggcgtcaaatgacttctctatctgcatggtcttgggctggatgacgtgcaccttgttcttgtagccacaccacacgcggtcgtacacaacagccatgcagcggatggagtggtgcgggtggcccaggtccattaggtgatagttgctcagatcccactggccatcttcaccacggtggaagatggccagggtcccgtccgccagagccaccagcacacggcctgtgacatgcaccaggctcagcacagaatccttcagcttgatggagtgcaggcacttcttccagttggccacagccgagtgcacatagagccagccgttctgggctcccagccacatggtgggtgcagcactgctgcctgctcccgtggggtccccgctgggctctggctctggccgtgtgctgctgctgtcaggctctggcccgttctcgctgccaggctgggggccagaggacggggtcggggctgggtcagtgaagacgtgctctgtgagaggcccgggccgcaatgtggctgtctctggctcgctgggcccagggtctggcacctccgtggcctctgtggcctcctctgtggactgggacgggttgaccttcccgttggcgatggtggccacctcccctgtgttaggagaggtgagcttgggggaaacagaaacgtgggaatgagatctt

SEQ ID NO: 98267 - DNA, 538 bp, Homo Sapiens
gggccgtgatgcgtacgaaggagaaacccagcttgccagtgcctagcatcttgctgacgtagggctcaatgtccacgtcctgtagatgctggtgcgtgtgtgcatggtagagcctcagggtggagtccaggcggatggacacccatacgccattcgccgatccacgccaagctgccgcacccggctctcccgccgcgggttgggcgtcaaatgacttctgtggagtcatggctgcccatcaacagggctggggagaggagaggaagttggggagccccaaacctgccacagctccagggccacctgcagtcccctcagacctcccagccagcgcctgctttgcgcctgttcaagcctgagtcataggtggtacaggggagatgggccccacgtagggcctcgtggacttccgtatggaagatgcgggagagctgctggccaagcaggagcctcttcccctccccgggggcctacgtggggcccgtcaccctaacgctgactgcctgaacgctgtaaacttaatcctggagtcacctca

SEQ ID NO: 98268 - DNA, 957 bp, Homo Sapiens
  misc_feature (97)..(124): n is a, c, g, or t
caccaaaccaaaccgacacccaccgtaccagaccggcaccaccccccccaaaaaaggccggaacccggtccggaattcccgcggaggcatcaacacnnnnnnnnnnnnnnnnnnnnnnnnnnnnttccaacaggctctggggcgccgagcggacaggaacgcagcacgggggctccgaggcggggtctgggtgttgaggggcgactggagccatggcggagtcggcgcctgctcggcacaggagaaaacgacgctccacacctttaacttcttccacacttccttcacaagcaacagagaaaagctcctattttcagaccaccgagatttcactctggacggtggtggccgctattcaggctgtggagaagaagatggagtcccaggctgcccggctacagagcctggaggggcgcacggggacagccgagaagaagctggctgactgcgagaagatggccgtggagttcgggaaccagctggagggcaagtgggccgtgctggggaccctgctgcaggagtacgggctactgcagaggcggctggagaacgtggagaacctgctgcgcaacaggaacttctggatcctgcggctgcccccgggcagcaagggggaggcccccaaggtgtccaggtcactggagaatgatggcgtctgtttcaccgagcaggaatgggaaaatctggaggattggcagaaggagctctacagaaacgtgatggagagtaactatgaaaaactggtctcttccgaagggtccttggccaaacagagggagaagccgaattgggtacaaagatgccgggtgacttggaagaggaaggtcctggtggtgcccatccagcaggtggggtcatgatcaaactgggagctacagtatacacaggaaggccctgcggaatcttcctggaagacgtctccatgcattgctgacagagcacggctatcctgagcca

SEQ ID NO: 98269 - DNA, 1208 bp, Homo Sapiens
  misc_feature (748)..(748): n is a, c, g, or t
  misc_feature (815)..(815): n is a, c, g, or t
gcggctggaccggtccggattccctgggatcggaagttgaccggggtgcggagctcctgggctgcagctcctggagtttccgaggttcgtgcgcgtctggtggcggcggcgtgatgttctcggcaggagcggagagtttgctccaccaggccagggagatccaggacgaggagctgaagaagttctgttcccggatctgtaaactgctgcaggcggaggacttggggccggacaccctcgactccctgcagaggctcttcctcatcatctcagccacgaagtacagccggaggctggagaagacatgcgtagacctgctgcaggccaccctcggcctgcctgcatgccccgagcagctccaggtgctttgcgccgccatcctgcgagagatgtccccctctgacagcctcagcctggcctgggaccacacgcagaacagccggcagctgagcctggtggcctccgttctcttggcccagggtgacagaaacgaggaggtcagagccgtgggccagggcgtgctacgagcgctggagagccggcagcctgagggacccagcctcagacacctcctccccgtcatggccaaggtcgtggtcctcagcccgggcaccctccaggaggaccaggccaccctgctcaacaagcggcctggttcgactggctgcgctacgccagcctccagcaagggctcccacactccggcggcttcttctccacgcccagggccccggcagccggggcccgnccacccaagtggaaccgggccggtagccccacagacttcttcacggtggctctccagcggccaccgncttcacagacgacccagtggctgaaacgtgccagccttcttcaatgctttcgggccgtggcttgctgcacaaccgggcccccaaagggcccccggcacccctgggacacagattgaacggggtcaaagccaggaagggctccaccttctggtcgggggaatctcccgccaactttcctttggcccggccgcccttgcttgccgccccccgggagacgggcttttccgggagggtgggccctttccaaataattggcccagcgcccttcatttgagacccaaagtaccccgaaggggacccccttaaaggaaaaggggggaactccccaaactgggcaaaaaaaccttttccctgggtgggggaggcccccgccccttgggtgcctttggaaaa

SEQ ID NO: 98270 - DNA, 733 bp, Homo Sapiens
tggttgaaacagagagcggagggggaggcgactggcaccattcctcgagtggtctctgtttccaccgacaagaggccattccttgggaggtcaggctggcccaggccacggaagctagggctcagcatctcgaaaggcggagaccacctgagtgcccctgggaaggcgaaggggaaacctgcccctgggtagccagatccaggccccagggcaccagccgcaaagagtcgctccttattggtggccatggcagctgcggtgtgagagtcccctggggtctgcagtgggcgggcgaggtcttcagccacagcccctgcccatgcccactgccccagcctgggaggctccgtacccgccctgcctggcctgcccactgggcctccaaaagtccggctggccgcctgcagagactggcttctacatactgggtcaggttgagggaactgggccgtagctgctggagtgggagggggaagggaggcggcggagccccgaggtcccggcgtcgggcagtctcttggatggagcgtcgcaatgtccggggctcgccgtactggggggctcctgggggggcacggctctaggctgggactgtcccggggcctctcggagcccgcccgcccacgtgaccgccccaaaatatccgacacattttctcccaaaccgcacactgactctgcaggcggggacacgcctcgtgccgaattcggcgcgccgtcgacttcatactctt

SEQ ID NO: 98271 - DNA, 1287 bp, Homo Sapiens
  misc_feature (889)..(889): n is a, c, g, or t
ggaagagtatgaagtcgacggcgcgccgaattcggcacgaggcgtcgtacaccatgggcctccacctccgcccctaccgtgtggggctgctcccggatggcctcctgttcctcttgctgctgctaatgctgctcgcggacccagcgctcccggccggacgtcaccccccagtggtgctggtccctggtgatttgggtaaccaactggaagccaagctggacaagccgacagtggtgcactacctctgctccaagaagaccgaaagctacttcacaatctggctgaacctggaactgctgctgcctgtcatcattgactgctggattgacaatatcaggctggtttacaacaaaacatccagggccacccagtttcctgatggtgtggatgtacgtgtccctggctttgggaagaccttctcactggagttcctggaccccagcaaaagcagcgtgggttcctatttccacaccatggtggagagccttgtgggctggggctacacacggggtgaggatgtccgaggggctccctatgactggcgccgagccccaaatgaaaacgggccctacttcctggccctccgcgagatgatcgaggagatgtaccagctgtatgggggccccgtggtgctggttgcccacagtatgggcaacatgtacacgctctactttctgcagcggcaaccgcaaggcctggaaggacaagtatatccggggccttcgtggtcactgggtgcgccctgggggggcgtggccaagaccctgcgcgtcctggcttcaggagacaacaaccggatcccagtcatcgggcccctgaagatccgggagcagcagcggtcagctgtctccaccagctggctgctgccctacaactacacatggtcacnctgagaaggtgttcgtgcagacacccacaatcaactacacactgcgggactaccgcaagttcttccaggacatcggctttgaagatggctggctcatgcggcaggacacagaaagggctggtggaagccacgatgccacctggcgtgcagctgcactgcctctatggcactggcgtccccacaccagactccttctactatgagagcttccctgaccgtgaccctaaaatctgctttggtgacggcgatggtactgtgaaacttgaagagtgccctgcagtgccagggcctggcagagccgccaggagcacgcagtgttgcctgccaggaactgccagggcagcgaagcacattcgagatgctgggccaacgccacccaccctggccctatcttgaaa

SEQ ID NO: 98272 - DNA, 948 bp, Homo Sapiens
  misc_feature (693)..(693): n is a, c, g, or t
  misc_feature (776)..(778): n is a, c, g, or t
  misc_feature (832)..(832): n is a, c, g, or t
gcgagagagtatgaagtcgacggcgcgccgaattcggcacgaggggggggcgcgccagctcgtagcaggggagcgcccgcggcgtcgggtttgggctggaggtcgccatggggcgaggcagcggcaccttcgagcgtctcctagacaaggcgaccagccagctcctgttggagacagattgggagtccattttgcagatctgcgacctgatccgccaaggggacacacaagcaaaatatgctgtgaattccatcaagaagaaagtcaacgacaagaacccacacgtcgccttgtatgccctggaggtcatggaatctgtggtaaagaactgtggccagacagttcatgatgaggtggccaacaagcagaccatggaggagctgaaggacctgctgaagagacaagtggaggtaaacgtccgtaacaagatcctgtacctgatccaggcctgggcgcatgccttccggaacgagcccaagtacaaggtggtccaggacacctaccagatcatgaaggtggaggggcacgtctttccagaattcaaagagagcgatgccatgtttgctgccgagagagccccagactgggtggacgctgaggaatgccaccgctgcagggtgcagttcggggtgatgacccgtaagcaccactgccgggcgtgtgggcagatattctgtggaaagtgttcttccnagtactcaaccatcccccagtttgcatcgagaaggagtgcgcgctgtgaccctgctaccacagctgacaggaagcggaggaannngcactcacactgactgccccgatactgacacccctgtctacatccactgccccnacgaaaaacgcctcagagagagaatcatcgcctgccttccatcagcgagaagaagctaaaatcattatgtacaggggactgcctgcctacccccaactgattctgaattggctgga

SEQ ID NO: 98273 - DNA, 703 bp, Homo Sapiens
  misc_feature (633)..(633): n is a, c, g, or t
tacgggggaagagtatgaagtgacggcgcgccgaattcggcacgaggggtggcaggggccatgcaggcatgcgggcagctctgctctggggcccctggggagcaggactctcaagtcagcgagatcctcagtgccttggagcgcagggtgctggacagtgaggggcagctgcggctggtgggctccggcctgcacacggtggaagcagcgggggaggcccggcaggccacgctggagggattacaagaggttgtgggccggctccaggatcgtgtggatgcccaggatgagacagctgcagagttcacactacggctgaatctcactgcggcccggctaggccaactggaggggctgctgcaggcccatggggatgagggctgtggggcctgtggcggagtccaagaggaactaggccgccttcgggatggtgtggagcgctgctcctgccccctgttgcctcctcggggtcctggggctggtccaggtgttgggggcccaagccgtgggcccctggacggcttcagcgtgtttgggggcagctcaggctcagccctgcaggccctgcaaggagagctctctgaggttattctcagcttcagctccctcaatgactcactgaatgagctccanaccactgtggagggccacggcgctgatctggctgacctgggggcaaccaaggaccgtatcatttctgaga

SEQ ID NO: 98274 - DNA, 1186 bp, Homo Sapiens
  misc_feature (1041)..(1041): n is a, c, g, or t
aaggaagcgaggcctgggtggcgaattcggcacgaggccgccatcttagatggcgggagtaagaggaaaacgattgtgaggcgggaacggctttctgctgccttttttgggccccgaaaagggtcagctggccgggctttggggcgcgtgccctgaggcgcggagcgcgtttgctacgatgcgggggctgctcggggctccgtcccctgggctggggacgcgccgaatgtgaccgcctcccgctccctcacccgccgcggggaggaggagcgggcgagaagctgccgccgaacgacaggacgttggggcggcctggctccctcaggtttaagaattgtttaagctgcatcaatggagcacatacagggagcttggaagacgatcagcaatggttttggattcaaagatgccgtgtttgatggctccagctgcatctctcctacaatagttcagcagtttggctatcagcgccgggcatcagatgatggcaaactcacagatccttctaagacaagcaacactatccgtgttttcttgccgaacaagcaaagaacagtggtcaatgtgcgaaatggaatgagcttgcatgactgccttatgaaagcactcaaggtgaggggcctgcaaccagagtgctgtgcagtgttcagacttctccacgaacacaaaggtaaaaaagcacgcttagattggaatactgatgctgcgtctttgattggagaagaacttcaagtagatttcctggatcatgttcccctcacaacacacaactttgctcggaagacgttccctgaagcttgccttctgggacatctgtcaagaaattcctgctcaatggattttcgatgtcagacttggtggctacaaatttcatgagcactgtagcaccaaagtacctactatgtgtgtggactggagtaacatcagacaactcttattgtttccaaattccactattggtgatagtggagtcccagcactaccttctttgactatgcgtcgtatgcgagagtctgtttccaggatgcctgttagttccancacagatattctaccctcacgcttccctttaacaccccagtcctcactgaggttcctctcccaaggcgagtcgactcacaccatgtccatgtcacacacctgctgtgagcagtgatgagatcatccatccagcatcccctgccga

SEQ ID NO: 98275 - DNA, 996 bp, Homo Sapiens
cctgggtggcgaattcggcacgagggtctgggccgcccgagagtcttaatcgcgggcgcttgggccgccatcttagatggcgggagtaagaggaaaacgattgtgaggcgggaacggctttctgctgccttttttgggccccgaaaagggtcagctggccgggctttggggcgcgtgccctgaggcgcggagcgcgtttgctacgatgcgggggctgctcggggctccgtcccctgggctggggacgcgccgaatgtgaccgcctcccgctccctcacccgccgcggggaggaggagcgggcgagaagctgccgccgaacgacaggacgttggggcggcctggctccctcaggtttaagaattgtttaagctgcatcaatggagcacatacagggagcttggaagacgatcagcaatggttttggattcaaagatgccgtgtttgatggctccagctgcatctctcctacaatagttcagcagtttggctatcagcgccgggcatcagatgatggcaaactcacagatccttctaagacaagcaacactatccgtgttttcttgccgaacaagcaaagaacagtggtcaatgtgcgaaatggaatgagcttgcaatgactgccttatgaaagcactcaaggggaggggcctgcaacccgagtgctgtgcagtgttcaaacttctccacgaacacaaaggtaaaaaagcacgccttagattggaatactgatgctgcgtcctttgattgggaaaagaaccttcaaggtagattttcctgggatcattgttccccctccccaacaacaacaacttttgcttcggaaagaacgttccctggaaagcttggcccttcctggggacattcttgtccaaaaaaattccctggcctccagggggattttccaatggttcacaactttggtgggctttaccaccatttttcccttggaacccccttggttaacccaccccaaaagagaacccccaaacctaaat

SEQ ID NO: 98276 - DNA, 862 bp, Homo Sapiens
  misc_feature (371)..(371): n is a, c, g, or t
aagggcgagagagtaatgaagtcgacggcgcgccgaattcggcacgagggcgaaaacaacagctggggctgcgagcgcccccgccccggccccgagagcacgccggcccagtcccccacctggggcgcccgtctgcccaccatgaggaagatccgcgccaatgccatcgccatcctgaccgtagcctggatcctgggcactttctactacttatggctaggacaaccgagcccacgcagcatcctccggcggccgtgggcgcgcagagggcaggcaggaggtctggagcagctccgcgaggaccgcaccatcccgctcattgtgacaggaactccctcgaaaggccttgatgagaaggccctacctgtcgngccaagcagctgaaggctggagaggaaccctacagacagcacgccttcaaccagctggagatgtgacaagctgagcccaaaccggcccatccgggacacccgccattacagctgcccatctgtgtcctactcctcggacctgccagccaccagcgtcatcatcaccttccacaatgaggcccgttccaccctgctgcgcacagtgaagagtgtcctgaaccgaactcctgccaacttgatccaggagatcattttagtggatgacttcagctcagatccggaagactgtctactcctgaccaggatccccaaggtcaagtgcctgcgcaatgatcggcgggaagggctgatccggtcccgagtgcgtggggcggacgtggctgcagctaccgttctcacctttctggatagccactgcgaagtgaacaccgagtggcttgccgccatgctgcagcgggtgcaggagggaccacaccgcgtggtgagtccca

SEQ ID NO: 98277 - DNA, 797 bp, Homo Sapiens
tgttgagagagtatgaagtcacggcgcgccgaattcggcacgaggggagacttacctgagccacctggaggcactgctgctgcccatgaagcctttgaaagccgctgccaccacctctcagccggtgctgacgagtcagcagatcgagaccatcttcttcaaagtgcctgagctctacgagatccacaaggagttctatgatgggctcttcccccgcgtgcagcagtggagccaccagcagcgggtgggcgacctcttccagaagctggccagccagctgggtgtgtaccgggccttcgtggacaactacggagttgccatggaaatggctgagaagtgctgtcaggccaatgctcagtttgcagaaatctccgagaacctgagagccagaagcaacaaagatgccaaggatccaacgaccaagaactctctggaaactctgctctacaagcctgtggaccgtgtgacgaggagcacgctggtcctccatgacttgctgaagcacactcctgccagccaccctgaccaccccttgctgcaggacgccctccgcatctcacagaacttcctgtccagcatcaatgaggagatcacaccccgacgacagtccatgacggtgaagaatggagagcaccggcagctgctgaaggacagcttcatggtggagctggtggagggggaccgcagctgcgcacgtcttctgttcccgactgcttctctgcacagctcagaagcgagcgagggcaaccagcatatgactgcaatgtacatcgctcacgattcactccgatgtgaga

SEQ ID NO: 98278 - DNA, 842 bp, Homo Sapiens
ttatgggcgagagagtatgaagtcgacggcgcgccgaattcggcacgaggtattattacccagacagcctcgtgggcacagactcgcacactaccatgattgatggcttgggcattcttggttggggtgtcggtggtattgaagcagaagctgtcatgctgggtcagccaatcagtatggtgcttcctcaggtgattggctacaggctgatggggaagccccaccctctggtaacatccactgacatcgtgctcaccattaccaagcacctccgccaggttggggtagtgggcaaatttgtcgagttcttcgggcctggagtagcccagttgtccattgctgaccgagctacgattgctaacatgtgtccagagtacggagcaactgctgcctttttcccagttgatgaagttagtatcacgtacctggtgcaaacaggtcgtgatgaagaaaaattaaagtatattaaaaaatatcttcaggctgtaggaatgtttcgagatttcaatgacccttctcaagacccagacttcacccaggttgtggaattagatttgaaaacagtagtgccttgctgtagtggacccaaaaggcctcaggacaaagttgctgtgtccgacatgaaaaaggactttgagagctgccttggagccaagcaaggatttaaaggattcaagttgctcctgacatcatatgaccatagactttaccatgatacactgagtcaccctgctcatgtctgtgtcatgctgcatacactgccacaccatatcgtcgtattagggagatgtacagaacttgatctgcgactatctaataatactgcctggagctgcctctca

SEQ ID NO: 98279 - DNA, 520 bp, Homo Sapiens
  misc_feature (26)..(26): n is a, c, g, or t
  misc_feature (68)..(68): n is a, c, g, or t
ggccccaaggggtttgcggcgtacgntgggcgccaaaaacttttctgctcagtaggcttactttcagngtgcaccctgtctaaggttacgcccagttgtccattgctgaccgagctacgatgctaacatgtgtccagagtacggagcaactgctgcctttttcccagttgatgaagttagtatcacgtacctggtgcaaacaggtcgtgatgaagaaaaattaaagtatattaaaaaatatcttcaggctgtaggaatgtttcgagatttcaatgacccttctcaagacccagacttcacccaggttgtggaattagatttgaaaacagtagtgccttgctgtagtggacccaaaaggcctcaggacaaagttgctgtgtccgacatgaaaaaggactttgagagctgccttggagccaagcaaggatttaaaggattccaagttgctcctgaacatcataatgaccataagacctttatctatgataacactgagttcacccttgctcatggttctgtg

SEQ ID NO: 98280 - DNA, 462 bp, Homo Sapiens
atggtgggaagagtatgaagtcgacggcgcgccgaattcggcacgaggtgagagagagaatggatgtgtgtgtgtttacgaataaacttggaggggagggggcaacaggggtgggttttcgggctgagaaatgggaacactgtggggctgctgcaagcaggacttgggccttaaacattccaggagagtgttctcgggagtagccccgggaaggactttaacagaggttaacacagaaatctgcctcctgggccatgccgcttctaaggcctgtttcttctcatgagccccagcacaagacagatgggccagttctcacagtggataacttcccctgcctgagcaagagatgggatagtatctgggatctgtccatcaccagactctgagcttaataaggcagctgaatgaagggaggtaacggacccctgagaggggcactgaagtctgcagtgggggggg

SEQ ID NO: 98281 - DNA, 1015 bp, Homo Sapiens
  misc_feature (12)..(12): n is a, c, g, or t
gagtatgaagtnacggcgcgccgaattcggcacgaggtgaaatggccgcccgggacgagctcggcctcggcggggattctcttgaggccatgcccgtgccggccgccagaggtcgcccgaggatcacgaatgggcccgaggagctggctgccccttcccccgcggccttggctgattatgaggggaaggatgtggccaccagggtcggagaggcctggcaggagaggcctggagctccaagaggtggccaaggagacccagctgtacccgctcagcaacctgcagatcccagcaccccagagcggcagagcagccccagcggatctgagcaacttgtcagacgagagagttgtggcagcagggggaggaacccctcgagctgcatggtcactgtaactgtcactgccacatctgagcagcctcacatttatattccagcccccgcaagtgaattggactccagctctaccaccaaagggattctcttcgtgaaggagtacgtgaatgctagtgaagtgtcttctgggaagccagtatctgcacgctatagcaacgtcagcagcattgaggactcattcgccatggagaagaagcctccatgtggcagcactccatactctgagaggacaactggagggatctgtacttactgcaaccgtgagatccgagactgtccaaagattaccctagaacatcttggtatctgctgccatgaatattgctttaagtgtgggatttgcagtaaaccgatgggcgatctcctggatcagatcttcattcaccgtgacaccattcactgtgggaaatgctatgagaagctcttctagcgaccccccaccgccaggctgatcagaagctgatgactcgtggacaaatttggctgtccccagttttgccccaagttgctgtctccccttccctcacctcctccctccctgtttgatttcttcatgcttttgcccttctcaagttgaagttgcatacatccaatatcgtatcttaaaaatgctatgat

SEQ ID NO: 98282 - DNA, 893 bp, Homo Sapiens
gaagagtatgaagtcgacggcgcgccgattcggcacgaggctcacagccgacgaggcaacaattaggctttggggataaaacgaggtgcggagagcgggctggggcatttctccccgagatggcgggtctgacggcggcggccccgcggcccggagtcctcctgctcctgctgtccatcctccacccctctcggcctggaggggtccctggggccattcctggtggagttcctggaggagtcttttatccaggggctggtctcggagcccttggaggaggagcgctggggcctggaggcaaacctcttaagccagttcccggagggcttgcgggtgctggccttggggcagggctcggcgccttccccgcagttacctttccgggggctctggtgcctggtggagtggctgacgctgctgcagcctataaagctgctaaggctggcgctgggcttggtggtgtcccaggagttggtggcttaggagtgtctgcaggtgcggtggttcctcagcctggagccggagtgaagcctgggaaagtgccgggtgtggggctgccaggtgtatacccaggtggcgtgctcccaggagctcggttccccggtgtgggggtgctccctggagttcccactggagcaggagttaagcccaaggctccaggtgtaggtggagcttttgctggatcccaggagttggacctttgggggacgcaactggagtccactgggtatccatcaggccccagctgctggtgctatgactgcctaacacaggaactgccttgctatggccgagatgctgtcacggcagctgtaccacggacaggtggcccgcacaccacgcctacacacaatcgtcgacccgtctctggtgaggcggtcgtgctgatcgat

SEQ ID NO: 98283 - DNA, 1113 bp, Homo Sapiens
ccgccaccacgacgggaaatgaagggcctcccgaaagagatcgcacttgaccgtgggcttccccttaagcgcgcttggtttgcgggcaattgcacgagcgggcaggttggatgtccccgcacccctgggagattccctgccaatttccagggaatttgcgcgcagggcccccccggggaccacccaggcccctttccaaacccccaggggaggactccgggttgctcccagccccgaacttttggctgctgctttagctgcccgctgcttgctgctgcctggggggcccaaccccctgttccctgttgggtaaccagccttgcccggtgcaccagccactcctccggggcccatagccatagggcagtttccctgtggtgtagggccagtccatagccaccaggcagcttgggggccttgatgggataccccagtgggactccagttgcggtcccccaaagggtccaactcctgggattccagcaaaagctccacctacacctggagccttgggcttaactcctgctccagtgggaactccagggagcacccccacaccggggaaccgagctcctgggagcacgccacctgggtatacacctggcagccccacacccggcactttcccaggcttcactccggctccaggctgaggaaccaccgcacctgcagacactcctaagccaccaactcctgggacaccaccaagcccagcgccagccttagcagctttataggctgcagcagcgtcagccactccaccaggcaccagagcccccggaaaggtaactgcggggaaggcgccgagccctgccccaaggccagcacccgcaagccctccgggaactggcttaagaggtttgcctccaggccccagcgctcctcctccaagggctccgagaccagcccctggataaaagactcctccaggaactccaccaggaatggccccagggacccctccaggccgagaggggtggaggatggacagcaggagcaggaggactccgggccgcgaggccgccgccgtcagacccgccatctcgggtctggggagaaatgccccagcccgctctccgcacctcgttttatcccccaaagcgctaagttgtt

SEQ ID NO: 98284 - DNA, 838 bp, Homo Sapiens
agtatgaagtcgacggcgcgccgaattcggcacgagggtgtgaagcagtgtcgttgcatatccatcgatttggattaagccaaatccaggtgcacccagcatgtcctaggaatgcagccccaggaagtcccagacctaaaacaaccagattcttacttggcttaaacctagaggccagaagaacccccagctgcctcctggcaggagcctgcttgtgcgtagttcgtgtgcatgagtgtggatgggtgcctgtgggtgtttttagacaccagagaaaacacagtctctgctagagagcactccctatttttgtaaacatatctgctttaatggggatgtaccagaaacccacctcaccccggctcacatctaaaggggcggggccgtggtctggttctgactttgtgtttttgtgccctcctggggaccagaatctcctttcggaatgaatgttcatggaagaggctcctctgagggcaagagacctgttttagtgctgcattcgacatggaaaagtccttttaacctgtgcttgcatcctcctttcctcctcctcctcacaatccatctcttcttaagttgatagtgactatgtcagtctaatctcttgtttgccaaggttcctaaattaattcacttaaccatgatgcaaatgtttttcattttgtgaagaccctccagactctgggagaggctggtgtgggcaaggacaagcaggatagtggagtgagaaagggagggtggagggtgaggccaaatcaggtccagcaaaagtcagtagggacattgcagaagtttgaaaggccataccagacacaggctgatgcttttagaagtc

SEQ ID NO: 98285 - DNA, 1058 bp, Homo Sapiens
agagtatgaagtcgacggcgcgccgaattcggcacgaggcgtgacccggcccgagtgcgggcggtggaaggcggaagtaggagaggagttcggcgccgcttctgtggccacggcagcttcacggtgatgatatggcatctgccagctctagccgggcaggagtggccctgccttttgagaagtctcagctcactttgaaagtggtgtccgcaaagcccaaggtgcataatcgtcaacctcgaattaactcctacgtggaggtggcggtggatggactccccagtgagaccaagaagactgggaagcgcattgggagctctgagcttctctggaatgagatcatcattttgaatgtcacggcacagagtcatttagatttaaaggtctggagctgccataccttgagaaatgaactgctaggcaccgcatctgtcaacctctccaacgtcttgaagaacaatgggggcaaaatggagaacatgcagctgaccctgaacctgcagacggagaacaaaggcagcgttgtctcaggcggagagctgacaattttcctggacgggccaactgttgatctgggaaatgtgcctaatggcagtgccctgacagatggatcacagctgccttcgagagactccagtggaacagcagtagctccagagaaccggcaccagccccccagcacaaactgctttggtggaagatcccggacgcacagacattcgggtgcttcagccagaacaaccccagcaaccggcgagcaaagccccggtgctcggagccggcaccgccagcccgtcaagaactcaggccacagtggcttggccaatggcacagtgaatgatgaacccacaacagccactgatcccgaagaaccttccgttgttggtgtgacgtccccacctgctgcacccttgagtgtgacccccgaatcccaacacgacttctctccctgccccagccacaccggctgaaggagaggaacccagcactttcgggtacacagcagctccccagcggctgcccagggccccgacgctcttgctgctggatggggaaca

SEQ ID NO: 98286 - DNA, 1444 bp, Homo Sapiens
  misc_feature (129)..(182): n is a, c, g, or t
  misc_feature (980)..(980): n is a, c, g, or t
  misc_feature (1078)..(1078): n is a, c, g, or t
  misc_feature (1082)..(1083): n is a, c, g, or t
  misc_feature (1252)..(1252): n is a, c, g, or t
  misc_feature (1313)..(1313): n is a, c, g, or t
taacaacactcacgagccccttcaggtcctaggtagcgagcctgcgtggcgaattcggcacgagggaacgcagaggcgggctggtgtctctggacggggactggaatttcatctgaatgactgcccctnnnnnnnnnnnnnnnnnnnnnnnnnnnnnnnnnnnnnnnnnnnnnnnnnnnnnngtcagccagccgggggacgcctgcaccgtggccccgggaccgccggcctgcccctcccgccccgtccggatctagcagacctcggcgcggccgacctcgcctcctggccccgcagaccccgggctccggcccctgcgagggaggtggggcgcccacgagccagggaggagccgccgctgccaccgccgacggagaaactgtgctgatccccagctccgggtgacactgggcgcacacccctgggcctcgagatgacgaagggccgtggctggctttttctcccccgatctgcgccgcctgcgcgggcggcgggggagttaggccccatctccaccgagggggctcctctcctggcctaagaagagaaacccacggccccccaaggcatggcttttgcctccctacaagaagcgggctccgcaggcccctcgcggggtttctaccccccggaccacaggtccgccgcaaaaaaaaggggggtttcacgacgccccctccgacaagagcgattggtccgtcccgcccggcgccgcacaaaccgcagcagtcccccacctcaactccagcggcccccacccgtccacacatgatatcgcgccctgcgcaaacggcgttcgcacccgcacgtcggtcgccctcaataaccccttcgcctctcggacacccccaccaccggtacccacgggtcacacccaaatcacaatatataatgcggcaaggagggagccgataggggcaaagatgtgggtgcgggggaggagggaacgtagagagacctcacgtcgcgaccagtgatgnacagacgaaccccattgcggaggcagcgcgggtcgcttctgacaaggcgcgcacaccccaaagacaaaggccgaaaacacataaataaaacaggcccngagnnaacacctaccacagaataggggacggtggagggggagtaccccgtggcgcgccccaccaccacaaaaatacgccgccaagcgtgccgactacaccacacgcgacctccccccttcgccgaaaacaatacgggatacccgccccgggcgaggcgagcctcccaggctgangatgaacatccgtcgtggggcgggaagagatggcccaacgtggagtgaaatgggcgggggngagaagagagtagctgtgcgtttttagcctcgagctagcacccagcccgaacgcacacaccccgcgcgccgtgacgcggtgacccaccgcacgtcccgccccacacacaacgtacgaatcgccaacaaaac

SEQ ID NO: 98287 - DNA, 939 bp, Homo Sapiens
  misc_feature (854)..(854): n is a, c, g, or t
gagagagtatgaagtcgacggcgcgccgaattcggcacgaggggtactgctgtggctccccgtcctggtgcgggacctgtgccccgcgcttcagccctccccgcacagcctactgattcccctgccgcccttgctcacctcctgctcgccatggagtcgctggttttcgcgcggcgctccggccccactccctcggccgcagagctagcccggccgctggcggaagggctgatcaagtcgcccaagcccctaatgaagaagcaggcggtgaagcggcaccaccacaagcacaacctgcggcaccgctacgagttcctggagaccctgggcaaaggcacctacgggaaggtgaagaaggcgcgggagagctcggggcgcctggtggccatcaagtcaatccggaaggacaaaatcaaagatgagcaagatctgatgcacatacggagggagattgagatcatgtcatcactcaaccaccctcacatcattgccatccatgaagtgtttgagaacagcagcaagatcgtgatcgtcatggagtatgccagccggggcgacctttatgactacatcagcgagcggcagcagctcagtgagcgcgaagctaggcatttcttccggcagatcgtctctgccgtgcactattgccatcagaacagagttgtccaccgagatctcaagctggagaacatcctcttggatgccaatgggaatatcaagattgctgacttcggcctctccaacctctaccatcaaggcaagttcctgcagacattctgtgggagccccctctatgcctcgccagagattgtcaatgggaagccctacacagggcccgagggtggacagctggntcccctgggtggttcctcctctacatccctggtggcatggccaccatggcccctttgaatgggccttgaaccataaggaatcccc

SEQ ID NO: 98288 - DNA, 1178 bp, Homo Sapiens
tcccgggatcggcctccccctccctggttccgcgttctggttccgccatggaatccaacaaggatgaagctgagcgctgtatcagcatcgccctcaaggccatccagagcaaccagcccgaccgggcgctccgcttcctggagaaggcacagcggctgtatccgacgccgcgagttcgcgccctgattgagtccctcaaccagaaaccacagactgccggtgaccaacccccacccacagacacaacccatgccacccacaggaaagcaggtgggaccgatgccccctcggccaacggtgaagctggaggagagagcaccaaaggctacactgcagaacaggttgcagctgtgaaaagggtcaagcaatgtaaagattactatgagatcctgggggtgagcagaggggcctcggatgaggacctgaagaaggcctaccgcagactggccctcaaattccacccagacaagaaccacgcacctggtgccactgaagccttcaaagccattggcacagcatatgcggtactcagcaacccggagaagaggaagcagtatgaccagttcggcgatgacaagagccaggcggcccggcacggccatgggcatggggatttccaccgtggctttgaggccgacatctcccctgaagacctcttcaacatgttctttggcggcggcttcccttctagtaacgtccacgtctacagcaacggccgcatgcgctatacctaccagcaaaggcaggaccgcagggacaaccagggtgatggcgggctaggggtgtttgtgcagctgatgcctatcctcatcctgattctcgtgtcagctctcagccagctcatggtctccagtccaccctacagtctgagtccaagaccgtccgtgggccacatccacaggcgagtcactgaaccaacctgggtgtcgtccaactatgtggggagaacactttctccgaagagtacacaggctccagcctcaaaacggtcaaaccggaaatgtggaaaaatgattattatccgcccaactccggaaccaacttgctggaagggaaaacccaccaaaagggaagggctttgcttaacccgggcacgctaattttggcggaacccgatatgtaccccccgaaaccccggaagatggggcaacccccaacttgcaaccgaaatggttcaa

SEQ ID NO: 98289 - DNA, 845 bp, Homo Sapiens
gcgaaagagtatgaagtcgacggcgcgccgaattcggcacgaggggagtcagctcctcggggataccatcccccgacctcaccttctacctaccgcagcctgctagcctttccgggagaaaaggcatccttacctctggttgaaggtctcggggcctccccctctgcatccggaccctctccccatcccagcctcccatgccaaggcccgccttgtcagtcacttccttttgtcatcggcttggcaaacgggagagaaaacagagcttcatgggaaacagcggcaacagttggtcccatacacctttccccaagttggagctaggcctggggccccagcccatggcgccccgggagctccctacctgctccatctgcctggagaggttgcgcgaccccatctcgctggactgtggccacgacttctgcatacggtgcttcagcacacaccgtctcccgggctgtgagccgccctgctgtcctgagtgccggaagatatgcaagcagaagaggggcctccggagcctgggcgagaagatgaagctcctgccgcagcggccgctgccccctgcactgcaggagacgtgtcctgtgagggcggagccgctgctgctggttcgcatcaatgcctctgggggcctcatccttaagatgggggccatcaaccgctgcctgaagcacctctggccaggacacccagtctgcctctcgctgtctgggggagcacactcaggaagtccttctctcaacattgctcaggctgcgggctgaatctgtgagggcgcgcaaagagaagcatcctcagctcagggggctagctccaggctagatgacacctctgcggaa

SEQ ID NO: 98290 - DNA, 1325 bp, Homo Sapiens
gggagagagtatgaagtcgacggcgcgccgaattcggcacgagggccgccgccactcatctctgcccagctgctgccctccccaggaggcctccatggcttcacctacctccaccaacccagcgcatgcccactttgagagcttcctgcaggcccagctgtgccaggacgtgctgagcagcttccaggagctgtgtggggccctggggctggaacccggtggggggctgccccagtaccacaagatcaaggaccagctcaactactggagcgccaagtcactgtggaccaagctggacaagcgagcaggccagcctgtctaccagcagggccgggcctgcaccagcaccaagtgcctggtggtgggtgctggaccttgcgggctgcgggtcgctgtggagctggcgctgctgggggcccgagtggtgctggtggaaaagcgcaccaagttctctcgccacaacgtgctccacctctggcccttcaccatccacgacctgcgggcactcggtgctaagaagttctacgggcgcttctgcaccggcaccctggaccacatcagcatcaggcagctccagctgcttctgctgaaggtagcattgctgctgggggtggaaattcactggggtgtcactttcactggcctccagccccctcctaggaaggggagtggctggcgtgcccagctccaacccaacccccctgcccagctggccaactatgaatttgacgtccttatctcggctgcaggaggtaaattcgtccctgaaggcttcaaagttcgagaaatgcgaggcaaactggccattggcatcacagctaactttgtgaatggacgcaccgtggaggagacacaggtgccggagatcagtggtgtagccaggatctacaaccagagcttcttccagagccttctcaaagccacaggcattgatctggagaacattgtgtactacaaggacgacacccactactttgtgatgacagccaagaagcagtgcctgctgcggctgggggtgctgcgccaggactggccagacaccaatcggctgctgggcagtgccaatgtggtgcccgaggctctgcagcgctttacccgggcagctgctgactttgccacccatggcaagctcgggaaactagagtttgcccaggatgcccatgggcagcctgatgtctctgctttgacttcacagcatgatgcgggcagagagtctgctcggtgcagaaaagcatgcgccgctgctgctggactgtggggactgctggtgagcctctgcccctgggactgatgcacggctcctgcacctttagcactgatgtgac

SEQ ID NO: 98291 - DNA, 680 bp, Homo Sapiens
ggatctcgcttaagtcactttctttacttcaagctgctgcaggtggggtcaaggccacctctactgacacctggggaggtacaggaggttctgcgttcaggttccttctcttcggtcctcttcttccctctgcccatgctgcctggccctctgcaggtactacctgagtgactgtccggcatatttgtcagccccttgtcatgggtcccatcatcgccattacgctctgtctcatcctcagagatgcgagagtcatcagcatgaagatccacaacagcctcctgccccgccaggggtttgatgtcggggatgaggctctgggacacagataccccccaccccgttacactgggcccatgtctactcccaccttaacaggtctcatcctcccttccctggctcctcccacctcacctttagtgattcagtggtgatactgatggaaggtttcttctgtgtggtggctgtgctggctccccagcgtcgtttccgaccaggctggcccccctctgtgtcactgtttccacgctggcacccccttggtagctgctgtccccaagaaatagaaccaacagttagatggtctcaggacctctggctagttcaaaccgtaatacctacaggttacctctggctggagttttggtaaaaggttaacttaaagaaatcatatttggagg

SEQ ID NO: 98292 - DNA, 733 bp, Homo Sapiens
gtatgaattcgacggcgcgccgaattcggcacgagggatgttgacgcgaatagagaacgccacccaggctcagctcccatgtctcctcgtggctggctcagggggagctgcggactgcctggcggagaccctggaagacactctggccccagggagtgggggagccaggcaaggcgaagcccgagatcgaatcaggcgtttctttcccaaaggggaccttgaggtcctgcaggcccaggtggagaggattatgacccggaaggagctcctgacagtctattcttctgaggatgggtctgaggaattcgagaccatagttttgaaggcccttgtgaaggcctgtgggagctcggaggcctcagcctacctggatgagctgcgtttggctgtggcttggaaccgcgtggacattgcccagagtgaactcttttcggggggacatccaatggcggtccttccatctcgaagcttccctcatggacgccctgctgaatgaccggcctgagttcatgcgcttgctcatttcacaagatctcaacctgggctattcctgacccgatgctctggccatctttcatccggctcctacattattcacgtaacttttgatatcttcccacaccaagcacaaattcttcttatagggaatgttaatacgccgtttttgtctttttatatattataattaattcatacatcttcggatctattctttaattatcttatattattc

SEQ ID NO: 98293 - DNA, 785 bp, Homo Sapiens
agggcagatgtgtttactggtcttgtgaactggtcaaccccagcatctgatgtaccctcagaattagccaatttggggtcatccactttggccacaaagtcactgcccgtgtgctgcagatcctcctcaggatgatattcatcataccagcgatcggtggctgttccctcaggttctcccagccacagcttctcctctgattgctccaaatattcctcagcccagcgggcaggggacacagacaaggggtctgtaacttcagagatgaattcttgggaccagtcagtctcattataatcctgagttacatccacagcatctccagctgcaagaaactcctgggcccagttctcagacaaggccaagtctgccacaccaggggctctctggggagcctggcggaagtttgactgctcaatctgctgcatctcagccaggaggtcatccatcttgaaggtctgaggggcacgggacacaaggggtgcattctggtcctgcaggaattcagccaccaactcatcttcagaagctactcccaaaggcttggaggctgcctcagaggccggggctccggggggccaggggccaggcctcaatccctcctgccgaagggccttgtcctgggtgaagtgcccggcgagcttcatgagcgggttggcacccccgcattcggcctccaccagctcccgcattgccatggtgaccgccagctctcgcggagcgccgcgccgcacgacccgccggggcaccaggtgcatgcagggaattccggaccgggtaccagc

SEQ ID NO: 98294 - DNA, 881 bp, Homo Sapiens
cagcacctggtgccccggtgcgtcgtgcggcgcggcgctcggcgagagctggcggtcaccatggcaatgcgggagctggtggaggccgaatgcgggggtgccaacccgctcatgaagctcgccgggcacttcacccatgacaaggcccttcggcaggagggattgaggcctggcccctggccccccggagccccggcctctgaggcattggtggctgaattcctgcaggaccagaatgcaccccttgtgtcccgtgcccctcagaccttcaagatggatgacctcctggctgagatgcaacagattgagcagtcaaacttccgccaggctccccagagagcccctggtgtggcagacttggccttgtctgagaactgggcccaggagtttcttgcagctggagatgctgtggatgtaactcaggattataatgagactgactggtcccaagaattcatctctgaagttacagaccccttgtctgtgtcccctgcccgctgggctgaggaatatttggagcaatcagaggagaagctgtggctgggagaacctgagggaacagccaccgatcgctggtatgatgaatatcatcctgaggaggatctgcagcacacggccagtgactttgtggccaaagtggatgaccccaaattggctaattctgagggtacatcagatgcctgggttgaccagttcaccagaccagtaaacacatctgccccttgatatggagtttgaaccagccaagtcagctatagaatcctgatgtcgatttctgggacaagtgcaggcaaagttgggaggaaatggcaaaacgggatgctgaggccccccccgggctttctgactatgatgaccttacggcagctacctcagataaa

SEQ ID NO: 98295 - DNA, 1089 bp, Homo Sapiens
ctgccgacaagctctgtggctccccaggagaactgtcccaaggcccaggactctggtctgctgaggtgtgggtctgatggctcccggctctatgactgcgtgtggaggtacaactcaagcgtgaatgagtgggcggaggtggcgcccatgctgaaggcccgcgagtaccacagctcctctgtgctggacggactgctgtacgtggtggccgccgacagcaccgagcgcgtatgaccacaccactgactcctgggaggccctgcagcccatgacctaccccatggacaactgctccaccactgcgtgccgtggccggctctatgccatcggctccctggctggcaaggagaccatggtgatgcagtgctacgacccggacaccgacctgtggtcgctggtggactgcggccagctcccgccctggtccttcgcccccaagactgcgactctaaacggactcatgtactttgtcagggatgactccgctgaggtggacgtgtacaacccgacgaggaacgaatgggacaagatcccgtccatgaatcaggtacatgtggggggcagcctggccgtccttggggggaagctgtacgtctctgggggatacgacaatacatttgaactctcggacgtggtagaggcctatgacccagagactcgcgcgtggagcgtggtggggcggctcccagaacccaccttctggcatggcagtgtcagcatcttccgccagttcagtgccccagagccttctcgggtgggccgtggctttcgaggttggacagtgggcagcgatgacatggacccaggccgaccccggccgccgcgggaccccgatgagctgcactagccccagtctggcccggcacgggcctcggtgccggtaactggcacctctgcgggggaattgccccactcttttgtgccaagacacgttggggctcaaggaggaacccaagctcttgggtggggaaaccgccccaggatcctttaccggaagggttctgttcctttgaaaccctaaattaaaaggcgtcggggaacccctcccttggtttgaggaaaaacccttttttctgcacccatgttttt

SEQ ID NO: 98296 - DNA, 1178 bp, Homo Sapiens
cgagagagtatgaagtcgaggcgcgccgaattcggcacgaggcggggtttggggttctgcagggctattgtctgcgctggggaaggggacaggccgggaccgggacctccgctcgcagccggccgcaccaggacagctggcctgaagctcagagccggggcgtgcgccatggccccacactgggctgtctggctgctggcagcaaggctgtggggcctgggcattggggctgaggtgtggtggaaccttgtgccgcgtaagacagtgtcttctggggagctggccacggtagtacggcggttctcccagaccggcatccaggacttcctgacactgacgctgacggagcccactgggcttctgtacgtgggcgcccgagaggccctgttcgccttcagcatggaggccctggagctgcaaggagcgatctcctgggaggcccccgtggagaagaagactgagtgtatccagaaagggaagaacaaccgagaccgagtgcttcaacttcagtccgcgttccgtgcgagcccatacaatgcctcccacgctgtacgtcatgtggcacctacgcctttccagcccaagtgcacctacgtcaacgatgctcaccttcactttggagcatggagagtatgaagactgggaagggcaagatgtccctactgatccgcagcataagggccagtgctgggccttcgttgtggcatggtgtagctgtacatcggccatcactcaacagacttcctggagcaacggaaacccaattatccttgcgtaacaatggggcccgcacctagtccatgaacgacagagctaccgtggacctttctggctcaactgaaccgtcaccttttgtaggcctctgccctatgtaccctgagacctgtgcggcagccttcacgcgcggcacgacggacaacggctctacgttcttctctccgggcacgcggcgcagctcggacgtccgcactgcctatgccgcagccacggtgcgctgcgctcgtgctgcgcccgctgtctgcccacgcgcgactatgcggcgggcgcacgcgaccctgcacgaccggaagtggacccacctccctgaaccggcgcggctggcatgctctgccccagaactgtcagctcatacttcaaccagctgcatggcgatgcacaacctgcatgacagctccatg

SEQ ID NO: 98297 - DNA, 1113 bp, Homo Sapiens
gggggagagagtatgaagtcgacggcgcgccgaattcggcacgaggagaatttcgcagccagaatgggtacgtctcagcgatcctgaaagcagccttgacagccagaggcgagtcaagtggaaaggctggccgggcttcgagaagggagggggcatcgaggtacttaaaggcctgaatcgcgcggcgtgacgtcgggggcgcggtttcgcggcgtctgggcggacactgcgccgaggggcggggctggacgcgcgctccaagatggcggcgaacgtgttcccgttccgcgacgcccgtgccgcaccggacccagtgctggaggccggcccggtggcacacgggccactgccggtaccgctggtgctggacaacgggtcgttccaagtccgcgctggctgggcgtgtcccgggcaggacccaggtcccgagccgcgcctgcagttccgcgcggtgtgcgcccgcggtcgtggcggggcacggggcgcgtcgggcccgcaggtggggaacgctctgggcagcctggagccactgcgctggatgctgcgctcgcccttcgaccgcaacgtgccggtcaacctggagcttcaggagttgctgctggactacagcttccagcacctgggtgtctcctcacagggctgtgttgatcatcccatagttttgacagaagctgtgtgcaacccactgtattcacggcaaatgatgtctgagcttctttttgagtgctacgggattcccaaggttgcctatggaatagacagcctcttcagcttctaccacaataagccaaagaactcgatgtgcagtgggctaatcatttcatctggataccagtgtacgcatgttttacccatcttagaagggagattagatgctaaaaactgcaagcgcatcaatcttggaggaagccaagcagctggttacctccagcgtctcctccagctgaagtaccctgggcacctggcaggcatcaccctcagccgcatggaggagattctgcatgagcacagctacatcgctgagggattatgtggaagacattacacaaaatggcgggtgtcctgatcattcatgagactaatgtccaacaagatgcagctcccattctccag

SEQ ID NO: 98298 - DNA, 869 bp, Homo Sapiens
ggaatgaagtcgacggcgcgccgaattcggcacgaggtgtcgtggtaactcagaggcgcgcgaggcggggcggccaacggggtcgcggggcgagcacgcgcgccactggggcgccggacgttgcaagggggtcacatccggtagggggcgggcctggcggaccccggaagtgtgggcgcggctgcggtttaacccgcggtggcggcggcgacggcggccctggcagggaaggatggagacgctgaaggataagaccctgcaggagctggaggagttgcagaatgactcggaggcgattgaccagctggccctggagtcccctgaggtccaggacctacagctggaacgggagatggcactggccaccaaccggagcctggcagagcggaacttggagttccaggttcccctggagatcagccgctcaaacctctcggatagataccaggagctccggaagctcgtggagcggtgccaggagcagaaggcaaagctggagaaattttcttcagcactgcagccagggaccttgttagaccttctgcaggtggaaggcatgaagatcgaagaagagtccgaggccatggctgagaagttcctggagggcgaggtgcccctggaaacgttcctggagaatttttcctccatgaggatgctgtcccacctgcgccgggttcgcgtggaaaagctccaggaagtggtgaggaagcccagggcttcccaggagctggccggcgatgcccctccaccccgtccaccacccccggtgcgcccagtcccccagggaacaccccctgtggttgtagagcagtcgcagccaccatcatccatgcctacatacgctttgcacgactaacgcatcagccgtt

SEQ ID NO: 98299 - DNA, 1031 bp, Homo Sapiens
  misc_feature (757)..(769): n is a, c, g, or t
ggagcgaggcctgggtggcgaattcggcacgagggctaggcgacgggtggaagccggtaccgagaggaactacagcgtcgccgcctgggttgtgtcgccgcggtaggcgctgcgctctgagcgcagcgcaggccccgtaccgaccgcccgcccgccctctgtccgcgatggaggtgccggccgcgggtcgcgttcctgccgagggcgccccgacggcggctgtggccgaggtgcgctgcccggggcccgcgccgctgcgcctgctggagtggagggtggcggcgggcgcggccgtgcgcatcggctcggtgctggccgtgttcgaggccgccgcctccgcgcagtcctccggggcctctcagtcccgtgtagcctccgggggctgcgtgcgccccgcgcggccggaacgcaggctgaggtcggagcgcgcgggcgtggtgcgggagctgtgcgcgcagccgggccaggtggtcgccccaggagcggttctggcgacgctgcacagatgccggaccccggctccctcccgggcctcgcgtgctgcatgtgctgacgccccctgcaataggccgagggggaacgtgctgcccgctggggtccggcgactaacgccgctccggcctcctcctccggcacagctgcgacaccactccctgattatggcgccgcactgcctcccgccgcccgtgggaactctaggcgggtgccctcccgccccccttctcatcccgcgccctcgccccctgggttatcggtnnnnnnnnnnnnntggggacttttctattccccctcggaacggcggccctgtactgccccctgcccctctccctccgcccgcacaactccctggccctctctccaattgcgcccgcgcttttgctgacttccggcgcccccccctgtgtgcgccggactccccggtctaccccctcaccgcgcgggtccctttgcccgccgccccctcgccgactttgcgcctaacccgcgtcacgccctccttctgacgcctgccgttctctgccgctgtagtc

SEQ ID NO: 98300 - DNA, 964 bp, Homo Sapiens
agaaatgttctaaagcgaagctcaagatctcagtatgaagggtgggcggagagtaacctctcccgggtttagccagcaacaatggtcaccattggcatgattttcaatcttacacagttctgaagattccataggtcagtgttcaaatgtctcagatcacagagcaaatctggctctggcactggctgtgatacaggtccttggtctggctctggcactgtttgtgataccatgcatagtgtgggctctatcacaggctccagagtggactccagcacagactctagctctggccccagatccagccctgccttcagcagtggctctaagtccaggctgagctctggctctggcaccagccctagttccagctctaatgactccagctctggctctggcttaagccccagcggttgttgcagttcatccacctgtctattagagaccacaatgagcctgtgtttcaggtatttcctccgttcctggagattaactttctcctggtagtagcacccaaaagcttcatcccgggggattcggggatagaggaagcgcagtgggttttcaggtatattctcctcagtgagcaactggtaatggcggatgatttcagtcagcgggagtgactgcagcacctccttcgtgtacggttgcacagagtagatgagcaccttgtcatcatcctggtgctccacccaggagcaggtaatgcccccttctgacgattcactgaagcgcagtagaaaggtgccagacatggtcttcttcagcagccggcgctcctggctccgactcacaaagcccatgatgcgtccatcattccagagatccttcaggtggtcatgtaccaactccagaattttgtccagccatgtccagaatggtaacttgccaggagggctctctcgcttagtgaagtcagcccaggcctcgtgccgaatcggcgcgccgtgacttcatactc

SEQ ID NO: 98301 - DNA, 1446 bp, Homo Sapiens
  misc_feature (1336)..(1337): n is a, c, g, or t
  misc_feature (1402)..(1402): n is a, c, g, or t
  misc_feature (1405)..(1405): n is a, c, g, or t
taggggggagagagtatgaagtcgacggcgcgccgaattcggcacgaggaggaccggagctggatccgcggtgcggctgtgggagtcagcattggtaatagtgctgtgctgcggaagagtggagtctaaactttttcattgccagtgccccgaaactggagtgtgaaggaccgagacaagatgaagactgtgctcatggttgctgaaaagccgtccttggcacagtcaattgccaaaatcctctctagagggagcctgtcctcacacaaagggctgaacggggcctgctcagtccacgagtacactgggacctttgctggccagccagtgcgcttcaagatgacgtctgtctgtggtcacgtgatgaccctggatttcctgggaaaatacaacaaatgggacaaagtggaccccgcagaactgttcagccaagctcccacggagaagaaagaagctaaccccaagctgaacatggtgaagttcctgcaggtggagggcagaggctgcgactacatcgtgctgtggctggactgcgacaaggagggggagaacatctgctttgaggtttcagactaaatatttccaggggaaatacggtgatttagacagctctctcatctcctttgggccgtgtcagactccaaccctgggattctgtgtggagagacatgataaaatccagtccttcaaaccagagacctactgggtgctgcaggccaaggttaacactgacaaagacagatctctccttttggactgggaccgagtaagagtgtttgaccgggagatcgcacagatgtttttaaacatgacaaagctggagaaagaagcccaggtggaggccacaagcaggaaagaaaaggccaagcagaggcccctggccctgaacactgtggagatgctgcgtgtggccagctcttctctgggcatggggccgcagcacgccatgcagacggctgagcggctctacacgcaaggctacatcagctacccacggacagagaccacccactaccctgagaactttgacctgaagggctctctgcggcagcaggccaaccacccctactgggccgacacggtgaagcggttgttagcagaaggtatcaaccgcccgcggaaaggccatgacgccggcgaccatccccccatcacccccatgaagtctgccacagaggccgaattagggggtgacgcgtggcggctctatgagtacatcaccagacacttcatcgccacggtcagccatgactgcaagtacctgcagagcaccatctccttcagaattgggcccgagctcttcacctgcctccgggaagaccgtcctctcaccagnncttcacggaggtcatgcccctggcagagcgtgccccctgggagagagcctgcccacttgccaagnggnggtgatgcccttcccctgtgggccaaggtgaagaatgctgg

SEQ ID NO: 98302 - DNA, 860 bp, Homo Sapiens
ctagtgttgagagagtatgaagtcgacggcgcgccgaattcggcacgaggggctctggtgaacagcaaatgctccacgctgggacgggccattgcctgatgcctgtacatggtgggcactgagagacaagattcctgggccctgccttccatacactccccacgatctcggaggaagctctgaggaccccgctgagaacccacagacaggaggacaactgagctatgacagcaataaaggccaagaaggagaaagttgatggaccgctgactagccccgtgtgctgttgggagctgccctttctacttcaaaccttcctctagcagacatgtgcagggaccccccacctaccaccatctgccgccatggttgtgctaaaagcagcgcatgacgccggggacatgagggcaggcgtgcagctggagcccttcctgcaccaggtcggggggcacatgagcgtgatgaagtatgacgagcatacggtgtgcaagcccctcgtctcccgggagcagaggttctatgaatccctgccgctggccatgaagcggttcaccccacagtacaaaggtaccgtcacagtgcacctctggaaagacagcacaggccatctcagcttgtgttgccaaccccagtgaacggagagccaggagcccttcaaggtctccacagagtcggcggcggtggccatatggcagacgctccagcagaccacggcagcaatgcagcgactgcacctttgccagtggcgcatgccagctgcacgctcaccaagagaatgtgacgcagatgaagagggagagagaggccgcgtgtcacctcacaactcaccatctggcctcgagtcaggaggacgcgcgcga

SEQ ID NO: 98303 - DNA, 1297 bp, Homo Sapiens
  misc_feature (1029)..(1029): n is a, c, g, or t
  misc_feature (1164)..(1164): n is a, c, g, or t
  misc_feature (1174)..(1174): n is a, c, g, or t
  misc_feature (1184)..(1184): n is a, c, g, or t
gcctcggccccggaggcggcaccaggaagcgcccgccccggccggagccgccatgtaaccggcgccgcccggagcccgagccgcgcgggccccagcgacccgcccgccatgggggacgaggacgacgatgagagctgcgccgtggagctgcggatcacagaagccaacctgaccgggcacgaggagaaggtgagcgtggagaacttcgagctgctcaaggtgctgggcacgggagcctacggcaaggtgttcctggtgcggaaggcgggcgggcacgacgcggggaagctgtacgccatgaaggtgctgcgcaaggcggcgctggtgcagcgcgccaagacgcaagagcacacgcgcaccgagcgctcggtgctggagctggtgcgccaggcgcccttcctggtcacgctgcactacgctttccagacggatgccaagctgcacctcatcctggactatgtgagcggcggggagatgttcacccacctctaccagcgccagtacttcaaggaggctgaggtgcgcgtgtatgggggtgagatcgtgctggccctggaacacctgcacaagctcggcatcatttaccgagacctgaaactggagaatgtgctgctggactccgagggccacattgtcctcacggacttcgggctgagcaaggagttcctgacggaggagaaagagcggaccttctccttctgtggcaccatcgagtacatggcccccgaaatcatccgtagcaagacggggcatggcaaaggctgtggactggtggagcctgggcatcttgctcttcgagctgctgacgggggcctcgcccttcaccctggagggcgagaggaacacgcaggctgaggtgtctcgacggatcctgaagtgctcccctcccattccacccctcggatcgggcccgtggcgcaggacctgctgcagcggctgctttgtaaggatcctaagaagcgatgggccgcggggcccaagggggcacaagaagtccggaaccatcccttcttccagggcctcgattgngtggctctggctgccaggaagattccagccccattccggccccaaatccgctcagagctggatgtgggcaactttgcggaggaattcactcggctggagcctgtctactcaccccctggcagcccccccacctgnggacccccgnaatctttcanggatactccttttgtggcacccctccatttctcttttgaccaccaacaacgccggtggatgaaccggatggggctgggaaagcgccctggtgcctgggaagacccggcccaag

SEQ ID NO: 98304 - DNA, 978 bp, Homo Sapiens
  misc_feature (892)..(903): n is a, c, g, or t
gagcgatgcaagcctggagaaaaggccccgatggcccccagaagacctcttcagacagcatgtcccgtttaatggattctgacatggattatgaaaggccaaacgtagagaccatcaagtgcgttgtggtgggggacaacgccgtgggtaagaccaggctcatctgtgcccgcgcttgcaatgccaccctcacccagtaccagctgctggccacgcatgtgcccacagtatgggccatcgaccaatatcgtgtgtgccaggaggtgctggaacgctcccgagacgtggtagatgatgtcagcgtctctctgcgcctctgggacacctttggagaccaccacaaagaccgtcgctttgcttatgggagatctgatgtggtggttctgtgcttctccattgccaaccccaattccctccaccatgtcaagaccatgtggtacccagaaatcaagcacttctgcccccgagcacctgtcatcttggtgggctgccagttggacctgcgctacgctgacctggaggctgtcaacagggctaggcgacccttggctaggcccatcaaacctaatgaaatcctgcccccagagaagggtcgggaggtggccaaggagctgggcatcccctactatgagaccagcgtggtggcccagttcggcatcaaggacgtctttgacaacgccatccgagctgcactcatctcccgccgccacctgcagttctggaagtccaccctccgcaatgtgcagcggcctctgctgcaggcacccttcctacccccaagcaccgccccgatcatgtggtgccgaacctcctccacaacaagaaggccccccacttcggagaacccttggcggaatctctgtgctgagacggggccactttcccaaataannnnnnnnnnnnaaattataacttcccggaaaaaagggaatggggctcaaccgggcccccaaaacaaggccttataaaccctcaccc

SEQ ID NO: 98305 - DNA, 975 bp, Homo Sapiens
aatcggagagagtatgaaatcgacggcgcgccgattcggcacgaggcggagtaggggctgcgcttggggtttgctgaagctggctgcctctcccactccccttttgggtgcaaagcgccgcttagcgggaagacggggggcctgggcggtggacagtgtgcaccatgcctgtagctgtgactgagacgcctgcgcccatgcttacactcgacccacacccgggccccggccctgaccccgacgcgaccgcgatccgcatccgactcccgattcgcatcctgttcctccgtctcactcacctgtcgtgaccctgttgaccacggccgatggcttcagacgagcaccatggcagtccacaagactgcagtgtctgcgtctcatactgcgccctgtggcctccgaccattccgcatcttagcaggatcgttccggaaccgtcagttcccgtcaccagaaacacgcacgcagtcgtgtcgaacaaccctgagacctccttgagacatgtgcaacacatgagcccaacagctattcgccgtcctagcgcaatgacgtcacacgttcacggtcgttagccgcacgtatcgttccctcgagacttctttgggtacaccgccatgcggattgatagaactagactccagtttagcccttaccagaattaaagtccacaggagcccgcctcaagagactacttgatcagaccgttgactaacgcgccacgcgaaacggaggcagccagacgtatatgttattggcactaacgttccatcagcccgtatcactggacggcagatgtaccctgggtacgtgacatgggtcgcgggccctgcgtgcctagcgacgttgcttgacctctggtagatagcgaccgtacaaacttcctagctggtgtaccatcccatccatgggcttacccctgggccatgggatccctgcgccatcgacgtaccaccctgaagcgcacaccgctactga

SEQ ID NO: 98306 - DNA, 805 bp, Homo Sapiens
atctcccactcgagctgccccgccctctggacccgagtgactcaggcctttgctttgtccttcctggtagaggcgggttccctccctcggcaagatgccggagtgctgggatggggaacatgacatcgagacaccctacggccttctgcatgtagtgatccggggctcccccaaggggaaccgcccagccatcctcacctaccatgatgtgggcctcaaccacaaactatgcttcaacaccttcttcaacttcgaggacatgcaggagatcaccaagcactttgtggtgtgtcacgtggatgcccctggacaacaggtgggggcgtcgcagtttcctcaggggtaccagttcccctccatggagcagctggctgccatgctccccagcgtggtgcagcatttcgggttcaagtatgtgattggcatcggagtgggcgccggagcctatgtgctggccaagctcgcactcatctaccccgacctggtggcaggggctggtggctggtgaacatcgaccccaatggccaaaggctggatagactgggctgccaccaagctctccggcctaaactagcacttgacccgacacggtgctctcccacctcttcagccaggaggcgctggtgaacaacacagagctgccgccgagctaccggcagcagatcgggaacgtggtgaaccagggcaacctgcaccacaccaggaacatgtacaacagccggcccggtgatgctgagggaagacgacacatccaccgccgacgaccgaaagaagcagcccacaccaacacgggacccgaccacta

SEQ ID NO: 98307 - DNA, 954 bp, Homo Sapiens
gggagagagtatgaagtcgacggcgcgccgaattcggcacgagggcctgcagcagagccgcagcagcaacagccaccaaagcgggggctgaaagggaagagaacttagatttgacctgtgcaaggacctcagcagcttggacacagcccactgcagagatgaaaggagaagctggacatatgctacacaatgaaaagtcaaagcaggagggacacatctggggctctatgaggaggacagctttcatcctgggctctggacttctctcatttgtggccttctggaactcagtgacatggcatcttcagagattttggggtgcttctggctacttttggcaagcccagtgggagaggctgctgactacatttgaagggaaggagtggatcctcttctttataggtgccatccaagtgccttgtctcttcttctggagcttcaatgggcttctattggtggttgacacaacaggaaaacctaacttcatctctcgctaccgaattcaggtcggcaagaatgaacctgtggatcctgtgaaactgcgccagtctatccgcacagttcttttcaaccagtgcatgatatctttccccatggtggtcttcctctatcccttacctcaaatggtggagagacccctgccgccgtgagctacccaccttacactggttcctcctggagctggccatcttcacgctgatcgaggaagtcttgttctactatacacaccggctccttcacagccaacattctacaagaaaatcaacaagaaacaccattgagttggacagctcccaatgggcgtgatctctcgctatgcccaaccctatagagcatggaggtttccaacatgctaccggtgaatagatgggccccatagtaatgtggctcccacttgtccatcaatcacccaggtggatatacattggccccatacatacgagacagttcccc

SEQ ID NO: 98308 - DNA, 1463 bp, Homo Sapiens
aagggcgagagagtatgaagtcgacggcgcgccgaattcggcacgaggggaagagagctgtgaccagcagcgtcccttattcgcttggccttggttcctgtttgcactggctacagcagggcactggcccctactgtcaccgccacctacacaaagaccctatctctgagcgctgcagcctactgttcagccccaggtttgaggatggatgccctggacgcttcgaagctactggatgaggagctgtattcaagacagctgtatgtgctgggctcacctgccatgcagaggattcagggagccagggtcctggtgtcaggcctgcagggcctgggggccgaggtggccaagaacttggttctgatgggtgtgggcagcctcactctgcatgatccccaccccacctgctggtccgacctggctgcccagtttctcctctcagagcaggacttggaaaggagcagagccgaggcctctcaagagctcttggctcagctcaacagagctgtccaggtcgtcgtgcacacgggtgacatcactgaggacctgctgttggacttccaggtggtggtgctgactgctgcaaagctggaggagcagctgaaggtgggcaccttgtgtcataagcatggagtttgctttctggcggctgacacccggggcctcgtggggcagttgttctgtgactttggtgaggacttcactgtgcaggaacccacagaggcagaacccctgacagcctgccatccagcacatctcccagggctcccctggcattctcactctgaggaaaggggccaatacccactacttccgtgatggagacttggtgacctttctcgggacattgagcggcaatggcttgagctcaacgaactgagatcaccgatcctatccacgtgcgggagcgatgcgtccctggaggattggagacacaacaactttcactcggtacttgcgtggtggggctatcactgaagtcaagagacccaagactgtgagacataagtccctggacacagccctgctccagccccatgtggtggcccagagctcccaggaagttcaccatgcccactgcctgcatcaggccttctgtgcactgcacaagttcccagcaccatggccggccaaccccagccctggggatcctgttgatgcagagactggggtggggcctggccccgggacctggaaaccctggaagcggacagagagaaaagccactgggagaagcccctggatgaaggcccctaatgccgggaaagtcgccccttaagacaatggcaagggggtcttgaaaccccttaaggtgggccactggtttgggttgccataaaccttgcccccggaaagatggcctgaaaaggccaattctcccccggggaaaaagttccatgggccccctctggataacccagggggggctttttaacaatcttgagaaagggacccccctccgt

SEQ ID NO: 98309 - DNA, 1080 bp, Homo Sapiens
ccagcctaccttcaggtggaatccttgccctcacccatgatgtggctgtggcactttatttccccgcttttccccagcaaatcctacaccccaaatcatctccttggaccaccctgttccatccatcatttccacagcgtaagttctcaccttgctccccgcaatctccgggtcccatagatccagtgtccagggactccctgccgtcactagggggagctctcactccttggcactgagcacccagcaaggctgagctccgcccctcccaagaagccagtgctcctggcccctgcccacatagacgcctcctgcaccagacctcagcagctgcctcctggacagccaggggcaaactgcaacagagcctctctatgggcatcccccggggactgcagcagggcagagaagtctctcagcactccagtacactgagaggctccggaagatggtcctggcgtgaagtcccagctcagccgctctgccagctcttctacccggctctgagccatgacaaaggcttcagtcaggccactgatcatcagtgagcctggcgccctgggcaccagatgggctgacgtgctccaggccaggcagtcaaggaagaagccctgggctcccagaaagatgcagtgcagtttgggcgggtagtggatttcatcctgcagttctgggctgcagaggcccttcaggtactccttggctctgctggcgttttccttggggccctccagctgcagccagatgtgggggttgtccggacagtccttcggaaggacgctcacccccacgctgaagatgcgctccacatggggctgctgttcccgaaccttgttctcagcctccgcagacaccgcaaagcgatctggggacgcggggcgggccccccaggtaggcatggctgctgcccccagcccgcctccgccgcccgcgccggcttcaggtcctctcagcgcccgccaggcccccgctttgcccgcgcccccagcccaggggacaagggcacgggggcccgaatctgggcggccttcccgggttcctcacccaacggggacctctcttgtccatcccgttactccc

SEQ ID NO: 98310 - DNA, 1156 bp, Homo Sapiens
agagtatgaagtcgacggcgcgccgaattcggcacgaggcggaggaggccgtaaaagcctcttagaggccagaccccgcagtggcctctgtgtccttcattccgccacccatccgtccaccgagcgcctgctgggtgccaggaactgggtcacagaaaggctgaggtcaactcccgaccgagaagcctggcgctgggaccaagtggcaaaacgactccgaatgcagcggcatccacgcggcggccgtggttgaggaacagaagctgagagcggcaagggcggtcacagaggaaggaagttcagggttagccaacaggagccgcaggtgccccgaaaagggggcggggtcaggggtgccctgaactccgaatgcgaagttctgtcttgtcatagccaagcacgctgcttcttggattgacctggcaggatggcgccaccaccagctagagtacatctaggtgcgttcctggcagtgactccgaatcccgggagcgcagcgagtgggacagaggcagccgcggccacacccagcaaagtgtggggctcttccgcggggaggattgaaccacgaggcgggggccgaggaggcgctccctacctccatgggacagcacggacccagtgcccgggcccgggcagggcgcgccccaggacccaggccggcgcgggaagccagccctcggctccgggtccacaagaccttcaagtttgtcgtcgtcggggtcctgctgcaggtcgtacctagctcagctgcaaccatcaaacttcatgatcaatcaattggcacacagcaatgggaacatagccctttgggagagttgtgtccaccaggatctcatagatcagaacgtcctggagcctgtaaccggtgcacagagggtgtgggttacaccaatgcttccaacaatttgtttgcttgcctcccatgtacagcttgtaaatcagatgaagaagagagaagtccctgcaccacgaccaggaacacagcatgtcagtgcaaaccaggaactttccggaatgacaatgctgctgagatgtgccggaagtgcagcacagggtgccccagagggatggtcaaggtcaaggattgtacgccctggagtgacatcgaggtgtgtcacaaaagaatcaggcaatggacataattatatggggg

SEQ ID NO: 98311 - DNA, 742 bp, Homo Sapiens
  misc_feature (616)..(616): n is a, c, g, or t
  misc_feature (712)..(712): n is a, c, g, or t
atggcgaagagtatgaagtcacggcgcgccgaattcggcacgaggcggaagtcctcggtggagtgtgagaaggcagccagtgttggcctggaagacctctagaacctgagaagaggcagcgatcctggggcagagtccagggcagctcaaggctcctccacacacacacccgctgaaccctgagcaccctgagctgctgagatggggcgggccggggctgccgccgtgatcccgggcctggccctgctctgggcagtggggctggggagtgccgcccccagccccccacgccttcggctctccttccaagagctccaggcctggcatggtctccagactttcagcctggagcgaacctgctgctaccaggccttgctggtggatgaggagcgtggacgcctgtttgtgggtgccgagaaccatgtggcctccctcaacctggacaacatcagcaagcgggccaagaagctggcctggccggcccctgtggaatggcgagaggagtgcaactgggcagggaaggacattggtactgagtgcatgaacttcgtgaagttgctgcatgcctacaaccgcacccatttgctggcctgtggcacgggagccttccacccanactgtgcctttgtggaagtgggccaccgggcagaggagcccgtctccggctggacccaggaaggatagaggatggcaaggggaagagtccttatgnacccaggcatcgggctgctccgtgctggtg

SEQ ID NO: 98312 - DNA, 796 bp, Homo Sapiens
agagtatgaagtcgacggcgcgccgaattcggcacgagggggcaactcagctgagcgagcgcccggcctgtgtgaagaaagactactccaacttcatggcatccctgaatctgcgcaaccgctacgcgggcgaggtgtatggaatgattcggttctcaggcaccacaggccagatgtctgacctgaacaaaatgatggtccaggatctacattcagctttagaccgcagtcatcctcagcactacacgcaggccatgttcaagctgaccgcaatgctcattagcagtaaagattgtgacccgcagctccttcatcatctgtgctggggtcccctccggatgttcaatgagcatggcatggagacggccctggcctgctgggagtggctgctggctggcaaggatggagtggaagtgccgttcatgcgggagatggcaggggcctggcacatgacggtggagcagaaatttggcctgttttctgctgagataaaggaagcagaccccctggctgcctcggaagcaagtcaacccaaaccctgtccccccgaagtgaccccccactacatctggatcgacttcctggtgcagcggtttgagatcgccaagtactgcagctctgaccaaatggaaatcttctccagcctgcttgcacgcttcttgtcctgaacacagcggggccaagggagcttgaatctgcattggcggcatctggcccgcttcaactgtgacctggggcttccctctaatgccatttggtccaatgcactacccatgtctttcgaaaattatctctg

SEQ ID NO: 98313 - DNA, 1391 bp, Homo Sapiens
tggaccggtccggaattcccgggatcgcgggcgaggatggcggcggagaacgaggccagccaggagagcgccctgggcgcctactcgccagtggactacatgagcatcaccagcttcccgcggctgcccgaggacgagccggcgcccgcggccccgctgaggggccgcaaggacgaggacgcctttctgggagaccccgacaccgacccggactccttcctgaagtctgcacggctgcagcggctgccatcgtcgtcgtcggagatgggcagccaagacgggtcgccgctacgcgagacgcgcaaagacccgttctccgccgcagcggccgagtgctcctgccgccaggatgggctcacggtcatcgtcacggcctgtctcaccttcgctaccggtgtcaccgtggcgctggtcatgcagatctacttcggggacccccagatcttccagcagggtgccgtggtgaccgatgctgcccgctgcacttcactgggcatcgaggtgctcagtaaacagggatcttctgtggacgcagcggtggcagcagccttgtgtttgggtatcgtggctccacacagttctggcctgggcggtgggggcgtgatgctggtacatgacatccgacgaaatgagagccacctaattgatttccgggagtccgcaccaggggccctcagggaagagaccctgcaaagatcctgggagaccaagcctgggctcttggtggggggttcccggaatgggtgaaggggctacatgaagctcaccagctctatgggcaggctgccatggtcccaagtccctggcctttgcagcagctgtggcccaagatggcttcaacgtgactcatgatctagcccgtgccctggctgaacagctgccacccaacatgtccgagcgcttccgggagacgttcctgccatcgggccgcccgccactacctggctcgttgctgcatcggcccgacctggctgaggtgctggatgtacttggcacctccggccggctgccttctacgcaggtggcaacctcacactggagatggtggccgaggctcagcacgcagggggtgtcataaccgaagaggacttcagcaattacagcgcccttgtggaggaagcctgtgtgtgggcggttgtacagaggccacctggttcttagtcccccactccgcacacgggccctgccctcatcagtgctctcaacatcctggagggcttcaagtctcaccagcctggtatcccgagaacaggctcttcactgggtggcagagaccctgaagatgcattagccctggcagcaaactgggagatcccgtctatgattctccatcactgagaagattgatgacactgctccagcaaggggaggcgcctaactccggggcttta

SEQ ID NO: 98314 - DNA, 962 bp, Homo Sapiens
agtatgaagtcgacggcgcgccgaattcggcacgaggggaggtactggccacgactgcatgcccgcgcccgccaggtgatacctccgccggtgacccaggggctctgcgacacaaggagtctgcatgtctaagtgctagacatgctcagctttgtggatacgcggactttgttgctgcttgcagtaaccttatgcctagcaacatgccaatctttacaagaggaaactgtaagaaagggcccagccggagatagaggaccacgtggagaaaggggtccaccaggccccccaggcagagatggtgaagatggtcccacaggccctcctggtccacctggtcctcctggcccccctggtctcggtgggaactttgctgctcagtatgacggaaaaggagttggacttggccctggaccaatgggcttaatgggacctagaggcccacctggtgcacctggagccccaggccctcaaggtctccaaggacctgctggtgagcctggtgaacctggtcaaactggtcctgcaggtgctcgtggtccagctggccctcctggcaaggctggcgaagatggtcaccctggaaaacccggacgacctggtgagagaggagttgttggaccacagggtgctcgtggtttccctggaactccctggacttccctggcttccaagggaattagggggacaccatggtcctgggatgggattgaaggggacagccccggtgccttcctggtgtggaaagggtgaaccctgggtgccccctgggtggaaaaatggaaacctccaggcccataccaggaagcccccgggggcccttccctggttgaaaaaagggaccttggttggtgggccccctggccccaaacttggggggccccgggggccagttgaattggaaagttttgggctcccccgatgggaatacactgccttggcaccccattgggccgacctgt

SEQ ID NO: 98315 - DNA, 865 bp, Homo Sapiens
  misc_feature (659)..(659): n is a, c, g, or t
  misc_feature (662)..(663): n is a, c, g, or t
  misc_feature (666)..(666): n is a, c, g, or t
taggggggagagagtatgaagtcgacggcgcgccgaattcggcacgaggggccgcggggaggaggcgacttcgctccctgcggcgggcgcggcccgggcgcccgagcctcctcggccttggagagcagcggcggcggcggcaccccgggcgcggcaatactgaacactgcgcagcttgcagaggtctcctggcagccctcattaggaattctgtctggccccgatcagaatactggagacgagaccacgagattgatgagtttgccttgggagtcggtaagaaggtgaagccaggggcgaacatgggtcagaaggtcactggagggatcaagactgtggacatgagggaccccacgtacaggcccctgaagcaggagctccagggtctggattactgcaagcccacccggctggatctgctactggacatgccccctgtgtcctatgatgtccagctgctgcattcatggaacaacaacgaccgatcgctcaatgtctttgtaaaggaggacgacaagctcatctttcaccggcatccggtggcccagagcacggacgctatcaggggcaaagtcgggtatacccgtgggctgcacgtgtggcagatcacgtgggccatgagacagcggggcacacacgccgtggtggggggtgcgacngcnnacnccccctgcctctgtcggtacacaccttgtggggataacacgagtctggggtggacttgggccacggcttacacatgcagacagcagcaactaccgcttctgacaataaatctgtccgatctctgtactgatgacagattactctggatgatatgatgctggacaggaacgtcgtgagctgccggacagcatagctcact

SEQ ID NO: 98316 - DNA, 893 bp, Homo Sapiens
ggaattgcctacctattacaagcatgtaatcactcattgcagattcctaaagaattaaaaatgttcttcagttactcatagttcatcagatgtactgttagcccttgctaattcacattcttcactggtttgacaactctgaaggatgtccttgtagtggttcttcagatcttcataaaatgaaacagtttcttgtgagtaagccaaaggtaacaccttttcatttaataacatctgcactcggaattgttctttaggagtcttagcattttcacagtggtaaagcacaaatatcaggttcgaggcataaggtacaatgagaccacttcggaacttccgatgcatttgttttttgtaattgtacgctgttaggggttccttgtctttgaagtagcccatgagagaaagcagtggaagaagagtctctgcatgaccaaactggaggatgactggagaagaaattggctgagacctttgtttctgttcaactgctttgtccaagtgctgaaagatatcctgaaaaaaggtgcagctggatcgactgttaatagtatacccatatcctcttttccaatattgtttcagatcatttaaatattctaatacctttgcatcatcttatgtcaaaaacatcacacccaaggagatttaacacctttaattgccaggtcaaatgaacaggtgaaaaaggctacttgaattaaatctgcatttaaatcatttactggcacttgcaaagtagctgcaactttttttaaaatgttctgcatttctggtccagttttgaaggcttccacgtgataaagagctgtagcatttttttctacttcagttaaaaacttctcctcgtgccgaattcggcgcgccgtcgacttcatactctctccccataa

SEQ ID NO: 98317 - DNA, 843 bp, Homo Sapiens
cgggatcagtgggagtccagagagcttcgccagctccctggatggcagtgggcatgcaggcccagagggcagccgcctggagcgtgacgagaatgacaagcacagtggcaagatccccgtcaacgccgtgcgaccgcacaccagctccccgggcctgggcaagccccctggaccctgcttgcagccaaaggcttcggtgctgcagcagctggacagggtggacgagactccggggcctccccatcccaagggaccccctcgctgctctttcagtcctcggaactcacggcatgagggctcctttgcccggcagcagagcttgtatgcacccaagggctccgtgcccagcccctcaccgcggccccaggcactcgatgccacacaggtgccgtcaccgcttccactggcacagccgtccacaccccccgtacggcggctcgagctgctgcccagtgcggaaagcccagtgtgctggcttgagcagcctgagagccaccagcggctggcggggccgggctgcaaggcagggctgtccccagccgagcccctcctgtcccgggcaggcttttccccagactcctccaaggcggacagttgatgctgcctcctcagggggctcggacagtaaaaagaagaagaggtaccgacctcgagactatacggttaacttggacgggcaggtggctgaggcgggcgtcaagcctgtccggttaaaagagcggaagctcaccttttgaccccatgacgagacagatcaaacctctgacccagaaagagccagtgcgggcagacagccctgtgcacatggagcagcagtccaggacagagctggacaagcaggag

SEQ ID NO: 98318 - DNA, 787 bp, Homo Sapiens
gtcttaaagagtatgaagtcacggcgcgccgaattcggcacgaggccgacctccggggcatcagcactaagtggagctgaaatgggccattactctgaagatggagattccaggcccgatgcctcccttaatccgacgagatgctggagaaccctgaaatgtttgaggatgactcctcgcagcctggtccccaccccaatgcctctagcgaggatgaggttcctgggggccagggcaaagggggcctgaagtccccagcctgaccagtggcccctgacctccccgctgtgggggttggggcttcaggcagcagactgaccatctcccaaaccgccagtgactgggggaggacctgctctgacctctcccctccccttcttttgagctccttgtttttgccaaattttctaggggtgcctctgtgctcatccccttcttgatctaatcggctctcacgcctatccttggggcctgccctgttccctcttattaatgtgtccatattatgcttccttggtttggtattccagatctcactattgcctcatgggtccttaaattactattgatagtatgaaaaatatgcatttcacatccccttacctctgcaatttgcttggtgttcttataattatttgatttctcttgactaactcagtgtaatggttttgggttaatctcctctatttgtactacacatatacttataattggtttgtattttagttcaatcttttttttattacttccttcttagtatttatcatttctatgcttatttattcgg

SEQ ID NO: 98319 - DNA, 491 bp, Homo Sapiens
cctaggtatatgtcgtgccctcacaggctgggccccgtgctgaaggcgggctggctgaagaagcagaggagcatcatgaagaactggcagcagcgctggattgtgctgcgtggggatcagcttttctactacaaggacaaagatgagatcaagccccaggtgagaagtgcatgtccggtgtgccatgggcatcgtggcagggctccacaagagggaagaccatgcccaggagaagggaggaaggcacagagccactgactccatcacagtgatgttttgccaggatttccaaagtaattttcattcttatcccccatgttcctggtatcacagcctgttttactggaacatgtccacaacttctgcaatgaaaatgtttccttaaaatgttgatagagaatgtccttgtccaacttaagaaaacaacgtcttccatgttctttgtggccccttcatgcttccaagaaggacatacatgcacgacatatacc

SEQ ID NO: 98320 - DNA, 718 bp, Homo Sapiens
atcgtgatagagtatgaagtcgacggcgcgccgaattcggcacgaggaggggacgtcctgggggcccgccaagactgcaccccctccttgaagagcttggtcgccactgggaacctgctggacttagaggagacagctaaggccccgctgtccacggtcagcgccaacaccaccaacatggacgaggtgccgcggccacaagccttgagtggcagcagtgttgtctgggagctggatgatggcctggatgaagcgttttcgaggcttgcccagtctcggacaaaccctcaggtcctggacactggcctgacagcccaggacatgcattacgcccagtgcctctcgcctgtcgactgggacaagcctgacagcagcggcacagagcaggatgacctcttcagcttctgagggcccggggccagccggacacaagcggccctgacacgtgatggaccaaagccacctgctgcgggggagccagttctggggcccgcctgccacctctcccagccctcagcattgtcagcctgaagatcagagctgcagccagtcaggcaggggagagatttttcttttaagccctgctctttctctgagaaccaaaagatgccttgaatatttattcagtgacttctggcttatgctcagatgccagtctgcgtcaggcacgtctcctgcagccgtgacatgtgcagtgtcctgcctcctaagtcctgtc

SEQ ID NO: 98321 - DNA, 1420 bp, Homo Sapiens
  misc_feature (99)..(159): n is a, c, g, or t
  misc_feature (1297)..(1345): n is a, c, g, or t
tgaagtcgacggcgcgccgaattcggcacgaggaccggatctcacccgccacacccggacaggcggctggaggaggtcggaccctcccccaaatctggnnnnnnnnnnnnnnnnnnnnnnnnnnnnnnnnnnnnnnnnnnnnnnnnnnnnnnnnnnnnnactttaggcgggcgtctaaaattctgggaagcagaacctggccggagccactagacagagccgggcctagcccagagacatggagagttgctacaacccaggtctggatggtattattgaatatgatgatttcaaattgaactcctccattgtggaacccaaggagccagccccagaaacagctgatggcccctacctggtgatcgtggaacagcctaagcagagaggcttccgattccgatatggctgtgaaggcccctcccatggaggactgcccggtgcctccagtgagaagggccgaaagacctatcccactgtcaagatctgtaactacgagggaccagccaagatcgaggtggacctggtaacacacagtgacccacctcgtgctcatgcccacagtctggtgggcaagcaatgctcggagctggggatctgcgccgtttctgtggggcccaaggacatgactgcccaatttaacaacctgggtgtcctgcatgtgactaagaagaacatgatggggactatgatacaaaaacttcagaggcagcggctccgctctaggccccagggccttacggaggccgagcagcgggagctggagcaagaggccaaagaactgaagaaggtgatggatctgagtatagtgcggctgcgcttctctgccttccttagagccagtgatggctccttctccctgcccctgaagccagtcatctcccagcccatccatgacagcaaatctccgggggcatcaaacctgaagatttctcgaatggacaagacagcaggctctgtgcggggtggagatgaagtttatctgctttgtgacaaggtgcagaaagatgacattgaggttcggttctatgaggatgatgagaatggatggcaggcctttggggacttctctcccacagatgtgcataaacagtatgccattgtgttccggacacccccctatcacaagatgaagattgagcggcctgtaacagtgtttctgcaactgaaacgcaagcgaggaggggacgtgtctgattccaaacagttcacctattaccctctggtggaagaccaaggaagaggtgcagcggaaagcggaaggaagggccttgccccacctttctcccaagccccttcnnnnnnnnnnnnnnnnnnnnnnnnnnnnnnnnnnnnnnnnnnnnnnnnncaagccccgggggcgcctaacgggaaaggaaaccctgggaaaggaaaggtggggccaaacccctccggggttttc

SEQ ID NO: 98322 - DNA, 921 bp, Homo Sapiens
caggccaaaggggaccccttcacccgggaggcgatgcagcttaaagctctcgaaatcgccctaggaaatgaacattccagagaaagggttcaaggcaagcttgggttggtgtcgaagaatgatgagaaggtatgacctgtctctgaggcattaagtgcccgtgccccagcacctgccggaagacctgactgagaaactcgtcacttaccagcgcagtgtcctggctctgcgcagggcgcatgactatgaggtagctcagatagggaatgcagatgagacgcccatttgtttagaggtgccatcacgggtaactgttgataaccaggacgaaaagcctgtcttggtcaagacaccaggcagggaaaaactgaaaatcacagcaatgcttggtgtcttggctgatgggaggaagttaccaccgtacatcattttgaggggaacatatatccccccggggaagtttcccagtgggatggaaattcgctgccaccggtatgggtggatgactgaagacttgatgcaggactggttggaagtggtgtggagacggaggacaggagcagtgcccaagcagcgagggatgctgatcttgaatggcttccggggccatgccacagattccgtgaagaactccatggaaagcatgaacactgacatggtgatcatcccagggggtctgacctcacagcttcaggtgctggatgtcgtggtctacaagccactgaatgacagtgtgcgggcccagtactccaactggcttctggctgggaacctggcgctgagccacaccggaatgctaaaaagccaccctggggctctttctggattggtcatgttccctgaatagcatctcagtgagtcatcctccagggttaagaaatgccattctccccacttggagaagagacaattttggtggaa

SEQ ID NO: 98323 - DNA, 1084 bp, Homo Sapiens
tattatcaattgtctcttgattcattctcatttgagtcggcaagcatcattttatgatcgtgcagatgtacatcacggaatgatgtagaggtcgacagatccagcactccagagagtctctctcgtccatgagatctcacaggttgcaatgctttctcccagatgtacagggcagctgccggcagaaccgccacgatgtatccccatccccagagaaacaacatttcttccatggggtcctattcaccaaatcctgcaatttctgcataggttcaggctctccatctcttccacatgttaagatttctctgccatcataaactctgattattcgatctgccgtgttaattaaaaagcaactccccttccgggcaaactcaattgacttaatggctgtggtattgcttgttccaagttgtcactctgaaggaagcaacaagatcctgagaatctgtttttaggaccaaaatcttgccttttgcgtttcccgtataaatatattcccctcgcctatcaaaagatgccacaacgttcaaatcggagtcatcgtccaccggcagaacaacatgtttggaatctgaaagggtcaacatgacaggagcagatttcatgggacacacgagaaccttgttctgatctcgtggatgatattggacttttaagatgggtgaagggaatcgaaacctctggtcacagtcgcctgaaagaacatcccactgtgacactatgttatcagtggaagcactcacgagtttatgaccatctcggctccagcataaagaacacactggatggatgtgtgcactaattattttagcaatgcctcttgtcaagaaatcccagatgactattcggccatcattacagccaactgcaagcagtgtgccccacctgttaaaggtgcaagtcaaagccatgctgatacaatccaaagttccatcagcttcctctggatagttctgcccaaaggactccagcaactcgaggttcatccctgcggactgtggccgcccggtctcagctccggcaacaacaccttctccccggccggcttcagcaacttgcgtctaagtggtggacgccg

SEQ ID NO: 98324 - DNA, 1184 bp, Homo Sapiens
ccccccacctcctcctccacctcccctccgccgacccgcgaaccagacggtcgcggagcaggcttgtattttccggccagtaactataacggtcctatggtagcgaggcctgggtggcgaattcggcacgaggtgagagggccttcgcggtggaacaaacactcgcttagcagcggaagactccgagttctcggtactcttcagggatgagtcatgtggcagtggaaaatgcgctcgggctggaccagcagtttgctggcctagacctgaactcttcagataatcagagtggaggaagtacagccagcaaagggcgctatattcctcctcatttaaggaaccgagaagctactaaaggtttctacgataaagacagttcagggtggagttctagcaaagataaggatgcgtatagcagttttggatctcgtagtgattcaagagggaagtctagcttcttcagtgatcgtggaagtggatcaaggggaaggtttgatgatcgtggacggagtgattacgatggcattggcagccgtggtgacagaagtggctttggcaaatttgaacgtggtggaaacagtcgctggtgtgacaaatcagatgaagatgattggtcaaaaccactcccaccaagtgaacgcttggaacaggaactcttttctggaggcaacactgggattaattttgagaaatacgatgacattccagttgaggcaacaggcaacaactgtcctccacatattgaaagtttcagtgatgttgagatgggagaaattatcatgggaaacattgagcttactcgttatactcgcccaactccagtgcaaaagcatgctattcctattatcaaagagaaaagagacttgatggcttgtgcccaaacagggtctggaaaaactgcagcatttctgttgcccatcttgagtcagatttattcagatggtccaggcgaggctttgagggccatgaaggaaaatggaaggtatgggcgccgcaaacaatacccaatctccttggtattagcaccaacgagagagttggcagtacagatctacgaggaagccagaaaattttcataccgatctagagttcgtccttgcgtggtttatggtggcgccgatattggtcagcagattcgagacttggaacgtggatgccatttgttagtagccactccagggcgt

SEQ ID NO: 98325 - DNA, 367 bp, Homo Sapiens
aaggggagagagtatgaagtcgacggcgcgccgaattcggcacgaggttgaggcatgcttttggaatcctggcatgttggcatatggctggtctatcctttttaagatctctggttgggggtatctggatatggattaggagggacaaggagcctttttcttggctaatgttttccaatacttttttgaatggtgccagcccctccaggcatcccacccccaaatcatcatctttagcactaacagggtgtctggtcttagaagcctcccttcagatcccagctgacccatgtaacaagcctggccagctgtgggtggaatccatgtggttctatcagaaggctgcagccaacatcaaggccaggca

SEQ ID NO: 98326 - DNA, 857 bp, Homo Sapiens
  misc_feature (745)..(745): n is a, c, g, or t
  misc_feature (753)..(753): n is a, c, g, or t
  misc_feature (756)..(757): n is a, c, g, or t
taggtgggagagagtatgaagtcgacggcgcgccgaattcggcacgaggccttttctcatcatcctgccaggctaactttaagtctcctgctttttctcacttggatttggatccatttcttcctatttccgctcatgtgaactctccagttctcctttctcaccactctcctgctagccatctctttggcactaaaggccctggtcaaattggatttctttcatttttccacacttcaaagacccatgttctaggtattctccatagggatagtctctttggcatttatttggtttttctacgttttcagtcccatttactccaagactcactccctgccacctagtgcatcagatacagctacttctggctgacttttcaagggggaccaccctacctgtcatctcttcactgttcagaaatgactgtgtcagtgcacctcaaactcccttgctgtccttttccaaggagacagctaaggtggatggagatgcagaatggacctcacgttcgccctagtcaggactgataccctttccgtttcagaggattgccaagaaaaaactcacagttgaggcagggtgctctgaggtcggctgcggtgtgggaggcacggccagggcatgctctctgggctggagcaggtggattcgaaggcctgtctagcacgagggcccaaaggtcttgtcagtggccagtagctctgccgcctttcccagagagggggtcaggggacatctgaangctggccntgnngcactctgctctgcagctgagcagccaatagggcgatgtatgggactgggccataagtgggtgagcaagggaagatcccatggatgtgctgtcgaacgga

SEQ ID NO: 98327 - DNA, 841 bp, Homo Sapiens
atttcccctcctctgcgcctccccgcccgctcacggtcctaggtagcgaggcctgggtggcgttccggcacgaggggagctccaggtgctgatggcccacaaggtcccccaggtggaataggaaaccctggtgcagtgggagagaagggcgagcctggcgaagcaggtgagcctggccttccgggagaaggcggccccccgggacccaaaggagaaaggggagagaagggcgagtcaggcccttcaggtgctgccggaccccctggacccaaaggccctcccggagatgatggtcccaaaggcagccctggcccagtgggttttcctggagatcctggcccccccggagagcctggccccgcgggtcaagatggtccccctggtgacaaaggagatgatggtgaacccgggcagacgggatcccccggccctactggtgaaccaggtccatcggggcctccaggaaaaaggggtcccccaggccccgcaggccccgaaggcagacagggagagaaaggggccaagggagaagccggcttggaaggccctcctgggaagactggccccatcggcccccagggggcccctgggaagcccggaccggatggccttcgagggatccctggccctgtgggagaacaaggtctcccaggatccccaggcccggacggtccccccggccccatgggtcccccaggacttcccggcctcaaaggagattctggtcccaaaggtgaaaagggtcatccaggcctgatcgggctcatcgggtcctcccggtgaacaggggtggagaaggggcgacccgtgggtctcccctggcccccaggggctcctccgg

SEQ ID NO: 98328 - DNA, 717 bp, Homo Sapiens
acggggagaaaatcatttgggacccagggcctttcacaaaaggtgcttcgccttctttaccaagttgagttgagacggttaagtggccatcattggagaccccggccttgaatgttcccctcccacgggtaggtgtttcttttttacgccggacgggccaggaggattcaatgggaagccgccccaaaccggggattggattcggcccccaaggcttgttttacttggctttccgcatgccgcacgaggcgcaaacggggcttttgggcccccgggtgatccccgcccgattccgctagacttcccgagacgcttcaggggctgcgcgccctctcccagacggggtcttcccgcagaggtatcggagaccgccccgacgcatagaccgtcccgggatcgctgtcccttggaagaagtgggggtttccccacagcacaagctcggtccccgggctcccgactgggccgccctggcacgggctccgttcctccgggccacactgggactccgggctacgcgcccccggacagcttctacttcagcgcgggccctgctcagtgtacttagaagagcggggagatgctgccgagcgagccagtcccattagtttgcgcccccgaagcctcggccgggtagcccggcagcctcgcgtcgccgagtcctggctcccgggcgatcgagcccgagggtctgcggccagtgcgagcctcacaaacc

SEQ ID NO: 98329 - DNA, 1233 bp, Homo Sapiens
aggggggagagagtatgaagtcgacggcgcgccgaattcggcacgaggcgccttccccgtgatggtgaatgacaagggccaggtgctcattgctgcctcctcctacggccgaggccgcctcctggttgtgtcccatgagggctacctgtcgcatgctggcttggctccatttctcctcaatgcagtgagctggctctgtccctgtcctggggctcccgtgggagtgcatccatccctggcacctctagtaaacatcctacaggatgctgggcttgaggcacaggtcaagccagaaccaggagagcccctaggggtttactgtatcaatgcctacaatgacaccttgactgcaacgctgatccagtttgtgaaacatggagggggcttgttaatcgggggccaggcctggtactgggccagccagcacggccctgacaaggtgctctccaggttccctgggaacaaggtgacaagtgtagccggagtgtacttcactgacacctatggggacagagaccggttcaaggtctctaagaaggtgcccaagatcccactccatgtcaggaggattccctgggagcacccaccagctgagatctgcacatcagccacaatcctctcaggacggcggaaagggaagggctcagctgccagcctggccacagcctgcatcatctcatcccagaggcggagcacaggctcggggtccttcagggcctgaaggtttgtggttggcactgtcaggatgatgttgtccgtggccagctctccccagggagccaggttctcctgcatctgcctcttccactcctccagcgatgtcttacctgggaataaatatcatggaacctaccacacccacttctccaacttcccttgagctgaaaaataccatttgaactctggaagaacattgcaataatgaactactatcacaggcgtctataggctgtaaagtgaagaaaaggcttcctgactcttctctttgtctgccctgaagtctccatggacacagggtattccgtatcttctgcctccatgttccctcccaacagttcttcctctttctctccaccaaagctcatccctctcccatttagcaaccaccccacagttcccacggcatctgccactcttcctcctccctaaatgttcactccacttacccagcttgtagtatggggcaggcacagtcccctgatagtgacaggcacagggctagttggctgcctg

SEQ ID NO: 98330 - DNA, 786 bp, Homo Sapiens
atgggggagagagtatgaagtcgacggcgcgccgaattcggcacgaggtgccaatctacagcgaagaaagtctcgtttggtaaaagcgagaggggaaagcctgagcatgcagagtgtgcagagcacgagcttttgtctccgaaagcagtgcctttgcctgaccttcctgcttctccatctcctgggacaggtcgctgcgactcagcgctgccctccccagtgcccgggccggtgccctgcgacgccgccgacctgcgcccccggggtgcgcgcggtgctggacggctgctcatgctgtctggtgtgtgcccgccagcgtggcgagagctgctcagatctggagccatgcgacgagagcagtggcctctactgtgatcgcagcgcggaccccagcaaccagactggcatctgcacggcggtagagggagataactgtgtgttcgatggggtcatctaccgcagtggagagaaatttcagccaagctgcaaattccagtgcacctgcagagatgggcagattggctgtgtgccccgctgtcagctggatgtgctactgcctgagcctaactgcccagctccaagaaaagttgaggtgcctggagagtgctgtgaaaagtggatctgtggcccagatgaggaggattcactgggaggccttacccttgcagcttacaggccagaagccaccctaggagtagaagtctctgactcaagtgtcaactgcattgaacagaccacagagtggacagcatgctccaagagctgtggtatggggttctccacccg

SEQ ID NO: 98331 - DNA, 899 bp, Homo Sapiens
tttatgggggagagagtatgaagtcgacggcgcgccgaattcggcacgaggggggctccgccagtgttgaaccctcccagcacccgctcttccttccccagcccccgactgtccctcccaacggattccctctcccccgacggcggcagcatcgagctggagttctacctggcgcccgagccgttctccatgcccagcctgttgggagctccaccctactctggcctgggcggtgtaggggatccctatgcgcccctcatggtgctgatgtgccgggtgtgcctggaagacaagcccatcaagcccctgccttgctgcaagaaggccgtgtgcgaggagtgcctcaaagtctacctgagcgcccaggtacaacttggccaagtagaaatcaaatgccccatcacagagtgttttgaattcttggaagaaacaactgttgtctataacttaacgcatgaagactccatcaagtataagtacttcttggaacttggccgtattgattccagcaccaagccatgtcctcagtgcaagcactttacaaccttcaagaaaaaaggacatattcccaccccttccagatcagaaagcaaatacaaaatccagtgccctacctgccaattcgtctggtgttttaagtgccactctccttggcatgaaggtgttaactgcaaggagtacaaaaaggagaaaattgttgcgtcactggccagcgaattgagctgggcagagatgccagagtgtcaagtgcagatcacatcacgactgaagagtacatatgactgctccatgtacctatttgtacgagtgtgaaatcgcgctcgatttgaaccctcactcataatgagcattctctcaaaactctagatagcagcacggcgattctgctcatagtgtgt

SEQ ID NO: 98332 - DNA, 1230 bp, Homo Sapiens
  misc_feature (769)..(866): n is a, c, g, or t
cttgataatactcattcacttagatgttcagtctatggatgtcagttccttctaacttgatatccacagcaactaatggacaaatggatgaatgggggaactcttcaggaagcaagtaatgcgtgctgttcagcaagcctacatgaaccattcagtaagaaatgttttaatagtgggctaaaagaagaaggaatcaattggtgaaagcaaaatgtataagatgagcttcattattatttaaagaactacagaatcaacatttgaaatacaatttcagattggtggctgttagattgaaataacatcaccattagctcaatctgatatgccaagggaaatacaaatgtgtgctaaaagtgcatcttaaacccgaaaatccttgcctgtcactcagactacaaagttggcatgtttgaccaaaattgatccaaagttttttaatcactcacaactaaaaattattagaactaagctggtcaggatgaaaatatagaattaaaaaaatctgttctatgtgtcttaaattattctttggtcaaatgatgtgatttttgagagatctgaaaatataaacctatttctcatttccaaatacaaggttataagtatgtacagcaaggtagcattttcttactagaaaacaaggctttcaggtaccgtatcattccattaacacttgtacacttttatagtccctttcctcccatggctacaaagtgctggacatacagagaatacaggaaagaataaaggagcaaatgaatagagnnnnnnnnnnnnnnnnnnnnnnnnnnnnnnnnnnnnnnnnnnnnnnnnnnnnnnnnnnnnnnnnnnnnnnnnnnnnnnnnnnnnnnnnnnnnnnnnnnctggcaagttacaaaagcatggctgggaacaaagaaaaagaaatggaagatcagtcctggctcccagccctagacactaaactttatttcaaaatattaaaaaataaaaatagcccacaattgccttttaaatgttggaatttagaaaaacctttaggtattcctcttaaacatgtgcctttctttcatattcctgctaagtgaagaacggatagatgactaaatggtattccttactctctctaactgcaattcccatgatagatcagatgtatcagcatttcaccagagctcaggctccaaactcaaggacacctcgtgccgaattcggcgcgccgtcgacttcatactctctcccccctaa

SEQ ID NO: 98333 - DNA, 642 bp, Homo Sapiens
cgcggcgcgagctggactaccgcggtcgctgttggtggcgccgccgggcctgcgactaggtggcatccttcagacactataggccgtctctgcacacgtgatgcggggctcggtcacgttgccccctggaagcttgaggatgcgccaggtttgactctgcagggcgtacgcgctttagggatggaaggaagaggaacgcggcaggaaggcgagccccaaggtggagaatcgcctgggcgcgcaggctgcggcggcttcgcacagccgccctgggcgctgcacgggtccgcgcgcaccctgctgcgcacccactcgcggccagctccctacagaggagtggagtgactgctcgactaccacccctcttttagtgtgagcgtctggagtcctgaccgccccagccagcccagctacgatgaactgtctaagaggatgtggcaagacccagaagtatgggtgaccttatgtcagaggaagtggctttcttattgcagcaaaaattcccgtaccaatgtcagtgctagggtaatgtaactaaacttttatttatttttattctgccctcccctttctgtttgttatgaaccataaaatattcaacacaattatcttgaaatataaatataaaatttaaaacataaa

SEQ ID NO: 98334 - DNA, 900 bp, Homo Sapiens
cctgggtggcgaattcggcacgaggtgggccggcgccttcaccatggcctcggcagagctggactacaccatcgagatcccggatcagccctgctggagccagaagaacagccccagcccaggtgggaaggaggcagaaactcggcagcctgtggtgattctcttgggctggggtggctgcaaggacaagaaccttgccaagtacagtgccatctaccacaaaaggaagctgctcgagctgctctttgattatgagattgagaaggagcccctgctcttccatgtcttcagcaacggtggcgtcatgctgtaccgctacgtgctggagctcctgcagacccgtcgcttctgccgcctgcgtgtggtgggcaccatctttgacagcgctcctggtgacagcaacctggtaggggctctgcgggccctggcagccatcctggagcgccgggccgccatgctgcgcctgttgctgctggtggcctttgccctggtggtcgtcctgttccacgtcctgcttgctcccatcacagccctcttccacacccacttctatgacaggctacaggacgcgggctctcgctggcccgaactctacctctactcgagggctgacgaagtagtcctggccagagacatagaacgcatggtggaggcacgcctggcacgccgggtcctggcgccgttctgtggatttcgtgtcatctgcacacgtcaaccaccctccgtgactaccctacttactacacaagcctctgtgtcgacttcatgcgcaactgcgtccgctgctgaggccattgctccatctcacctctgctcccagaaataatgcgctgacacctccccacaacctgcaatctgtcggcactttctcgttcaacgcctgcgcttaactgggatcct

SEQ ID NO: 98335 - DNA, 1547 bp, Homo Sapiens
caccacagaagggcgacaggacggacatctttggtgcagcacaacttcgaattatgagcaggaccagaaatactctttctgcacagaccacactgttttggttcagactcgaggaggaaattccaatggtgccttgtgccacttccccttcctatacaacaaccacaattacactgattgcacttctgagggcagaagagacaacatgaagtggtgtgggaccacacagaactatgatgccgaccagaagtttgggttctgccccatggctgcccacgaggaaatctgcacaaccaatgaaggggtcatgtaccgcattggagatcagtgggataagcagcatgacatgggtcacatgatgaggtgcacgtgtgttgggaatggtcgtggggaatggacatgcattgcctactcgcagcttcgagatcagtgcattgttgatgacatcacttacaatgtgaacgacacattccacaagcgtcatgaagaggggcacatgctgaactgtacatgcttcggtcagggtcggggcaggtggaagtgtgatcccgtcgaccaatgccaggattcagagactgggacgttttatcaaattggagattcatgggagaagtatgtgcatggtgtcagataccagtgctactgctatggccgtggcattggggagtggcattgccaacctttacagacctatccaagctcaagtggtcctgtcgaagtatttatcactgagactccgagtcagcccaactcccaccccatccagtggaatgcaccacagccatctcacatttccaagtacattctcaggtggagacctaaaaattctgtaggccgttggaaggaagctaccataccaggccacttaaactcctacaccatcaaaggcctgaagcctggtgtggtatacgagggccagctcatcagcatccagcagtacggccaccaagaagtgactcgctttgacttcaccaccaccagcaccagcacacctgtgaccagcaacaccgtgacaggagagacgactcccttttctcctcttgtggccacttctgaatctgtgaccgaaatcacagccagtagctttgtggtctcctgggtctcagcttccgacaccgtgtcgggattccgggtggaatatgagctgagtgaggagggagatgagccacagtacctggatcttccaagcacagccacttctgtgaacatccctgacctgcttcctggccgaaaatacattgtaaatgtctatcagatatctgaggatggggagcagagtttgatcctgtctacttcacaaacaacagcgcctgatgcccctcctgacccgactgtggaccaagttgatgacacctcaattgttgttcgctggagcagaccccaggctcccatcacagggtacagaatagtctattcgccatcagtagaaggtagcagcacagaactcaaccttcctgaaactgcaaactccgtcaccctcagtgacttgcaacctgtgttcagtataacatcactgtctttgctggtgggaaggtaccgagctgata

SEQ ID NO: 98336 - DNA, 624 bp, Homo Sapiens
atctgtgaccgaaatcacagccagtagctttgtggtctcctgggtctcagcttccgacaccgtgtcgggattccgggtggaatatgagctgagtgaggagggagatgagccacagtacctggatcttccaagcacagccacttctgtgaacatccctgacctgcttcctggccgaaaatacattgtaaatgtctatcagatatctgaggatggggagcagagtttgatcctgtctacttcacaaacaacagcgcctgatgcccctcctgacccgactgtggaccaagttgatgacacctcaattgttgttcgctggagcagaccccaggctcccatcacagggtacagaatagtctattcgccatcagtagaaggtagcagcacagaactcaaccttcctgaaactgcaaactccgtcaccctcagtgacttgcaacctggtgttcagtataacatcactatctatgctgtggaagagaatcaagaaagtacacctgttgtcattcaacaagaaaccactggcaccccacgctcagatacagtgccctctcccagggacctgcagtttgtggaagtgacagacgtgaaggtcaccatcatgtggacaccgcctgagagtgcagt

SEQ ID NO: 98337 - DNA, 848 bp, Homo Sapiens
cttggcgggtgcagacacgcggcggaggagcgagggccgcgagcgcttcctgctgtgctccggggtcttgtcgtgctcgttcttctgcacgctgtgcatctcgcacggcccgtttcctgtgaacagagaccgcttggcttcgggcaggaactgtccaaactctgagagcaggtcctcctggccccggaagaggttggccacctcggtgaacacctcctcttcagacatgcctcggaatggccggcccctcgtgttcagctgctccttctggtacgtgtgcaggatctccaggaatgacctgtagatttctgggtggtctaggaagcgggttttaatcttattcacatagctgatggcgttgttgaattccacggaatcggactccaggggcacctggggtttgtcctctttatacggcacctgctgcttgaagtcctctgcaccgtccccgtggttgtgcgaattctcctggcttgtcagaggcgactgtatgtttaacttgccattcttgggaatgtctattctatatccgaggggaagaaaagcgttgaatccaacaatgaggtcagggtgctcgtggaagagctgcgagacacgtctgatgactccaggagtatcgatgctctggcttttgaactccttcatgatctccaggaagccgttgtaggtggcagggtcgctgccaaagcggatcttcacctggtccagataggtgagggcgtcttctacgtgcaccggcagcttctcgtggcctgcggagcccgagcgaccccagcgggcgccgctcagcccccggcccgcggggccgccggcaccgctgccatcccgggaattccggaccggtccag

SEQ ID NO: 98338 - DNA, 594 bp, Homo Sapiens
  misc_feature (127)..(137): n is a, c, g, or t
  misc_feature (195)..(230): n is a, c, g, or t
gacttatgttgtcttttattagcagggaatgtcatcacagattggatagtacatacaggtgcaatgtcaccatcagcaaggtcagcttgacactcaagtggaagattagggaagaatgactaggatnnnnnnnnnnnggagggcaccaagggaaagggatgatggggtgagctggcgagtgtgggtgggaaatgnnnnnnnnnnnnnnnnnnnnnnnnnnnnnnnnnnnnttaatccacattttatcgtttacttttcaaacagatgcaccttacccccaccccaatgctctgtccctgcagatatcagaagacagtgtgattttcatgctctgaagttcagttttacatccaagcatccctctctgttttttaacaatccaaagacaggccaaaaaaagcaccacagtttattaagtacttactaagcacccatccactgccccacactgtggcaaggattgtgaggggtaaagaagcatggggcacaatattctgctgccttcatgtaacttacagtctcacaaataaatagaacttcagttgaaatactgacattaattaaatagagttgtaataaatacaagaatcttct

SEQ ID NO: 98339 - DNA, 365 bp, Homo Sapiens
ctggaccttattttctaatgttaagtttgagttctgggtttagttgggcaagaatttccctcagctgccatcaatcctggctgaagttaacccctttccatcactgacccaggggaaaaaaccaccaaatttacttactatctgttaaaaattcaaaaaggaagcagatgatcaagtcattgaacaaaaagctacatggattagacaagaacatataacttggctctaagatgatggagaaggaaaagacatctcatgggtggcttctccttaagagaaatgggaatctcagcttattagaaaaaacaatttgggaggttactactttagttcagagactgtaaactaaacctctgttgagcagg

SEQ ID NO: 98340 - DNA, 832 bp, Homo Sapiens
  misc_feature (73)..(73): n is a, c, g, or t
  misc_feature (96)..(96): n is a, c, g, or t
  misc_feature (647)..(703): n is a, c, g, or t
cagcttcccacctgttcccatttgagcagctgtgagatgagcgcccactagaggggcacccaccagttgctgntgccccactacaggccccacacntgccttgggcatgcccagcccctggtggtggaggcttctctgctgagaaggcaaactgaggcagcatgcacggaggcgaggtcaggggagacgaggccaagctgaggaggtgctgcaggtcccgtctggctccagcccttgtcagattcacccagggtgaagccttcaaagctttttgctaccaaagcccactcaccctttgagctacagaacactttgctaggagatactcttctgcctcctagacctgttctttccatctttagaaacatcagtttttgtatggaagccaccgggagatttctggatggtggtgcatccgtgaatgcgctgatcgtttcttccagttagagtcttcatctgtccgacaagttcactcgcctcggttgcggacctaggaccatttctctgcaggccacttaccttcccctgagtcaggcttactaatgctgccctcactgcctctttgcagtaggggagagagcagagaagtacaggtcatctgctgggatctagttttccaagtaacattttgtggtgacagaagcctnnnnnnnnnnnnnnnnnnnnnnnnnnnnnnnnnnnnnnnnnnnnnnnnnnnnnnnnngttagtaaaatagatgagtgttaaactagattgtattcattactagataaaatgtataaagctctctgtactaaggagaaatgacttttataacattttgagaaaataatacacgcatttatctaaaaa

SEQ ID NO: 98341 - DNA, 1178 bp, Homo Sapiens
  misc_feature (311)..(321): n is a, c, g, or t
  misc_feature (561)..(570): n is a, c, g, or t
  misc_feature (617)..(683): n is a, c, g, or t
ctccggggactagctctcgtctatcgaaggcaggcggtgcgagtatgtggggcaaggcggagaaagaaccctctcgccggggcggcgtgtgtgatggattttcccgccacgacaccgcgcgcgtcgcgggcgggtgggtggcgttgtattggacccgcgggggcccccagaatatgaaaaatcccgcagacgaagataggaagcagcgtgggtcgggtggaaccaaccatttcttcccagaaagataattgtagtaatttcggaaagtgctttaagacaatcaaacgaagaagtgggggtctcctacaaannnnnnnnnnngcccagaaaaaatgttttgttctttcccatggagagcctccaaaacttgcggtttgcggggggcggcccaaggggttgcccacccccgcgggggggaggtttcgtttacaaaggagtccccaaaggggggccggttttctccaaataaagaaaggggttggaaacgcacgagcccggggccccacgggatataatttcccgtccctgggccgcgccccccctttgatcaagaaaaagatnnnnnnnnnnttaaccctgggcccccctggagggtatcttttgggcgggccccccgnnnnnnnnnnnnnnnnnnnnnnnnnnnnnnnnnnnnnnnnnnnnnnnnnnnnnnnnnnnnnnnnnnnctccagttactttgctttatttgcagactgaagtgggctacataaatccattacagagtcaacacatgtagacttggcaaaaaggacaatacaaaaatacaactcttgacagtaaatgagactgccctcagctcatcccagtctgtatcagtgggaagccagtgtttaaggtcaacataggaggaagtgctgtggaatgaggaggcatgaaggcttccaccaatgtcactgacccagtaaaatcctggactgagttgcatgggctcttcttggctgtgtggccatttctgccgccttcaaacttggtcacttcctcctctaggaaggggaagagaacctccccaagtcatcggacaccctccacaaggatctgagcaggggctgtgcagtcaaagccaagtgtagccctgggaccactgtgagcacccttccctggggcacctccagcctgggcagttgcctctgggcatccccgatcccgggaattccggaccg

SEQ ID NO: 98342 - DNA, 1019 bp, Homo Sapiens
ctcggttccgcctgtctcaagatgatataaatggcattcagtccctctatggacctccccctgactcccctgagacccccctggtacccacggaacctgtccctccagaacctgggacgccagccaactgtgatcctgctttgtcctttgatgctgtcagcactctgaggggagaaatcctgatctttaaagacaggcacttttggcgcaaatccctcaggaagcttgaacctgaattgcatttgatctcttcattttggccatctcttccttcaggcgtggatgccgcatatgaagttactagcaaggacctcgttttcatttttaaaggaaatcaattctgggctatcagaggaaatgaggtacgagctggatacccaagaggcatccacaccctaggtttccctccaaccgtgaggaaaatcgatgcagccatttctgataaggaaaagaacaaaacatatttctttgtagaggacaaatactggagatttgatgagaagagaaattccatggagccaggctttcccaagcaaatagctgaagactttccagggattgactcaaagattgatgctgtttttgaagaatttgggttcttttatttctttactggatcttcacagttggagtttgacccaaatgcaaagaaagtgacacacactttgaagagtaacagctggcttaattgttgaaagagatatgtagaaggcacaatatgggcactttaaatgaagctaataattcttcacctaagtctctgtgaattgaaatgttcgttttctcctgcctgtgctgtgactcgagtcacactcaagggaacttgagcgtgaatctgtatcttgccggtcatttttatgttattacagggcattcaaatgggctgctgcttagcttgcaccttgtcacatagagtgatctttcccaagagaaggggaagcactcgtgtgcaacagacaagtgactgtatctgtgtagactatttgcttatttaataaagacgatttgtcagttatttt

SEQ ID NO: 98343 - DNA, 871 bp, Homo Sapiens
  misc_feature (81)..(133): n is a, c, g, or t
  misc_feature (791)..(827): n is a, c, g, or t
ccacataatcctaccctacatagtgtggttaaaaaattcataaaaaattcatatgtttaagaagttaagattgtgtggctnnnnnnnnnnnnnnnnnnnnnnnnnnnnnnnnnnnnnnnnnnnnnnnnnnnnnaatgttagttttttcccccaatcaccagcagtaccttcatgccaagtggcagcagacacaagacaatcacttggcaaaatctattctttcaatactaacattattacaaagggaaaaggaagaagcttgaaagaacacagaaagccaaaagacctaattgaacgtctgttaagaaccagctccttcctccaactgtgccaggaaagtaactaagcttttggctggtccagcaagacagggcagtcaggctgacaatggtgctcttgctgaactttcagccagagtgcgattctgaactcccgggtgaacggtacaaggaaatcctgactgcaggctgggtcaacccgcccaatgccatcggacaaagaataaaacattactactagggttccaaatgtgagccatctgactacgtcttgcacactgaaacctcagactagccaattctgcactccaatctccttcaaaagagagccgggagagactgctgcgagggacaggcacagaagaaagaccctgtgagaacacagtgagaaggtggccatctgcaaagaggcctgccaggagggaggcctcagaagaaagcaaacctgcagacatcttgatcttgaacttctagcctcccagaactgtgagaaaataaagttctgtttaaggnnnnnnnnnnnnnnnnnnnnnnnnnnnnnnnnnnnnngaccgcgtatgcggccgcaagcttattccctttagttgagggta

SEQ ID NO: 98344 - DNA, 1207 bp, Homo Sapiens
  misc_feature (16)..(16): n is a, c, g, or t
  misc_feature (95)..(95): n is a, c, g, or t
ttaaggcaagatagtnagaaggaaaggaggtatgtacagcaatgctcctcttacgggagaagagaacctgccacagaacaagatgcagttggttntgtggtgcctgatgaagaaaagaaaagggtgtctgcacagaatcttggctccattctgctgcaccgggaattcctgaccacagcagtggctgcggcagcctctgtgccttcctcattgacctccacgaagcacttgtgggcaaccttggacagaggcacattcttctcagttgacattccagaaaagtctgccttggcttcgtcaaaagcatcgatcattcctaatcttcgaaggaaaggctccaagtcataactctcctccagctttaatctgggaaggaaaacttgaaccttactttttgtcaacttttctgaatttgtccaggctttgaatttctcatatgtaagtgctttttccaccacggcgaggtccgtgttgtcatcgggaagcagaatgaccatgctcagctcctcttccacatagggcagctccaggacctgggtgtgtacctcatccgcataccccattttaaacttagcttccttaaacatcatctgcactgtctttgtgttcctcgttggttttaaagagcattccccttgtgtactttctgtcaaattgctcattccactttgcccttgaaataaatggcattcacaaggaccagctttgtcaggggatcgactgtcccagcatccagtacctctgaaatcttaccttcagtcttctctgccacccagtcatttatatgcttcctgcactcttcagtgtcttcagcaaaggacaactcctccagctctgcctgatagaacttctgacagtattctttaaagtctggaaggaaatcacacgtcttttctccaaagagtctgttggcagttctaagcaagtactgagtgccagttctgttaacttcactgagaagtgactggaaacctcggtgaatatctccgtctttgtataaacaaagtgcctgggacatctgggctgcagtgcttccctttgcccccatgaagaccatggccagggcagaggagatgctcatgggagagaagaatacgtttcttgagttgtcctcttcccccaatattttaaataagctgatggcaaaagtgccatttgcttcacagaggtcatccatcagagaaggtctggcagaggcacccacctc

SEQ ID NO: 98345 - DNA, 922 bp, Homo Sapiens
acgtttgcattttcttggttcaaggtgtttattgcatctcagagggcagacatgcactgggtttttaaaccaaaatacaaagaaaagccattttgaaattggttttaggtaattttcccccattacagtgtatgttatccccacagtaaattcagatacaaccacttttaaagggtaccatacatctattaaataatttgaaaaataggcaaacacctttccaacccaatatgcttttacaaagagctgccaagccactaaacaacactgatcaacagtgacctcatgtacgcatcaaaatcttaagccaagccatcagcacagacagtatgacaacaaactaaaaatcaaagaatacagtatgtacagtaaaagatacaattctctgaattagtttaaatcctaatcacaatgttacaacaaaacctactttgagctcagttgaaggatggaagaacactagtctacaaaacacacaaagaaacactaaattaacagatgtactaaaaacccacagtaaagtaaagatatttgcagtaatctttaaattacagatataccttggggtgccttcagaatcacttgaatagcacctctctaaccgcattttcatgaacatgacacaaacagaccctttacttttcagtgcatttaatcaagaatgaataaataggtcaatttagatgcaaaacctgtcaaatataattaaaatatatatattttaatatagcagtgataaataggggattcttcccatacgatttttcgttcttgataaggtagcttcaaagagaagtatttattatggacgttaacctttatattttttaaaataaaatttcttaacatatacagtgccacaaaaataaacatttctcacaacagttgaagttcctgtgattggaaaaatgtactccacact

SEQ ID NO: 98346 - DNA, 523 bp, Homo Sapiens
  misc_feature (94)..(103): n is a, c, g, or t
  misc_feature (125)..(170): n is a, c, g, or t
  misc_feature (190)..(298): n is a, c, g, or t
agaaaatgcatcttcagcagtgacagcatcaacgaggaggagactggccgggaggctattacccgcatcaaaaccagtgaacattaaaaaaaannnnnnnnnnagagagagggtcttgctctttnnnnnnnnnnnnnnnnnnnnnnnnnnnnnnnnnnnnnnnnnnnnnntgaattcctgcgttcaagcnnnnnnnnnnnnnnnnnnnnnnnnnnnnnnnnnnnnnnnnnnnnnnnnnnnnnnnnnnnnnnnnnnnnnnnnnnnnnnnnnnnnnnnnnnnnnnnnnnnnnnnnnnnnntaggacaaagaggaatgacaaaaggcatgtaaccacctgaatttgcccctatcaaagagctctccaggaagcaccaccaaggaattttcactgacatttcccaggccagaccatgctgctgctaagcaaaatgaggattctgctagtgaggatgaaaggaagaatgtgtaatcagttttcttgaagtataatacatgtacaataaactgaacctattggaaatat

SEQ ID NO: 98347 - DNA, 919 bp, Homo Sapiens
caaagctgaagtcggctaggtttgcaaagctgtgggctgagcactcaggcaatcacactctcagaaactgcggcggctctggactgcagcctcccaaggctccatgccagacaaagcatgcgtgtcacacttgctacaatagcctggatggtttcttttgtctccaattattcacacacagcaaatattttgccagatatcgaaaatgaagatttcatcaaagactgcgttcgaatccataacaagttccgatcagaggtgaaaccaacagccagtgatatgctatacatgacttgggacccagcactagcccaaattgcaaaagcatgggccagcaattgccagttttcacataatacacggctgaagccaccccacaagctgcacccaaacttcacttcactgggagagaacatctggactgggtctgtgcccattttttctgtgtcttccgccatcacaaactggtatgacgaaatccaggactatgacttcaagactcggatatgcaaaaaagtctgtggccactacactcaggttgtttgggcagatagttacaaagttggctgcgcagttcaattttgccctaaagtttctggctttgacgctctttccaatggagcacattttatatgcaactacggaccaggagggaattacccaacttggccatataagagaggagccacctgcagtgcctgccccaataatgacaagtgtttggacaatctctgtgttaaccgacagcgagaccaagtcaaacgttactactctgttgtatatccaggctggcccatatatcccacgtaacagatacacttcctctctttctcattggttaattcagtaaattctaatactggcctggttataatttaccatttttgggtacagccacaagtaaccccttatttttagt

SEQ ID NO: 98348 - DNA, 996 bp, Homo Sapiens
tacggacgcgaggcctgggtggcgaattcggcacgaggcgaggctccgtgcgcaccttggccgagccgaaccgagccgagtcctgtccttccaggccgttcgcaatggtggatgagttggtgctgctgctgcacgcgctcctgatgcggcaccgcgccctgagcatcgagaacagccagctcatggaacagctgcggctgctggtgtgcgagagggccagcctgctgcgccaggtacgtccgccgagctgcccggtgcccttccccgaaacgtttaatggcgagagctcccggctccccgagtttatcgtgcagacggcgtcttacatgctcgtgaacgagaaccgattctgcaacgacgccatgaaggtggcattcctaatcagcctcctcaccggggaagccgaggagtgggtggtgccctacatcgagatggatagccccatcctaggtgattaccgggccttcctcgatgagatgaaacagtgctttggctgggatgacgacgaagacgacgacgacgaagaagaggaggatgattattaggccctcgaccctcgggcctcgaggggggagggccctgcacgccgccaccccctccccgcagccctcaccccgccaggagccactgctctcccccttgccctccggtccccttacctacccgcgcccgtctgctctctctcttcatttctccgtagtgcttgtctttgttccaggaatagcgctccagttacctgctgctggggtcggggctggagcctcactcactccgaagtgcttggaagtgtcatctacccctggccatccccggggatcccctcccccgctaattcggaactggggccatgaaccccaagcttttggcccaggccccctgttactaacccgcccagaccagccccgaggccctcgcggctggcacccggccctggcttgccgggctttacccccttccccggaggagcactgtgggccccgtttcacctcccaggtt

SEQ ID NO: 98349 - DNA, 846 bp, Homo Sapiens
  misc_feature (92)..(195): n is a, c, g, or t
  misc_feature (804)..(804): n is a, c, g, or t
gagaaactcctccaaaagcagctctcactatcagaaaacccaactacagttgtgaacgccttcattttctgcctgaggtctcagtccgtcgnnnnnnnnnnnnnnnnnnnnnnnnnnnnnnnnnnnnnnnnnnnnnnnnnnnnnnnnnnnnnnnnnnnnnnnnnnnnnnnnnnnnnnnnnnnnnnnnnnnnnnnngtcactgtgcatggcatcatcctggccccctctagagctccaatcctccaaccagagccagctcttccctcaaaatgctacggcctgtgacaatgctccagaagcctgggacctgctgcacagagtgctgccgacatttatcatctccatctgtttcttcggcctcctagggaacctttttgtcctgttggtcttcctcctgccccggcggcaactgaacgtggcagaaatctacctggccaacctggcagcctctgatctggtgtttgtcttgggcttgcccttctgggcagagaatatctggaaccagtttaactggcctttcggagccctcctctgccgtgtcatcaacggggtcatcaaggccaatttgttcatcagcatcttcctggtggtggccatcagccaggaccgctaccgcgtgctggtgcaccctatggccagccggaggcagcagcggcggaggcaggcccgggtcacctgcgtgctcatctgggttgtggggggcctcttgagcatcccacattcctgctgcgatccatccaagccgtcccagatctgaacatcaccgcctgcatcctgctcctccccatgaggcctggcactttngcaggattgtggagttaatattctgggtttcctcctacactg

SEQ ID NO: 98350 - DNA, 863 bp, Homo Sapiens
cgccggggctgaggccgatcgcgtcgggcagcgggcgcggcggccccgcgcagccatggactggctcatggggaagtccaaagccaagcccaatggcaagaagcccgctgcggaggagaggaaggcctacctggagcctgagcacaccaaggccaggatcaccgacttccagttcaaggagctggtggtgctgccccgcgagattgaccttaacgagtggctggccagcaacaccacgacgtttttccaccacatcaacctgcagtatagcaccatctcggagttctgcacaggagagacgtgtcagacgatggccgtgtgcaacacacagtactactggtatgacgagcgggggaagaaggtcaagtgcacggccccacagtacgttgacttcgtcatgagctccgtgcagaagctggtgacggatgaggacgtgttccccacaaaatacggcagagaattccccagctcctttgagtccctggtgaggaagatctgcagacacctgttccacgtgctggcacacatctactgggcccacttcaaggagacgctggccctggagctgcacggacacttgaacacgctctacgtccacttcatcctctttgctcgggagttcaacctgctggaccccaaagagaccgccatcatggacgacctcaccgaggtgctatgcagcggggccggcggggtccacagtgggggcagtggggatggggccggcagcgggggcccgggagcacagaacacgtgaaggagagatgagccccccgggccggacaggggcacacgtgtgcaaagagacggtggtgtgtgttctctcctgcatctgcgtgtgcacacatgtgctgggcacgcgt

SEQ ID NO: 98351 - DNA, 981 bp, Homo Sapiens
tctatatctaattcagggtttaccaggagcttaataattaatggctacatagcaaggcatcgtcttggaaccggagaattttctctagactattaggctagacagtctcatgattatactaaccaaacctggagtaaagtggttgaaaaaaaagaaagtataaaggggcttattaaagtggttaataaatatgatttaggttggtttttgatatgtttttcttccaactgttatataagaaactactaatgtaaaatagtaggctatatgttgggatgtgtatagctatgtcttcaagactaatactcagagaatcaaattgtagattgtacctatctgtgagcctatttctttagccagttttctgtctactgccaagaaacagaattctctgcctcatgcaaatgccctttcgtgtttacttttcgctctagatttttaaaaatgtgattgtgcccttgactgtaccaaagtgctgttgctataacagtgaacatttgtgaacagaggatgtttgtagtttcaaatgcagtacccatatgaccttgatcatattttagctatttaaaaattaagttggaggattttggcagaagtagtcacatgcatgattgctctgatagattggttggcgtgtgctgcagggggcttgtccttttaactctcccacaggatggatgtaggcagtgtcacattcattatgctgagagtgaaggttcatcactcctgtatcatggtagcaaatctcaacaggatagcttctaggatgttaagtgagcagttctccagcagaaatgatgtagaaggaaaaaattgaataattaaatttccttgtcttcacagtttgtattctacagagtacagtaatgtattacattccatttgcacccttccttagggaagaactttgtggttatctaccttctgagtggaatgttacagaaaatattttaaaatattggaataaacctatgattttat

SEQ ID NO: 98352 - DNA, 767 bp, Homo Sapiens
gagaaaatagggctgttgtgagctgtggggagcccaggagagctgctgccccccgacctccgtgcgttctgggcagtccttgaccccccacaactcctgccatctccaggagccccgcctggatgtcaagcggatgccaagcggatgccacagttccccccccagcggactccgtggggacatggcttcgctggtgcccctttccccatatctaagccccacggtcctcctgctggtcagctgtgacctgggcttcgtgcgagcagaccggcctccctctcctgtgaatgtgacggtcactcacctcagagccaactcggccactgtgtcctgggacgtcccagaaggcaacatcgtcattggctactccatttcccagcaacggcagaatggccccgggcagcgtgtgattcgggaggtgaacaccaccacccgggcctgtgccctctggggcctggctgaagacagtgactacacagtgcaggtcaggagcatcggccttcggggagagagtcccccagggccccgggtgcacttccgaactctcaagggttctgaccggctaccttcaaacagttcaagcccaggtgacatcacagtggaaggtctggatggagagcggccactgcagactggggaagtggtcatcattgtggtggtgttgctcatgtgggctgctgtaattgggctgttctgccgtcagtatgacatcatcaaggacaatgactccaacaacaatcccaaggagaagggaaaggggccgggac

SEQ ID NO: 98353 - DNA, 856 bp, Homo Sapiens
gctggctctccgggacggtcacatcccgctgcaggcgcgggcggaggccgccgcactgcctcccgcaccggggacccaggccagcgtccgggcaacgccccctgctcccggacagactccgtggcccgctcgagccctggggtgctcctgcagaccctgcgccctgctccgccctgcagctcggcccctgcgctgcccgcgtcgccgggcccgcgccgggatggggtaggggcagcgccaccgagtcgggctgatgggccgccctctgggcaccgagcagccccccgaggcctgaccaaccgcgaggaccggcggaggagccccgcctggatgtcaagcggatgccaagcggatgccacagttccccccccagcggactccgtggggacatggcttcgctggtgcccctttccccatatctaagccccacggtcctcctgctggtcagctgtgacctgggcttcgtgcgagcagaccggcctccctctcctgtgaatgtgacggtcactcacctcagagccaactcggccactgtgtcctgggacgtcccagaaggcaacatcgtcattggctactccatttcccagcaacggcagaatggccccgggcagcgtgtgattcgggagggtgaacaccaacaaccgggcctgtgccctctggggcctggctgaaagacagtgactacacagttgcagggtcaggagcatcggccttcggggagcagagtcccccagggcccccgggtgcactttccgaaactctcaagggttctgaccgagctaccttcaaacagttcaagccccaggtgacatcacagtggaaggtctggatggaaagcggccactgcagactgggg

SEQ ID NO: 98354 - DNA, 827 bp, Homo Sapiens
  misc_feature (61)..(62): n is a, c, g, or t
  misc_feature (162)..(162): n is a, c, g, or t
ctctccggaatagcagaaaccgcctgtgtgcactgtctctgatggaaaacatctcatttcnntgactgggttgcagttgtgacacgatgagaacaaagttgttgcccagagtagagaatgacttcagagtcctgacttcaactgttctattgtggtggtttntgaaaacagttttcaagtagaactccagcagggtgtggacaaggtaacagctctcagcatccgagacgttctgcagaacctcctgctgcagcagccgggcactcgtgatgttatcctgagcttgcatagtgtctttcacagcccagaaggcttcccacagtttctggggaacaacccccttcacttggcagggcccaaagtggaattcttggccctgggcccctgatacctggctccagagaagcagggtaaaacccaggcaagggagcacaaccatctgcatttgagaggctgtcgccagcaaaggagggcagaagggtctgctggctaaagtccacaggctttgcagcctctgttgaaaattcatctctcagtctcgtgttcctcctggccttcctcccaagcagcctcaattcttcttggtgttaaattggcgaaagcagctcctcatcacagtcatgtcttgtccctctggtcctgtaagtgatgcttgagggctggctgcctggaggcagctggttctttttacagaaaagttagacaggcaccttcaccattcaccaatcagaggcatagctgtgggtggaaggttcccgtcccagccgtggaagtcatcgacgcgtggtcgacgatatcccggaacccggcgcggaccagcgcttggc

SEQ ID NO: 98355 - DNA, 569 bp, Homo Sapiens
acccagtgtatgcggccgcgggacgcgctggggccgggcagccgggaagcggggcgctgacggctggtaggggagctgccccccagagcagcatggatgccccgcgaagggacatggagttgctcagcaacagcctggctgcctacgcgcacatccgcgccaaccccgagagcttcggcctctacttcgtgctgggcgtctgcttcggcctgctgctcaccctctgcctgctcgtcatcagcatctcgtgggcgccccgcccgcggccccggggcccggctcagcgccgggacccccgcagcagcaccctggagcccgaggacgacgacgaggacgaggaggacacggtgactcggctgggccccgacgacacgctgccgggccccgagctgtccgcagagccggacgggcccctcaacgtcaacgtcttcacgtcggcggaggagctggagcgggcgcagcggctggaggagcgcgaacggatcctgcgggagatctggcgcaccgggcagccggacctgctgggcacaggcacgctggggcccagccccacgggcacgggcaccctg

SEQ ID NO: 98356 - DNA, 930 bp, Homo Sapiens
tgctccccttatgtgcctcgttccgtccggctcagcgccttcttgtgctgtgcatgtaggtagtattgcccttccagtgaggtccaggctctggtaccgggttcacccctttcgttggctgcgctgctagtcgcgcttggggtcaccatggatcccgagtatctcggcttgttcgttcgaatcgtggtactgccgcgcgttcgctgggcggtcagctacggcgctgggccagcgtgcctcccgttgggccctgtcgtaagcacgtgctcgcagcgccggagtccctaggcagtctcgtcgtggcttgatcgcggctagaagcctactccggagcgtcgcctgggctgcctctgggtgtccacgctcgctggatagcctgatagcggggactacgtcggctctcacattgccggaacggctggctagtctagcggcaccgtccgccgtctcgccgctgggcctcagcagcgttccgcgcggaaggacgaggatccctgtacggtgacggcttgaagctggtcccacgcgcagccatggcatggagtcatgcgtgtagctggcgtcatgtcggggggccaagtgggtcccgggatcccgggatgtggggggaccgccgagaggcccagcgcagccgacgtctccctgcagctgcgctccaggccaggcaccgccaggggcccccagccagggccagcagcaccagcgcggggaggaggcacagggcgaccagcgcaggctccaagccagcggcgctcgacgcctgcccaccggggcctcacgaggggacacagggccccgcggcaccatggcagacttgctgtggggctcagggctgcatggggcagcaaggcgcgggggcccggcacgcagagcctccggggaggatccggaggggaggcagtggctcggcggctcgggtacagcccggtg

SEQ ID NO: 98357 - DNA, 852 bp, Homo Sapiens
gagagggtggcctctgtgccccaggttgtcagtggaggggaaggggtgtcactgcccctctgtgggactgtcatgccagtgtgcccacctgcctggtctacatcctaaagagatgtaccgtcccccctccatgcgggcaccaccactcccaggagccaagctggaggaccgcgacctgggctgggagcagagctgactgacacgggtggaggtgaccctgagccaagttctctggcacttgctggacatgtcccctaccctcttcccaagaggagccatcccacatttgggtagttagtacccaggactggttggactgatcgggttagggaccctagagggttaagggaacaacagagatggggctgcaatgccctgtctggaactccgctctcccgctggggtggttctgattgtggctcatgcctggttgcaaattggtttttaacccacaaattgtgattattttttaaaaagccaaacagattttggcaggagttagaataaatcccggggcctgggcttctctattctttggccctccgtagtctccctccgagaggaggccagagggagaggaggatctcagcaggcctctagccgcttccagatgcagtctggggagtgggctgaaggtgaagggaggcaaggctgtgggccactctcccttctgagaggcagctgcagctcaggccctaatacactcttttgccctgtggcctctccctttttccccccttcttggttggacggagggagaagtggggaagttggttggggaacttgggttggtccacattagacttccccattggtcccttggccccgccttcagggcagaggcccctgccc

SEQ ID NO: 98358 - DNA, 355 bp, Homo Sapiens
cctccgcctccatctgcaccgtgtatgtgtaggggaccccattggcgtcgatgaggaggtggcggcccagccgcgggggtcggggccccgccgccgaggaaggagtggaggaggggccttccgccttggggaaagggggagccttggggggcggtgggtccatggcctccggagaggaggaccgagggtggggtggccgcggcggcagcagcagcatctggagtggcagctgggagcggcggaggggagattagttaaaattgccacttccttttaggaaaagtttcctaaaatggaaagcatccccactatcactgcttgttaccctttgtgcgccactgactacctccatagc

SEQ ID NO: 98359 - DNA, 1260 bp, Homo Sapiens
  misc_feature (477)..(477): n is a, c, g, or t
  misc_feature (1219)..(1219): n is a, c, g, or t
ggtattctctctgtctctcattcagcacagcctcctgcccaccagccccctatgatctcaaccaaatatccggagctcttccctgcccaccagtcccccatgtttccagacacccgggtcgctggcacccagaccaccactcatttgcctggaatcccacctaaccatgcccctctggtcaccaccctcggtgcccagctaccccctcaagccccagatgcccttgtcctcagaacccaggccacccagcttcccattatcccaactgcccagccctctctgaccaccacctccaggtcccctgtgtctcctgcccatcaaatctctgtgcctgctgccacccagcccgcagccctccccaccctcctgccctctcagagccccactaaccagacctcacccatcagccctacacatccccattccaaagccccccaaatcccaagggaagatggccccagtcccaagttggccctngtggctgccctcaccagctcccacagcagccccaacagccctgggggaggctggtcttgccgagcacagccagagggatgaccggtggctgctggtggcactcctggtgccaacgtgtgtctttttggtggtcctgcttgcactgggcatcgtgtactgcacccgctgtggcccccatgcacccaacaagcgcatcactgactgctaccgctgggtcatccatgctgggagcaagagcccaacagaacccatgccccccaggggcagcctcacaggggtgcagacctgcagaaccagcgtgtgatggggtgcagacccccctcatggagtatggggcgctggacacatggccggggctgcaccagggtcccctaccactcctcagtgctctccgtcacccggcctgtggtggtctctgccacgcatcccacactgccttctgcccaccagcctcctgtgatccctgccacacacccagctttgtcccgtgaccaccagatccccgtgatcgcagccaactatccagatctgccttctgcctaccaacccggtattctctctgtctctcattcagcacagcctcctgcccaccagccccctatgatctcaaccaaatatccggagctcttccctgcccaccagtcccccatgtttccagacacccgggtcgctggcacccagacaccactcatttgcctggaatccacctaaccatgccctctggtcacaccctcggtgccanctacccctcaagcccagatgccttgtcctcagacccaggca

SEQ ID NO: 98360 - DNA, 459 bp, Homo Sapiens
agtgactctggcaaggctgcttctctatcactggctttgcacagaagtatgctctacttgcgttgctttagggcaggattctattttgagggaaaagacagtatccttattaccttttgtttgtttaatagcacaaatgcttatttgttatccaaaaacaacctccttcttatctgtgataaatctatagaaagaatttagctgcaagtggacaaaggaacaagcccccagaaaagaaagggaagaactgccttcttatactacagaacatgcattagtgtgggctatatagctgtggctcatgctacccaattccagatttctttgtcctctaagagttgattgctgtatattaaaattgaacatcagaggatgggaagagggctctgtaagccagaaccttactaaagtagagggcacaatcagtgtgaataaattcacttcagaatctcaagtcaa

SEQ ID NO: 98361 - DNA, 1090 bp, Homo Sapiens
  misc_feature (745)..(745): n is a, c, g, or t
  misc_feature (753)..(753): n is a, c, g, or t
  misc_feature (763)..(763): n is a, c, g, or t
agctgtctggcttgtggtctgcgcaatctgcggcccggtctcgaggggaaaataggtctgtggtccgcaaggccccagtggagcccttgggttcccgcagaaccgactgggtctccagtagtctctgaggagccgctcgaccttctcccgaccctggatctgaggcctgctcttccaggggctgagcgtgttgttatccctggcaggagacgtgctggtcagcatgtacagggaggtctgttccatccgcttcctgttcacggctgtgtcgctgctgagcctctttctgtcagcattctggctggggcttctgtacctggtctctcctttggagaatgaacctaaggagatgctgactctaagtgagtaccacgagcgcgtgcgctcccaggggcagcagctgcagcagctccaggccgagctggataaactccacaaggaggtgtccactgttcgggcagccaacagcgagagagtggccaagctcgtgttccagaggctgaatgaggattttgtgcggaagcccgactatgctttgagctctgtgggagcctccatcgacctgcagaagacatcccacgattacgcagacaggaacactgcctacttctggaatcgcttcagcttctggaactacgcacggccgcccacggttatcctggagccccacgtgttccctgggaattgctgggcttttgaaggcgaccaaggccaggtggtgatccaactgccgggaaaagtgcanctaaaaancatcactctncagcatccaccgcccagcgtggagcacaccgaaggagccaacagcgccccccgcgatttcacggtctttggcctccaggtttatgatgaaactgaagtttccttggggaaattcaccttcgatgttgagaaatcggagattcagactttccacctgcagaatgaccccccagctgcctttcccaaggtgaagatccagattctaagcaactggggccacccccgtttcacgtgcttgtatcgagtccgtgcccacggtgtgcgaacctcagagggggcagagggcagtgcacaggggccccattaaacatgctgatttttggagtag

SEQ ID NO: 98362 - DNA, 824 bp, Homo Sapiens
  misc_feature (708)..(716): n is a, c, g, or t
  misc_feature (724)..(724): n is a, c, g, or t
gtcgccggctgctggagcagagcttgggagaaactaagaccttccctccccgccgcaggacattaagagcggccgctccccgctcatccacgccgtggaaaacaacagccttagcatggtgcagctgctgctgcagcacggcgccaacgtgaacgcgcaaatgtactccggcagctccgccctgcactcagcgtccggccgcgggctcctcccgctggtgcgcacgctggtccgcagcggcgctgacagcagcctcaagaactgccacaacgacacgccgctcatggtggcgcgcagccgcagggtcatcgacatcctgagggggaaggccacccggcctgcttccacctcccagccagacccctcccctgaccggagcgccaacacctcccccgagagcagcagccgcctcagctccaatggtcttctctccgcatcaccatcctcctaaccctcccagtctccccccagggacccccctggattccccatggctcctcccaatttctgccttccttccccatctccacccgcctttcctgccctttgctggggtcactccgaggccctggccggccaggtgcccccctccccagctccaggaggcaactaaggggaatggggggccagatcttggactcatgaggaggggcccccctgccctgtggggtcaacccttctggaaactgtgaagatctcactctgcgnnnnnnnnnaatcttcngggaccaggatttgcacagaagcacatgcaccctacccatacaccccctcttctgagcacagatgttccccatctcgctgcctcccaggactctgacccc

SEQ ID NO: 98363 - DNA, 1029 bp, Homo Sapiens
ggttgctgcaggttcggggtcggccggcctgcgcgtgggcttgcgaggacgctgttcgtccctgcgctggggtgtccgacagcgaggaggagaacgacgcacggagcccgcgcgactggaaccagcaaagctccatctgtcggcagaggagaagggggaggaggcacggccgaggcaaacgagcggacgcctcgtcgccgggtgccggtatcaccccgctgcaacgccttccagcaaaagccaccgcggcccgggttgcagcagccggacggatgccaaggccacacggcagccacgggggcagccgtcgcagtcgccgtcccacacgggctgcggacaccaagggttgctaatgaagtgattgagaagaaacagtgaacatcctcatttcacagataagacaacatggatcagccttttactgtgaattctctgaaaaagttagctgctatgcctgaccatacagatgtttccctaagcccagaagagcgagtccgtgccctaagcaagcttggttgtaatatcaccatcagtgaagacatcactccacgacgttactttaggtctggagtagagatggagaggatggcgtctgtgtatttggaagaaggaaatttggaaaatgcctttgttctttataataaatttataaccttatttgtagaaaagcttcctaaccatcgagattaccagcaatgtgcagtacctgaaaagcaggatattatgaagaaactgaaggagattgcattcccaaggacagatgaattgaaaaacgaccttttaaagaaatataacgtagaataccaagaatatttgcaaagcaaaaacaaatataaagctgaaattctcaaaaaattggagcatcagagattgatagaggcagaaaggaagcgggattgctcagatgcgccagcagcagctagaaatcggagcagttactgtttttcgaagatcaactcaagaagcaagagttagcccgaggtcaatgcgaagtcagcaaacctcagggttgtcagagcagattgatgg

SEQ ID NO: 98364 - DNA, 825 bp, Homo Sapiens
cctctgcctagcactgctcccccaaggctcccagaaatctcaggtcagaggcacggacaggctctggagctctcgtctggtgggaccatgaactgccagcagctgtggctgggcttcctactccccatgacagtctcaggccgggtcctggggcttgcagaggtggcgcccgtggactacctgtcacaatatgggtacctacagaagcctctagaaggatctaataacttcaagccagaagatatcaccgaggctctgagagcttttcaggaagcatctgaacttccagtctcaggtcagctggatgatgccacaagggcccgcatgaggcagcctcgttgtggcctagaggatcccttcaaccagaagacccttaaatacctgttgctgggccgctggagaaagaagcacctgactttccgcatcttgaacctgccctccacccttccaccccacacagcccgggcagccctgcgtcaagccttccaggactggagcaatgtggctcccttgaccttccaagaggtgcaggctggtgcggctgacatccgcctctccttccatggccgccaaagctcgtactgttccaatacttttgatgggcctgggagagtcctggcccatgccgacatcccagagctgggcagtgtgcacttcgacgaagacgagttctggactgaggggacctaccgtggggtgaacctgcgcatcattgcagccaatgaagtgggccatgctctgggggcttgggcactcccgatattcccaggccctcatgggcccaagtctacgaagggctaacggccccactttaagctgcacccg

SEQ ID NO: 98365 - DNA, 702 bp, Homo Sapiens
ctggagagtaaaaagaactgggggtaagagcccctctgcctagcactgctcccccaaggctcccagaaatctcaggtcagaggcacggacagcctctggagctctcgtctggtgggaccatgaactgccagcagctgtggctgggcttcctactccccatgacagtctcaggccgggtcctggggcttgcagaggtggcgcccgtggactacctgtcacaatatgggtacctacagaagcctctagaaggatctaataacttcaagccagaagatatcaccgaggctctgagggagagtcctggcccatgccgacatcccagagctgggcagtgtgcacttcgacgaagacgagttctggactgaggggacctaccgtggggtgaacctgcgcatcattgcagcccatgaagtgggccatgctctggggcttgtggcactcccgatattcccaggccctcatggccccagtctacgagggctaccggccccactttaagctgcacccagatgatgtggcagggatccaggctctctatggcaagaagagtccagtgataagggatgaggaagaagaagagacagagctgcccactgtgcccccagtgcccacagaacccagtcccatgccagacccttgcagtagtgaactggatgccatgatgctggggccccgtgggaagacctatgctttcaaggtggg

SEQ ID NO: 98366 - DNA, 1431 bp, Homo Sapiens
  misc_feature (1340)..(1340): n is a, c, g, or t
actgattaccaattggggggggttggaagagggtgttgcccccctcccccggtggttttgcagggggtcaacaccgtttaaggggagaggggccggcgggtttccccaggggaaggggagtgccggggccaggtgtcccaaaccccatgtggggcccttggtacccaggtccgggttccaattttccgagccaaggtccaaaaagtttcccactcccgcgccccgctgcgccgggaccgagcttcgggtgatgcactcatcagcccgggagctgcctgcatagttctctccccagctgtactgggttaggattgtcctgctcagctcctttcaggaacgctccgatggctcccaggtagccttcgtgcctcagaaacagcgcctgcacttcccccttggagaagaagttgatgctataggtgatggtgcgcatggtcacggggtggccccggataaagaagcctccaaagtacacgcggtccaggctgtgcagccgtgcgtggaggcaggccagctgcccaatgtcgttgctgatcatgtgcagcaggctcttcgccatgtcttctttggagaactcttggtcggcggtggccgacttcccgaagctgctggcgatgaggttcccgctcagcccgagagtctggtgggcgccgccgtagacgtcccgcaccagcatgtccacattgctgtgctggccccctcgaggccaggtgcaggagctcgtcaaacttcttcgttttggtgagcagagcgccaagcccccagaaggtgccgcctccaatggagctgccgccgacccactcgaacctgtcctccgtctccaccttcacgatggagactccagagccgatattgacaagaagataggggaaaatgtgggggtggttggtctggaaccggaactcagggtcggaatccttctggtacacgaaggcctcatgggggatgttcttgagcacgaagttgcaccccttaatcaggcacgtcatcacgtcctccttgtcgactttcagccgcagcttctcttcgatgaggtccttgaacttgtaggccccgcccccggtcgcctggatgaccttggtctctgtgttgacgagatggtctttgatgaagtccaggcaggcttcgatgtaggtattctcaaacttaatgaagtgcagtcgagcagtgatctcttcttgaactgaaatctcatagggcggctcatgttcacgttctgtgtccttgtccggagtggtcgaaagaccgcaccttggcgactttgtgctgtaccgttgaatagtaggccagcttggttaacgacccgcctatgtcgatggcgaagcgcttggcgttctccnaggttgcggaagatctcgtcgggggggcagcgtgatgctcttgtccagactgtccccgctgctcccgctgccgctcgctccacactccgcc

SEQ ID NO: 98367 - DNA, 1148 bp, Homo Sapiens
atgctcagcgtgtggagactgacactgggtcgttgacgctgcctcgcctttagttatactcggctgctcccatatctgactacctatacgcacggtgagcgtgatggttgtcctcagtagggccccgccgcgcatgaacctactgacgtatcctctcctaggggtgtttgtcttcgcgatggatgtgcccgtcagcagcattcccctgcatatttgagccgttgtccaagccatcgaagcgtgttcctcaactggcggatgcattcagttctggccccacgcttgttgaatccgcctccgcgttgcccggcgccggagccggtaggtgtctttcccgttgcacaggtggtagatgaaggaccccagggcctccttgtcactgacatgctccgtgaccaccatctcctcctggatgatgtacgtctgcggcaggtaggtccccctcttcacgttcatgaggagctcccagaagttgcgagggggcagcacaatggtggtgttgagttcgatgacatagcacttgtccagggagatatcatggtacgcagtcagaccccgctggaagtcatggatgatgtctgcagggtcaccgccgccaaactggggcacaggcacgttgatgcgctcgtagttctcgtcgaggtagattttcacatcctcttccagctccatctgagtccggacctgggaggacagggagtcctcatacagcacaccacagcggaagaagttatctcgggccagctgcgcaaggaagaagtatctgtagatgtagacagaggcgaacacgaggcccatgagcagcacgaccatgcccatcgacaggtagcacacgccgcccactgagccccccctcttggatcgatgttgtgggggctgctcctccctagccggcgtcagcaggatctcggtggccgaggccggcgcaggggccgacgccgacgccttgtcagccttgtcgcccttgatgccagccacggcgggctggaagctaatcttcaccatggctgcgccggcccgcgcgtccgccccgcagcctctgccggtgcagcctcggtctctgcctccgcatcccgaaaattccggccccccactcttcttacggagggatttgtgttgtgctggtatttatattatgtttttatttg

SEQ ID NO: 98368 - DNA, 1017 bp, Homo Sapiens
  misc_feature (714)..(753): n is a, c, g, or t
ggaaggggcggagctgctttgcggacggcgcggagcagtcagccgactacagagaagggtaatcgggtgtccccggcgccgcccggggccctgagggctggctagggtccaggccgggggggacgggacagacgaaccagccccgtgtaggaagcgcgacaatgccccgctacggagcgtcactccgccagagctgccccaggtccggccgggagcagggacaagacgggaccgccggagcccccggactcctttggatgggcctggtgctggcgctggcgctggcgctggcgctggctctgtctgactctcgggttctctgggctccggcagaggctcaccctctttctccccaaggccatcctgccaggttacatcgcatagtgccccggctccgagatgtctttgggtgggggaacctcacctgcccaatctgcaaaggtctattcaccgccatcaacctcgggctgaagaaggaacccaatgtggctcgcgtgggctccgtggccatcaagctgtgcaatctgctgaagatagcaccacctgccgtgtgccaatccattgtccacctctttgaggatgacatggtggaggtgtggagacgctcagtgctgagcccatctgaggcctgtggcctgctcctgggctccacctgtgggcactgggacattttctcatcttggaacatctctttgcctactgtgccgaaagccnnnnnnnnnnnnnnnnnnnnnnnnnnnnnnnnnnnnnnnntgtcagccgcatcctcttcctcactgacctgcactgggatcatgactacctgggagggcacgggacccttgactgtggcagaccccactgttgctgccgccgggggtttctgggccctggccggcccggcattcccgggcccagggggcccggaattactggggggccgaaataaccaggcaagggtggggaaaccttggcccccttgggaggggacccttggggaagaaaccccttgtttttgaggggggggcctttggggga

SEQ ID NO: 98369 - DNA, 1468 bp, Homo Sapiens
aaagagcgaggcctgggtggcgaattcggcacgaggcaccagccaaagttcaggtactgcccctgtctgagtttggacatgtggcccacagatgccagctgggggctggaatactgtaccttgatcttagggcctggaaaaatcagaccgagggacacacaggcactgctgtctgcaacacaagcaatggacctgcggaggcgagactaccacatggaacggccgctgctgaaccaggagcatttggaggagctggggcgctggggctcagcacctaggacccaccagtggcggacctggttgcagtgctcccgtgctcgggcctatgcccttctgctccaacacctcccggttttggtctggttaccccggtatcctgtgcgtgactggctcctgggtgacctgttatccggcctgagtgtggccatcatgcagcttccgcaggatctgctctccaggcctgcactgctaccattctacccctaggcttggcctacgccctcctggctggattgccccccgtgtttggcctctatagctccttctaccctgtcttcatctacttcctgtttggcacttcccggcacatctccgtggggacctttgctgtcatgtctgtgatggtgggcagtgtgacagaatccctggccccgcaggccttgaacgactccatgatcaatgagacagccagagatgctgcccgggtacaggtggcctccacactcagtgtcctggttggcctcttccaggtggggctgggcctgatccacttcggcttcatggtcacctacctgtcagaacctcttgtccgaggctataccacagctgcagctgtgcaggtcttcgtctcacagctcaagtatgtgtttggcctccatctgagcagccactctgggccactgtccctcatctatacagtgctggaggtctgctggaagctgccccagagcaaggttggcaccgtggtcactgcagctgtggctggggtggtgctcgtggtggtgaagctgttgaatgacaagctgcagcagcagctgcccatgccgatacccggggagctgctcacgctcatcggggccacaggcatctcctatggcatgggtctaaagcacagatttgaggtagatgtcgtgggcaacatccctgcagggctggtgcccccagtggcccccaacacccagctgttctcaaagctcgtgggcagcgccttcaccatcgctgtggttgggtttgccattgccatctcactggggaagatcttcgccctgaggcacggctaccgggtggacagcaaccaggaagctggtggccctgggcctcagtaaccttatcggaggcatcttccagtgcttccccgtgagttgctctatgtctcggagcctggtacaggaaaagcaccggggggcaaactccgcaggttggctggaagccattctcttccccttttttcatcccttcctccatcata

SEQ ID NO: 98370 - DNA, 846 bp, Homo Sapiens
  misc_feature (58)..(58): n is a, c, g, or t
  misc_feature (143)..(143): n is a, c, g, or t
  misc_feature (486)..(530): n is a, c, g, or t
gatgatcacactcagctcgatggccagcaggaagaagcggtgatctcccacaggatcntatcagcaacagttgcagcgttcgaggtgctcaccgtcatggataccacgccccgggcaatgcccaccagcgccaccacaaacancaggatgtagaaggtgataaaaatggggctggaggtgatgcggatcttcgcccgagcagatggaagcttccagagcaggaagatgaggaagagcacattggggatgagcagcaagaggtcccagtaccggaccctggaggtgccaatgtcttcgtagagcagcagcaggcagcgatgaggcacactgatgtttggtgccaggggtgggggtagcgctgtgctcccattggcccaagtcacctcctccagggtgtccatcccgccagcagccagccctgtagtctcagctactcggtggggccgaggtggaaggatcacttgagcccaggagctccaggcagcnnnnnnnnnnnnnnnnnnnnnnnnnnnnnnnnnnnnnnnnnnnnncacagagtgagaccctgtctgacagcccgggccgcgctcaggaccggccgccccggccgcccatccgccgccactgggtgtgcgcggatccagcacaggccgcgggactccggcctccagcgccagaccaggcggcctgggccgggaagcgtcgcgcaaggaccgggcgcgaccggctccgtggaatgagggctaggcaggaaaggcgaggcggggtcagctcgccgggccgcgggtctcgcggacaccctgcagcccttcccgacagcggcgaccgggaaagcaagaccgtctttttcgtccagcccaaattgcg

SEQ ID NO: 98371 - DNA, 1283 bp, Homo Sapiens
cggtttcagttccacctggaattttacactccagctcccagctaaccagttttacatggccggttagactcctttcccatccccgcctggtcccagaccgccggccagttgctcacaagcagggagatgcgctccttcacgcgggttcttgggaaggatgaccaccagagagtagacctacagagacaggcagggctgagaaggtgctgggggcgccagcccagacccacagccagaaacccaggaatccaatccctacctggccctaaggccccagccaccccagctgccccagcctgaacctcaccaggaagaagaagcaggagctgaccagccagaactggcggcccccatggccatagatattaaagtcctcagctgagagatgggcatcagggtacaggatctccagggtcccctgggtgacagagtaggccagggacagcactgtggtgatggccagcacccgcttgatgctggacttactctccaggtggccaaagggccaggccccaggatgatcacactcagctcgatggccagcaggaagaagcgggtgatctcccacaggatcttatcagcaacagttgcagcgttcgaggtgctcaccgtcatggataccacggcccgggcaatgcccaccagcgccaccacaaacaccaggatgtagaaggtgataaaaatggggctggaggtgatgcggatcttcgcccgagcagatggaagcttccagagcaggaagatgaggaagagcacattggggatgagcagcaagaggtcccagtaccggaccctggaggtgccaatgtcttcgtagagcagcagcaggcagcgatgaggcacactgatgtttggtgccaggggtgggggtagcgctgtgctcccattggcccaagtcacctcctccagggtgtccatcccgccagcagccagccctgacagcccgggccgcgctcaggaccggccgccccggccgccccggccgcccatccgccgccactgggtgtgcgcggatccagcacaggccgcgggactccggcctccagcgccagaccaggcggcctgggccgggaagcgtcgcgcaaggaccgggcgcgaccggctccgtggaatgagggctaggcaggaaaggcgaggcggggtcagctcgccgggccgcgggtctcgcggacaccctgcagcccttcccgacagcggcgaccgggaaagcaagaccgtctttttcgtccagcccaaattgcgaaaacggccacagtcccacaagtcccagagtcccagagtcc

SEQ ID NO: 98372 - DNA, 1262 bp, Homo Sapiens
ccagcctctcgccagctgggagtcgcgcgctgcccacctcgctgcccaggcccccgacgccgcggcaggagccccccaagagcgcgggaagccccgtggacctggcgctcccggctcgggcgtggacggggcgggcgccggggcggggcgcgcgtcctcgcgggtctgaatggaagggtcgaggtcgtcgtcggcggcgagcagatcctgaagccagaactccaccccggcgcccgcgccatgcggcgggagaggtgcggcgccccccacccgcgtcgccgccatggaggtgctgcggcgctcctcggtcttcgccgccgagatcatggacgcctttgaccgctcgcccacagacaaggagctggtggcccaggccaaggcgctgggccgggagtacgtgcacgcgcggctgctgcgcgccggcctctcctggagcgcgcccgagcgtgccgcgccggtcccgggacgcctggctgaggtgtgcgcggtgctgctgcgcctgggcgatgagctggagatgatccggcccagcgtctaccgcaacgtggcgcgtcagctgcacatctccctgcagtctgagcctgtggtgaccgatgcgttcctggccgtggctggccacatcttctctgcaggcatcacgtggggcaaggtggtgtccctgtatgcggtggccgcggggctggccgtggactgtgtgaggcaggcccagcctgccatggtccacgccctcgtggactgcctgggggagttcgtgcgcaagaccctggcaacctggctgcggagacgcggcggatggactgatgtcctcaagtgtgtggtcagcacagaccctggcctccgctcccactggctggtggctgcactctgcagcttcggccgcttcctgaaggctgccttcttcgtgctgctgccagagagatgagctgcccacctggcagtggccgcagcctggccctctgggcccaacgcaggaggccctcagcaccccgaacacatcttcctcctccccacccgagcctggagcactctaaccctcggagacccccctaagccccggttcctccgcagacccaggccctcccggaaggggtgaactgggggaaggccctttcccagcaacctggtagctacgggttttgggggcttgccgcgcaacaagccccctgccatggacccctccccctccacgaatgggggggcaatccccccctttcgtatggacggggcagggagcgggcgttggtggacccctgccgggggcc

SEQ ID NO: 98373 - DNA, 742 bp, Homo Sapiens
  misc_feature (420)..(420): n is a, c, g, or t
  misc_feature (726)..(726): n is a, c, g, or t
agccgccgggacggaggggctgggcctggggaccccccggcctccgcctgcacgcccccccacgcccggacgtgccctctccgcgcgggggactcgcctaggtctcctacgtctgcccctgcccggctcccggcggccccagctgtcaccggcccccccaggatgcaatggcgcagcccccccggctgagccgctctggtgcctcctcactttgggacccagcttctcctgctcccacctctggccccaggcctcggctttgggagggtcaagatgtgctggccagatggactgatgggctgctatacttgggtaccatcaaaaaggtggacagtgctagggaggtgtgtctggtccagtttgaggatgattcgcagtttctggttctatggaaagacattagccctgctgccctccctnggagaggaactcctctgttgtgtctgtcgctctgagactgtggtccctgggaaccggctggtcagctgtgagaagtgtcgccatgcttatcaccaggactgccatgttcccagggctccaccccctgggagagggagagggcacatcctgggtatgccgccagtgtgtctttgcgatcgccaccaagaggggaggtgccctgaagaagggccctatgcccgggccatgctgggtatgaagctttctctgccatatggactgaaggggctggacttggatgctggacatctgagcaccgacagcagnttactgttactgtggt

SEQ ID NO: 98374 - DNA, 1350 bp, Homo Sapiens
  misc_feature (1311)..(1311): n is a, c, g, or t
atcgaaccagccgcccatgatgacctgcgagagactcccatgccccactgcaggcctgggccccctcagggaggaagcgatgaagccagggcagcctccagtcccttgcagcaggtccccgccccgccactgcctgcgaagaagaaccttcccactgcccctcccagacgccgcgtttccgagagggtgtccttagaagaccaaagtccggggatggcggcagagggggaccagctcagcctgcctccccaagggacctcagacggccctgaggacacgccccgggagagcacggagcaaggccaggacacagaggtgaaagccagcgatcctcacagcatgccagagctgcccaggacagccaaacaacccccagtcccgccccccaggaaaaaacggatctctcgacaactggcctcgaccctcccagctcccttagagaacgctgagctctgcacacaggcgatggccttggagacaacccacgccgggtccacccagagagggccaaagccctgcttctcaggctgggactcagcaccctcctgcccaggccactgcccattcccagagctctccagagttcaagggctccctggcctccctctcagacagcttgggggtgtctgtcatggccaccgaccaggactcctactccaccagcagcacggaggaggagctggagcagttcagcagccccagcgtgaagaagaagccctccatgatcctgggcaaggctcggcaccggctgagctttgccagtttcagcagcatgttccacgctttcctctccaacaaccgcaagctgtacaagaaggtggtggagctggcgcaggacaagggctcgtactttggcagcctggtgcaggactacaaggtgtacagcctggagatgatggcgcgccagacctccagcacggagatgctgcaggagattcgcaccatgatgacccagctcaagagctacctgctgcagagcaccgagctcaaggccctggtggaccccgccctgcactccggaagggaggaagctcgaaagcaattgtagagtctgccttgtacaaatgtgtcctgaagcccctgaaaggaagccatcaactcatgcctgcatcagatccacagcaaggatggttcgctgcagcagctcaaggagaaccagttagtgatcctggccaccaccaccactgacctaggtgtgaccaccagcgtgccggaggtgcccatgatggagaagatcctgcagaagttcaccagcatgcacaaggcctactcacctgagaagaagatctccatcctgctcaagacctgcanactcatctacgactccatggccctcggcaacccagggaa

SEQ ID NO: 98375 - DNA, 570 bp, Homo Sapiens
  misc_feature (542)..(542): n is a, c, g, or t
atagaggtgcagcgtgtgcagcccccgcagcggccgcagagccccggcgggcagccctgagctccccagctggttgtgctgcagcaacaaatagcgcagaccacgcgccccgtgcagccgagccgcctccacctgccggatgcggttgcggcccaggtgcaggatagccagggtccggggcaggccggcgggcactgtggtcagctggttgtgggagagatccaggtattcaaggctatgcagcttgctgaaggtggtggcatccaggccactgtctgtcagctggttgtgctggaggtagagctcacggagttgagtctggcggctcagggctcctcggggcaccttggagatgagattgttctgcaggtggagccgctcgagtgagggcggcaggctgggcggcaggtagctgagctggttgttggagaggctgagggtggcgatggcctcggagccgcggaaggcgtcggggggcaggccagcgttgctcagctggttgttgtggaggtacacggacctgagtgccggcttctccccanaggtgagggggaagatctccatcacttg

SEQ ID NO: 98376 - DNA, 792 bp, Homo Sapiens
  misc_feature (779)..(779): n is a, c, g, or t
gcgcggctggcggcgctgctggcggtgctggcgctcgggacaggagacccagaaagggctgcggctcggggcgacacgttctcggcgctgaccagcgtggcgcgcgccctggcgcccgagcgccggctgctggggctgctgaggcggtacctgcgcggggaggaggcgcggctgcgggacctgactagattctacgacaaggtactttctttgcatgaggattcaacaacccctgtggctaaccctctgcttgcatttactctcatcaaacgcctgcagtctgactggaggaatgtggtacatagtctggaggccagtgagaacatccgagctctgaaggatggctatgagaaggtggagcaagaccttccagcctttgaggaccttgagggagcagcaagggccctgatgcggctgcaggacgtgtacatgctcaatgtgaaaggcctggcccgaggtgtctttcagagagtcactggctctgccatcactgacctgtacagccccaaacggctcttttctctcacaggggatgactgcttccaagttggcaaggtggcctatgacatgggggattattaccatgccattccatggctggaggaggctgtcagtctcttccgaggatcttacggagagtggaagacagagtatgaggcaagtctagaagatgccttggatcacttggcctttgcttatttccgggcaggaaatgtttcgtgtgccctcagcctctctcgggagtttcttctctacagcccagataataagaggatggncaggaatgtcttg

SEQ ID NO: 98377 - DNA, 1111 bp, Homo Sapiens
  misc_feature (905)..(905): n is a, c, g, or t
  misc_feature (1007)..(1007): n is a, c, g, or t
  misc_feature (1025)..(1025): n is a, c, g, or t
attcggcacaggggccggcgggccgcgccgcgagccagtatctcagagagcgcggggtccggacagccgcgcgctgagggtctcggggcgggcgccgcgggacctctccgggccatggcagcccctgtcaaagggaacaggaagcagtccacggagggtgacgccctagacccacctgcatcccccaaacctgctggcaagcagaacggaatccagaaccccatctcgctggagttaacctgtggaagatctacaaagcagtggagaagctgggggcctatgagctggtgaccgggcgccgcctctggaagaacgtgtacgacgagctggggggcagcccaggcagcaccagcgcggccacgtgcacgcgccgccactacgagaggctggtcctgccatacgtgcggcacctgaagggggaggatgacaagccgctgcccacctccaagcccaggaaacagtacaagatggctaaggagaacaggggggatgatggggccaccgagaggccgaagaaggccaaggaggagcggcgcatggaccagatgatgccaggaaagaccaaagcagatgctgctgacccagcaccacttcccagccaggagccccccaggaacagcacagaacagcagggcctggcctctgggtcttctgggtcctttgtgggtgccagcggctgtcctgaagcctacaagcggctcctatccagcttctactgcaaggggacacacggcaatcatgtcaccacgggccaaaaagaaactcctggcccaggtgagcaaggtggaggccttgcagtgccagaaggagggctgccgccatggggcagagccccaggcgtccccagctggtcacctcccagagagtccccagagccccaaagggctgactgagaactccaggcnaccggctggacccctcaggaagggattgcaagcccccaggtgggcaagcctcagagaaggaaggcgcaggcaaggccccgtgcccgggaaggccccccatcntccaagggggctgctttncttaacccccaccccccacccaaggggggcctggaaaacctgtgtttcaacccagacaaccccccaggggaacttttcttttcttt

SEQ ID NO: 98378 - DNA, 694 bp, Homo Sapiens
cggggtcccggacagccgcgcgctgagggtctcggggcggtgcgccgcgggacctctccgggcccatggcagcccctgtcaaagggaacaggaagcagtccacgagagggtgacgccctagacccacctgcatcccccagacctgctggcaacgcagaacggaatccagaaccccatctcgctggaggactcccccgaggcaggcgggggcagcgggaggaggagcaggagcgggaggaggagcactgccttcctggtcattgactctacaagttcatgaagtgagcgacacacgcccatcgcagcagggtgccccatctcggcttcaagcacgattaacctgtggaagatctacaaagcagttggagaagctgggggcctatgagctggtgaccgggcgccgcctctggaagaacgtgtacgacgagctggggggcagcccaggcagcaccagcgcggccacgtgcacgcgccgcactacgagaggctggtcctgccatacgtgcggcacctgaagggggaggatgacaagccgctgcccacctccaagcccaggaaacagtacaagatggctaaggagaacaggtgggatgatggggccaccgagaggccgaagaaggccaaggaggagcggcgcatggaccagatgatgccaggaaagaccaaagcagatgctgctgacccagcaccattc

SEQ ID NO: 98379 - DNA, 1018 bp, Homo Sapiens
  misc_feature (225)..(261): n is a, c, g, or t
  misc_feature (900)..(900): n is a, c, g, or t
  misc_feature (931)..(931): n is a, c, g, or t
  misc_feature (934)..(936): n is a, c, g, or t
tggaccggtccggaattcccgggatcggggtccggacagccgcgcgctgagggtctcggggcgggcgccgcgggacctctccgggccatggcagcccctgtcaaagggaacaggaagcagtccacggagggtgacgccctagacccacctgcatcccccaaacctgctggcaagcagaacggaatccagaaccccatctcgctggaggactcccccgaggcaggnnnnnnnnnnnnnnnnnnnnnnnnnnnnnnnnnnnnncaggccttcctggtcagcctctacaagttcatgaaggagcgacacacgcccatcgagagggtgccccatctcggcttcaagcagattaacctgtggaagatctacaaagcagtggagaagctgggggcctatgagctggtgaccgggcgccgcctctggaagaacgtgtacgacgagctggggggcagcccaggcagcaccagcgcggccacgtgcacgcgccgccactacgagaggctggtcctgccatacgtgcggcacctgaagggggaggatgacaagccgctgcccacctccaagcccaggaaacagtacaagatggctaaggagaacaggggggatgatggggccaccgagaggccgaagaaggccaaggaggagcggcgcatggaccagatgatgccaggaaagaccaaagcagatgctgctgacccagcaccacttcccagccaggagccccccaggaacagcacagaacagcagggcctggcctctgggtcttctgtgtcctttgtgggtgccagcggctgtcctgaggcctacaagcggctcctatccagcttctactgcaaggggacacacggcatcatgtcaccacttggccaaaaagaagctcctggcccaggtgagacaagtggnaggccttgcagtggccaaggaggagggctgnccnnnccatgggggcagagcccccaggccgtcccccagctgttccacccttcccagagaagtcccccgaggccccccaaggggcctg

SEQ ID NO: 98380 - DNA, 963 bp, Homo Sapiens
  misc_feature (650)..(650): n is a, c, g, or t
cgcccagcctcccgcctcgcggcctcccgcctcccgcctccctccagactgcgatgtgcggcctcggctggcggcggcctctggccttcagtttgtaaggcgatcttgtggctgtcaggatggcggaggcacgcaggacgttctcccagtctctgcaagttgcctgcaccaggcctcaaacccacactgtggtgaacaacagctaccggagcgcacagcactctccatggctctgctccgtagggcatgtctggcatctcacgggatcagcaggcaatcactcattcgcagtgattgctgctggatggctggacggagcatactacattcagaggtcctctagtcgcgattcgcatgctggtctgcggtgtccatgctgagtctcactttcacgagcgaactagtgctgctgtggggagcgatcttgagagtcgaggagtcggcaactgaggaacgacggtccttgtagtccgatcggtgatgctgattcctacagaatgctaatgatgccgaagaatctcgtcactattgtacaagtatactacgcgtccggagcatggcagctcaagtcctgagcaaggttacaagagacactggtggctgcctgccagcttcagatcccgagaaattatccatttctgctgtgattntcctcatgtcctgggtggacgaagagaacattctcgatgtctaccggctggcagagctgtttgacttgagccgcctgactgagcaactggacacctatatcctcaaaaactttgtggccttctctcggactgacaagtaccgccagcttccatttggagaagggtctactccctccttcagcagcaatcgcctggaggtctcctgcgagaccgagggtatatgaggggggcccttctctaccattatagcctggagcaggtgcaaggctgaccagaatctcgctgcacgagaccccaaagctccttgagacag

SEQ ID NO: 98381 - DNA, 855 bp, Homo Sapiens
  misc_feature (46)..(129): n is a, c, g, or t
gtggtaccgggtccggaattcccgggatcgcgtggccatgcgtccnnnnnnnnnnnnnnnnnnnnnnnnnnnnnnnnnnnnnnnnnnnnnnnnnnnnnnnnnnnnnnnnnnnnnnnnnnnnnnnnnnnnggtgcaggtggacgcggcccgcgcgctgtggcccctgcggcgcttctggaggagcacaggcttctgccccccgctgccacacagccaggctgaccagtacgtcctcagctgggaccagcagctcaacctcgcctatgtgggcgccgtccctcaccgcggcatcaagcaggtccggacccactggctgctggagcttgtcaccaccagggggtccactggacggggcctgagctacaacttcacccacctggacgggtacctggaccttctcagggagaaccagctcctcccagggtttgagctgatgggcagcgcctcgggccacttcactgactttgaggacaagcagcaggtgtttgagtggaaggacttggtctccagcctggccaggagatacatcggtaggtacggactggcgcatgtttccaagtggaacttcgagacgtggaatgagccagaccaccacgactttgacaacgtctccatgaccatgcaaggcttcctgaactactacgatgcctgctcggagggtctgcgcgccgccagccccgccctgcggctgggaggccccggcgactccttccacaccccaccgcgatccccgctgagctggggcctcctgcgccactgccacgacggtaccaacttcttcactggggaggcgggcgtgcggctggactacatctccctccacaggaagggtgcgcgcagctccatctccatcct

SEQ ID NO: 98382 - DNA, 667 bp, Homo Sapiens
tgctcctcagcacagaccaagatggagttcctgcgcaaagcacggcttctccagaagcccatgtttcttgcccgctgcctccggctggagctcaaagcctgccggatatgggttgcaggggcgccagttaccccctgaggctccatgggaccagggtctgggccggcggatggacgctgtgggggaaagcgggtgacagccatcgcagataggatcatcaagaggcagaacgctatcactggccgcctcttgccacgcagctttctccggagccaagacgcctatccagcctgctctccagtcattcctgcttaggactccctgtggctgggtgaaacaggactctttcccttgctccagatgagagaccaaagctggtttggaagtgggtggcactacaaaggccacagcctcatagttctccagcatcacatccctgtacaaggccctctcggcaggcaccatgatggcccattccttcgtagtgaagtacacagccacgtcctcaaaagccactgattcctggggcctggttgttaaggacacagctgtcatcatctgacctcttttattcctttctgggtaaaggtaaaagtctccaggtgcgtgggctcctggcggcctctgcagcttttcagcaagcagagatggtgggcgccactcgccg

SEQ ID NO: 98383 - DNA, 1155 bp, Homo Sapiens
ctcgcacttcagcttcccctcccccggcgccctctggggctccgagcccggcgggaccatgttcaccagcaccggctccagtgggctctacaaggcgcctctgtcgaagagccttctgctggtccccagtgccctctccctcctgctcgccctcctcctgcctcactgccagaagctctttgtgtatgaccttcacgcagtcaagaacgacttccagatttggaggttgatatgtggaagaataatttgccttgatttgaaagatactttctgcagtagtctgcttatttataattttaggatatttgaaagaagatatggaagcagaaaatttgcatcctttttgctgggttcctgggttttgtcagccttatttgactttctcctcattgaagctatgcagtatttctttggcatcactgcagctagtaatttgccttctggattcctggcacctgtgtttgctctgtttgtaccattttactgctccataccaagagtccaagtggcacaaattctgggtccgttgtccatcacaaacaagacattgatttatatattgggactgcagcttttcacctctggttcctacatctggattgtagccataagtggacttatgtccggtctgtgctacgacagcaaaatgttccaggtgcatcaggtgctctgcatccccagctggatggcaaaattcttttcttggacacttgaacccatcttctcttcttcagaacccaccagcgaagccagaattgggatgggagccacgctggacatccagagacagcagagaatggagctgctggaccggcagctgatgttctctcagtttgcacaagggaggcgacagagacagcagcagggaggaatgatcaattggaatcgtctttttcctcctttacgtcagcgacaaacgtaaactatcagggcgggtcggcagtctgagccagcagcgcccctctagaagttttctgaggaacaggtcgcccggctcatggagatgggattttccagaggtgatgctttggaagccctgagagcttcaaacaatgacctcaaatgtcgccaccaatttcctgctgcagccactgatacgtccccaggccacactggagacggaacggagccgagtgacaagtgcgttgttcccac

SEQ ID NO: 98384 - DNA, 869 bp, Homo Sapiens
  misc_feature (76)..(124): n is a, c, g, or t
  misc_feature (846)..(846): n is a, c, g, or t
gataatgcggcggcgctcgcggatgctgctctgcttcgccttcctgtgggtgctgggcatcgcctactacatgtannnnnnnnnnnnnnnnnnnnnnnnnnnnnnnnnnnnnnnnnnnnnnnnnaggaaggaggactggaatgaaattgaccccattaaaaagaaagaccttcatcacagcaatggagaagagaaagcacaaagcatggagaccctccctccagggaaagtacggtggccagactttaaccaggaagcttatgttggagggacgatggtccgctccgggcaggacccttacgcccgcaacaagttcaaccaggtggagagtgataagcttcgaatggacagagccatccctgacacccggcatgaccagtgtcagcggaagcagtggcgggtggatctgccggccaccagcgtggtgatcacgtttcacaatgaagccaggtcggccctactcaggaccgtggtcagcgtgcttaagaaaagcccgccccatctcataaaagaaatcatcttggtggatgactacagcaatgatcctgaggacggggctctcttggggaaaattgagaaagtgcgagttcttagaaatgatcgacgagaaggcctcatgcgctcacgggttcggggggccgatgctgcccaagccaaggtcctgaccttcctggacagtcactgcgagtgtaatgagcactggctggagcccctcctggaaagggtggcggaggacaggactcgggttgtgtcacccatcatcgatgtcattaatatggacaactttcagtatgtgggggcatctgctgacttgaagggcggttttgattggaacttggtattcangtgggattacatgacgcctgagc

SEQ ID NO: 98385 - DNA, 892 bp, Homo Sapiens
  misc_feature (50)..(50): n is a, c, g, or t
  misc_feature (793)..(825): n is a, c, g, or t
atgatctggagcagcagtctcaaggctggctgagtagctggctgcccacngtggcgccccacttccatgtctcagctgaagaatgtggaagccaggatcctccagtgtctccagaataagttcctggccagatatgtatccctcccaaaccagaataagatctggacggtgactgtgagccccgagcaaaacgaccgcacccccttggtgatggtgcatggttttgggggcggcgtgggtctctggatcctcaacatggactcactgagtgcccgccgcacactgcacaccttcgatctgcttggcttcgggcgaagctcaaggccagcactcccaagggacccggagggggctgaggatgagtttgtgacatcgatagagacatggcgggagaccatggggatccccagcatgatcctcctggggcacagtttgggaggattcctggccacttcttactcaatcaagtaccctgatagagttaaacacctcatcctggtggacccatggggctttcccctccgaccaactaaccccagtgagatccgtgcacccccagacctgggtcaaagccgtggcatctgtcctaggacgttccaatccattggctgttcttcgagtagctgggccctggggtgagtagcctgtagtatctccttaaaggaaggctataacgttctagaaggcccacagtgtctttcccacttattcctaaaaagtggaaattggcctagccttgttatttaaagctgttaatctgaaccagatcactttgttcaaggtttgagaaggnnnnnnnnnnnnnnnnnnnnnnnnnnnnnnnnnagactccatctcaattagtaataataataaagaagcatctggtttctcttggtccttcttcttcaaa

SEQ ID NO: 98386 - DNA, 671 bp, Homo Sapiens
  misc_feature (34)..(35): n is a, c, g, or t
gaggggcgtggctgaggcatggcgggggcggcanntaggagcaggagcacggcacgtgggcggggtccgggccgtgggcggggccagaccccgagcccggggtggacttgacgatggtgatgacgctggccggcgccacgagcgtggcgggcccgcgggcggcggccacggagcgcgcgaagccctgcagcgcctcgcacttgccgcgcagcgcgtcgagctccaggcgcatggcggcgttctcgcgcgccagcttgtccacctcgcgctccagctccgacttctgcttctgcagctcctccttctggcacacgcgcttcacgcggcagctggcggcgtagccacggtttttgagtgtgcggcgccgctgcttgagccgtgtcacctcctcggcggagagcccgcgcagatgccggttcagctcgcgcaccgacagccccatcagcgcctcgtccgacaggtgcggcgtgttctcgctcagctctcgcttgatctttagagctttgctggataggggatccacagacatgtttgcagaaggtgccctctgggctgcagacccgcttctgggcccgcttggtccggcgcgctcacacacgcgcgtctcgccgctgtcccgcccgctgtcccgatccgcgctccggtcagtctcccccccgctctgagccgca

SEQ ID NO: 98387 - DNA, 1529 bp, Homo Sapiens
ccctctcctgggtcaacgggggttgattcaaggaatttcttacctgggaaaggccgtttgaaaggggaccatgtttggaaatccgcccggggtgttatgaaattgagggggcacggtggggggttcccggttgaaaatactttgtgcgggggaagggcccccgtggtccccccgcatagcggtggcacccccaggggctggcccactaaaataggccaccacccatgaggaaagagagaggaggatgattccaaggacgggcccgatggcactgctgtggcccgggctgtcgtatgagggcggcttggtgatttcacacatgagctcgtcggagcggtcgatacagtcggggaaggagtcgcactgctgtttgatgaggacacactggccgctcgcacaccggaactggttgggcaggcagatggcgtcacagtccgcctcgtctgagcggtcctgacagtctgcctcgccgtcgcagcgcaggcgcaggtccacacactgaccccgcgcgcaggggaactgggcggcggagcacacggggcagccctcctcgtcgctttggtcatcgcactcgggaaagccgtcacagcgccaggccccggggatacagtcgatctcccctgtggcacatgcaaactggtccggggagcaggtgggcggctctccacaggtcagcaggttctgcaggagccacgaggtggatctgggcatgagcaccgtggtgtcccatcacccttggcaatacagatgtgggagcagcccaccattgtcacgggcacatgggtgggctgagaactcctccaggctgacttcctccactgcatggatgccagtgaggtgggcgacacggccctggatgcgagtccgcttgtccccggtggtcttctccacacgctcgatcatctgctgctggcggtcgatccagtagagatgcttgccaaggatggtcaggcccagaggctgcacgatgttggcgtcctccagggtcaggcggttggcccctgacaggtcacagctctcaatgcgcttcaggtccgcgtccacccagaacagcttgcccagtgtgttgtctaccaccagggccacagggcggatgaggccggtggtgaagaggacctcgcgctcggtgccgtccagggctgcgcgttcgatcttggctgcccggtcctgcatgttggtgaagtacaggtaccctcgctccgcgttgacgacgatggccctgggcttgtcgcggtccccacgcagcaccacccccatggcttccccgctcagcctgtggacgttgatggtattggtggcctcgcacgtccagaacagtgtccggctgtagatgtcgatgctgaggtcgtggggctgcctgtctgggttttggccttggctcagagaggtcaaaacaaagggctgggtcccgtcgtccttggctcgcttgatgttctggcgcccatccacccagtagatgaacttgtccagtgggtcatagtcgatggctttgacgttcctcagtccatgcaggggcaggatgagatccg

SEQ ID NO: 98388 - DNA, 901 bp, Homo Sapiens
  misc_feature (29)..(31): n is a, c, g, or t
gtgatacggacagtgaacagtagaccagnnntgaaggaagccatgtaggtgaggaggtagcgaaggcccccagcagccctacagacacattcaccactgagaagaagatgagcagctccaagccccccagagggctccagcaaacgcccggccaccaccaccgttgtcaggctgatggccacgtcccacacatgctgctccatcagcccatgggtggccagggtccagatccagaagttgggaggaaagaggtagcccggggtgaccgccaggcagcctgtgtccacggcgaaggagagcaggtagaggaatagtaccgccgcacacagagccttcaccaccacgctggcgctggccagaatggcccccaagtgctggcgggcgcctggcagggcacgttgcatcttcctggcggctgtcggcctgagaaaagggtctggtaggccaggggcctccccggggcctcgtcctagtccggccccgatgggaggcccaggcccggcctagtcactggcctatggccctggtaaaggatccgcttccgatcgggtggggctctggtcccgaggggccgagtcgggccttgttgccgggccgcagcgtaggcccctcgcccgggacctgagggaaggccctggacggctgcggcacgcccgcctacccaccctgtaggccccgtgccaggctagcctggttggcgttgacctcagggctgggcctcctccatccactgcgaggcccttcggttcgcaaggggactggtgcctcgttctgtacccgagtcaagcctggtcagctcccgctcggcctggctcctggcttcgaccgtacctcttctcgtcggggggccgacaaacaggggtgctgcgcctgcgcgtccccggcggcagcgatcccggga

SEQ ID NO: 98389 - DNA, 1771 bp, Homo Sapiens
  misc_feature (1457)..(1457): n is a, c, g, or t
  misc_feature (1669)..(1719): n is a, c, g, or t
caaggtagcgaggcctgggtggcgatttcggcacgagggtttgccagcgctcaggcaggagctctggactgggcgcgccgccgccctggagtgagggaagcccagtggaagggggtcccgggagccggctgcgatggacgccgtcttggaacccttcccggccgacaggctgttccccggatccagcttcctggacttgggggatctgaacgagtcggacttcctcaacaatgcgcactttcctgagcacctggaccactttacggagaacatggaggacttctccaatgacctgttcagcagcttctttgatgaccctgtgctggatgagaagagccctctattggacatggaactggactcccctacgccaggcatccaggcggagcacagctactccctgagcggcgactcagcgccccagagcccccttgtgcccatcaagatggaggacaccacccaagatgcagagcatggagcatgggcgctgggacacaaactgtgctccatcatggtgaagcaggagcagagcccggagctgcccgtggaccctctggctgccccctcggccatggctgccgcggccgccatggccaccaccccgctgctgggcctcagccccttgtccaggctgcccatcccccaccaggccccgggagagatgactcagctgccagtgatcaaagcagagcctctggaggtgaaccagttcctcaaagtgacaccggaggacctggtgcagatgcctccgacgccccccagcagccatggcagtgacagcgacggctcccagagtccccgctctctgcccccctccagccctgtcaggcccatggcgcgctcctccacgggccatctccacctccccactcctcactgcccctcacaaattacaggggacatcagggccactgctcctgacagaaggaggagaagcggaaccctgattgctgaggggctaccccattccccacaaaactccccctcaccaaagccgaggagaaggccttgaagagagtccggaggaaaatcaagaacaagatctcagcccaggagagccgtcgtaagaagaaggagtatgtggagtgtctagaaaagaaggtggagacatttacatctgagaacaatgaactgtgggagaaggtggagaccctggagaatgccaacaggaaccctgcctccagcagctgccagaaactccagaactctggtccccccaacaagaatctcccagacccttaacaagatgggccgcccaccccgaaactggggaaccctggcctcactgggtgggggcaaccccttggaggcctttttgattcccgggcgtggcctgggggactttcccccttccggtggggccccctggacaccttttccccccgaaggatgtttttcccgccgcgcggggctttccccccaagaaaactgggtggcaaaggggggaaagcacaccncccccctggagcccgcggccagaaaacggggggggtttcttaacctcacggggcccacgcggcccagaaaaaggggcaccccttccccgcaaaaagaagccgtgcccctaaatttttcatttaaagggacatggaaaaaccgggtgagcccaaggggctctatataaaacgggggcgaagaaaaagtggcgccgtccccccacaacacgcannnnnnnnnnnnnnnnnnnnnnnnnnnnnnnnnnnnnnnnnnnnnnnnnnnaaaaatatggctacctcagggaaacaaaaacaccccacaccaccaccgcggc

SEQ ID NO: 98390 - DNA, 1035 bp, Homo Sapiens
  misc_feature (20)..(20): n is a, c, g, or t
  misc_feature (63)..(63): n is a, c, g, or t
  misc_feature (215)..(215): n is a, c, g, or t
  misc_feature (386)..(424): n is a, c, g, or t
  misc_feature (830)..(957): n is a, c, g, or t
gtaggggtagtcggtaggcngcgcggtaggccattcggtgagctcttaagactcgtgctgtanaggaagagtttgtccagcagacggcgcgggggggcgcgacgtgctgtttctcgatcggttggattcatccaccttccgcgctatagcccctcttcatcccggcggtggcgggtgcccatcctcccccgcggtggggtttcccatcagggagnaagactctccccggaggctttcttgggttgcctgggcctttctcgccactcgagaggtggaggcccacccacggtttgtggtgttccactcaaggcggggccccagggggttgacccaatgcgttcttcgccattcctttggggggtggggtgtcccctacaccattgctnnnnnnnnnnnnnnnnnnnnnnnnnnnnnnnnnnnnnnnccaggttggagttccgccggcttgcgggggaggtaagcttgtggttccggcctgggatggcctgggccgtagggggagtcccagttcccaggtccaatagaagggctcttctcatccagcacagggtcatcaaagaagctgctgaacaggtcattggaggaagtcctcccatgttctccgtaaagtggtccaggtgctcaggaaagtgcgcattgttgaggaagtccgactcgttcagatcccccaagtccaggaagctggatccggggaacagcctgtcggccgggaagggttccaagacggcgtccatcgcagccggctcccgggacccccttccactgggcttccctcactccagggcggcggcgcgcccagtccagagctcctgcctgagcgctggcaaacnnnnnnnnnnnnnnnnnnnnnnnnnnnnnnnnnnnnnnnnnnnnnnnnnnnnnnnnnnnnnnnnnnnnnnnnnnnnnnnnnnnnnnnnnnnnnnnnnnnnnnnnnnnnnnnnnnnnnnnnnnnnnnnncccgggcgcaccgtgggcattcagccgactccacctcctcctgctcctcctggggcacagctggcttccatggggagc

SEQ ID NO: 98391 - DNA, 1292 bp, Homo Sapiens
ggtcctaaggagcgaggcctgggtggcgaattcggcacgaggaaccagttcctcaaagtgacaccggaggacctggtgcagatgcctccgacgccccccagcagccatggcagtgacagcgacggctcccagagtccccgctctctgcccccctccagccctgtcaggcccatggcgcgctcctccacggccatctccacctccccactcctcactgcccctcacaaattacaggggacatcagggccactgctcctgacagaggaggagaagcggaccctgattgctgagggctaccccatccccacaaaactccccctcaccaaagccgaggagaaggccttgaagagagtccggaggaaaatcaagaacaagatctcagcccaggagagccgtcgtaagaagaaggagtatgtggagtgtctagaaaagaaggtggagacatttacatctgagaacaatgaactgtggaagaaggtggagaccctggagaatgccaacaggaccctgctccagcagctgcagaaactccagactctggtcaccaacaagatctccagaccttacaagatggccgccacccagactgggacctgcctcatggtggcagccttgtgctttgttctggtgctgggctccctcgtgccctgccttcccgagttctcctccggctcccagactgtgaaggaagaccccctggccgcagacggcgtctacacggccagccagatgcccctcccgaagcctcctattctacgatgacggggcaggcttatggggaagatggccgcagcaccctgctgcccatggagcccccagatggctgggaaatcaaccccggggggccggcagagcagcggccccgggaccacctgcagcatgatcacctggacagcacccacgagaccaccaagtacctgagtgagccctggcctaaagacggtggaaaccgcaccagccccgacttctcccactccaaggagtggttccacgacagggatctgggccccaacaccaccatcaaactctcctaggccatgccaagacccaggacataggacggacccctggtacccagaagaggagttcttgctcactaacccggatccgcctcgtgcccctgcctcctggagcttcccattccaggagaaaaggctccacttcccagcccttccttgcccctgacatttggactcttcccttggccgaccactctgttctcattctccttcccaccaacatccatccgtcctttctcagacaaaccactcactggtagcccataaacctca

SEQ ID NO: 98392 - DNA, 1021 bp, Homo Sapiens
  misc_feature (437)..(437): n is a, c, g, or t
taggcccctccagccaatcccggggttccggctttctccccccccttctgtccaggaaggcagtggccccctgatgttcccccttgtaaattttgtgaaggggccacttgaggaattgggggagggtggaaaatggcccgtggaaggagccgcccccatggggccctgaccaggggcttggagggggggccagagaagcgggggacttctggggagcccgtccgctgtcaactgcccatgggctgctgggggggcgtcggagggcatctgcacccaggttcctcccggtgtcactttgaggaaactggttcaccccccagagggctctgctttgatcactggcagctgagtcatctctcccggggccctggtgggggatgggcagcctggacaaggggctgaggcccagccagcgggggtggtggccatgggcggcncgccgcaagcccatgcccagagggggcccaaccagagggtccacgggcagctccgggctctgctcctgcttcaccatgatggagcacagtttgtgtcccagcgcccatgctccatgctctgcatcttgggtggtgtcctccatcttgatgggcacaagggggctctggggcgctgagtcgccgctcagggagtagctgtgctccgcctggatgcctggcgtaggggagtccagttccatgtccaatagagggctcttctcatccagcacagggtcatcaaagaagctgctgaacaggtcattggagaagtcctccatgttctccgtaaagtggtccaggtgctcaggaaagtgcgcattgttgaggaagtccgactcgttcagatcccccaagtccaggaagctggatccggggaacagcctgtcggccgggaagggttccaagacggcgtccatcgcagccggctcccgggacccccttccactgggcttccctcactccagggcggcggcgcgcccagtccagagctcctgcctgagcgctggcaaaccctcgtgccgaattcgccacccaggcctcgctcc

SEQ ID NO: 98393 - DNA, 878 bp, Homo Sapiens
  misc_feature (76)..(203): n is a, c, g, or t
gctccccatggaagccagctgtgccccaggaggagcaggaggaggtggagtcggctgaatgcccacggtgcgcccnnnnnnnnnnnnnnnnnnnnnnnnnnnnnnnnnnnnnnnnnnnnnnnnnnnnnnnnnnnnnnnnnnnnnnnnnnnnnnnnnnnnnnnnnnnnnnnnnnnnnnnnnnnnnnnnnnnnnnnnnnnnnnnncccgtttgccagcgctcaggcaggagctctggactgggcgcgccgccgccctggagtgagggaagcccagtggaagggggtcccgggagccggctgcgatggacgccgtcttggaacccttcccggccgacaggctgttccccggatccagcttcctggacttgggggatctgaacgagtcggacttcctcaacaatgcgcactttcctgagcacctggaccactttacggagaacatggaggacttctccaatgacctgttcagcagcttctttgatgaccctgtgctggatgagaagagccctctattggacatggaactggactcccctacgccaggcatccaggcggagcacagctactccctgagcggcgactcaacgccccagaagcccccttgtgcccatcaagatgggagacaccaccccaacatgccaaaccatggaaccatgggccgcctgggacaacaaactgtggctcccctccagggtgaaagcagggaaacaaagaccccggagagtgcccccgtgggaaccctcctgggctggcgcccccgcttggggccatggcgttggccctacggaacccccaaagaggtcaaatacaagccgcccccgtggagtggggggacacatcaagacgccgtatttgcgcaccacggaaccgcgccccccc

SEQ ID NO: 98394 - DNA, 1786 bp, Homo Sapiens
  misc_feature (1560)..(1568): n is a, c, g, or t
  misc_feature (1613)..(1670): n is a, c, g, or t
gctctgtgtggccgaggccatgaagccgcagccgcccggctaggccccgggcggctctagcccagggcggcccgcggggcgctgggcctggctcccggctccggtttccgggccggcgggtggccgctcaccatgcccggcaagcaccagcatttccaggaacctgaggtcggctgctgcgggaaatacttcctgtttggcttcaacattgtcttctgggtgctgggagccctgttcctggctatcggcctctgggcctggggtgagaagggcgttctctcgaacatctcagcgctgacagatctgggaggccttgaccccgtgtggctgtttgtggtagttggaggcgtcatgtcggtgctgggctttgctggctgcattggggccctccgggagaacaccttcctgctcaagtttttctccgtgttcctcggtctcatcttcttcctggagctggcaacagggatcctggcctttgtcttcaaggactggattcgagaccagctcaacctcttcatcaacaacaacgtcaaggcctaccgggacgacattgacctccagaacctcattgactttgctcaggaatactggtcttgctgtggagcccgaggccccaatgactggaacctcaatatctacttcaactgcactgacttgaaccccagccgggagcgctgcggggtgcccttctcctgctgcgtcagggaccctgcggaggatgtcctcaacacccagtgtggctacgacgtccggctcaaactggagctggagcagcagggcttcatccacaccaaaggctgcgtgggccagtttgagaagtggctgcaggacaacctgattgtggtggcgggagtcttcatgggcatcgccctcctccagatctttggcatctgcctggcccagaacctcgtgagtgacatcaaggcagtgaaagccaactggagcaaatggaatgatgactttgaaaaccactggcttacgcccaccatttccgaggtcctgtccacggcggggcctcagcagaactctctgactggggcccctggcccggccccacccagccgacatgttttctttggcctgggtggtttataccctgagccaaccctttaaaaattggtagatttcacataaaagtccagaatccacagcttctcttgaaagaatgaccacctggctacgcccggctcttcgggtggcaacactacctgggacactgcctccccagtcaccaagggccccagctggcccgttctactcacctaagtgccgcctgacccttgtacactaggagctggcctcccacctctgcagggttatttcctgcacctcgaggccgctgcgggccaatctggagtgaaacacggggacctgaaggatggagaggctggaccccgctttgaagagggtgcagcctgggaagggcggccttgctggggactggcgggggagtaaagtgcccagcagagggtctgaggggtggggaagggggctccacccccctttgccccacgaactccccctggcaaaccctggacaccgggggggcaacaattatcnnnnnnnnnacccgggtggccggggccgttgacccgcgcaccgcggaccacccnnnnnnnnnnnnnnnnnnnnnnnnnnnnnnnnnnnnnnnnnnnnnnnnnnnnnnnnnngggcggaaggagacgttttgcccgcagacgccaaccacccccccgccctctctcgccacgcggcggcgcaacacgggcaacagacccccgcctcccacctcacctacggtctgcat

SEQ ID NO: 98395 - DNA, 1517 bp, Homo Sapiens
  misc_feature (1112)..(1114): n is a, c, g, or t
  misc_feature (1446)..(1446): n is a, c, g, or t
ctgctcagtgaccctggcctgtggcgtccgcctgcagttcccagcgggagccaccgccacccccatcaccatccgctatcggctgctgctgccggagccaggcctcgtccccctgggtcctcatgacgccctgctcagccatgtgctggagctgcagccccatggggtggccttccagcaggatgtggggctgtggctgctcttcaccccaccgcaggcccggcgctgccgtgaagtggtggtcaggacccggaatgacaacagctggggtgacctggagacctacctggaggaagaggcaccccagcggctctgggctcactgccaggtgccccacttctcctggttccttgtggtttcccgccctgtgtccaatgcctgcctggtgccaccggaggggacactgctgtgctcctcgggtcatcctggggtcaaagtcatcttcccccctggggccactgaggagcctcgtcgagtctccacgcaggtggtgcgcatggctggccgagagctgcaggccctcctgggagaaccagaggctgcagtgagccccctgctgtgcctgtcacagagcggtccccccagcttcctccaaccggtcaccgtgcagctgcctctgccctctggcatcacaggcctcagtctggaccgctcccgcctgcacctgttgtactgggcccctcctgcagccacctgggatgacatcacagctcaggtggtcctggagctcacccacctgtacgcacgcttccaggtcacacacttctcctggtactggctctggtacaccaccaagaactgtgtgggaggcctggctcggaaggcctgggagcggctgcggctgcaccgtgtgaacctcatcgctctgcagcggcgccgggaccctgagcaggtcctgctgcagtgcctgccccgaaacaaggtggacgccacccttcggcggctgctggagcggtaccggggccccgagccctctgacacggtggagatggtcgagggcgaaaagttctttaagagcttctatggcggccttccgagcgcggcgcttccaactgggaatgctggacccgcccttgatgtggggggcagggaaaaaaaagggctttggccgnnncaaccccccacccgaaaaaaaggggaaaggagggggccccttccaacccgtgggcccggggggctcggggcgggtggcccaaaggcaagccttaaagtcttccctcggaaaaaagagaagggggaccaaaaacgccctggggtggatgggcccgccctctgcccattatgaggactgcgcgccacacatttataagcggggcgcgaagggggcccacccctcgcggggcgaggcgagaaccactcgcccctggcgccccacctcccacaccttagtcccacatagtacaccgtcacgccgcccgccttttataaaaggagcggtgataaagncacaccgcccgcatggttgtgaggtctcgcgagtcagcctgtgtcggttgacgaccccaccctccttgcgc

SEQ ID NO: 98396 - DNA, 1307 bp, Homo Sapiens
ctgtctccctctctccacaaactgcccagtgagtgagtagctgctttcggtccgccggacacagccggacagatagacgtgcggacggccaccaccccagcccgccaactagtcagcctgcgcctggcgcctcccctctccaggtccatccgccatgtggcccctgtggcgcctcgtgtctctgctggccctgagccaggccctgccctttgagcagagaggcttctgggacttcaccctggacgatgggccattcatgatgaacgatgaggaagcttcgggcgctgacacctcgggcgtcctggacccggactctgtcacacccacctacagcgccatgtgtcctttcggctgccactgccacctgcgggtggttcagtgctccgacctgggtctgaagtctgtgcccaaagagatctcccctgacaccacgctgctggacctgcagaacaacgacatctccgagctccgcaaggatgacttcaagggtctccagcacctctacgccctcgtcctggtgaacaacaagatctccaagatccatgagaaggccttcagcccactgcggaagctgcagaagctctacatctccaagaaccacctggtggagatcccgcccaacctacccagctccctggtggagctccgcatccacgacaaccgcatccgcaaggtgcccaagggagtgttcagtgggctccggaacatgaactgcatcgagatgggcgggaacccactggagaacagtggctttgaacctggagccttcgatggcctgaagctcaactacctgcgcatctcagaggccaagctgactggcatccccaaagacctccctgagaccctgaatgaactccacctagaccacaacaaaatccaggccatcgaactggaggacctgcttcgctactccaagctgtacaggctgggcctaggccacaaccagatcaggatgatcgagaacgggagcctgagcttcctgcccaccctccgggagctccacttggacaacaacaagttggccagggtgccctcagggctcccagacctcaagctcctccaggtggtctatctgcactccaacaacatcaccaaagtgggtgtcaacgacttctgtcccatgggcttcggggtgaagcgggcctactacaacggcatcagcctcttcaacaaccccgtgccctactgggaggtgcagccggccactttccgctgcgtcactgaccgcctggccatccagtttggcaactacaaaaaagtagaggcagctgcagccaccgcggggcctcagttgggggtctctgggt

SEQ ID NO: 98397 - DNA, 789 bp, Homo Sapiens
atgcctagaaatcgatggaagccctgatgggggggcaggaaggccccctcaggccccaccccaaggtgccacttgccggccattcctgtgaggtagcctcgggcagccaggacttcggccacggtcacctcctccaggggcaggcccccccgggagctgggcaccaggacgccagggtacatgcccatccgaaccgggagccggccggtcaggagggcggccctagagggtgtgcacagagacacaggcacgtagaagtctgtgaaccgcagccctcccgccgccagctggtccaggttgggagtggtagagctggggtgcccatagcagcccaggtccccatagccgaggtcgtcggcaaagatcagcacgatgttgggcggacgggcaacggccaggccagcagccagggccaggaggagggaccgcggtgcccccatggacatgggaccgaggggtctgtcccaagagagggagggctacttggctccagcaggctctttccgataccgcagacccaggcgccgcccttccctgagaccccggacccaaatactccccgaccctgacggccgcctcctgaagctccagagggccggggcccgacagtaccgggagaccgcgggctgggacggaactcctccaggaccagggcaccttcagattctcgagcggagatctgatcctcctcgcctagcggtccgggctcagggtcgggggcgtaagtcacttggcgctgaccagcggagtcggccggggggaaggcgctagaggagcccaggaggagcc

SEQ ID NO: 98398 - DNA, 1082 bp, Homo Sapiens
  misc_feature (444)..(444): n is a, c, g, or t
  misc_feature (579)..(588): n is a, c, g, or t
ggctcctcctgggctccctctagcgccttccccccggcccgactccgctggtcagcgccaagtgacttacgcccccgaccctgagcccggaccgctaggcgaggaggatcagatctccgctcgagaatctgaaggtgccctggtcctggaggagttccgtcccagcccgcggtctcccgacccctcggtcccatgtccatgggggcaccgcggtccctcctcctggccctggctgctggcctggccgttgcccgtccgcccaacatcgtgctgatctttgccgacgacctcggctatggggacctgggctgctatgggcaccccagctctaccactcccaacctggaccagctggcggcgggagggctgcggttcacagacttctacgtgcctgtgtctctgtgcacaccctctagggccgccctcctgaccggccggctcccnggttcggatgggcatgtaccctggcgtcctggtgcccacctccccgggggggcctgcccctggaggaggtgaccgtggccgaagtcctggctgcccgaggctacctcacaggaatggccggcaagtggcaccttnnnnnnnnnncctgagggggccttcctgcccccccatcagggcttccatcgatttctaggcatcccgtactcccacgaccagggcccctgccagaacctgacctgcttcccgccggccactccttgcgaacggggctgtgaccaaggcctggtccccatcccactggtggccaaccctgtccctggaggcggcgccccacctgggctgccccggactaaaagccccgctacatggcttttcgccccatgaacctcatgggcccaacccccagggcccaggaacgcccccttcctccctggactaatgcgtgtaaagcaaaccccacttaccctcatttccatgggggcaacactttttgcaaagaacgattcgggacaccgggtccatatggggggaacccccttcaaggcaagctgtgatggcggttggggggggacccctgaaatgacaaccaattggggaactctgaggcccgccctagagaaaaaagacttgtcccacct

SEQ ID NO: 98399 - DNA, 1458 bp, Homo Sapiens
  misc_feature (1269)..(1269): n is a, c, g, or t
gcagagcctgggcatgcggcgagccacccctgccacccctttcccgctggaaaccacagatggcaatgacagcagtagtcccctgggcagccacacacccctctccaagaaccccagcgtgccacctgccagagcctgcagctcccacacccctctcatgcctccagcacagccctgccaccacttgcagaggaagctgagaccagagcactgaagtaacctgcccaagactgcacagcttgctggcagaggagcagagcctgcggcacggcctctgtgttacactgtgggccctgaggatgaggactggcctggagtccctttgggtctgcagagcaatgcctggcacagagcaggccctgactggggctgcagagtcactaagtccctgcatgggggaccaactgatgcaggctctgaggtcccaggattctgtggagattcacaggggacctaggaccctcggagctgccctctgaattcaagcagtggtgcctcctgtgcttgtcaggcaggatgatctgtggggcctgtgggctctgacctcactctgcagcagcaaagcccagaggcctcactttttcatgaaccagcacaggctctcctgagagccctggagggaaggctccggctatactgcctcctggtgtgaggaggcttctctcttgtctgtcccactagggcggggctgacgttctacccttgccggtgggctctggtctgcttcccctcatcatgcccttctcaacattctcattttcagactgaagttgggtgattgctccttttctcagagtgcttgggtgcagcaggctgcggaggggcactgaggcagcccagcctcaaccagggttcccaggacctgaggccccaggctggaccccagcaggctgcaggctgccctgcggacaccacacctcaacaccacaaagggccctgctgaggttggcagtcagtgctcagagcacctccaggcacggttcctaacgagcaagctgatgccaaggtcacatgaccatgagtttttggctgcgttgggtcctgtttatggagagatggtgggaggggagcagcatgggtgggtggtggttcacgcttaagggactaactgggagctacagtaagacacatgcgtaccattaaagaagagactttctctgtcggaacggggggtgcttgtaggcccggcctggaggaggaggaacccgtgctgttctttttctgcccagtggtctcaggctggaggaggccttaagtggctccgtgttnaaaaactctctgtggctttctcacactctgaaaaccacggggaccactcagggcagcaggggcggttactctcgggcttgcaaccttttcatggaacatttgaaaagatgccttccggaatcaaaatttccccccgcttactccgggaacccgaacgaacgaaactaatgtgtctccccagccccgaat

SEQ ID NO: 98400 - DNA, 1521 bp, Homo Sapiens
  misc_feature (392)..(439): n is a, c, g, or t
  misc_feature (1115)..(1115): n is a, c, g, or t
gccgcccgccgccgctggagctagagatggatttgcagccgctgcaagtgtgtggaagggccgtgttcgtgttggcaaagaaggtcggctgctgagcccagggcgtgtctcccggaggcctgtgggctgccaggatccccacctctctgcaatgggctgcccaggctgaccagccggttcctgctggaagctcctggtctgatctggggataccatgtccaagccccccgacctcctgctgcggctgctccggggcgccccaaggcagcgggtctgcaccctgttcatcatcggcttcaagttcacgtttttcgtctccatcatgatctactggcacgtagtgggagagcccaaggagaaagggcagctctataacctgccagcaagggatnnnnnnnnnnnnnnnnnnnnnnnnnnnnnnnnnnnnnnnnnnnnnnnntccaggcaacatcttcttcctggagacttcagaccggaccaaccccaacttcctgttcatgtgctcggtggagtcggccgccagaactcaccccgaatcccacgtgctggtcctgatgaaagggcttccgggtggcaacgcctctctgccccggcacctgggcatctcacttctgagctgcttcccgaatgtccagatgctcccgctggacctgcgggagctgttccgggacacacccctggccgactggtacgcggccgtgcaggggcgctgggagccctacctgctgcccgtgctctccgacgcctccaggatcgcactcatgtggaagttcggcggcatctacctggacacggacttcattgttctcaagaacctgcggaacctgaccaacgtgctgggcacccagtcccgctacgtcctcaacggcgcgttcctggccttcgagcgccggcacgagttcatggcgctgtgcatgcgggacttcgtggaccactacaacggctggatctggggtcaccagggcccgcagctgctcacgcgggtcttcaagaagtggtgttccatccgcagcctggccgagagccgcgcctgccgcggcgtcaccaccctgcccccctgaggccttctaccccatcccctggcaggactggaagaagtactttgaggacatcanaccggaggagctgccgcggctgctcagtgccacctatgctgtccacgtgtggaacaagaagagccagggcacgcggttcgaggccacatccagggcactgctggcccagctgcatgcccgctactgccccacgacgcacgaggccatgaaaatgtacttgtgaggggcccgccaggtcacctccccaagctgctcctgatggggcactgggccgcccttcccggggagggcaagattgaggggccgggagagggaggcccgagctgcaccgggcttaggcaggctgtgagggagctgtgggaagcaggcccagtggggaggctgtggacacccggaggacagtgtcctgtctcgaggcagggtgacccttggtgccatagcagcggaggggctcaatggattgccg

SEQ ID NO: 98401 - DNA, 842 bp, Homo Sapiens
gctcctggggttggggtcgtggcctctgagctagggatgctggtggaggaggcagcagcaacaactgtagtggcagtctcctcagtggagttgactgaagtggcaggccgggggggccccaaggaggccagcacggtgaggtactggttgatctgcagcatggcggcgtccagcagtgtgtggatgttacgcaggctctgcagccgggcctccaggtgctgccgctcatggccctccagagctcgtagctcctctggggtcagcccagcaaagcccgcagggggcacaggcattggggggaaggcaaagggtggaggcaggggcatacccatccagggaggagggaaggggaaaccaggggcagggccagcctctggggcagagccagagcctgggccagatgctgtggcagaagcagcagtagcactggtgccagcagctgtggttgtagctgctccactgggccgagaaagggctgctgcactggtggatggaggagccacagcctctcctgagctggggggaggcgggacaggtggaaaggggcccatggggggccacagtgggaacatgcctggaggaaaaggaggcaggaggccctgggggactgcagagagaagacggaggtaaggaaagggccaaatggacacagacccaactcccaggcagggggcctggctattgagagctctgtcctattcccacaggccctcagcccagcactggtcacactgactgcaagcatctatttctcatcttttaatccctccctggcccagactgagattctggagggcagggacttacaatttcccagcatctccacatccgtactaaccggt

SEQ ID NO: 98402 - DNA, 1089 bp, Homo Sapiens
  misc_feature (178)..(178): n is a, c, g, or t
  misc_feature (188)..(188): n is a, c, g, or t
gggcccttggccaagactttttttgggggagagaatctttgggggaggcccttttttcccggcccaagccctttgggccggccccctatgaaccccccgggtagtccccaaaggttccccttgggccaggtatccagtgacgatgtagagccccgcccttctccttccaggatcacgncccagggagntgcaccagggtgctatgcgccagttgcgtcatgactgaggcttcagccaggaagccctgggcagtggcgtcgttcttaatgcacttgacggcgactttgttccctcggtaatcgcccagcatcacgtctccgaactcccccttcccgatggtctgcagcagcttcagctccttcatgttcagggcccagccgctgcggtagaactcatcctgggccgccactgtgccctccatgacctttggtttaatgaggcgcgtacagagtccatctgcgtctgaggtgtagtgctccaccagctgcatgaggttctcaaagtacacctcctcgtcgatgctgagcttgctggcatggtacatgatgcggtagtgctccaccttgccgtcgcagctcacgcacagcgtgtagtctccggggtagttggtgctctcccgcaccaggaacaggcctgtctccggcgggtacagaagccgctcagcctgctcccgtgtgatcttgccgtggaaccaaggcatgaggctgagtttggtacccgccttcacgccctcccgcttctggacgtagttggctgggatgatgccctcacggcccaccttgtttttggctttgtaccagttggggtccttggtgacggccacaatggtgagcacgtctcctttgcagaagggcaggtcctgctcggcagtgccgtggaagttgtacttggcaatacattctgtaccggatggccaggcggcctgtattgctgacatcttctcaggagctctggcgtccccgagtcacagtaaagccaacctgtcacttggtaccattagagctctcttggggcactgcggtccgggccacctcgccgcgggcggcatcagcggcctgcgggacggtccatggaggctatcagcgcgtt

SEQ ID NO: 98403 - DNA, 676 bp, Homo Sapiens
ctactcatcaccaccagctctccttaatacatgagcaagagtgggtcaggggagaaggaaaagaggtcaacatgaagctaaagcagcgagtcgtgctgttagcaattctccttgtcatttttatcttcaccaaagttttcctgattgacaacttagatacatcagctgccaaccgggaggaccagagggcctttcaccgaatgatgactggcttgcgggtggagctggcacccaagctggaccataccttgcagtctccctgggagattgcagcccagtgggtggttccccgggaagtgtaccctgaagagacaccagagctgggggcagtcatgcatgccatggccaccaagaaaatcattaaagctgatgtgggttataaagggacacagctgaaagccttactgatacttgaaggaggccagaaagttgttttcaaacctaagcggtatagccgagaccatgtggtggaaggggaaccgtatgctggttatgatagacacaatgcagaggtagcagcctttcacttggacaggattctgggtttccaccgagcccccttggtagttggcagatttgttaatcttcggacagagatcaaacctgtcgccacagagcagctgttgagcaccttcctacctgtaggaaacaatacttgtttttatgggaagtgcta

SEQ ID NO: 98404 - DNA, 1331 bp, Homo Sapiens
  misc_feature (240)..(258): n is a, c, g, or t
ccgactggacttggaagcgcccgagccccgcgccgtagccaccaacgggctgcgggacaggacccatcggctgcagccggtcccggtaccggtgccggtgccagtcccagtggcgccggccgttcccccaagagggggcacggacacagccggggagcgcgggggctctcgggcgcccgaggtctccgacgcgcggaaacgctgcttcgccctaggcgcagtggggccaggactccccannnnnnnnnnnnnnnnnnntcctgcgccccagagccaggcacctgggggcccagaggcacagcctttccgggagccgggtccgcgtcctcgcatcttgctgtgcgcaccgcccgcgcgccccgcgccgtcagcacccccagcaccgccagcgcccccggagtccactgtgcgccctgcgcccccgacgcgccccggggaaagttcctactcgtcaatttcacacgtaatttacaataaccaccaggattcctccgcgtcgcctaggaaacgaccgggcgaagcgactgccgcctcctccgagatcaaagccctgcagcagacccggaggctcctggcgaacgccagggagcggacgcgggtgcacaccatcagcgcagccttcgaggcgctcaggaagcaggtgccgtgctactcatatgggcagaagctgtccaaactggccatcctgaggatcgcctgtaactacatcctgtccctggcgcggctggctgaccttgactacagtgccgaccacagcaacctcagcttctccgagtgtgtgcagcgctgcacccgcaccctgcaggccgagggacgtgccaagaagcgcaaggagtgactggctgcaggcaagaccaaggccaccactgtgggccctccttccagtcaggcctgaggacaaggtgagctcgctgagtccagcctcgtggtcttctccaagatgccgccagatgcccagcctacagcctctcagggtcggatcggagcacgcctgcctccctctcccctccgccctcacccagccaatccgaggctgcttcgcactttgccctctgcctggtggggaggggagagctcagcccccgactcactcagaccccaaggcccactgtccagctgcagaaattcgttgccaaagattggacagagacaccgaaggaaatggggtgatgaaaccccacagcgaaaagccacaccgttgctcctgtgactttttgctcctcctgtttgccctgaggccccatctcaagccaaagatgagtcagtgggttctgctaggaactcatgcgatggctgggcctttcgatgacccctgggggtcctcttggccc

SEQ ID NO: 98405 - DNA, 821 bp, Homo Sapiens
  misc_feature (768)..(768): n is a, c, g, or t
cttgccgccacatcccgggtggctctggggctctgaactctgacctgtgaatagaagcagcatgcactttggaaatccggccttttgaccagaacgcacacctcgtcggggggcccagtccagccaccccccagcactttatgtagagagtgtgacatagacctgcatatttgtcagtgccatgatggaagaagctgagcatgtcttaccaaaaacagagagaacgagcctgaatacagcagatgtaggggacagccgtgggaccgcgtgagaattgaagcggtggggttcccgcaccctgggctggctggtggttttctcgggaagcaggaccctcctgactggtgctcttcctgtgagcggatagagtgatagactgggtcgtgtgtgagacgcatgtgctccaccccactccttttgggggaagccaggcaacagtggcctctgggagggggtcaggaagaggcgaacagctcaggcagcgcaggtgtgatgggcacagtacgcagagcaagctcgggaagttggtaggatctcaggcttggggccgggactctggagtgaatccccatttctctaccggcttgcttggagtttggacagaagcatttcacctctgatctcagcttccccacctgtggagtgggtttagtgacctgagtcactagggaatgtcacctgaatgcacagcccagcccatgcacctgccccagcccctccagctttggagccaaggcatcgttccagcacttgactgtcctcgacggnctgttccagacagggcgtttgttttggtcatgccttccctcctgcacgcacac

SEQ ID NO: 98406 - DNA, 683 bp, Homo Sapiens
gggctggccgggcgcaacgatccccaccccgggactccagccccggccgtgcgcgtcgccgcggacgggctctgcgggccacggggaaggtgcgaggaggcgcgagcaggctgtgagccgctgggcgctcccgcgagcccgctcctctccgtcgggagcagggcaaaggcgccaggaacagggcagaggcacagcgcccaccgcctctgcggccgcctgatgtgcgagcagcccgcgacgaggcagtgcacgctcagacgccccgctcctcccgccagcgcgcggcctcgctcctcctagaggacgctctctgcgcgggccctcggaggaggcggcggcggggcgagctgcagcgccgggacaggaggtttgtccccgcccgcgcgccgtaccgcggcggagatgggcgagaccatgtcaaagaggctgaagctccacctgggaggggaggcagaaatggaggaacgggcgttcgtcaaccccttcccggactacgaggccgccgccggggcgctgctcgcctccggagcggccgaagagacaggctgtgttcgtcccccggccaccccggatgagcccggcctcccttttcatcaggacgggaagggtccacattccacagagagacacaattttgtgggtatagcccggcctggattttagtcgtctgtagtcgtgacttg

SEQ ID NO: 98407 - DNA, 1212 bp, Homo Sapiens
  misc_feature (695)..(726): n is a, c, g, or t
  misc_feature (745)..(756): n is a, c, g, or t
  misc_feature (1144)..(1144): n is a, c, g, or t
ctgcctcccgcgactcccggcgccggcggtctggccgtgcgcaccttcgtgtcgcacttcagggaccgcgcggtggccggccacctgacgcgggccgttgagcccctgcgcaccttctcggtgctggagcccggtgggcccggcggctgcgcggcgagacgacgcgccaccgtggaggagacggcgcgggcggccgactgccgtgtcgcccagaacggcggcttcttccgcatgaactcgggcgagtgcctggggaacgtggtgagcgacgagcggcgggtgagcagctccggggggctgcagaacgcgcagttcgggatccgccgcgacgggaccctggtcaccgggtacctgtctgaggaggaggtgctggacactgagaacccatttgtgcagctgctgagtggggtcgtgtggctgattcgtaatggaagcatctacatcaacgagagccaagccacagagtgtgacgagacacaggagacaggttcctttagcaaatttgtgaatgtgatatcagccaggacggccattggccacgaccggaaagggcagctggtgctctttcatgcagacggccaaacggagcagcgtggcatcaacctgtgggaaatggcggagttcctgctgaaacaggacgtggtcaacgccatcaacctgggatggggggcggctcctcccgcgccagtgcggcnnnnnnnnnnnnnnnnnnnnnnnnnnnnnnnntcgccgagtgttggccgannnnnnnnnnnncgccccgtgccccccgagcttggggcagcggaccggcaatgccgacgttgaggatacgtgacgcggcgtggggcgatcctcgccgttctgcggggtgccctctctcggagtgggcgcccggatctcacgtcttatgggtagaggatcttgggtcgggtcggtgtgcatgcgtgtgtcgcaggcgtgtgccggctcggcggacggtttcggggggcggcgcggcgaacgcgcgacgatgtggtacgacaggtcttaagcatggtgttgtcccattgtccgcggtgctgcggcctggctcctgcacggcgctgcgtgtggcggtcgcagctcgtcgtatagagtgcacggcgggagtcttcgcgggcggcgttccgggcgccgcgccccngcgcggtggcgcgaccgcggcaccgcgcggtgtctcgctgcgctacgcgacgcgctgtggcatcgcct

SEQ ID NO: 98408 - DNA, 1108 bp, Homo Sapiens
  misc_feature (112)..(112): n is a, c, g, or t
  misc_feature (781)..(781): n is a, c, g, or t
  misc_feature (819)..(819): n is a, c, g, or t
ggctggtaccggggtccgggaattcccgggatcccaaaccccatggccttttcatgcacggagacaggcctctggatgtgcagccttgccaccccctgccccaatcctcccntgagagctcctgcctcagtgccctgggctggtgagggagaagcctgtctgcacctgcctaattccagctcctccaggaagcaagggcttgtttgtcagagctgcagggttggccactcggtggggaggagtcagccaggattagagagcctgcccctaatccggcctgctgggttttacaaggatcagagctgctgataatgaacctcattaagggggagcaggagcctcaatccgatttggttttctctttgacatcttcactctgctcagatggcctgggtgctatgtggagcaggtgggatgccaaggccactcctgctatggggcagctggggctggggagggatggcagtctccctgcatgtttccctcgacctctttagctgcagcgccttgctgggctcctgggttggactccctctctgtgcccctgctccaggcacccattggctccatcctcctggttgtgctctgcaccccctgctcccttgggctggccctggctgggggcctgagagacagacaggaacccacaatcaggaggcaaccctggcctgcaagaggaagacagaggctcccagggccggtgccctgtgtgcccactgcaccaaggccgctgaataagcctgcccttcaccccctaagggctccttgcccaatgccaagntgctggggaatttctgtcagcaagccctgtggctccangtgacggtatttctaaagccaaacttagttacctagaattagcgccatgttggaaaacactgtcgcagcagccccgggctgcacagtggtgtagcccagcctccaggtcccacgggaatgggtgggggaacttcccaccttaaaggctgcctcctggcaagccaagcctctttttcgcccggcccccaaccccctctggggtgaaaaaacggggtgggggcctcccctcaacagggtggggctggccttttcaccctggaatttcccccagggggctcctcgggaaaaa

SEQ ID NO: 98409 - DNA, 1103 bp, Homo Sapiens
gagcggtgccgtgcggctcgtatagtgtctagcgtcgcgccgcccttgatttctgcggccctgttcgttgacctccggggatagtggcgctctttcggtcccacccgtgggtgggccgccgaacgggtgtgtttggcgggttcccgcgaccccccagggtcgccggatcgtctgcccccgttctttgtgggttgcgggccattggcccccggggtgcgaggctgggtggcctttttggttttccccggggcgagggggttcccatggtcagggtgggcccccttggggaagctacgggtggagcttttgggggtcctgggaatcaggccgtttttcctggccccccgattgttccctggatcgccgtgcccagcacggtgcccagcacttccacagtcatccgataggcggtggcagaatcccgctcagtctgctcggtgctgatgaacatggtgagagccgagtagggaacatggaaacacgtgaccattgtttcaaagaggcaatagaaaagcaggtaccaataggtctggccgtgtgggaagtcgggcacgaaccagatgaggaagtaggcaatgacggccaggggcgtggagaagatgatccagggcataaggcgacccaggcaggtccagggggatttgctgatgcagaggcccaccagggggtctgtgatggcatcccaggctcggcccacaaacaggatgatggaggcagagaaagggcccacctgagccacatccaataggtagatctgaaggaagaaacccagggcacagcccgtcacctggtagggggctcccccaagtgcatagcaaagcttgttgcaaacagacaactgttgtttcttctttttcggttctttcttcacctgggccgggcgttcagtgctttggaggatgctggtgggtagcagccccgccgcggagccgctctcggcgccttctcctttggccatgacccgcgggccacgccgcttgggacctggtagacgggatgctcctctgccccgcaggccgctgctcctcccaagctcgcttcgtagcagcacttagccacggccagccgcgcagctagccaagccacgcaacccacaagccacg

SEQ ID NO: 98410 - DNA, 668 bp, Homo Sapiens
cgccttcagcctgtttcccaggaacggtccccggcttcgcgccccaatttctaacagcctgcctggtcccccggggaacgttctaacatccttgggggagcgccccagctacaagacactgtcctgagaacgctgtcatcacccgtagttgcaagtttcggagcggcagtgggaagcatgcgggactacgacgaggtgatcgccttcctgggcgagtgggggcccttccagcgcctcatcttcttcctgctcagcgccagcatcatccccaatggcttcaatggtatgtcagtcgtgttcctggcggggaccccggagcaccgctgtcgagtgccggacgccgcgaacctgagcagcgcctggcgcaacaacagtgtcccgctgcggctgcgggacggccgcgaggtgccccacagctgcagccgctaccggctcgccaccatcgccaacttctcggcgctcgggctggagccggggcgcgacgtggacctggggcagctggagcaggagagctgcctggatggctgggagttcagccaggacgtctacctgtccaccgtcgtgaccgagtggaatctggtgtgtgaggacaactggaaggtgcccctcaccacctccctgttcttcgtaggcgtgctcctcggctccttcgtgtccgggcagctgtc

SEQ ID NO: 98411 - DNA, 704 bp, Homo Sapiens
gacatcttcttcagaatcacttcttcgacagccttgattagtttccgggtttcagacttactccaagcaccacgatttctttgactgctgatctgtgagaacttgagggccacggagaggctacttcgggccaccatctcaccaatcgtcttccagtcattcccaaggagagaatggtacatctttaacttctcagtatctccttcgctatacctgcctttgtaattgttgacatcgaacatcttctttgctcgatagtatataagtttccagggccgggcaatgttcctaccaatgtgtaatctaaacgagtatctcctttttaagttggtgatcacagatttttcctcaggatatctgtccgtgtacaggagcttgtctgcactctcaatgcctgtcagggctagaaagtcttccacatttttctctaactgcttattttcctttacagaaaacttgccaaatttaatagcgacaccttgtgctttaaattccttaaaccgttccaagtcgtcccggtacatccgcttgattgtgctggtggccctgtccttgatgttaggaatgaactcctgaagctgtttcacggcagaacccaaatccgcatctgaatcatcggcatctcctgaatctgcagataagtatcttatttcggaatcttcagctgtttccacattgtgttcttcatatgcaggttctaaccc

SEQ ID NO: 98412 - DNA, 805 bp, Homo Sapiens
gggaacggcgagcgcgtggagccaagaaagaatacctcctctgaaaaatggcagaagcagttttccatgccccaaagaggaaaagaagagtgtatgagacttacgagtctccattgccaatcccttttggtcaggaccatggtcctctgaaagaattcaagatattccgtgctgaaatgattaacaacaatgtgattgtgaggaatgcggaggacattgagcagctctatgggaaaggttattttggaaaaggtattctttcaagaagccgtccaagcttcacaatttcagatcctaaactggttgctaaatggaaagatatgaagacaaacatgcctatcatcacatcaaagaggtatcagcatagtgttgagtgggcagcagagctgatgcgtagacaggggcaggatgagagtacagtgcgcagaatcctcaaggattacacgaaaccgcttgagcatcctcctgtgaaaaggaatgaagaggctcaagtgcatgacaagcttaactctggaatggtttccaacatggaaggcacagcagggggagagagaccttctgtggtaaacggggactctggaaagtcaggtggtgtgggtgatccccgtgagccattaggctgcctgcaggagggctctggctgccacccaacaacagagagctttgagaaaagcgtgcgagaggatgccctcaccttctggccccatggtctgttggctgcaaaccaaaatgcttctcctttcttccagccgtggggccttccatcaatgaaagacgggcagcccaggcaacattcgggccctta

SEQ ID NO: 98413 - DNA, 482 bp, Homo Sapiens
aggaagctcttcagcctctcgcagtagccgacttcatactcgaaggggccgcagtaattcaccaccgtgttcatccagtgcatgtagatgagctcctccgacacagcagcctccaccacaccggctgcataggcctgcaagctgtcattgtattggccacttgtgcccagctccaggaaggcccacccagtctcgcggatggcgttggtgaggttggcccaggccacggcgtcagggtggcgtccgtccaccataagcagctggcccagccgagacgtccaggagcaccgagcggctgcgggaggctggagggacctgcccatcgcgcgcccagcggccccccggcgctgggatcgcccccgccaggccgctcaggaacaggcccgaccagcagggccagcaccagggcacagcagccagccgcccgcagtcagcgacccgggccaggtggctaccggggtagcagtacatctggcccacca

SEQ ID NO: 98414 - DNA, 914 bp, Homo Sapiens
tggttccacatgtcttctcgggccaccatcacggtatactctgcccgtggcttgtctgataagtcctctatgtccgaatactttttggatgttgttcatgagatcctccgttggctatgaccacggaatggagagggtatcagcaatggctttgatgactttcacagctgacaggatgctgaggtcgctcgctcccgcttcctcccatgaacttgcgatggcagcaaatggccagtcctctctatccgcttcacaaggctcagggtatcttctagcgatggcaggatgcgaatcttgcaggtcacaggtctgcgtgtccctttaacaagagtgctgaggatcttctcaatcttgtcagggtctgacagcagggcagctcccattcctcccttggtggaatattgttttggacagcccatgttgacatcaataccagccacatcattttctacaagcctggccacagcaagggctcgctctgcgtctgaagtccccatctggaagaccaccctgttctgctctctttcacaggtgcggaagacaactcgatcatcaggggcgacaaagtccactgtgctgagcacctcattaacaactctcttgcactgaatcatcttgaggtcgatcagctcctcacagtaaacaatgtccgctccataatccagggccagcagcctcattggaagagtccctacccgaaccattggggccaggattagcttattatggtaacacagagagaggctattcaaaatcatttcctcctctgttacagcctattattttgttctgatacttcaggattactttgatatatgtgttctggctttgtacagagtaattctttgtttgatatctcgcagctgaactcttaaaaagaacctcgcttcttcctccacggtgctccagctcct

SEQ ID NO: 98415 - DNA, 1043 bp, Homo Sapiens
  misc_feature (890)..(890): n is a, c, g, or t
  misc_feature (898)..(899): n is a, c, g, or t
  misc_feature (901)..(905): n is a, c, g, or t
  misc_feature (919)..(919): n is a, c, g, or t
aaggaagcgaggcctgggtggcgaattcggcacgaggctccagagtggcggtggccggctagacagggtatcgctcccctggggaacttgggtaagtccataaatagctctgctgacacaaaggagctctgtctggggaaggcagccgcttgacacggccgccaggagctgccacagccacggccgcccgcctgcgggaggagccgggtggaaacctgggcgggcgagctggcaggagcggcagccaggagtcgcctgggtccctgctggagtatgctggatgtttgagacggaggcagatgagaagagggagatggccttggaggaagggaaggggcctggtgccgaggattccccacccagcaaggagccctctcctggccaggagcttcctccaggacaagaccttccacccaacaaggactccccttctgggcaggaacccgctcccagccaagaaccactgtccagcaaagactcagctacctctgaaggatcccctccaggcccagatgctccgcccagcaaggatgtgccaccatgccaggaaccccctccagcccaagacctctcaccctgccaggacctacctgctggtcaagaacccctgcctcaccaggaccctctactcaccaaagacctccctgccatccaggaatcccccacccgggaccttccaccctgtcaagatctgcctcctagccaggtctccctgccagccaaggcccttactgaggacaccatgagctccggggacctactagcagctactggggacccacctgcggcccccaggccagccttcgtgatccctgaggtccggctggatagcacctacagccagaaggcaggggcagagcagggctgctcgggagatgaggaggatgcanaaagcagnnannnnntgggagggaagggnaaaaaaaggggaagaagaacccaggagagggacccccgccgaaggccaccaacggaaaagcccccggggaggcccacggccgcaaccaatgaccgagaaggggcccagggggcagaagggcggg

SEQ ID NO: 98416 - DNA, 617 bp, Homo Sapiens
gagcgtcgcggggccgcccccgtcctgccgtgctctcgccgagcctcctggcgcgcccgggcccgcgacccccgtacccagctccgcaggaccggcggtgcgcgcgcgggctctggaggccacgggcatgatgcttcgggtcctggtgggggctgtcctccctgccatgctactggctgccccaccacccatcaacaagctggcactgttcccagataagagtgcctggtgcgaagccaagaacatcacccagatcgtgggccacagcggctgtgaggccaagtccatccagaacagggcgtgcctaggacagtgcttcagctacagcgtccccaacaccttcccacagtccacagagtccctggttcactgtgactcctgcatgccagcccagtccatgtgggagattgtgacgctggagtgcccgggccacgaggaggtgcccagggtggacaagctggtggagaagatcctgcactgtagctgccaggcctgcggcaaggagcctagtcacgaggggctgagcgtctatgtgcagggcgaggacgggccgggatcccagcccggcacccgaccctcaccgcgaatcaaagcaccactcggagaacggggccaag

SEQ ID NO: 98417 - DNA, 758 bp, Homo Sapiens
gttgcacgtcaggaagaagcccagggcgctgttcctcacatcactggatgcagccaagtccaccaatgagccaacggcgctgaccgtcccgcccatggctcctcctgatatcagtgcctgggagttcctcataggaaaggagccggtcatgccgtagatgctgctgctgaagacagtggaggcaccgctgaggatcaccatgcagacaatggtgaccgcaaaaaagccacgggtccaggagaaagtgtccaccttcaccagtgcagttatcaccatgaagatggccaggatgaccgtcagtgaggccaggacacggatgtggactgcaaccctgttgacaagcaggaagttggccaccaggcacagcatggagggcacggtggaggcaacggcaaggtagctctcaaagtagttcaggatgtctgagccctcagggtcctccccggtggctgggctggaggagttgcggagtttgaacatccagtactccttggcagtgataaagaagttccatggcagtagactgccaatgcccaggctgaagaagatgatgtatgtgccacagaagcggtcctcgggcctctgcaggccagggggcgggcggtccagcagcttctcaagcagtgcctcctggtctagctcggagactgctgcttgtggttctgtaggtggagtttgaactgtgctgaaagtcctcctctgagacaacggccatgtcgccgctgcgccacgccgccgctgcctccggcgcacggcca

SEQ ID NO: 98418 - DNA, 1045 bp, Homo Sapiens
ggaggaggtggctccagagatggcagtgagcgagaggagggggctcggccgcgggagccccgcggagtgggggcagcggctacttctggtgctgctgttgggtggctgctccgggcgcatccaccggctggcgctgacgggggagaagcgagcggacatccagctgaacagcttcggtttctacaccaatggctctctggaggtggagttgagcgtcctgcggctgggcctccgggaggcagaagagaagtccctgctggtggggttcagtctcagccgggttcggtctggcagagttcgctcctattcaacccgggatttccaggactgccctctccagaaaaacagtagcagtttcctggtcctgttcctcatcaacaccaaggatctgcaggtccaggtgcggaagtatggagagcagaagacgttgtttatctttcccgggctcctcccggaagcaccctccaaaccagggctcccgaagccacaggccacagtcccccgcaaggtggatggcggagggacctctgcagccagcaagcccaagtcaacacccgcagtgattcagggtcctagtgggaaggacaaggacctggtgttgggcctgagccacctcaacaactcctacaacttcagtttccacgtggtgatcggctctcaggcggaagaaggccagtacagcctgaacttccacaactgcaacaattcagtgccaggaaaggagcatccattcgacatcacggtgatgatccgggagaagaaccccgatggcttcctgtcggcagcggagatgccccttttcaagctctacatggtcatgtccgcctgcttcctggccgctggcatcttctgggtgtccatcctctgcaggaacacgtacagcgtcttcaagatccactggctcatggcggccttggccttcaccaagagcatctctctcctcttccacagcatcaactactacttcatcaacagccagggccaccccatcgaaggccttgccgtcatgtactacatcgcacacctgctgaagggcgccctcctc

SEQ ID NO: 98419 - DNA, 1575 bp, Homo Sapiens
tgtttcctgcagccctggcccagctcggcctctcctgctgcggctgtgcttcaccaagcgaagccccgccggcccacggctacttctgttcttctgggagggcccggcagtggctccggtagagccctggggcgagggctcgggctcccagagcaggaaattcgtggagcagcgtgttgaccgtctcagggcattccagcaatcaccatgtggctgccctcgtcgatgagccttcaggaatgccaggagcaggatctcggccatgcgctggtcttcctccaccggcacaaacttatcgtgcatgccgtggacaagcaggacgggcacggtgagctcggcgtggtagacctcgtcgccctcgggccagtactggccgctcatcatggcccggagtacgaaggatgacacgttgaaagcgttgccctcctttaacagctgcttctccttggctccttggccgggcgaagccggcccttgaggaagcttccaggcccaggcagggcgacaaagcagtgcaggacgcagggtgggcatgttgaagattgagcagaagctgggctcccagcgccgtaggccccccgccattgatcatgatcaccttgtgcactaggtctgggtactcatgtgccaggaatgtgcagaaagagacaccgtaggaatggccaatgagcacatttcgcttcttggcatagcgcttgaagattgctcgcatgtcctcagccagcgcatagaaggtgtaggctgcggccacctggggcgcagagctggccccgtggccggccaggtcaggagccaccacctcatagcctaggcgcacaaagaagtccagctgctccttccagatggccagggaaccgccgacaccatggatgaaaaagagcaccacgtcggcctgggcgcctttgcagctagtgatgcgcttctcacagtcaatatggatggtcctcttggggcgcctggctcaccgccgccgcccaccactgccactgccgctgccgctgcctgcgctgccgggggccaagcggccatcgctgccacagccaggatctgccagctccacctccagggcggccggcggctccccagagccattctgcccgtgtaggaggtcggctcgaggggctcggcccaggttttccaccagcaaccgcccattgcggtacacggtgatccggcgctgacagcggaccaagccggagaggtccccctgggctgcatccgaggatgcggatgatggtggagttgggctagcggctggggcgggtcctgcatgcttcacccgcagcacgcggccagggcttgacctcgtacaaaggtgtagccatcgctggactcgacgctctccagtggccccacggcgttggggggcgtgcccagcaggcaacagaagataccgtcggtcaccccggtcagcatggtgtgtcctcatcgagggccgcggggcccagggtcggggcaggaggggtcccaggcggagaagccagcgtccgcctgctggcgccgtttacatggtggcgcggggtcagtccgggtgcgtctacgcgggcgggcacctgcacctggcggtcagcgcag

SEQ ID NO: 98420 - DNA, 1386 bp, Homo Sapiens
  misc_feature (857)..(857): n is a, c, g, or t
  misc_feature (963)..(974): n is a, c, g, or t
agaggggggcgaagaatccaaaacggtcctaagtaacgaggcctgggtggcgtatccggcacgagggttggctttctcctttcaagaacgagttattttcagctgctgactggagacggtgcacgtctggatacgagagcatttccactatgggactggatacaaacacacacccggcagacttcaagagtctcagactggaggagaaagcctttccttctgctgctactgctgctgccgctgcttttgaaagtccactcctttcatggtttttcctgccaaaccagaggcacctttgctgctgccgctgttctctttggtgtcattcagcggctggccagaggatgagactccccaaactcctcactttcttgctttggtacctggcttggctggacctggaattcatctgcactgtgttgggtgcccctgacttgggccagagaccccaggggaccaggccaggattggccaaagcagaggccaaggagaggccccccctggcccggaacgtcttcaggccagggggtcacagctatggtgggggggccaccaatgccaatgccagggcaaagggaggcaccgggcagacaggaggcctgacacagcccaagaaggatgaacccaaaaagctgccccccagaccggggcggccctgaacccaagccaggacaccctccccaaacaaggcaagcctaccgccccggactgtgaaccccaaaaaggaaaagccttccccgggaaggcaaaggcccacccccccaaaaagacaaggaaatctgatccccccagaccttcacttttccttggcttggaaacaaaagggcccacaaggggaaaagccccccggggtgccnccccccgacactgaagggaaatcgccccacaagggacggagacccccggttttttttacgcagccccacaaaacatcccagcgactacccatattcgctacaaaannnnnnnnnnnnacggagaaagggtaaaccccctgggccctatcccttcacagagcctggggcaacacacccgggggaacgcgcccttgggttctcgcggaaaagtgggtctgtgaggccccgctacaaccagggggggaaatgggctcaaatgcaggaaccctaaaagccgcccggtataaaatttttgtggaacgagggtccttgggactcctcgcgtgcgtcataaaaaaagcagaatacataagagggaagactttttttgttttgtggaaacccaacaagtggggccccaaatacaaaataataatcccgcaagatggccccacccccctgggggggacaagtggtaaaaagcccactagggaggggttacagccggggcgttggggggacgccgtgtaagaagtgcgccccccttggg

SEQ ID NO: 98421 - DNA, 657 bp, Homo Sapiens
cgccctaggtacctatgaacagtgttcaaaaagcaggctgtaccggtccggatatcccgggatatcgtcgacccacgcgtcgcaaggcctgaaggagcccatgtggttggataaaatcaagaaaaggctgaatgagcacggttacccccaagtggaggggtttgtacaagacatgcgcctcatcttccagaaccacagggcctcttacaagtataaggattttggccaaatgggacttagactggaggctgaatttgagaaggatttcaaggaagtgtttgctattcaggaaacaaatgggaacagttgactggtttagtggatgctgaaggccttcaggaaatatgctactggttgccactgacttcaaactgagagcacttgggaaatagcacatgcagggagaggcttttctctgagcctccctcatctgcccaaaaacaaatcctcaaaagaaatttgatcatcatgaatcccatccccaagaatctcatcaaccagggaagaggaactgagatcacagggaaggagattggaggtgataccagcatcagacagactctcacctcttctcctgaggtctgctccagacaacatttattactcacaagacctttttcctccgttttttattgagatggagtctcacacagtcac

SEQ ID NO: 98422 - DNA, 1124 bp, Homo Sapiens
atgaacaggcaattcagtacccagagcttgactggagacactaatcaggattgaagtcttgatgcagttcataaaaacccacttaaaaaaaggcatcaaaaaccacatttaaaataaagctgtccatatataaagaatgaagtgtttagaagttcccagcttgtatcctaataagagtactgaaaggtttaatattagcagcctgtgaacacgtagtgaagaaagagtctgagaaccaagttaacatccttattccactctaattccacccatgccatgggtaaaaacagttcttgcagtctagagtttctcctccgatggtttaaccatcagatttttacatcttgggagttcaaccaatcttggcaagcgtcgttcttaagtctcaatgctgtgagtctggaggctggattgtgggcccagcattctgacattagctttcaaaactgctcgtagacattcatcactgttccaccgattagacacaattgctcgcaaacgtttgacacacacaacctcacgcatatcttcgtatgacggatcactcggtaccatgttgtaatatggcagttggtattcttccacgatccctcctgtgatacaacgacgagccatctcccaaatgattaggccgaagctgtagatgtcagccatgatgtagggctggaagtggtttttgttcaggctttcgtccagcacttcgggagccatgtagcgtttggtgcccaccctggtattcaagggcacatcaacttcatttgtgtcactgttgaatttaacagcaaggcccaggtcagcaatgcagcaactcccatttttcttgatgaggatgtttttgctctttaggtctcgatgagcaattgcgggctttccttgggtgccataaatttctgtgtgcaggtggcacagaccacaggcagctgaataagccaatttaagcagggctctggtgtccagtgtagcacatttcaggaagtcatagagagatccattttcatggtaatcagtaatcaaatagagctgagtccaggaacctgtacctcttaatgtctgccgctatgaaaccaagtatgttttcatggcgcattagcacagtttggtagatttctgtttctcgaaaccag

SEQ ID NO: 98423 - DNA, 924 bp, Homo Sapiens
tgtacggtcggaattcccgggatatcgtcgaacccacgcgtcggttggggccgtcgaggcggcggcgactctgcgtccccggctcctgatggaggcggggccgcatccccggccggggcactgctgcaagcctggggggcggctggacatgaaccacggcttcgtgcaccatatccgacggaaccagatcgctcgggacgactatgacaagaaggtgaagcaggcggccaaggagaaggtgaggaggcggcacacgcccgcgccgacgcggccccgcaagccagacctgcaggtgtacctgccgcgacaccgagatgtctctgcccacccacgcaacccagactatgaagagtccggtgaaagcagcagtagtggaggctctgagctggagccttctggccatcagctcttctgcttagaatacgaggcagacagtggagaggtcacatcagttatcgtctatcagggtgatgacccaggaaaggtgagtgagaaggtgtcggcacaccacgcctctggatccacccatgcgagaagccctcaagttgcgtatccaggaggagattgcaaagcgccagagccaacactgaccatgttgaaggcgtctctccaggctggattcactgcactcggaagaattctgcccagggaatttaagtgtgggggtacccaggaccagtttgtcttgatctttgaggaccccccagagcgtgctgcatccatagggtgttgccggacttacaccttgggcctgccttgcaggtcattctttcttattttgtgacgccttttgccaggcctggttttctggcgtctttttgtgttctctatcatgggaggcttgggggggcacctgttcccgaccgcactccgggcaccaacatttagggcgcgtcgcattgtctccccggcgtctccggggcg

SEQ ID NO: 98424 - DNA, 1175 bp, Homo Sapiens
ggtacgctcggattccgggatatcgtcgaccacgcgtcgccacgcgtcgaagctgagtaaacaggcccttcctagagtgtcactggaaatcacagtcaacgccattgaaaactgacctcccacaccagaacgtgctacgttctttctgtcatgcctatgtgtgctccattccgtcatttctacttggctcaagaacaacatttctgcagtcaggtgcagactgtttacaaaaagaggcagcaaaatcaatgccatccttgaacatgatgagatgtgagaacttacaaatgcaacaaaggcaatacatgcatagcaaattcatttcttcaggtacagcaatcagttgcataggcatgtgagggtgttaacttggggtgaaagtggaggaaggtcccaggtgcaatcggctctcgatggaaatttggaattaaagcaaatcaaacgtcctgggggttacacaagaataccagatttcaaaagtttgcctgtagagcaaaataaaacagtcagtagtagtcattaatccttgaggcccaacgcagccgatgggtcggtgtaagggaaatttctgagatgggagtgagatctgatcggatcctgggaaggatgtataccaccagttagaacagtgtagggtactgggataccatgggcaagtctagagtgggcggagtgaaaagggacaagcatgggcatatcagtataggcatgtccacatgactaacaggaggattgaaatgatcttatggacacaatattatagagacattcaacgagtaataagaactcacagaaacagagataagatatcagcagcccaggacagcctgagcaccgtagcacggaactcaatgccccacacctgcgcaccaaggcacactccaccaaggcacgcaagcaatacagacaacgcacacgcaccacccacaacccagtgcgccacacaaacagcagaagaaaaagcaagacaaaacagaacacccaaaagacaacaacgatacaaggaacaagaaacgaacaacaaacaaaaacaacgccccaaagccagcggacaagcaacgagacaggcacagcagtacgagtaaagcgcagcagcgcgaaaaagagaagcacacacaacaagaagcagacaacaagacgacaccacccacggtgtaccagctccctacacaaca

SEQ ID NO: 98425 - DNA, 857 bp, Homo Sapiens
  misc_feature (417)..(446): n is a, c, g, or t
ggaaattaaagtgggtataaagcggctggtacggtccggaattccgggatatcgtcgaccacgcgttcgaaaaatggaaggagccctgccgaatagaactctacagagtcgtagagagtttagccaaggcacaggagacatcaggagaagaaatttccaaattttacctgccaaactgcaacaagaatggattttatcacagcagacagtgtgagacatccatggatggagaggcgggactctgctggtgcgtctacccttggaatgggaagaggatccctgggtctccagagatcaggggagaccccaactgccagatgtattttaatgtacaaaactgaaaccagatgaaataatgttctgtcacgtgaaatatttaagtatatagtatatttatactctagaacatgcacattnnnnnnnnnnnnnnnnnnnnnnnnnnnnnngtaactactttttatactccatacataacttgatatagaaagcctgtttatttattcacttgtaagtttattttttctacacagtaaaaacttgtactatgttaataacttgtcctatgtcaatttgtatatcatgaaacacttctcatcatattgtatgtaagtaattgcatttctgctcttccaaagctcctgcgtctgtttttaaagagcatggaaaaatactgcctagaaaatgcaaaatgaaataagagagagtagtttttcagctagtttgaaggaggacggttaaattgtatattccaccattcacatttgatgtacatgtgtagggaaagttaaaagtgttgattacataatcaaagctacctgtggtgatgttgccacctgttaaaacgacactggatatgt

SEQ ID NO: 98426 - DNA, 974 bp, Homo Sapiens
ccagaggaatccactgtgagcttgagccggactgagttcccaaggtcagcaaatggtccgggttctgagacttggtccagctggcctgagagccacaaggggccggctgacctccaggagagaagagggggccttctgtggctggcgtgggggccactgccgacgctgcagtctcggtccaggcagcccatcctcccagcaggtctgggttgctggacgaggctgtcatcttgctgggctctcctggcagatcccccaggtgcaggaagtcggcgctgcaggatgggggcggagagctgtgggcagacgggaaggatggtgggacggtcacagagtccgaattgagaaattcgccgaagagatcaggattggagcagggctgggagttgttgcctgaagacggcagaagcgggccaaaggggtcagcagcggcagggggccctcctcttggggtgctctgcacgctcaggggaggggccgggcttgccaggagcagcgggtcctcgctgagcagatcctccgggggcccctgggaggcggcctcagggggcccaaggaggcagctgagcaggtcggtgttgctggagggggccttgcaggcctgcgggggtacagctggccctgcgcccacctcggagtgcaggggtgactcccaggtctgaggggagagcaggggtgatgcccgagcccaaggggacaagggcgtgagaggagcaccgcagacatggtgactggccgaggggtggctccttccttggggatcctaggggtatagtcggtggttacacaaacatcacttgactgtgcggagctggcggcgtgcttcccacggcacggggaggcctggatgctccacttctattcaccgcaaagaactgtccaggtgacagtgttaaacggactctaggctcttaagattaaaaagttccgttcagccgggcgcagtggctcacgcccgtaatcccagcactttg

SEQ ID NO: 98427 - DNA, 762 bp, Homo Sapiens
ttgggacctatgacactggtcaaaaaagcaggctggtacggtccggaatcccgggatatcgtcgacccacgcgtccgatgagtttctgtccaagctgcaagatgacctcaaggaggcaatgaatactatgatgtgtagccgatgccaaggaaagcataggaggtttgaaatggaccgggaacctaagagtgccagatactgtgctgagtgtaataggctgcatcctgctgaggaaggagacttttgggcagagtcaagcatgttgggcctcaagatcacctactttgcactgatggatggaaaggtgtatgacatcacagagtgggctggatgccagcgtgtaggtatctccccagatacccacagagtcccctatcacatctcatttggttctcggattccaggcaccagagggcggcagagagccaccccagatgcccctcctgctgatcttcaggatttcttgagtcggatctttcaagtacccccaggcagatgcccaatgggaacttctttgcagctcctcagcctgcccctggagccgctgcagcctctaagcccaacagcacagtacccaagggagaagccaaacctaagcggcggaagaaagtgaggaggcccttccaacgttgatgccccttctctttcctcaaatcaaatgtcagggagtcaaaagggctgtagcacaggatggagttgatttatccctcctcccccaaaactaggaactgaatcttttctttttattttgagatggagtct

SEQ ID NO: 98428 - DNA, 557 bp, Homo Sapiens
gccgagaagagccgaagcccgtctacagagagccagctgatgtccaagggagacgaggataccaaagacgacttcagaggagaccggtgcccaaccccttcagccaactcactgaccaggagttggaggagtacaagaaagaggtggagacggaagaaactagaacttgatggagagaaagaaactgctcccagaagagcctggctcacctgcaaagtctgcacctgcgttctccagcgcagagcccagcgaaggaggcagagacaaagagccctttagtctctccttccaagtctttagaggaaggtactaagaagacagaaacaacgcaaagccgccaccacagagcccgaaacaacccatgccggaaggggtggtggtcaacgggagggaggaggagcagacggcagaggaaatcctcagcaaaggcctgagccagatgaccaccagtgtctgacacggatgttgatacctctaaggacaaaatccgagtcggtcaccagcggccccatgtcccacagagggctcaccttcaaagtctccctcaaagaagaaaa

SEQ ID NO: 98429 - DNA, 1282 bp, Homo Sapiens
  misc_feature (949)..(949): n is a, c, g, or t
gcaggctggtaccgctccggatttcccgggatatcgtcgacccacgcgtcgcgatgccaaagaaagcaaagcctacagggagtgggaaggaagaggggccggctccctgtaagcagatgaagttagaagcagctggggggccttcagctttaaactttgacagtcccagtagtctctttgaaagtttaatctcgcccatcaagacagagacttttttcaaggaattctgggagcagaagccccttctcattcagagagatgaccctgcactggccacatactatgggtccctgttcaagctaacagatctgaagagtctgtgcagccgggggatgtactatggaagagatgtgaatgtctgccggtgtgtcaatgggaagaagaaggttttaaataaagatggcaaagcacactttcttcagctgagaaaagattttgatcagaaaagggcaacgattcagtttcaccaacctcagagatttaaggatgagctttggaggatccaggagaagctggaatgttactttggctccttggttggctcgaatgtgtacataactcccgcaggatctcagggcctgccgccccattatgatgatgtcgaggttttcatcctgcagctggagggagagaaacactggcgcctctaccaccccactgtgcccctggcacgagagtacagcgtggaggccgaggaaaaggatcggcaggccggtgcatgagtttatgctgaaagccgggtgatttgttggtactttcccaagaggaaccattcatcaagcgggacactcctgcggggctggcccactcgactcacgtgaccatcagcacctaccagaacaattcatggggagatttccttttggataccatctcggggcttgtatttgatactgcaaaggaagacgtggagttacggaccggcataccccggcagctgctcctgcangtggaatccacaactgttgctacaagacgattaagtggcttcctgaggacacttgcagaccggctggagggcaccaaagaattgcttttcctcagacatgaaggagggatttttattatggcacgaaactcccccctttactcttggcggaaaatggggggcaaaacctggtcaacccccaggggggaaaaagttaccccgaggcctgggaacagggggaaagtggaaaactgggcccgttttaaaagaaaccaccctttgtctccctcccccggataactgggcccgggaatttaaggaaatccaatccttgggaagggaaaaccccttccc

SEQ ID NO: 98430 - DNA, 1283 bp, Homo Sapiens
acgacacacacccatacgcgcctactgtgactatagaacacgtggtttaacacaaagcagcgctggctaccggctccggaatttccgggatatcgtcgacccacgcagtcgaaggatttgaactcagaggatcaaaaagccttcagctgttgaacatacaagctgcaaggaggaagaaaatttcgcaaatatgaaaaagaaggccaaaataggcattcatcacaaaaatagtccccccaaagtcactgttccaactagtggaaatactatagagtctcctcttcatgaaaacatctctaattcaacatcatttaaagatgagaaaatcatggagactgatagtgaaccagaggaaggtgaaattacagactctcagactgaggatagttatgacgaagccattaccagtgaaggcaatgtaactgcagaagatagtgaggatgaagatgaagacaaaatttggcccccatgtattagagtaattgtcattagatcacctgtgttgcagataggatcactctttatcattactgctgtaaaccctgctacaattggaagagaaaaggatatggaacatactctccgaatccctgaagttggtgtcagtaagtttcatgcagaaatttattttgaccatgacttacaaagttatgtccttgtggatcaagggcagtcaaaatggcacaattgttaatgggaaaacagattcttcagccgaaaactaaatgtgacccttacgtacttgagcatggagatgaagtcaaaattggagaaactgtcttatcctttcacattcatcctggcagtgatacctgtgatggctgtgaaccagggcaggttagagcccaccttcgccttgataagaaagatgaatcttttgttggtccaacacttaagtaaggaggaaaaagagttggaaagaaagaaaagaattaaagaaaatacgagtaaaatatggtttacagaaatacagaatacgaagatgaaaagacatttaagaatccaaaatataaagatagagcaaaacgtagggagcaggttggaagtgaaggaactttccaaagagatgatgctcctgcatctgttcattctgaaattactgatagcaacaaaggtcggaagatgttggagaagatgggttggaagaaaggagagggcctggggaaggatggtggaggaatgaaaacgccgaatcaacttcagcttcggcgaaacatgccggctttgggggaaggcaaaccatcctcatttgaaaaatgttcaccgttcccccaagaaagaac

SEQ ID NO: 98431 - DNA, 1785 bp, Homo Sapiens
  misc_feature (169)..(229): n is a, c, g, or t
  misc_feature (317)..(350): n is a, c, g, or t
  misc_feature (373)..(605): n is a, c, g, or t
  misc_feature (788)..(864): n is a, c, g, or t
  misc_feature (1290)..(1290): n is a, c, g, or t
atggtgaatatagaacagcgtttaaacaaagcaggctggtaccggtcggaattcccgggatatcgtcgaccacgcgtcgcttcctgagtagttggtattacaccaccatgcccagctaattttgtatttttagtagagacagggtttcaccatatggtcaggctggttnnnnnnnnnnnnnnnnnnnnnnnnnnnnnnnnnnnnnnnnnnnnnnnnnnnnnnnnnnnnntgagccagcgcacccggcaacaataacatttaataggcatgtctcattctaatgatatataccttctacctagtgggcacttgtacannnnnnnnnnnnnnnnnnnnnnnnnnnnnnnnnngagacagagtctcactctgtcannnnnnnnnnnnnnnnnnnnnnnnnnnnnnnnnnnnnnnnnnnnnnnnnnnnnnnnnnnnnnnnnnnnnnnnnnnnnnnnnnnnnnnnnnnnnnnnnnnnnnnnnnnnnnnnnnnnnnnnnnnnnnnnnnnnnnnnnnnnnnnnnnnnnnnnnnnnnnnnnnnnnnnnnnnnnnnnnnnnnnnnnnnnnnnnnnnnnnnnnnnnnnnnnnnnnnnnnnnnnnnnnnnnnnnnnatgagccacacagctggccgtaaatattttttgaatttgaatctgttttggaagccaaatatgttttggaagccaaacaattaagagaagtaaaattttaaccctagtaggtttcgcagattcatccccagatatgtttttgtttggcttgtgttatcaacaaataaatgagtgtctttcgcnnnnnnnnnnnnnnnnnnnnnnnnnnnnnnnnnnnnnnnnnnnnnnnnnnnnnnnnnnnnnnnnnnnnnnnnnnnnngaaccacaaaatcactacggtaatctcccgccccgcgaccggacatcgcctactaacatccgcgtcgccgccggcgcgcccccgtgagcgcacgcatcgtctgcggattcccgcgtctgtgtgcgtttatcaagttttcatgcatcccgcactcgcgtcgcatgggacagccccttacctccgtgcacatcgcgacccggttcggtgtgcctcgttcgttacattaggtcgcggcggggcgccggggtgtgctgccgccgccgctcttcgtttatcgcccgtgaccgtgtcgatcatattctgaacttcttcctcgcgagcgcagtacggcggtccacctctcatcgactactccatggccgacgtgcctatagaggagtagcgtgctcgcggccgtatttggcgatgcgacaccccgcccgcctntctcccgattcgcgccccggccttatcccacccaccgattcctcactagcgtatcctcccctagcgcgtgtgcactcggcttatcggtattttttctgtgttgcgttatgattccgggcgggtttcgcgtgtgcgtgaggggcggtgtcgtcttgccgcgcgtgacgccccccaaccgcccgctcgctcacagcacaacgcgtgcgggctctgatacccacataaaccccgagccataatgtaactatccggtcaccatgtacatccactcctctatgaccagctgatctatgaggagtgtgtgccatgtatctccggcgagcaccccacgacgacgctccttggccaccatctgacgcacgcacctgcatgcgtgtaccgcccgcgcgcagtggggcggcgcgcgaggcgcgcgggtgttgctcagcgaggatcgcatccgatagtggtatcggcgctcacagcgcacgctgacgcgcgtcatgctgctcgcga

SEQ ID NO: 98432 - DNA, 985 bp, Homo Sapiens
ctggtacccggccggtatcccgggatatagtcgaccacgcgtccgtgctatccttcccatcgtttaaggatgacctgtgtaaagatgatctgacgaccagcaaaggaggagctcactgttttccagaatagcgtgtggtgtatttagaagaaatcgtgcccatggggatcagccccaaaaagatctcctacaagaagcctggaatccatttatccccaggtgaatttcataaagaagtagaaaagtttttatctcaggcaaatcaagaacaaagtgatactatccttcttgattgcagaaacttctatgaaagcaaaataggacgattccaaggctgcttagccccagacatcaggaaattcagttacttccctagctacgttgacaaaaatctagaacttttcagagagaagagagtgctgatgtactgtaccgggggcatccgctgtgagcggggttcagcctacctcaaagccaagggagtgtgcaaggaggtgttccagctcaagggtggcatccacaagtacctggaaggagttacctgatggcttttacaaagggaagtagtatgtttttgatgaacgctatgctctgtcctacaacagtgatgtggtgtcaagagtgttcatactgtggagcccgctgggaccagtataaactctgctctactccccagtgccgcagctcgttttgactgcctgctgtcaagcacaaggatcacaggccgtcgggtcacatgtccagaacacggcgagccagcaagttcaggcctaatgccaagaacagtcaaagaggaagggcatgacagcggagacacgaacccaggaagtgcggagtgaagcgggaccaaacaggccgagtataagcggccacgagtaaacactgcaccccagacggccacaagcggggaccaacaagcgaatacacaaacgaacaaacaaggcaaaagaaggggcaacacagcagcaaacagcagaaaggcaca

SEQ ID NO: 98433 - DNA, 1042 bp, Homo Sapiens
ccggcgcgcatagtgaatatgaacagtggtcaaaaagcaggctgtacggtccggaattcccgggatatcgtcgacccacgcgtcgatgaggtatagacccggctagaatctgaagtgcgggagagtgctggaccctgagtgatggggccggcgccagctggagagcagcttcgcggaggcgatggagagccagaggtgatggaaccagccctgggaggggcacaggcaaagaggggaagaaagcatcctccaggaagcgtacattggctgaacctccagcgagagggcctcctgcagccagtgaagctcagcagggcagaactgtacaaggagcctaccaagtgaggagcttaatcgccttcgggagactgagatcttgttccactccagcttgcttcgtttacaggtagaggagctactaaaggaagtaaggctgtcagagaagaagaaggatcggattgatgccttcctacgggaggtcaaccagcggggttgtgagggtgccctcagtccctgagacagagctcactgaccaggcatggctcccagctggggttcgagtgcccctccaccaagtgccctatgccgtgaagggctgtttccgcttcctgcccccagcccaggttactgttgtgggcagctaccttctgggcacctggcatccgaccagacatcaatgtggatgtggcactgaccatgcccagggaaatcctacaggacaaggacgggctgaaccagcgctacttccgcaagcgtgccctctacctggcccacttggctcaccaccttggcccaggaccccctccttggcagtgtttgcttctccttaccaattggtgcacttgaacctcatgtgtgggcgcaagagatcctcggggggcaacttacgcgtccgtttgtcaaagggccatggggcggttacgagcagcgcgtcacggcgctgggaacgggctgggtttgagcgccctggggatgcgcccggagccggtaattgtggcactcctggtattcgattaataagcggcctatacgcatcggcggc

SEQ ID NO: 98434 - DNA, 1063 bp, Homo Sapiens
tgcatgtgactatagaacagttagttcaaaaagcaggctggtacggtccggaattcccgggatatcgtcgacccacgcgtccggtcagctgcaccaacaaaaacctgtccaaggtgcctgggaaccttttcagactgattaagagactggacctgagttataacagaattgggcttctggattctgagtggattccagtatcgtttgcaaagctgaacaccctaattcttcgtcataacaacatcaccagcatttccacgggcagtttttccacaactccaaatttgaagtgtcttgacttatcgtccaataagctgaagacggtgaaaaatgctgtattccaagagttgaaggttctggaagtgcttctgctttacaacaatcacatatcctatctcgatccttcagcgtttggagggctctcccagttgcagaaactctacttaagtggaaattttctcacacagtttccgatggatttgtatgttggaaggttcaagctggcagaactgatgtcatcagatgtttcttataaccgaattccttccatgccaatgcaccacataaatttagtgccaggaaaacagctgagaggcatctaccttcatggaaacccatttgtctgtgactgtaccctgtactccttgctggtcttttggtatcgtaggcactttagctcagtgatggattctaagaacgattacacctgtcgcctgttggtctgactccaggcactcgcgtccaggtacttctgcctccagtgatagctttatgaattgctctgacagcatcatcaatggttccttacgtgcgcatggatttattcatgacgctcaggtcggcgaacagactcgctcggccactggtgacacgcaaggacacgggtaatgcacaataccggaatagcacatgggaggaaccagcataaaacgaaagtcaaagccgcaacacacaactgcacaacgtatacgacgattccaaagcgcagtcgacatacaaaaagccccaacaaaacacgaacgcacgcacccgcccgacaggaacagaagcagcctgtacgaga

SEQ ID NO: 98435 - DNA, 833 bp, Homo Sapiens
tgtacgctcggattcccgggatatcgtcgaccacgcgtcgcagcaccgtgccctggagctgacaggcgctggctgctgcggcccatgctctttcctgtgacacctcggcacgacccgctgctgccctcagatgtgaaactcaagctgtacgaccggagtctggagtcaaacccagagcagctgcaggccatgaggcacattgttacgggcaccacccgtccagccccctacatcatctttggccctccaggcaccggcaagactgtcacgttagtggaggcaattaagcaggtggtgaagcacttgcccaaagcccacatcttggacctgcgctccatccaactcagggcatgacctactctgtcaaaggctccgggtccaccttcatagctccatactaccgcctcctggcccccagcagggacatccgcatggtacctgaggacatcaagccctgctgcacctgggacgcaaagaagggggcagtatgtatttcccgccacgaagaagctgcaggaataccgggtcttacattaccaccctcatcactgccggcaggttggtctcggcccagtttcccatcgatcacttcacacacatcttccatcgctgcaggctggccactgcatggcagccctgagagtctggtagctatacgccaggctgctggacagtaccggccccaggtgcctcccggagggccagctagggtgatggaggcagcacctcggcagctgggggccttgttgctggatacccaatgaaccacaacgcatggactcggatatcactgaccggagcggtggtcactacatacatgtccacaaggcccg

SEQ ID NO: 98436 - DNA, 1020 bp, Homo Sapiens
tgagagggtgatggcagtggtggtctgtaacataggggctgctgctgtcttgtggccctttttgtgtggaacgggtctggatgcatggcacgagtggcccgtggtggtgggtgtattggtgtgagtcgcgtgtgatgaattcgcactgcgcaggtggaactgacttaggggtatgtctatgggggtgaagccgtgattgtgtatgtgtgggccttgatggctggcttcgacgtcctctgtgttgtgtaggtcggctgtccacacgtgtgggctgtccgagtgacgtgttctccggccgtagggatgtctgggagtcaccctcgtctgtagtgtgggcttgcctcggaagaactcgtggttgagtggtagctgtggggtgggctgaacgcgggactgcaggaagatgcaaccattggcgatggcctccaggggggtcggggccatcgtaggggaagcctaacccgatgaagagtttggccttgcgcagcagctgctgaaactcaggctgcggtaagagcccgtggttcttcacataatggctggcacctcggggggccgctggctctcgtagtacacggtgccatggatctccatgtatttgttcaggatgcccaggaacttctccttcccgaaacatggtcatgaactgcttgggcttgaggttccagtagcacccagttggtccggtagccgtgcagcagtggcgtactcctcgtggttgtacgcaggttccgtcccaaaggtgtcgatgaccctgattcggcaccggtacttcttgaaggagactcccatgtgccgcttcatctgctgcaggccgtggtagtcggtgtagatgaggtcgaagggcaggggcatggtgagcgggcagcttccccggcctggcggtacccctaagttactctgcagctccttcagggagactgtgacccgcaggccatcgactgcgtggtcgtacgatatcccgggaataccggaccgtaccagcctgcttttttaaccagctgttcatattccaagcgt

SEQ ID NO: 98437 - DNA, 459 bp, Homo Sapiens
  misc_feature (341)..(350): n is a, c, g, or t
aagataactagatgttgaagaaaaaattgtccagcacacagaagttttaggtgaactgtggccttttgactctgacagagctctttagtatctttcagaaaatatctaaaaacctaatataaaatgtcttttatatttctaacttttctgggatttacatgttttgcacactaacaagactaaggctcttcggtactaacaaatgatgttagcttaatgtggaaagtgtaaataccacgcacacacatccatggttaaggggactcaccttcatctcgagtgtactcttcccctgaatgaggttcaaacaaatagtcacctgtggccagttcaaaggcctnnnnnnnnnngaggacagtatatgaaagcacaaaagaaaagaaggcctttggaaagctgattgctatttggctcaatatgaagtaactcttgttcccttgggaaaacttatagatcatt

SEQ ID NO: 98438 - DNA, 1223 bp, Homo Sapiens
  misc_feature (12)..(12): n is a, c, g, or t
  misc_feature (280)..(601): n is a, c, g, or t
gcgattagcgcntgactgacagtggtgaaaaagcaggctggtacggtccggaattcccgggatatcgtcgacccacgcgtcggagaagaaggagaaggcccccctttcttcattaatctgaaataaaaggaaagtgagaataggctgatttttaaaagttaaggggcaagcagcatgcattctgggggaacgatcctggccacagccgccaaacaaacattcactaggcctcttctgttttcataccctgtaagtgggttatgtggtgggtatggtcagnnnnnnnnnnnnnnnnnnnnnnnnnnnnnnnnnnnnnnnnnnnnnnnnnnnnnnnnnnnnnnnnnnnnnnnnnnnnnnnnnnnnnnnnnnnnnnnnnnnnnnnnnnnnnnnnnnnnnnnnnnnnnnnnnnnnnnnnnnnnnnnnnnnnnnnnnnnnnnnnnnnnnnnnnnnnnnnnnnnnnnnnnnnnnnnnnnnnnnnnnnnnnnnnnnnnnnnnnnnnnnnnnnnnnnnnnnnnnnnnnnnnnnnnnnnnnnnnnnnnnnnnnnnnnnnnnnnnnnnnnnnnnnnnnnnnnnnnnnnnnnnnnnnnnnnnnnnnnnnnnnacatatggtcacattggcgcctagaacagttaggtcgctcgtcacataggcagttaagtggagaaccaggtttcaaaatcaggtaagaaaaccatcatcattaactgagcaccagctgtgctaagcctgccacgggcgtatccttgcagcctcacaacagtgggaggtctgtatcctgaatgtcctcattttacagatgaggacattgaggagaagagacttacccaggctcacacagcagctcagcctgttccaggcgctggtcagtgcgtgttctttgccaccagcctgtcactccagtggcagctccagaaacggaggctgttgcttttatccctaaactgcatccacagagaagccccaagaaggaggttggggccagctcataaaaagcctgaatgccaagccaaggagtggatgcctccagtcatatttagaacaaagtcaagtataaatttacagagaaaaaattctaagacagttggatgttgtcctgtggtgacggacgggaaaggtttacttgtaagggaacttggaaccaagccacaaattgcacgcttgtgaagctgtcatggaaacctgatcccaacagctttgaggtggaggaagtaggtagtttact

SEQ ID NO: 98439 - DNA, 1078 bp, Homo Sapiens
tggtacccgctccggtttcccgggatatcgtcgacccacgcgttcggttttattctcgtctccttcagaaatttaatggaagaaaagaaaggaatccgtaaagacccatttctctatgaggctgatgtccaagtgcagttgatcagcaaaggccaaccaaacccttgaaaaatattctaaatgaaaatgacatagtattcatagtggaaaaagtgcctttagaagaaggaagaaacaagtcatattgaagaacttcaatctgaagaaactgccatatctgatttctctactggcgaaaatgttggaccacttgctttaccagttgggaaggcaaggcagttaataggactttacaccatggctcacaatcctaatatgacccatttgaagattaatctgccagttactgcccttcctccccttggggtaagatgtgacagttcagcatcctgaaggtacttgttggctaggagctgagcttatcacaacaaagcaacagcgattacaggaattgtcttatatgtggtcagttgtaaagctgataaaaattattctgtaaatcttgaaaacctaaaaaatttacacaagaaaagacatcacttgtctactgtaacatccaaaggctttgcccagtatgagctctttaagtcctctgccttggatgatacaatcacagcatcacaaactgcgatcgctttggatatttcctggagtcctgtggatgagattcttcaaaaccctccaatctcttcaactgcaactctgaatattaaagtggaatcaggagagcccagaggtcctttgaatcatctctacagagaactgaaatttcttcttgttttggctgatggtttgaggactggtgtcactgaatggctcgagcccctggtaagcaaaatctgctgttgaacttgttcaggaatttctgaatgacttaaattagctggatggattttgggattctacaaaaaagacactgaggttgagactttagcatgagcactgctgcagtcgatcgtccgcaagcctcttttcaaagttcggaggatcttgaaattggggagcactgtgctgccca

SEQ ID NO: 98440 - DNA, 811 bp, Homo Sapiens
aggggctcgagccattcagtgacaccaagtcctcaaaccatcagccataacaagaagaaatttcagttctctgtagagatgattcaaaggacctctgggctctcctgattccactttaatattcagagttgcacgttgaagagagtggagggatttgaagaatctcatccacaggactccaggaaatatccaaagcgatcgcagtttgtgatgctgtgattgtatcatccaaggcagaggacttaaagagctcatactgggcaaagcctttggatgttacagtagacaagtgatgtcttttcttgtgtaaattttttaggttttcaagatttacagaataatttttatcagccacaaggggaggaagggcagtaactggcagattaatcttcaaatgggtcatattaggattgtgagccatggtgtaaagtccaattaactgccttgccttcccaactggtaaagcaagtggtccaacattttcgccagtagagaaatcagatatggcagtttcttcagattgaagttcttcaatatgacttgtttcttccttttctaaaggcactttttccactatgaatactatgtcattttcatttagaatatttttcaaagggtttggttggcctttgctgatcaactgcacttggacatcagcctcatagagaaatgggtctttacggattcctttcttttcttcattaaatttctgaaggagacgagaataaaacgtcctctgctgcgcagttcacgccgctcccacatcccgccccatgtgagagcggtaccggaaccgccaaactgaactgcg

SEQ ID NO: 98441 - DNA, 720 bp, Homo Sapiens
actgccccagttcaatcacttggtaactatgaaccagttgttcaaaaagcaggctgttacggtccggaattcccgggatatcgtcgacccacgcgtcgacttcaaccccgactgtgagcgagcctgcaggtaccaccccaccttcttcaacgacgtcttcagcaccttgttttctggaccagcccggtggctgccacgttacctgccttgtctaggcactcgctgtccccaaaatcctgtgcttggggcaggattccaacctcagttctctgagctgcttctgcaaaggcccccatgtccctccccacaccggccctgggcatagcctcagccccaggcctctgtcctgccgagccatcctcccggcgccacactccgggagcacagcatcctcctctcacctgtgggtcagagcaggacagtgatggtgtccccagggctgagcaccaccccacggcctgccctcacccctcaccaccatctgtgcactgatgagtctccagtttagccaagggctttgttcctggcatggagaatttgttcctggctgctgtgtttccagggggtgctgggggaagggttccgtggagcgagacaaggtgtcctcgggagcagggtccaccgggaagcgtttgggagccctgtatcacacggggaggcgggtttctcttccgggtctctgctcttatgcatcaggacgaccccgggacggctgtgggc

SEQ ID NO: 98442 - DNA, 893 bp, Homo Sapiens
cctgttacggctccggattcccgagaaatcgtcgacccacgcgttcgcataagatgagtcgtcagcagttagatctgtgcccattagtgaaaacgtctgctggtgataccgtgagtttgtccatcagaatagccaggaaattcacggcaggtcttctcaagatgaaagtggttgagtacgaaacaacaaataataaataccatagccaggaagagacagacagagcattcacctgaagatgcagcctgtggtccaggcatataggtagtgaacgaaataccaatgatagggaaaagaaccatggaagttctcctgaacaggtagtgaggccaaaagttagaaaactgataagttcaagccaggtggaccaagaaacaggttttaataggcatgaggcgaaacaaagaagtgttcaaagatggagagaggctttggaagttgaggaaagtggctcagatgacctcttaataaaatgtgacacgaatatgatggagagcatgactgtatgttcttggatccaccatactcaagagttattacacaaagggaaacagaaaataaccaaatgacatcagaaagtggagccacagcaggaaggcaagaagtggataacaccttttggaatggctgtggagattattaccaaactctatgacaaagatgaagatagttctgaatgcaggtgatggggaatggtctgcttctttgcctcatcgatttactggtacagaaaaaagatcaatcctcaagtgattgaaagctggggagactctgccaggaaaagatgagaatgaaccttgaggtacaactgttgataggcagtgcccctgaagaagaaaacccgaatactctctcaggaaggggaaccacacattcttggaacaggacaaatc

SEQ ID NO: 98443 - DNA, 440 bp, Homo Sapiens
cgctctgaggatccccgaacgggtgatgcggttgaatctgtcttgtgaagcgtcagggcacccccggcccaccatctcctggaacgtcaacggcacggcaagtgaacaagaccaagatccacagcgagtcctgagcaccctgaatgtcctcgtgaccccggagctgttggagacaggtgttgaatgcacggcctccaacgacctgggcaaaaacaccagcatcctcttcctggagctgggtgagggctgcatccctgcaggggatggcaggggcaggcccaggcacgggcagtaacttgcgcttctcctaacacccctccctctgcctcctagtcaatttaaccaccctcacaccagactccaacacaaccactggcctcagcacttccacttgcagtcctcatacccagagccaacagcacctcacaggtaagccaggc

SEQ ID NO: 98444 - DNA, 1048 bp, Homo Sapiens
  misc_feature (874)..(874): n is a, c, g, or t
  misc_feature (1035)..(1035): n is a, c, g, or t
gaacgctcggaagtaccgggatatcgtcgaccacgcgtcggggtataatagaaggggagaggtatctgtagtgatgtccacgtatcttggagttatgggttcgagttctactacaaaacactagtttgttttcttcactacttaagtgagatggcccataaatttaatcaggagatggaccagcttttgggaaatatgattgaaatgtgggttgatcgaatggacaacattacccagcctgaaagaagaaaactttcagctttggctttgctctctcttctgccatctgataatagtgttatccaagataaattctgtgggattataaacatttcagtagaaggcctgcatgatgtcatgacggaagatcctgaaacaggaacttataaagactgtatgttgatgtctcatcttgaggaaccaaaagtaacagaagatgaagaaccacccacagaacaagataagaggaaaaagatgctggccctgaaggaccctgttcatacagtgtcactgcagcagttcatctacgagaagctcaaggcacagcaggagatgctaggagaacaaggtttccagtccctcatggaaacagtggatacggagattgtcacccagctacaggagtttttgcaaggattctaagagcacatgacatgtggctgcctcccctttcagaaacaagctgagtaacccagcctgccgtttgtatgtgagagcctgctgagatgaagaaatcacttcatgaaaataagcaaagaccacacattttttactacaaaatgtaaaggataaatgtaaatcctgcataactaaaatcacaaacctattcctcaaaagaatttaattttatatttatgagggggcccttcactanaaagtacatgtaaaaagtacatttgatgacaatagctgcttagtttcctgttaagagaagaaactttatcttttaattatgtgctcttaatatttgaagatgagagttaatacctggagatgtttttctgcaaccaaaattcatttaaatttgggctgccnttatcccttttta

SEQ ID NO: 98445 - DNA, 918 bp, Homo Sapiens
gcaagggctggtaccgtccggatatccgggatatgtcgacccacgcgtcgcaaagactcttccaggaggagcaggtagaagatagttatacagccatatagctgcagatccagataaccttctttcttggaagttttcaagaaattcttaagcagtccaaggatgatttcaattatgcttctccattgggtccttctgctcatgcattcagttcaagtgtcctttatcccaggttcagagatgctgcctttctgaagaagacatctgaccctagcaggttggccagtgttattgaacaacaaaaatgggataaattgctttcatgattagctcaccttcttctggttttagcccttctgttctctgtacacgtgaacttctgtcatctccttctggcttggttgcctctgaaaggagggaaagtctcttggtaaattatctcttttgtgctgtttgctgtttctctgctgccgtctttgcagttctcctctcactggttgcaggctttcatagtaaggtttggcgagaaatgttccaaacatcacattttggattctaggctgtcacccctcattctgtgaaacgtattagcatgtgttcgcccaagatgactattccttgtgagccagttaatgatgatatttctacgcccttccccttctaaggctgtagttcaggaattccagacccacatagacaagactctgtgctttccaatggtgtagtcaatgccaaggtgatgccatttagggcaggaaaatcttaactcttgtggtttttgcgggaattcagtcctttgtgaagtggcggttccagaaaaaagctgtttttcatcctctgagaaagggcggattgagttttggcctgtggctgagtctggggaaagaccttgctcatgcgaaccccgttggggacata

SEQ ID NO: 98446 - DNA, 1279 bp, Homo Sapiens
caggaagcggcaggggaaagcaccggctccaggccagcgtgggccgctctctcgctcggtgcccgccgccatgtgggccgtcctgaggttagccctgcggccgtgtgcccgcgcctctcccgccgggccgcgcgcctatcacggggactcggtggcctcgctgggcacccagccggacttgggctctgccctctaccaggagaactacaagcagatgaaagcactagtaaatcagctccatgaacgagtggagcatataaaactaggaggtggtgagaaagcccgagcacttcacatatcaagaggaaaactagtgcccagagaaagaattgacaatctcatagacccagggtctccatttctggaattatcccagtttgcaggttaccagttatatgacaatgaggaggtgccaggaggtggcattattacaggcattggaagagtatcaggagtagaatgcatgattattgccaatgatgccaccgtcaaaggaggtgcctactacccagtgactgtgaaaaaacaattacgggcccaagaaattgccatgcaaaacaggctcccctgcatctacttagttgattcgggaggagcatacttacctcgacaagcagatgtgtaaccagatcgagaccacttaggccgtacattctataatcaggcaattatgtcttctaaaaatatggcacagatcgcagtggtcatgggctcctgcaccgcaggaggagcctatgtgcctgacatggatgattgaaaacatcatagtacgcaagcagggtaccacatacttggcaggacccccttggttcaagcggaactggggcaagaagtatctgctgaggatcttggaggtgctgatcttcatagcagaaacgtctggagtaagtggacccactgggctttggaatggattcatcatgcctttcattcacactagcgaaggatgctgaggacatctaacattatcagacgacactgggatgtaccattgaaccttttgaagaacgttaattactgaggatgactgatggaaacacggggcgaaacgtaaacagacgctggaaagcacagacaggcccagcacaaacacgggcggaaagcacaatacagtaaataaagccaccacgtggacaccctcaccacgaagtgaccaacacagggaccccagcacacggcacacaacggacagacaacgaaacaagaaaagagacacccggacacaaagtcaacacacaaagaggcacacacaaagaagagcaacaacccaaagcaaata

SEQ ID NO: 98447 - DNA, 505 bp, Homo Sapiens
taaaggctcttagtaagcgttcaatggtgacatccaatttcttctgataatttagattcctcacaaccttcctagttgagtgaagggcatgatgatcatccaaagcccagtggtcacttactccagactttctgcaatgaagatcagcacctccaagatcctcagcagatacttcttccccagttgccgctttaacctgtgcaatatttttagaagacataattgcctgattatagaatgtacggccaaagtggtctcgatctggaaacacatctgcttgtcgaggtaagtatgctcctcccgaatcaactaagtagatgcaggggagcctgttttgcatggcaatttcttgggcccgtaattgttttttcacagtcactgggtagtaggcacctcctttgacggtggcatcattggcaataatcatgcattctactcctgatactcttcctatgcctgtaataatgccacctcctggcacctcctcatgtcatataatctggta

SEQ ID NO: 98448 - DNA, 1028 bp, Homo Sapiens
gaggaaaaaatagcgcagtagtgaactatagaacagtgtttaaaaaagcaggctggtacggtccggaattcccgggatatcagtcgacccacgcgtcggtcgcgcgatccagaccgactaaagcctgggttaccccgcacttctcagtacgcggacctgtccgacgctgccaaccggaaccacgaggccctgcgccaggccaagcaggagatgaacgagtcccgacgccagatccagagtctaacgtgcgaggtggacgggctgcgcggacgaacgaggcgctgctcaggcagttgagagagctggaggagcagttcgccctggaggcggggggctaccaggcgggcgctgcgcggctcgaggaggagctgcgacagctaaaagaggagatggcgcggcacctgagggagtaccaggagctcctcaacgtcaagatggccctggacatcgagatcgccaacataccgcaaccggctggaagggcgaggagagccggatctccgatgcccgtccattcttgtgcctccttaacatataaagacgactgtgcctgaggtggagcctccccaggacagaccacagccggacagacggttctgatcaagaccatagagacccggaatggcgaggtggtgacagagtcccagaaggagcagagcaggtgagctggaccaagtcttctggcccacagtcacctgaaccccttggaccggagccttgactctgccctaggcctgctcaaagcccaaaccctaagaccactcctgaattgtctcctctccctctgcatgtgtctaaaaggtggtaccaggcatccctttcctggcttatggccaagccctacccggccagcagtcgttgggcctctccctgccctgacacttgatgtgacctatgtgcttcccttttcatgtcccgataagaagccaatgatcccccctcaggacaaatctactccagccacgatgagaagtgggtgagccagggtttgagtttcacatttgaaccaaataaaatgctgtcaagag

SEQ ID NO: 98449 - DNA, 987 bp, Homo Sapiens
  misc_feature (317)..(317): n is a, c, g, or t
ggcattgtgaatatagaacagtggttcataaaagcaggctggtacggtcggaatcccgggatatcgtcgaccacgcgttccggtcgctgaccgtggtaactatcgtatacaagtcttgacccgcaaaggctttttgaaggaaatccgccgcagccccagtggcattgatagctttgtgctaagcttccttggggcagatctaccacaacctcactcctctctcagtggcaatgaactgccaggggctgattggtgtgactgacagctatgataactccctcaaggtatataccttggatggccactgcgtggcctgntcacaggagccagctgagcaaaccatggggtatcacagccttgccatctggccagtttgtagtaaccgatgtggaaggtggaaagctttggtgtttcacagttgatcgaggatcaggggtggtcaaatacagctgcctatgtagtgctgtgcggcccaaatttgtcacctgtgatgctgagggcaccgtcttacttcacccagggcttaggcctcaatctggagaatcggcagaatgagcaccacctggagggtggcttttccattggctctgtaggccctgatgggcagctgggtcgccagattagccacttcttctcggagaatgaggatatccgctgcattgctggatgtgtgtggatgctcgtggtgactctcatcgtggctgacagtagtcgcaagggaacttctccatttacctaaggcgtgggggctctaagatgtcacttattcgagcagggacttaaccggtccgggatgggcataagcacctacatcccaaagggggaccagtgctgggtcttgggaactgtcgggatccatgcattcaagaatctaacaagtaacaatctgagaaagtactcaccacactaggcgcatgggacaatcactcaatctctggacacacacaatcacatccccaagttagcatgaaaagcaacgcacattac

SEQ ID NO: 98450 - DNA, 1088 bp, Homo Sapiens
gcaaatggaatatagaacagtgtgtaaaaaagcaggctggtacggtcggtttcccgggatatgtcgaccacgcgtcggtgtttgactagcgtttaagaacttgagagtagaagcaacaataagattttttcacctcttcctgcttccacccccaaactgagaacatcactcaattgtttggaagaaactgtaggtctatataaattttatttataaggtatgggtaatatacataatcataatacagttctcagatgcagggaagaagtttggcatttaatcattgaggctttaggtttttgatgtgatcagaactgggccatgtcaaacccggaattttcaccaacagttcactcaccctcctggtacattgccattccaaggaattctgagagtaggcaaacaaattttgccttcatggtacagttctcagtttttcttataggagaaatatggtatatgtttataagaatcttttatgagattatagatttcaatgctgtggatagtgtcttgcacccaaacaagaaagtccataatggaatgatcttccctcagcttcctatcgatttagttacctcttgaaagcacaaaaattaaaacattgccatatgttgaatttttaaaaagcacttggagtgagcgaacatttcctgataaatgccttttagagataggttcttgatattcagacatctgcagaaatgttctggttcccaaagtcatttcacttcgaaataaaacacagctccttcaaacagcacttttgccacataaatctagttgcctctccctgtggacattcagaactgatagaacaaacactactcttttgaatttgatggttcgtgtcctttaaagtgtttgaggacctatgcagagcctgtaacacttgggtagtacctgctaggacaatttcttggcaattgtcttactactagggatcagtaagatttagattctgagcccataatggcaacagccccctcacctatgggaagctgacttccctcagtcgggcacttctcatgggggcatgaacatggttcctgccctcgtccgagaacgccacccaggcctcgctcctt

SEQ ID NO: 98451 - DNA, 913 bp, Homo Sapiens
aaaatgtgtccacgaagtagctttgtgatcgcagatacattcatagtgaactcatcagaatggctggtttgcagtactgaaatactatcttctaggctaattgtagcactacatacagcctagaagatagtatttcagtactgcaattagagaaacagaagtccaaggctggcgacagcttgaaaagtctgacagcttttctacttttcctgaaaattttaagactgtgatatctgtcattttactgtatagctgactgtgtactcaggtattttattggtccttgaaagattggtcgttatggatcacccagcctttccaagtcagtggctgttgttctgtcttgctgtctgatacgagagtggggcttttcagtgaactaaccagggattgttcttgacatacctgacttttctcacatttgaacttccactatcattgtatccatataacttctagcattttcatgccatggtaatccatgagctacacatacgtagcccggcaccgtgatgcaagttcatggtatcgtgcatgttcgtggtatcatggtatcattcatgcgtgtttgaatagttctacatctagtgcttcttgccaaaaagaatacattgtttaaattcacaaaattagcataattgcagtgctaatgaatatccgaatatgtgcacagtaacatttggactattcattggagagtttacccatacatttagcaaaattgaactggccaaaacatttgatctccagtgagggctcaagttagatcccctatagaaaagaggacaacttcatccttacttcaggtcatagttacgatctgtgatacgaaccataagatatgcctgacaagcagaatcaccaagttcccactttgaattaccacaaaaagtgtagaacccatatactttct

SEQ ID NO: 98452 - DNA, 1556 bp, Homo Sapiens
  misc_feature (1408)..(1417): n is a, c, g, or t
  misc_feature (1480)..(1494): n is a, c, g, or t
caggctggtacgcgtcggaatcccgggatatcgtcgaccacgcgtcggtgtagacctatcctctgagccatttgttgggtacctgttagcctttaccctgggaatgaagtattagttctcagttttttctaccgctatatgcttaccgcgtggacttactgcctttgcagcttggccatttctcactcggctgtggactcgagcaaagatgacctcactgagttggactttcttctctttgctcctggcagtgttcccactgatgccggttgtaggtcgaaagccagacatctctctagtgatgggtgcaggcttgctggttcttctgttatccctgtgtgttgtaacatctctcatgaaaagaaaagatagctttataaaggaagagctattggtacatctgttacaggtgctgagcacagtgctctccatgtatgttgtgtatagcactcagagtagtctactcaggaagcaaggactgcctctcatgaatcaaattattagctgggcaacattagcctcttccttggttgtgccactactgagttctccagttctctttcagcgattgttcagcatacttctttcattgatgtcaacctacctacttctaagcacagggtatgaagctctctttccactagtgttgtcttgtctgatgtttgtctggataaacatagaacaagaaactctacaacaatctggtgtttgctgtaaacaaaagctcaccagtatccagttctcttataatactgatataactcagtttcgacagctatatctggatgacatccgtagggcctttttccttgttttcttcttagtgacagcattttttggaactggaaatatagcttctattaacagctttgatcttgcctctgtctattgctttctgactgtgttcagtccttttatgatgggagccctgatgatgtggaagattttaatcccctttgttcttggtatgtgtgccttttgaagcagttcagttgactactcagttatcgtcaaaaagcctttttctcattgttctcgtcatatcagacattatggctttgcattttttcttcttggtcaaggattatggcagctggcttgatattgggacaagcatcagccactatgtgattgtcatgtccatgaccatctttttggtgttcctcaatggcctggcccagctgctcacaacgaagaaactcagactatgtggcaaacccaaaagtcacttcatgtgaggttgctgaagcaccattcagcatctggatcctgattctccttttaagctaaaatctcatcaaggcttcaataagaagatggatatggatatatagtatattctactcctgtaaggaaaatggtatttggaattccgaattgacaggttatctggaacaaaggagcttcnnnnnnnnnnctaggttttgcaggcatgaaatagtgattatatctgtggaaaagcataggaaggcattctccnnnnnnnnnnnnnnnctttggctggcagctcttcccattgatgctgagagcacctggagccatcttggcccccagtg

SEQ ID NO: 98453 - DNA, 943 bp, Homo Sapiens
  misc_feature (106)..(114): n is a, c, g, or t
ggtacggtccggatatcccgggatatcgtcgaccacgcgtcgtgagctctctgtgaatccgtgaatttcctaaaatgtgtaagcaaaatgttgaatatcagggcannnnnnnnnctgaggtgggagtatgtcactcacagcaaacttggaaagaaggctatgactcccaagaggcagtgaaccattgccttaaattaatagcagcctctcaagtccattgaggcctcatgtaaaattcccatttttcatctttacactccttttctcccctcatttcctcttctccttactaaggtaaaaagaccctgcacagcattattacttaagttgaaaaagcttcaactctcaaggactcatgtataccatatgttccacttatgcttgttagtcaaaatgcatgttatgtagaaaatggtcaatggcaaatttttataaatacagctaccccatcaaagctgaacttgaaacgttttagcagaattttaaatatgtgaaagttcattgtggtcatggtgagaaaactaaaactacatgagtttcatgttagaaaagaatttttaaacaatcttcagatggcttgaacacgtgccattatagtatctaacaaaaagtggcataaaatattacaaaacatccaacactagaaagcaatgactaacatttaatttgtttacaaaaatgtttattgtcttcagtacaaaaaagttaaaaccatgattggattcataatgcacttgtcttatcccttatttatggagctagacttgacatatttcaaaccaatctcttctgtggtcttctccatctcagttaatgcaacttcaaccttccagatgctcaggtcaaaaactgaaagttgcttttgactcctctacttctgtttcaactctcgtctaatccaacagcaaatccccttgatgctaactttgaaatataactagaa

SEQ ID NO: 98454 - DNA, 1010 bp, Homo Sapiens
ggtccggaattcccgggatgcctctctctcctccacgctgctttgatttcgctcttgcctctcttcttgcgctgctcagctgggaacatcgtctcaccaggggcagcagcgacgcgctgcacagccagacaggagctggctgcggggcatggaagcagcctccttggcagccgggagaggagcaagcgcacgccactgcccgtgacccaggcgtccggctgctgtcccctgccggggagctcatccacgcagaggtctctccctgtcctccctgcgagcttttcctctgcagagcccagtggagccagtccccacaggagacaaccctgacgggagcatggagctgctgtccacgccccacagcattgagatcaacaacatcacctgcgactccttccgcatctcctgggccatggaggacagtgacctggagagggtcacccattacttcattgaccttaacaagaaggagaataagaattccaacaagttcaagcaccgggacgtccccaccaagctcgtggccaaggcagtgccactgcccatgacggtgagaggccactggttcctgagcccccgcacggagtacagtgtggccgtgcagacggcagtgaagcagagcgatggggagtacctggtgtccggctggagcgagacggtggagttctgcactggggattatgccaaggagcacctggctcagcttcaggagaaagctgagcagatcgcaggccgcatgctccgcttctccgtcttctaccgcaaccatcacaaggagtacttccagcatgccaggacccactgcgggaacatgctgcagccttacctgaaaggacacagcggcagccacggcttccccaccagcggtatggctccaccggggtcttcttcagctggcacacgggagttcacacgggcccaccccccgcagggactcccccctacggccgcttggggctttccgaatcccaattcaacgccctcttcaaatcccggcacccaccctcata

SEQ ID NO: 98455 - DNA, 1007 bp, Homo Sapiens
  misc_feature (413)..(529): n is a, c, g, or t
  misc_feature (587)..(595): n is a, c, g, or t
  misc_feature (663)..(663): n is a, c, g, or t
  misc_feature (699)..(719): n is a, c, g, or t
cggtcctaaggtagcgaggcctgggtggcgaattccgcacgagggcgggttaggggcttcatctctctgcgttctcagttgtgggaggccttggtgattcggccacagcctcagcctccgtcgctctgtgacctgcgggtattggatgattggtagctaagactcccgaatacttcagaagtggggaaatggaactcttaacattcagggatgtggccatagaattctctccagaagagtggaaatgcctggaccctgaccagcagaatttgtatagagatgtgatgttggagaactacaggaacctggtctccctgggtgttgctatctctaacccagacctggtcacctgtctggagcaaagaaaagagccctacaatgtgaagatacataagatcgtagccagacccccnnnnnnnnnnnnnnnnnnnnnnnnnnnnnnnnnnnnnnnnnnnnnnnnnnnnnnnnnnnnnnnnnnnnnnnnnnnnnnnnnnnnnnnnnnnnnnnnnnnnnnnnnnnnnnnnnnnnnctcattctttaagttttaattaggaactttcaaatgacttacttttaagtttgcttannnnnnnnncctgtagaactgagtcttctgttaaagcttgttgttaaattttttagttctattgtgtactccagcantatgtatttggggtctttttttaagtttctcgttcnnnnnnnnnnnnnnnnnnnnnaaaggatgggaggttcgctcctgttcacccagactggagtgcaatgggcacgatcttgggctgactgcaaccctctacttcccgaggttcaagtgattctcctggcctcgccttcccaggtagctggggattagccatggaccccccccacctggctaatttttatatttttaagaaaaagaagggggtttccccctggttggcccagcttggcctccaaactctggaacctcagggggtccgcctgccttaaccctcctgaaggggtggggaataacggggggggaa

SEQ ID NO: 98456 - DNA, 1033 bp, Homo Sapiens
  misc_feature (937)..(941): n is a, c, g, or t
  misc_feature (943)..(944): n is a, c, g, or t
  misc_feature (946)..(946): n is a, c, g, or t
  misc_feature (948)..(952): n is a, c, g, or t
  misc_feature (977)..(977): n is a, c, g, or t
aagggagagggagaaagttgtcttgaaccagtggttacaagcggctgtacggtcccggatatccgggatattgtcgatccacgcgtcggtcgacgcccgcggcgccggtggtcatcaccgcgggcctcggaccccgaaatggcgctgctggcctgaacacttgctgaatgccgctgcccgcggacaagcagatcgagaccgggcccttcctcgaggcggtgtcccacctgccgcccttcttcgattgccttgggtccccagtgttgactcccatcaaggcagacataagcggcaacatcacgaaaatcaaagctgtgtacgacaccaacccagccaagttccggaccctgcagaacatcctggaggtggagaaagaaatgtatggaagcagagtggcccaaagtaggggccacactggcgctgatgtggctgaaaagaggcctccgcttcatccaggtcttcctccagagcatctgcgacggggagcgggacgagaaccaacccaacctcatccgtgtcaacgccaccaaggcctacgagatggccctcaagaagtaccatggctggcatcgtgcagaagatcttccaggcagcactgtacgcagcaccctataagtctgacttcctgaaagcgctctccaaggggcagaatgttacggaggaggagtgcctggagaagatccgcctcttcctagtcaactacacggcgaccatcgatgtcatctacgagatgtacacccagatgaacgctgagcttaactacaaggtgtaggcatgcccactgctggacacgtccccgactcgtggccacatggagaaacaggcaaaccagaatcactgtgaatcaagtcggtgaactgcccctggcctgtgtcccccagagcagcccagggtcctgccagagtctgcaggggacagccctcgtttttttaagtcnnnnntnntntnnnnntttttggcctattctaagggaccgnaaataaatgatcttactttcaaatcttctttggaattttcacgacagcacagactg

SEQ ID NO: 98457 - DNA, 586 bp, Homo Sapiens
ttcgctactgtgtgcagaagaagctgcccagtttgagatggcagaagagcaccacaggcacagccagctgtatttttgctttagagccctaaaagacaatgtgacccacgctcatctccagcaaataagaaggaatcttgctcaccagcagcatggtgtcacgctgctgcacaggttcctggaacctctggcggtctcagattgagcagaaaaaggaaagagagctgctccccttactgcatgctgcctgggaccactacagaatagcactgctgtgcaaatgtatcgaattgtggctacagtatactcagaagaggcggtacaagcagctgctacaggccagagcggatggtcatttccagcagagagccctgcctgctgccttccacacatggaacagactctggcgatggcgccaccaggaaaatgtcctcagtgcaagagcaacacgtttccacagggagtcattagacaagcaagtattttctctctggaggcagaagatgtttcagcttctaaacctcgggtagcagatagaactgatcatcctgtgactcagtagcggtcgttttccaaggagcagcta

SEQ ID NO: 98458 - DNA, 984 bp, Homo Sapiens
aaagtcatggaatatagaccgtgtttaaaaaagcaggctggtacggtccggaattcccgggatatcgtcgacccacgctgtcgacacggtactccacttccagtaaagcaaacaatggcacggttcttctcccggcccagcctgagcctccgctgagcgaaaggccacagctcccaccggcggaggattttaaaatgatctttgcctgggtcggcctgtgggttcagggaagtgttaccaaccattgcgcgcaggtgggcgcgctcgcctgccttctccgaagcaaacttttcccagcaactgggagcagctacggagacttaaaagatccccgcggggtcgtgggcaccgcacgtgggccctgcagggacctccaccgcgggagattccttgacgtttgacctgtctaatggagtgtggtcttcagccacccaccgcaggtcctgcgagtcccgggcatgcaagggcccgcagaccacccaaggcaggccttacaggtgcagttgaggtcctttcagaccggggacccccgtatgaacgtcgcctgcttcgctgtagccgagtggcatcaaggcctaggataagagcaccatctgggtggtgggtggtcacagcatggtaagatcctgacttgaaggtagtaggaggtgccgggggtgacccgggatcaacagggttatctgacgaaatgtaggagccgatgaggattctgaccaatgttcagctatcgacgcggataaccaaccacgcactaaacattaacttcaacagacactcatctctaaattcatactgggtcatacaaagcacaatgtccaaaccattgaataatactgaatctacggcgtgggaccttggaaacgctggtataaccaacatgataagagaagagcacaatattgcatttatgggataaaaaaggtcatagcaactaacttcagattgtatcaacacagagaggcaaaccaaagaaggaaaagggaa

SEQ ID NO: 98459 - DNA, 571 bp, Homo Sapiens
tcgcctattgaggtcaagtgcctacggactgcagtaagagtgctaggagaccctcccaggggaccccggttcacccacagacgttcagctggtcacgcagcaggtcatccagtgtgcgtacgacatcgccaaggctgccaagcagctggttaccatcaccaccaaagagaacaacaactgacaagggcagggcaccgcctcctctgttttctaggctttataaagtccaatttcaaattcagacgcagaactcttcagatttctacaaaaagaaacatttaatgacggtttaaaactttttaaaagaaaactcagtattatttttgcatgttttctaaccaattttcaactatttaacccacttgccttatttagtgcctatttgctggtttagtttctgatgttcggttgtgttgtcaacaactgttgagttgatcacatacatccaaaagtatagtttcattgtctaaagtttgtgaaaacttttccatcccttaaaactccctgcctatggctgaaactataaatgaaatttttcataaaacattttcttgagagagttcagttaaac

SEQ ID NO: 98460 - DNA, 898 bp, Homo Sapiens
  misc_feature (861)..(861): n is a, c, g, or t
aggatcatcattcatgtattctatccctgccatctccacttctaggggttacccccagaaatatcattaatgaattcctctttacactgctgtagcatctcacatgtctgctggatctcttcctcactcaaaagcaccaacatcccaagaggtagatgaagcggttgtaggattctggaaaatgctgctgtcaaccccatgatccatggagcacgtcgccaggactgcctgcctggaatctcaggaatccttcctgaacctcaacgtcattgaggaaaaaggcaaggaagtgagtgaagggctgctttcttcgaaaagtgtccaaaagaacatcaatccgtgttcgggctgaaattacaccatttcgatgctggccagtgattacaatttccccgtcttgtccaggtttaggaatgctaatagaagttttggtctccatttctattttcttcctagtgtcccctctctttccaactatatgcttatagagcaagctgggggccctcaaagtagaccggaatccttgtggggtctgctccacctcgtaggcatcacagggctcatcagcacactccatggagccttgatagaagtcctcttcatcttcttcatgttgataggtctgttcttggactggattcttcctgtaattccggccatcaattcttataagctgtggacgcagaacttccatgacactttctccaaatgatattccaattatgccctgcagggactagaaaaatggagaaggtaggaggagaaaccaggagactgtctgcagcagacgtgcgataggaaattcggacgcgtgggtcgacgatatcccgggatatccgacgcggtaccagcctgcttttntaatcactggtcttgttactaagcgcgtgttttgtgt

SEQ ID NO: 98461 - DNA, 1223 bp, Homo Sapiens
gaatatgaacagttggttaaaaagcaggctggtacggtccggaattccgggatatcgtcgacccacgctgtcgcgacgaagcggaacggagtgcgggttcccggggagggggcgtgcaggatcgggttgtggggggtgcgctgtagggctaaggagaagatgagctttggggggccctgaggaggaggggagtcaggattaaccgaggacagggtcgcagcgggggcatggggaggacgggcccgagagcgccgctcctccccaaaactaggatttggagcctcacgttctcccgcaaaacgagccctgtgggtgccaggccagggcggctcccaggtgtggagggggcaaggtacgggcgtctgccgtcgctaagtgcccccttccacttaaggcacaccttcgcctccgattccgaaccgccggggacagaggcaagtggcaaagcagggagggcggaggactctgccacctccctcaggatgcctgagggccccgagctgcacctggccagccagtttgtgaatgaggcctgcagggcgctggtgttcggctggctgcgtggagaagtccatctgtcagcacgcaaccctgaggtgccctttgagagcagtgcctaccgctatctcagcttcagcccgcggcaaggagctgcgcctgatactgagccctctgcctggggcccagccccagagcaggagccactggccctggtcttccgcttcggcagtgtccggctcttttcagctggtgccccgcgaggtagctgtctacgccatgcccacctgcgcttttacacggtcccgccgtggcccccgtgctctgcccatatgtttcgatggactatccgaccggttcggccgctggagaaccttgtggcggaaagtggcagaccggagccgcgaggccctggtgtcttgcaggatgtaccagcagttcagggagaatgtgctactgaaacctagcggataaggcctttgaccggacccatctgcgaggccctcctggaccaggaggttcttcaatggcattggcaaactatctgcgggcagagatcctgtaccggctgaagatcccgcccctttgagaaaggcccgctcggtcctggaggccctgacagcaggcacaggcgcgagcccggagctgaccttgagccagaagatagggaccaaagctgcagaatccaggacctgctggagctaatgtcaactccagtggccaag

SEQ ID NO: 98462 - DNA, 630 bp, Homo Sapiens
ccatgctgaagttgggcggatggcagcaaaccggctccgctagaggaccgagccgcccagccccgctcccccggacccatcggcgcgctgcccacacctccaggcgaccggccaactgggtcctgaagtagctgaaatgcgaaaaaggcagcagtcccaaaatgaaggaacacctgccgtgtctcaagctcctggaaaccagaggcccaacaacacctgttgcttttgttggtgctgttgttgcagctgctcctggtatgtcatgttacctgtaggatgccacacccaggcttggcaggcactagtgtgaacatgcatgccaaatctcagaactgtagaaactgctcaacatgtctttttttgttctttctttgcaagtaggacttattgaagactatcattggtttaatgcaaatactttcacaaacaaaatatataatatttccccaaaatctacatttaaattgataataaggtaaaaaaaatgaagaggtgttttatatcatgtttttctccatccatgctttttaaagatatgggtaaaaataagattttagttacatttgtatttatcaataagcaatattttccaatgttacaggcaagaacattaaaataacatttagtaat

SEQ ID NO: 98463 - DNA, 1318 bp, Homo Sapiens
cgtgtccgccagtgccccttctgcatgaacgctttcccagaagctgcatgtcttccttgcttaccagcaacttagccacggtccgtaatacaggccacgctggagacccttgtcagcttcaatccaccctgtctccgtgccctgggatcctgctgtgtgaaccaaaaatcagggaagtgccttcacggggaattgtagcgttctgagccttcggtgacaatgcaagggctccgtccttccaggacaatctgtcccctggctgatgaccaccagtgggggaaccgcggcactgcattgccttgtcaaagatgttgtactcgagagactcttgtgtggtcttgcagagatgtttaacccctcgtcggggtcccaagatgaccaggtcggcatcggatcccacagcaatgcggcctttccgggggtaaagcttgaagactttggctgcattggtgctggtcacagccacaaactggttctcatccatccttcccagtgaccacagccttgtcccagatgacggacatccgctcctcagtgccattgggcccctccggaatcagggtgaagttgtcctttcctacagccttctgggcagtgttaaacgtgcaatgggcactgcccgtgacctggaggtctccacaggacagcaaggagttgagaaagtctggagtggtatggatcagggctcaagggtggggaggtgacaaaggcagcagcctcggcccagttcttgttctccagtaatgggaccagtccggttcaccaagctggcagtgatcgggctcgctcatacaccacagctcccttcttccgtgcctgggcgatgaccctcagcagagcttttgctcatcaccttggtgatatacagcgggcagttggtctggttggcgatggtgatggcacgattcacggcttcggcctcgacctcctcaggtcggctcagcacatgtccctcggggcccgtgatgcccagatccaggatcctctgctgctcctctgcaatgatgtcgccattttctgcgtggacttgggctatggcgccaatatcccggatcacactcagtacttcataaatctggcaatccgttagctggaagcgatctttgaaagccatgtacacgaggaaggaatttaccccgtgatccttcacaagcgcttccatctcctcctggatgcccttatgccactcgctgatgtccacatgcagagagtagtcacagcaggacttgctgtcggcccattccctccactggtcaaaggcagcgagcaggcttgtcccaggctcaggaacaacgtggtcaatgatcatagtcgttcc

SEQ ID NO: 98464 - DNA, 1490 bp, Homo Sapiens
  misc_feature (43)..(138): n is a, c, g, or t
  misc_feature (1161)..(1161): n is a, c, g, or t
  misc_feature (1376)..(1376): n is a, c, g, or t
gaccttcagctgccgcggtcgctccgagcggcgggccgcagannnnnnnnnnnnnnnnnnnnnnnnnnnnnnnnnnnnnnnnnnnnnnnnnnnnnnnnnnnnnnnnnnnnnnnnnnnnnnnnnnnnnnnnnnnnnnnnaccaaaatgccagaagagatggacaagccactgatcagcctccacctggtggacagcgatagtagccttgccaaggtccccgatgaggcccccaaagtgggcatcctgggtagcggggactttgcccgctccctggccacacgcctggtgggctctggcttcaaagtggtggtggggagccgcaaccccaaacgcacagacaggctgtttccctcagacggaccaagtgactttccaagaggaggcagtgagctccccggaggtcatctttgtggctgtgttccgggagcactactcttcactgtgacagtctcagtgaccagctggcgggcaagatcctggtggatgtgagcaaccctacagagcaagagcaccttcagcatcgtgagtccaatgctgagtacctggcctccctcttccccacttgcacagtggtcaaggccttcaatgtcatctctgcctggaccctgcaggctggcccaagggatggtaacaggcaggtgcccatctgcggtgaccagccagaagccaagcgtgctgtctcggagatggcgctcgccatgggcttcatgcccgtggacatgggatccctggcgtcagcctgggaggtggaggccatgcccctgcgcctcctcccggcctggaaggtgcccaccctgctggccctggggctcttcgtctgcttctatgcctacaacttcgtccgggacgttctgcagccctatgtgcaggaaagccagaacaagttcttcaagctgcccgtgtccgtggtcaacaccacactgccgtgcgtggcctacgtgctgctgtcactcgtgtacttgcccggcgtgctggcggctgccctgcagctgcggcgcggcaccaagtaccagcgcttccccgactggctggaccactggctacagcacccaaagcagatcgggctgctcagcttcttctgcgccgccctgcacgccctctacagcttctgcttgccgctgcgccgcgcccaccgctacgacctggtccaacctggcagtncaagcaggtcttggccaacaagagccacctctgggtgggaggaaggaggtctggccgaatggagatctacctctcccctgggagtgctggccctcggcacgttgtccctgctgggcgtgacctcactgccgtccattgcaaactcgctcaactggagggagttcagccttcggtcagtcctcactggggctttgtggcccctcggggctgaacangctggaacaacgctcagcgaacgggtggaacccccgccccttccagagagaagccgccaacaaagttcctaccctgggcctccccccccttccacgccttcccgccctgggtgg

SEQ ID NO: 98465 - DNA, 1020 bp, Homo Sapiens
acggctgatcgctccggatttccgggatatcgtcgaccccacgcgttcgaagaaaataatgcattgtgttttttaaaaagagtatcttatacatgtatcctaaaaagagaagctcatgtgcaattggtgcacagcaggagaaattactggactgttaggatgaatggacgcccttctccccgttatttaagatttgtgaccttgtacataaccctgggtgacgtgcacattgcttgggtatggaacggtagaaatttgggtgtttttaaaaccttgtttggggttgttcctgtccttgttgagaatcatagagatgtctgtgttcttggagtatttcacactgaggactaatctgctatcttcattccagtccctacccctcagtgcctgctctcatccaaataacctgggaggtgaccaatcaggatatctcaggaggtccaaaggtggaacagacctctttgcctttcccagcgtctcatacccccggtagtgcagctgtgggtggaggctggggtgtctagcacgaagtcaggacagcgtcctcctccacagcctgtcactgccccctccccagcctgtgtcaacagtgctgtgatcccgaggaaagtcctccagtctaacgtcacagtgccctgcacaggtgaggaagcaaactcccgctggaaactcaattctcttggaaaaacaggtagtctggagctgtggccaggcctttctggtaccaggcgattatgccaacaaggtcaatttcccctagtccgcttcgtcacaggttcagaatgggcccagaacagattggtctgaggccctgacagacggcatgtggtgaaaagtttggccgatgagccaacgagctgtaccttgagcagaatacagcaaatccacacgggcagatataaacactttaagacggaaacacaggttgaaaaagatattcgaaaaaggaagaaacgcaggggagttgcatccaaggacaactcgtgagcggctggacgattaacaattaccaccaccggt

SEQ ID NO: 98466 - DNA, 643 bp, Homo Sapiens
gtaccgcccggaataccgggatatcgtcgaccacgcgttcgcggtacgcgctgggcggacgcgtgggcctcggggacaggtcgccctaaagtgaggacccctagaaggagagaagggagggtggcatgggagaggtgaccgggccctccagtacggtagacaagccccaaggtagaccacaagtctccaggactagagctgcccgcttccctctggccagagggcccaaggcagccccctgggttctccaaccactgcaagcaaggtctggggacaaccttgacaacccccagccttcttgctgggctggcgctgctgccactcaaataggacataggacaagcttgtctgacatcagctactggagttaaattatggctttataggactcaaacctgttgtttttcccaactctgttctctccctccaatccaacccctgccacagtgcatgggcaggctagccttgaatggactggacagacaccaacagctgcatcccttggcatggggctccatgtcaaatatgcccaaccccaggggagatggagggggctggagacccggggcctcctcatagagataactctgcactgggttcaaatggccctgagtgcatccaaaccagttgccggggtgccagc

SEQ ID NO: 98467 - DNA, 1406 bp, Homo Sapiens
tccgcgctgctggaggctgtcgtcccaatgctccccaaacggcggcgagcgcgggtcgggtcccctagcggcgatgccgcttcctccacgccgccctcgacgcgcttcccgggagtcgccatctacctggtcgagcctcgcatgggtcgcagccgccgggccttcctcacaggcctggcgcgctccaaaggcttccgcgtccttgacgcctgcagctccgaagcgacacatgttgtgatggaagagacctcagcagaggaggccgtcagctggcaggagcgcaggatggcagctgctcccccgggttgcacccccccagctctgctggacataagctgggtaacagagagcctgggagctgggcagcctgtacctgtggagtgccggcaccgcctggaagtggctgggccaaggaaagggccctctgaacccagcagggatgcctgcctatgcctgccagcgccctacgcccctcacacaccacaacactggcctctccgaggctctggagatactggccgaggctagcaggctttgaaggcagtgagggccgcctcctcaccttctgcagagcagcctcggtgctcaaggcccttcccagccctgtcacaaccctgagccagctgcaggggcgttccccactttggagaacactcctctagggttgtccaggagctgctggagcatggagtgtgtgaggaggtggaaagagttcggcgctcagagaggtaccagaccatgaagctcttcacccagatcttcggggtcggtgtgaagactgctgaccggtggtaccgggaaggactgcgaaccttagatgacctccgagagcagccccagaaactaacccaacagcagaaagcggggctccagcaccaccaggacctgagcaccccagtcctgcggtccgatgtagatgcccttgcagcaggtggtggaggaagctgtggggcaggccctgcctggggccaccgtccacgcctgaaccggcggctccgcagggggaagtggcagggccatggactgtggaacttccttcattaccaccccaaggagggtccaggaggcggggctggtgcctagaagtgattggtgccggctgaaggaacagggctcatccttgtacccaccagcaccaggcaacagttggtggtagtcccctaccggcttggccaaaagagccacagtggccgcttggaagacaaagttctggttttcccggctaccaaactcccgggggctgtgtgggggggcccacgaaaggctggcccatcttggaagggcgggagagtgactctggtgtttcgccggtaccaagtccccttgcctgccgtgggactggccccactttccaagcgggggcccaaacagaggagagtgtaacacatgggtttgccgcgcaaaat

SEQ ID NO: 98468 - DNA, 982 bp, Homo Sapiens
cgccgcgactcgggctgagggagctcgggccaatcagagggacggccccagaatggcatggtagatggaacgcagctgagaggtctgacaagatgtaccaggtcccactaccactggatcgggatgggaccctggtacggctccgcttcaccatggtggccctggtcacggtctgctgtccacttgtcgccttcctcttctgcatcctctggtccctgctcttccacttcaaggagacaacggccacacactgtggggtgcccaattacctgccctcggtgagctcagccatcggcggggaggtgccccagcgctacgtgtggcgtttctgcatcggcctgcactcggcgcctcgcttcttggtggccttcgcctactggaaccactacctcagctgcacctccccgtgttcctgctatcgcccgctctgccgcctcaacttcggcctcaatgtcgtggagaacctcgcgttgctagtgctcacttatgtctcctcctccgaggacttcaccatccacgaaaatgctttcattgtgttcattgcctcatccctcgggcacatgctcctcacctgcattctctggcggttgaccaagaagcacacagtaagtcaggaggtacggtctatccctagcgggggctccaaggcagcccagaagaacaatcaaggacatctgtcctcaggattcgggtaatggtgaggtgggaactgagttctaatgggaaccctggcagaggggtgctgcggtcggggctggggcttgggaaccaaactgagggtggctcggtcagaatctaggactatagcactgtgtccgggctagtgtgcgagacttgcccaataccaacacactggacgctgccactggggatagaatgacgagtcgcatctaggccgcactcgagttaggaacagtgtcccacgactggacctgtcctcattccagcgccccaccatgtacatgggtctcctttcccccag

SEQ ID NO: 98469 - DNA, 1114 bp, Homo Sapiens
cgcagagccagcccccgaccccgggccacctgggcccccgggttccgccggcactctcgccaccaccgcgtgggtctgacaagatgtaccaggtcccactaccactggatcgggatgggaccctggtacggctccgcttcaccatggtggccctggtcacggtctgctgtccacttgtcgccttcctcttctgcatcctctggtccctgctcttccacttcaaggagacaacggccacacactgtggggtgcccaattacctgccctcggtgagctcagccatcggcggggaggtgccccagcgctacgtgtggcgtttctgcatcggcctgcactcggcgcctcgcttcttggtggccttcgcctactggaaccactacctcagctgcacctccccgtgttcctgctatcgcccgctctgccgcctcaacttcggcctcaagtgtcgtggagaacctcgcgttgctagtgctcacttatgtctcctcctccgaggacttcaccatccacgaaaatgctttcattgtgttcattgcctcatccctcgggcacatgctcctcacctgcattctctggcggttgaccaagaagcacacagtaagtcaggaggatcgcaagtcctacagctggaaacagcggctcttcatcatcaacttcatctccttcttctcggcgctggctgtctactttcggcacaacatgtattgtgaggctggagtgtacaccatctttgccatcctggagtacactgttgtcttaaccaacatggcgttccacatgacggcctggtgggacttcgggaacaaggagctgctcataacctctcaacctgaggaaaagcgattctgaacccttcagtcctgcttgggaggacgcagcccactgcccagaaacaagaaacacgaaaccattctggacttccccaacccacatcctctcttggccttactgaagatgggggaagggtaagaaggaagggtgtaggccaaggctcaccccagtgctgctggcttctcctctccacccctcatatgggcgtggggtcctcaaacatcacctttacctgagaggtcccaagaagctgagctggcagagagctccaccatttggtgct

SEQ ID NO: 98470 - DNA, 930 bp, Homo Sapiens
tggtagtcagagcgggacggccagcagagtttctccctggacggtgcatgtcaccacttgccggacaggtccctggagcctggatgcgtacaggtttcccaaggtattggggatgtcacctggggtcagaacgacctcttggaaacgcagcctgtcctgggagccgtccaaacagggtagaccagctgcccgaactggggtgatccttccaggaacccaggccagcgcagccccccagtgcaggcctcatccagaagcagctgctcccaccgcagcaccagctcctcgtgcagcagctctgccaagtggctcgccaccgacgtgcccaggatggggcccccgaggatagagaagcggcgctgtcggttgctgaggtaagcccagggacacccccagggctggtgtccaccgaggtcctggagcagcttcttcacactgaccactgtcttcttcttagtgcggctccccgctccctccagcttgaaattctccagcatcagcttccccaggggcgcaaaggctacgtctccatgatccaagaggaaccggctgatctgctcagtcacatccagcacgactcggggccgcttccgataccggtaccctccgcggaaaagcaggtcccgggcagtcaggccagggtcccagggatcgatgaggggaggcagcatggggagaggcccaggggttgccggctcccacagcaggtccttggtcacatgcagtgccccattctctgagttctggggctgggcctctggcagagtcagtgcgtctcgccaggtgaccccggcctcgtcgtggtcgtctggaaaatgggcctcggcgtgatgctcgccggacctggcaccacgagggaaatctcaagtagaaccccagctttggcactcgggacgggtcagccccgccgcagctacccacggtcttccg

SEQ ID NO: 98471 - DNA, 865 bp, Homo Sapiens
gcgctggtaccggtccggagttcccgggatatcgtcgaccacgcgtcgccacgcgtcgccacgcgtccgcacaggtttatagaaattaccagtcaactttctcttgtaaatcatctacttctatttccttcttccttcaatatagaggtaaaccttgtgaaacttgtttcaaatttaatgaatgactttatatatagttttggttttttaactatatgaatatatcacctataacaaatgcaaatatttgtttcacacatccatcctacccctgaaacctccccccttcacacacacactttatacacttcagtggtttcctttaagacaaagttttatcattaagaggctgcatggttttgctccagttatctttcatgtctcatcttaaatttgctttctccccttccctatgcactagccaagctaacttttcttcagtttctcaatttgctctttttcactactgtgtgtctaagaactatgttctcttgcatggattattcttgtatctaacatacactaatccttcagatctggtgctccaaatatcccttctacagagaagatgccccaatcaatcaaggcctaaatcaagcgtcacctgtttactcatatatcttttgtcacaaaacaatttagaacctattattttacctatatttgcatacttgttatctgtttaattattttttctactcctgttagtccacatacaccttgatggcaggagtagcgggagaccatgtactccttaacttaagggatgagaaagaagtcaaaaagcacaagagaaggacaatgaattcaaaagagaggaaagaaaatctgcaaaggtgtaaaagaatactatgttattctatgt

SEQ ID NO: 98472 - DNA, 1330 bp, Homo Sapiens
  misc_feature (46)..(92): n is a, c, g, or t
  misc_feature (771)..(781): n is a, c, g, or t
  misc_feature (837)..(846): n is a, c, g, or t
  misc_feature (921)..(960): n is a, c, g, or t
  misc_feature (979)..(990): n is a, c, g, or t
  misc_feature (1010)..(1019): n is a, c, g, or t
  misc_feature (1111)..(1149): n is a, c, g, or t
  misc_feature (1179)..(1187): n is a, c, g, or t
ttgtcaaagacccaagtagcgaggcctgggtggcgaatccggcacnnnnnnnnnnnnnnnnnnnnnnnnnnnnnnnnnnnnnnnnnnnnnnnatcaaaggctggtggggaggaccagctctggaggccctactactcctacaagcctaagcgcaaggctggagctgctggaggtgccagtgtggggggcagtgggctgccccgaggccgccggccaccacgttggaggcagaagctggaacggaggagctgggaggaaaccccagcggccgagagcccagcgggacgtgcccgcacagagcggaggcaccgatgcggggactgtgcccagaccttcaccaccctgagaaagctgcggaagcaccaagaggcccacggtgggggctcccacagctcccgggccggacggaggccctccacccgctttacctgcccccactgcgccaaggtgtgcaagaccgcagctgccctgagccgccacgggcagaggcatgctgctgagcggcccgggggcaccccaacccctgtcattgcctattccaagggcagcgctggcaccaggcccggggatgtcaaggaggaagccccccaagagatgcaagtctcctcatccaacggtgaggcaagtggccgggagcacctgctgctgaaggaagcttcccgaagaccgccctcacttcccaagaccccctatcaattttcagggggggtgaaggaaaccccccccagctaattggtcaaaagccgggggggccaggctaaatgttaatannnnnnnnnnntggtggacaagcgcaaaattttttccccaccttggggccccctctggacattcttnnnnnnnnnnaccccagaccacccgcgggggaaaaaacccccctttgatactcacggaatgtgggcccccacagggggcgccacnnnnnnnnnnnnnnnnnnnnnnnnnnnnnnnnnnnnnnnngggggtctccccaagatannnnnnnnnnnnccccttctcggcccgaaaannnnnnnnnnaaaaccccccggtaaatggggcgaaaagggggagaaaaataagggggggcgctctgcgcctacaaaaaaagagttcaacatttttttctccnnnnnnnnnnnnnnnnnnnnnnnnnnnnnnnnnnnnnnngcactttgcggttcaacaaaaagggggagnnnnnnnnnagaaaatttcccccctttgtgccccgggcgctcttaaacacccttttaacagaaaatcctttcgcggacaaaccctttttgggggcccgctgaattctccctaccgcagggggtgaaccttccccaaaaaacctaggggggcc

SEQ ID NO: 98473 - DNA, 1002 bp, Homo Sapiens
  misc_feature (334)..(334): n is a, c, g, or t
  misc_feature (384)..(384): n is a, c, g, or t
cctgggggccccaggaaggccaggtttttaaggggaagggaaaaaagaaaagggctaaccccgaaggcttgcccggggggaaagccccgcaaaattccccggggggggttttcgcatcctcctgtggccttccactgcagggcaggacaaaccctggatgccacctggagctgcttcctgagttggcacactatcgtgtacacagcagtcttcagccccctggaaggaggccatagtcgtgtgaggatggcaaagtcgaacaggaagctttgagtgctttcctccacgatgtcaacgaggagatccagtgccagatcgaggtggatggaacacncaggggtaggggtgcaggtgtgggcagtgatgtcccttcccctccctccnctggtcccacagactgtggccatgaggctgcaggctggtgctatgacagcagattgcagcacagggccctcccctccagcccccagtgggacatcaaaaccaccctggggccatttgtgcagggcaccacctccagtattgatggggaaaataaactcagtagagccacgacagggtggagagaagcagggaccattgtcttcctcaggagcgtgacagctgaccccacagaccatgcttgctggtacacactggtcccagacccaggcctgtcggacatcagcagtgtgctaaaaacgtgtaagatgtcactactcaccgtgtgtcctatctagttgacatgggtggagtcagctaaggggtgaatgttcatatgctcccaattcacgttgaagccctgatgaatgggattagtgctttataaggagagacaccagagagatgatctctctctccaccatgtgaggacacagtgagaagacagccgtctgcaggcccggaagagagccctcaccaggaaatgaaactgttggcaccttgagacttcccagcttccagaactgtaagaaataaatgtttgttgtttaagcacctcgtgccgaattcgccacccaggcc

SEQ ID NO: 98474 - DNA, 1020 bp, Homo Sapiens
  misc_feature (918)..(918): n is a, c, g, or t
  misc_feature (925)..(925): n is a, c, g, or t
  misc_feature (1004)..(1004): n is a, c, g, or t
acccggacccaccaccaccaagaggaacgggagccgatcctcaccaatgtagcgaggcctgggtggcgcgtgaatcatcgcagaagagaacaagaacctgcagccccagggagacgaggaccccgggaagttcaaggaggctgagctgaagatgcggaagcagtttgggatgcctgagggcgagaagctggtgaattactactcctgcagctactggaagggccgcgtgccccggcagggctggctgtacctgacggtcaaccacctgtgcttctactccttcctgctggggaaggaagtgagcctcgtggtgcagtgggtggacataacgcgtctggagaagaacgccaccctgctcttccccgagagcatccgtgtggacacccgcgaccaggagctcttcttctccatgttcctcaacatcggcgagaccttcaagctcatggagcagttggccaacctggccatgcggcagctgctggacagcgagggcttcctggaggacaaggccctgcctaggcccatccggccacacaggaacatctcagccctgaagcgagacctggacgcccgagccaagaatgagtgctaccgagccacgttccggctgcccagggatgagcggctagacggccacacaagctgcaccctgtggacgccgttcaacaagctgcacatccctggccagatgttcatctccaacaactacatctgcttcgccagcaaggaggaggacgcttgccacctcatcatacccctgagggaggtgaccattgtcgaaaaagctgacagctccagcgtgctgcccagccccctgtccatcagcaccaaaagcaaaatgacattcctgtttgccaacctgaaagaccgtgatttcttggtgcagaggatctctgacttcctccagaaacaccatcncagcagncaggcagtatcgggagcaggaaagccagtgttgtggaccctagcacagagtcttccccagctcctcaagaggggtcggnagcagcccgccacccc

SEQ ID NO: 98475 - DNA, 991 bp, Homo Sapiens
  misc_feature (964)..(964): n is a, c, g, or t
  misc_feature (979)..(979): n is a, c, g, or t
aaggagcgaggcctgggtggcgaattcggcacgagggaacggctgcctggtgtacaatgacaccaccatggtatgccgcgccccgtctgtggccaaccctgtgcgcagcccaccagagctgggggagcggccggatgagctgggcttcgtcatggacaacgtgcgctccctgcttgtgctcaactccacctccttcctctactaccctgaccccgtactggagccactcagccccactggcctgctggagctgaagcccagctccccactcatcctcaagggccggaacctcttgccacctgcacccggcaactcccgactcaactacacggtgctcatcggctccacaccctgtaccctcaccgtgtcggagacgcaactgctgtgcgaggcgcccaacctcactgggcagcacaaggtcacggtgcgggcaggtggcttcgagttctcgccagggacactgcaggtgtactcggacagcctgctgacgctgcctgccattgtgggcattggcggaggcgggggtctcctgctgctggtcatcgtggctgtgctaatcgcctacaagcgcaagtcacgagatgctgaccgcacactcaagcggctgcagctccagatggacaacctggagtcccgcgtggccctcgaatgcaaggaagcctttgcagagctgcagacagacatccacgagctgaccaatgacctggacggtgccggcatccccttccttgactaccggacatatgccatgcgggtgctctttcctgggatcgaggaccaccctgtgctcaaggagatggaggtgcaagccaatgtggagaagtcgctgacactgttccggcagctgctgaccaagaaacactttcctgctgaaccttcatccgcacgctggaggcacagcgcaagcttctccatgcgcgaacggcgggaatggggcctcgctcatcatgacggccctgcaggncgaaatggaataacncccaggcgtgct

SEQ ID NO: 98476 - DNA, 548 bp, Homo Sapiens
gcgttagggggcactggatttaatgagggaagcacatgaacgcaggcagtgatgtggctgtgtacggtctggtggccggccctgctccttctcctggaggaactcccgtgagatccggtgcctgacaccccccgggcagagccctggcagcgctcccatcatcatcaacatcaaccgcgcccagctcaccaaccctgaggtgaaagtacaactacaccgaggaccccaccatcctgaggatcgaccccgagtggagcatcaacagcggtgggacactcctgacggtcaccaggcaccaacctggccactgtccgtgaaccccgaatccgggccaagtatggaggcattgagagggagaacggctgcctggtgtacaattgacaccaccatggtatgccgcgccccgtcttgtggccaaccctgtgcgcaacccaaccagagctgggggagcggccggaatgagctgggctccgtcatggacaactgttgcgctccctgcttgtgctcaattccacctccttcctctaataccctgacgcatgaacctg

SEQ ID NO: 98477 - DNA, 978 bp, Homo Sapiens
ggggtggaactaaagaggtgagtcccaggacccggggaagccggggccgcccccccaaggcccaaggcagggtgggccaggccttgggttgaagaaagatttccctgcccagggccaggaaggggccccttcagccaaagcctaagacccctggtagtgtgctgtgagcccgcccctgcgcagaggcctcgcaggacaaatctccaaccctcaactccctctgcaggattcaagcatacatgccgaccatctccagcttccagagacaccatcacaggggctggggtgcagccccacgcacgcacctcccatccagggtccccaacaccactcctcatggcaggtgctgtgtgggactccctgacggagggcccaagagcaacactgtggagcgggatccccatgacctgcgcctgagcccccatgacctgcgctgcagcctcctgccctgaatgccagatctccccatggtacccggataccacataaaaacaaactaaaaggacaggagaaaaccgcctaaatgtcacatttcacccacgagccagcctggccagggggcaaggcaccgcgccacccacgcccagccaaactcatcaatgccagccgatactcatcaacgccagccgatactcatcaatgccagccgatactcatcaacgccaaccgatactcatcaatgccagccaatactcatcaatactggccaaactcattgatacgggccaatactcattgataccggctgatactcattgataccagtcaatactcatcaatgctacccacggtggcccagtaccggctgctgctcgtcaagaccggccaatactcaatactgcccacagcagcatggcaccagccgctgctcctggaggatcatcgatacccatcaatgctgctcaatgcttatctatactggccagtacgtgcccacacctgtcctcgtgccgaatcgccacccaggcctcgcttcct

SEQ ID NO: 98478 - DNA, 1341 bp, Homo Sapiens
  misc_feature (17)..(17): n is a, c, g, or t
cccttcagctcaactcnattcttcaccactacactaccctccctccgtagcgaggcctgggtggcgaattcggcacgagggtcatggctgcgcgtgcagacgtgcgtcatcgccgcgcgccgcgccgagcgaatctcggagtcggtgggtgcagatggcggcggcagttgtggtggcggagggggacagcgactcccggcccggacaggagttgttagtggcctggaacaccgtgagcaccggcctggtgccgccggctgcgctggggctggtgtcttcccggaccagcggtgcagtcccgccaaaggaagaggagctccgggcggcggtggaggttctgaggggccacgggctacactcggtcctggaggagtggttcgtggaggtgctgcagaacgatctgcaggccaacatctcccctgagttctggaatgccatctcccaatgcgagaactctgcggatgagccccagtgccttttgctactccttgacgcttttggcctgctggagagccgcctggatccctacctgcgtagcctagagctgctggagaaatggactcgcctgggcttgctgatgggcactggtgctcaggggctgcgagaagaagtccacactatgttgcgcggagtcttgttctttagcacccccagaaccttccaagagatgatccagcgtctgtatgggtgcttcttgagagtctatatgcagagtaagaggaagggggaagggggcacagacccggaactggaaggggagctggacagccggtatgcccgtcgccggtactaccggctcctgcagagcccgctgtgtgcagggtgcagcagtgacaagcaacagtgctggtgtccccaggcctctggagcagttccatcagcctcagccaggtcttgtgagtagtctgtcccgatggccatgcccttgctccttctggttccccgctgctcccctgggtccagctggcctcagcagaaagctggtgagccgtcctgataaccaggaacatgacagagagagagtcccagggattcctgtgcagcgtgtcctggacacaggtgtctctcttctgtcactcaccttcagtcccacagattcatgccttgaccctggtaaggccctatgtggcttgtgtctgcagcagcaaatttcttagcaactccaaacttcctggactctgcagaattccactgtgccttttgtcgatcctggggaggaatgattctcaccctcgtcgacattccttgccctgtaattgtgaacagaagcttgctgctgcttctctccaggaagatcaggtcactgtgagggcaagcagtctcttgtcagttttggagagg

SEQ ID NO: 98479 - DNA, 957 bp, Homo Sapiens
gtagcgaggcctgggtggcgaattcggcacgagggtagactgacagccagctagccaccagccttacctgccacctgcacctgcacagtggcctcgccgaactttacaccatccttgaagcggcagcagtatgtcctgttgtcaaaggtggtgaccctgtgactcctcaccatggccttgcccctggccacgtggtcactcatgaaggtggtccttcctctgtactgccacttttgctctccatccatgtccatccctctctcatgcatgtgcacagctagggagggctggcacctgtaccacctcagctccatgtcctcggcactgatattggggaacagctggcactgtaactccacgtgtcccccagccatagccagaataggggcatgaggcccagtgacatcaaagtcagctttccctgggggaggcagatcagaaagggctgggttaggccatgtgttgggaggccagggcacttcccccctgcccctccctcttcttggaagctttggggacctattgagccctgagctgctgggagatgcttcagcttcccgccatgctggacacacccccacctatgccagggcacctgcctcgacttgcacaggagtctgtccctcagttttgacagatgctggccagtgggagctgcaggaagaccaaggtgacaaagcagatggacaggaaagcctctggatcgcatgtcactgccattcctgccaggccggagccacgcactgtcactgggagaagagccaccgccaggaagctaacaggtgcagaggaaaagtgccatggaagaaaaagaagaaaaaggtcatttactctcactctcaaacaagttatttaatgctataaatggagacacagcaaagcctcatgtgccccctgtacccatctccctggcgggtacacaccctcttcacccctaatctggtctgcgcgaaattc

SEQ ID NO: 98480 - DNA, 1024 bp, Homo Sapiens
cacgccgcgtcacgcccctaacgtcccctccgtagcgaggcctgggtggcgttccaacacgagggcaggatgtggggctggtctccaagcagagtgtgcagactcgccacctctctggtgggatgcaacggaagctgtccgtggccattgcctttgtgggcggctcccaagttgttatcctggacgagcctacggctggcgtggatcctgcttcccgccgcggtatttgggagctgctgctcaaataccgagaaggtcgcacgctgatcctctccacccaccacctggatgaggcagagctgctgggagaccgtgtggccgtggtggcaggtggccgcttgtgctgctgtggctccccactcttcctgcgccgtcacctgggctccggctactacctgacgctggtgaaggcccgcctgcccctgaccaccaatgagaaggctgacactgacatggagggcagtgtggacaccaggcaggaaaagaagaatggcagccagggcagcagagtcggcactcctcagctgctggccctggtacagcactgggtgcccggggcacggctggtggaggagctgccacacgagctggtgctggtgctgccctacacgggtgcccatgacggcagcttcgccacactcttccgagagctagacacgcggctggcggagctgaggctcactggctacgggatctccgacaccagcctcgaggagatcttccttgaaggtggtggaggaatgtgctgccggacacagatatggaggatggcagctgcgggcagcacctatgcacaggcattgctggcctagacgtaaccctacggctcaagatgccgccacaggagacagcgcctggagaacgggggaaccagctgggtcagccccagagactgaccagggcctctggggccaaacccccgggggccggttaacggggctggggaccgaacccgccaccagctccaggccctggtttttaaaggcttttctgctttgcccccccaaaccgccgcgggccggtt

SEQ ID NO: 98481 - DNA, 1047 bp, Homo Sapiens
  misc_feature (273)..(307): n is a, c, g, or t
  misc_feature (693)..(693): n is a, c, g, or t
  misc_feature (927)..(927): n is a, c, g, or t
  misc_feature (930)..(930): n is a, c, g, or t
gtagcgaggcctgggtggcgaattggcacgagggaaactttccctcatcaactatttgatgatgtaaggtgcagtttatataaagccagatacatgctggattcttttcccttactgaccagtttttaaaacgagttggtttcctagtctcctgcaaccagtgattttgatacagaatggttgggctcctggctaaaccccacccttgggcctggagccgcagccctaagtgaaaacagctgaccccgttttccacccaaatgttgccttttnnnnnnnnnnnnnnnnnnnnnnnnnnnnnnnnnnngacttcagctggcagagcaacacaagcggctgatgcaaggggtcggggatgcaagctgctgaacgtaggggatgcaagcggctgagcatcagagactacagatagacgcagctaacctcagacggtgcagcttcagggaaagatcaccttcttcccgcaccatcccctttccaattccccattctgctgagagccacatccatcgaccaataaaatcctctgcatacactacccttcaatctgttcctgtgacctaattcttcctggacaccaaacaagaacctgggtgccgagagggcaagggcttggatgctgctgtggggcctgcgcagagtctgctctcatcagagaggagcgaccagctggttccagcatttgttccctcncagttccagcactcacctgctcacacgctccctctcgcgaggagtggccagcagcgggctgagtgaaatgcgccactccagttcccgcctacaaagcatgtcaagggtcaggggaacaatccccgtctcaatttgttgcagtagatattggctcttgggttttgaagtatcgggtatggaaggaatggacttaaaacagaaggaatgtggtttttctttcggttggctattttnggntccttaattgaatgcttcaaggtgggtcaacatttttcagccaagaagggcaggcccttttagcaatggtaaaccatgaattggatggggcttttggatttttaccgtaaaggggac

SEQ ID NO: 98482 - DNA, 1430 bp, Homo Sapiens
  misc_feature (1212)..(1229): n is a, c, g, or t
gacgttctctctgtggggcccatcatcccctgtatcctcaaagctcttgctgatgagaatgagtttgtgcgtagacaccgacctgtgcgcgggaccagcgggtaatctaccatgtacgctagagacagacatcgccctgctgctgacccagctagagcaaggcctctttgatgacctttggagaatcaggttcagctactgttcagctccttggggatctcctgtttcacatctcaggagtcactggtgaagataaccacgagaaactgactctgaggatgataactttggaactgcccagtccaacaaggcgatcatcactgccctgggggtagagcggcggaaccgggtgttggcagggctgtacatgggccgctcagacacccagctggtggtgcggcaggcgtccctgcatgtctggaagattgttgtctccaatacccccacgcaccttgcgtgagatcctacccactctctttgggctcctgctgggtttcctggccagcacgtgtgcagataagagaacgattgcagcgagaacattggggagatcttgtgcggaagttaggggagaaaatcctccccgagatcatccccatccttgaggaaggcctgaggtctcagaagagcgatgagaggcagggtgtgtgcattggcctaagtgagatcatgaagaccaccagacgggatgccgtgctgtatttctctgaatccctcgtgcccacggcaaggaaggcttagtgtgacccactggaggaggtcagagaggcggcagccaagactttcgagcagctgcattccaccatcggccaccaggctctggaggacattctcccatttttactaaagcagctggatgacgaggaggtgtcagagtttgccttggatggtctgaagcaagtcatggcctattaagagtcgtgtggtgctgccctaccttgtgcccaagctgacaacgccacctgtcaacacccgggtgctgggctttcctttcctcaggggctggtgatggcctcaccccgtcatcttggcgggatcctccccagcggtcatgctgggcccttgaaggaaaagcttttgggaaccccaaaatgagcagcctgggagatgggccaaattggccagggcttgtgaatccctctcccgtaataaggaatgacaccaggggccaccggggatccatccctcccagggattcttggttgggagggnnnnnnnnnnnnnnnnnntgaaggtgggggcattgaaaggccaaagcctggctggcacatcactcccgtccaaaaatccaaacgtgtgctccgcgccttcaaagggggctgaacttaccccctcacgccccacccgtgggggaaggcccggagatcccttcggggcccttgaattccgcccccctctttctcaatgggactacccaggaccccgctggg

SEQ ID NO: 98483 - DNA, 540 bp, Homo Sapiens
atgtgaggtgatctagaggactccagttacagcgttggggggggactctgctcccccgaaggaatgggagtacagagtccagctctggtgatggggatacagttctggttcaaaagcagaagggggctcgcttctcctaccctacattgtccctttagctgccagcaggaacgggctctgaggactcaccagatccggggctgccccatctacagtgtgggggctgtggcttcacctgtaaacagagccgttgcatgcagcagcaccggcggctcaagcacgagggggtgaagccccatcagtgccccttcttgtgacttttcgaccaccagacggtaccggttagaggctcaacagtcccgaaacacaggcatgggccgcatcccctgaagctcttgcccacaagacgttgggtaccaactcgaaactgcgcttgcaccggttaagggtacatgacaaaacacctacccacttctgtccacttagtgactatagtggctaccttcgccatgacatcactcgtcatgtcaacagctgcca

SEQ ID NO: 98484 - DNA, 1904 bp, Homo Sapiens
ggtccaaggtagcgaggcctgggtggcgaattcggcacgagggtgggacggtgggtgccggagcagagcagcgccgtggtcctggcggtcctgcactttcccttcatccccatccaggtcaagcagctcctggcccaggtgcggcaggccagccaggtgggcgtggccgtgctgggcacctggtgccactgccggcaggagcccgaggagagcctgggccgcttcctggagagcctgggtgctgtcttcccccatgagccctggctgcggctgtgccgggagagaggcggcacgttctggagctgcgaggccacccaccggcaagcgcccactgcccccggtgcccctggtgaggaccaggtcatgctcatcttctatgaccagcgccaggtgttgctgtcacagctacacctgcccaccgtcctgcccgaccgccaggctggagccaccactgccagcacggggggcctggctgccgtcttcgacacggtagcacgcagtgaggtgctcttccgcagtgaccgctttgatgagggccccgtgcggctgagccactggcagtcggagggcgtggaggccagcatcctcgcggagctggccaggcgagcctcgggacccatttgcctgctgttggccagcctgctgtcgctggtctcagctgtcagtgcctgccgagtgttcaagctctggcccctgtccttcctcgggagcaaactctccacgtgcgaacagctcccggcaccggctggagcacctcacgctaatcttcagtacacggaaaggcggagaaccctgcccagcttgatgaaggaaggccaacaccggtgggcctctgtgctgctggacgtggccctgggcctcatgctgctgtcctggctccacgggagaagccgcatcgggcatctggccgacgccctcgttcctgtggctgaccacgtggccgaggagctccagcatctgctgcagtggctgatgggtgctcccgccgggctcaagatgaaccgtgcactggaccaggtgctgggccgcttcttcctctaccacatccacctgtggatcagctacatccacctcatgtcccccttcgtggagcacatcctttggcacgtgggcctctcggcctgcctgggcctgacggtggccctgtccctcctctcggacattatcgccctcctcaccttccacatctactgcttttacgtctatggagccaggctgtactgcctgaagatccatggcctgtcctcactgtggcgtctgttccgggggaagaagtggaacgttctgcgccagcgcgtggactcctgttcctatgacctggaccagctgttcatcgggactctgctcttcaccatcctgctcttcctcctgcctaccacagccctgtactacctggtgttcaccctgctccgggctcctggtggtcgccgtgcagggcctgatccatctgctcgtggacctcatcaactccctgccgctgtactcactgggtcttcggctctgccggccctacaggctggcgggttcagaaccctggagacctgaggccacaggcctttgttcttctgccttgggattttctgggcttgggagtctgaactgcaggccagggccaagcgcggcaaagtcagaggcactaggagccagcagggcggccaccatccactggcgtgaagttccgtgtcctccggcacgaggccggcaggccctccgcctcctgatgcaggcctgagggaccctggtgtggtcctgctggatggggccccattctgccctgtgttcggagagcgcccttggctggctggggctgcctgggcacaccaggctcaagtctggttgggacgaaccgcttggattaaccgttgcctatagcggttgtgcactacggtcccatttgttgcacc

SEQ ID NO: 98485 - DNA, 1392 bp, Homo Sapiens
attccaagactgtggggcggatcaagctagactgctctctacggcccagctgcccactggaggtcgctgctgcacccaaactttgcaaggaattcggtccagaggattacggcgaagaggtaaaagcgaccctcagtttcccccagtcctgctcattttggtcacgcctctttgaagtcagctgtgcagaaacccgcgacggatgggcgccagacggggctctggaggctttggggagttgtagtctccggccatgcccttgaggatcttagattacctcctgggccacttggatgatgaagggaaatcaactggacagagtgacaggggcaagggggctgagggactgggcacctactgtggtctccgcaagtccttcctgtatcctccccaagagtctgagccctgccctcaaagcccctctgcctctgccaccttccccagtgtctcagacagcctgcttcaggtggccatgccccagaagctcctggtgacagaagaggaagccaatcgcctggctgaggagctggtggctgaggaggagcgcatgaaacagaaagcagagaaaaagcgactcaagaagaagcgtcaaaaggaacggaagcgacaggagcgtttggagcagtactgtggggagcccaaggccagcactacctcagatggagatgagagccccccatccagccctggaaacccagttcagggacagtgtggtgaagaagaggactcactggatctatctagcacttttgtgtctctggctttgcccaaggttgggggattggcccctcagtgcccgcagagaagaagggactgaaaccaggaggccccaaggcaggggtctggccctccagaagatgggtcaagaggaagagagccctccaagagaggagaggccccagcagagtccaaaggcatctccgggactgctggcagctgccttacaacagagccaggaactggcaaagttgggtaccagctttgctcaaaatggtttctaccatgaggccgtggtcctcttcacccaggccttgaagctcaacccccaggaccaccggttatttggaaatcgttccttctgccatgagcggttgggtcagccagcgtgggccctggctgatgcccaggtggcccttaccctacggcctggctggcccccggggcctcttccgcctgggcaaggccttgatgggactacaggcgcttcaaagaggcagctgctgtgtttcaggaaactctggagagggggggtcccagccctgacgccagcccggagagcttccggctcctgtgcctttctccacccttcaaaactggaaaggggtccaaccgaaaggaagggaaattctgggtggcaccccaccccttcctggttccaccccttgggggggt

SEQ ID NO: 98486 - DNA, 1640 bp, Homo Sapiens
  misc_feature (256)..(256): n is a, c, g, or t
  misc_feature (266)..(266): n is a, c, g, or t
  misc_feature (476)..(476): n is a, c, g, or t
  misc_feature (507)..(562): n is a, c, g, or t
  misc_feature (609)..(609): n is a, c, g, or t
  misc_feature (807)..(807): n is a, c, g, or t
ggggcgcgcgtgagcgccgtaagactccaggcggcgaggccgttatcgaatgaaccagcggggatcgtgggggcgtctatttgagggagggaaggcgcccagaaaaaacacccgatgagttgcgaattcgggttacagagtgattcaagtgggcgcaggagagggcaacagaagtaatgagattgtggttgggggaaatagaggggagggtagtttggggtaaagtaggaaagtttggcatggagaatgtgttggntaatgtgaanaaaatggtgagggggcctggcgcgtagatcttgggtcgcacagaagttgcagacgtcggggtcgggacagctgtgggggtcatattttgcgcacgtcttactccaccgtccccaaatgggtggcggagcgcgggatagtcggtgtggcgcgggactcaattcctgggggtgggggagggatatcaccccactagtcaccggtgttgtttnatctaatgcggtgtacaacaacccccaggcnnnnnnnnnnnnnnnnnnnnnnnnnnnnnnnnnnnnnnnnnnnnnnnnnnnnnnnncccaaatggggtggcgagaagtatggaggcgttgggggggccccttngatgtgaaatgtgtgatgataaggaagcagtgtgggtgtgaaatgtggtttaggagggtgttcgccgcagggtgatcccctcctgttccccttgccaagagaggaggtagatatctggaagtgggtttttgtgggcaggggacctcgaggataggggcgttcgcccgacgagtcccccagatatctgtgactaagggntctttaacactccatcccgaacgtccgagtagcttgaggtgcccagggggacccttacgctttatggggtccagggggagcgtacgaccgtgttcccatggagaatacttccatgggcccccctggaccaatttggagttgcaaaagagggcattttgacggatggaaaagggcgttcctcccttattctgtgaatggagcctccgcaggggggggccgcagtggtggggtggggttctcaaagtgctccctggacgctcctctagttccttctcaccgctgtagcagctgcttctctagttctgccacccgcatcatggttttcattctctaggtccagaagcttctctgtggagatgggacacatgctcctccaactcctccaccttctccagggctacattcttggtctcagcatcctccaacaaacccccgacatcaaacacgttgtccagatatgcctgaatatgcacctgcagcttctcgctctctgtgtgccttgacttctgcaggaactcctctagccccagcttggtaaactcatactgcaggtggacccggaagttcatgtcctccaccgagtgcaccacgatgttgatgaactgcatgcaggccaccatgaagtcaatattgctgtcctcattccggaaatactccatcagcttctcaaagcggtgcagctccttgcatacctctttgaaattgtcaaaggcagcaaggatgatttcgtgacctcctcgcaccaaacacacagctgccagaagctctaagcctcgtgccgaattcgccacacaggcctcgctacgtaggggctttttgagacaaataaagaa

SEQ ID NO: 98487 - DNA, 964 bp, Homo Sapiens
gtttgttgcgcaagcgcacaaaacaccctacgtaacgaggcctgggtggcgaatcggcacgaggcctcgtgccgattcggcacgagggtaactcagattctagccatgaaggtcaagaggaatcttcaaaggaaaatgtgtcatcaaatgctgcctgccctgaccacaccccaacacctaatgatgatggcaaatcacatgaactgtctaaccttcgactggagaatcagctgctgaggaatgaagttcagtctttaaatcaagaaatggcctcgttactccaaagatccaaagagactcaagaagaattaaacaaagcaagagcaagagttgaaaagtggaatgctgaccattcaaagagtgatcgaatgactcgaggactccgagcccaagtagatgacctgactgaagctgtggctgcaaaggattcccagctggctgtactgaaagtgagactccaggaagctgaccagctactgagtactcgcacagaagcattagaagccttacagagtgaaaaatcacgaataatgcaggatcaaagtgaaggtaacagcctgcagaatcaaagctctgcagactcttcaggagagactgcatgaagcggatgccactctgaagagagagcacgagagctataaaacagatgcagagcgagtttgctgcacgccttaataaagtggaaatggaacgtcagaatttaccagaagcaattacactgggccgaaagaaaatactcagatgagaagaagagggttgatgaactgcagcagcaagtcaagctgtataagttgaacttggagtcctctaagcaggaattaattgactacaagcaaaaagctactagaatactgcaatctaagggaaaattgattaacagcttgaaagaaagctctgggtttgaaaggcctagatagcagcactgccagtagcatggagctggaagaaacttcggcatgaggat

SEQ ID NO: 98488 - DNA, 1622 bp, Homo Sapiens
ggcctgggtggcgaattcggcacgaggaacttcctgttgggtgctgtggtcccaaggcgcgtgctttgcagcagatgtgtgacctggcgttcccctgagtgctcggaaaatggccttgtctccggtcgttcccgttcaggagcagaattttcccactgtaaaaaaccgagcaagtctggataagtgaggctggctccatgtatccagaatcaacgacgggctccccggctcggctctcgctgcggcagacgggctcccccgggatgatctacaggaacctgggcaagtctggcctgcgggtctcctgcctgggacttggaacatgggtgaccttcggaggccagatcaccgatgagatggcagagcagctcatgaccttggcctatgataatggcatcaacctcttcgatacagcagaagtctacgcagccggcaaggctgaagtggtactgggaaacatcattaagaagaaaggatggaggcggtccagcctcgtcatcaccaccaagatcttctggggcggaaaggcggagacggagcggggcctgtccaggaagcacataatcgaaggtctgaaagcttccctggagcgactgcagctggagtacgtggatgtggtgtttgccaaccgcccggaccccaacaccccgatggaagagaccgtccgcgccatgacccacgtcatcaaccaggggatggccatgtactggggcacgtcacgctggagctccatggagatcatggaggcctactccgtgggcccggcagttcaacctgaccccgcccatctgcgagcaggctgagtaccacatgttccagcgtgagaaagtggaggtgcagctgccggagctgttccacaagataggagtgggcgccatgacctggtcccctctggcctgtggcattgtttctggcaagtacgacagtggcatcccaccctactcaagagcctccttgaagggctaccagtggctgaaggacaagatcctcagtgaggagggccggcgccagcaagccaagctgaaggagctgcaggccatcgccgagcgcctgggctgcaccctgccccagctggccatagcctggtgcctgaggaatgagggagtcagctccgtgctcctgggggcctccaatgcggaccagctcatggagaacattggggcaatacaggtccttccgaaactgtcgtcttccattatccacgagattgatagtattttgggcaataaaccctacagcaaaaaggactacagatcctaagccgcccccgcccgcctgctcggacagtttccgttccctcctagtctctgttcgctcgccttaaagctgttttgaagcccagggaaaaatggtggtttgcatccaagagaaaaacccaccactgggatgtcctccgggaaatgatcctcccaagtcccctgccaaaaaccaccccactggcttcccccggaacaatgtccaaagtccagtccggggcccggggaaagcccctggtttaggaaaggatggttccaaacggtccccaccaaagcctgtgtcccttcggtttcttcctccaaagacacccccaggttttttccccgcccccaggccaaaattcccaaaagtcaaggccccaaaat

SEQ ID NO: 98489 - DNA, 873 bp, Homo Sapiens
tggtctcagcgctgggtcatgtgggttgtcttcttgctttggtggcatattggggcgggttcagggttgtggttgcctggtccttctggtgttagggcctcccatggttcttccttggttgcttcagatgcgttgatgttgccctgcatgtacatggccgtcccgtcggttgatgaactttgggtcatggctgcggacggtctctgtcgcatcggcggtgttgtggctccggacggttggcatacaccacatccacgtactccagctgcagtcgctccagggaagctttcagaccttcgattatgtgcattcctggacaggccccgctccgtctccgcctttccgccccagaagatcttggtggtgatgacgaggctggaccgcctccatcctttcttcttaatgatgtttcccagtaccacttcagccttgccggctgcgtagacttctgctgtatcgaagaggttgatgccattatcataggccaaggtcatgagctgctctgccatctcatcggtgatctggcctccgaaggtcacccatgttccaagtcccaggcaggagacccgcaggccagacttgcccaggttcctgtaaaactggagctgtcttttgggactcccataccgagtactgtagatcatcccgggggagcccgtctgccgcagcgagagccgagccaggggagccacgtcgttgattctggatacatggagccagcctcacttatccagacttgctcggttttttacagtgggaaaattctgggggctccagctccggatcctgtgccccgcgccggatcttccttcccgcacatgccctctgcgacatttagcgcccaccgaatcccgctagctcctgcaggttccg

SEQ ID NO: 98490 - DNA, 838 bp, Homo Sapiens
tttttcttccctcacagtcaccctcgggtcttaagtagcgaggcctgggtggcgaattcggcacgagggctgcggagggtgcaggagatcgcggccacctgccaggaccagatgcgagagatcctgagctgcctcgagtttttctgccgctggcagggctgcggggaccgccagctgctgcagtgcgggaggaacgcctccatcgccctgtacaattctgtctacttcatcgtcttctttggctcacgtggcttcctcatccccaggcgggcggagggggacaccaaggttagccaggccgtgctgaaggccaagattcagaaactggccgagagcctggagtcctgcaccggggctctggacgaactcagcgagcagctggagtctcgggttcagctctgcaccaagtccagtcgtggccacgacctcaagatctctgctgaccagcgtgcagggctgtttttctgagaacatcctttccccctaatgaccgaggccagcaaatcatcctcatgggatgctccagaatttgtagctcccttaggaaaacaccaagctgggttaggagccgaaggcaaaggatgagaaaaactgtttttgaagtgggcaggtccccaaagcccttcttttcccatcactgtgacatctgcctgggcttgagtgctacggacttttcagtcttcctagtggaaaaaatgtgacccaaaaaaactccttttttcccttttattccaaaaaacttttcctggcctaaaacaccagcctgggggcaagggcaccttccgtggttttttaaaaggtttattttttcccgggggggtcccccctgggaccccct

SEQ ID NO: 98491 - DNA, 1236 bp, Homo Sapiens
  misc_feature (16)..(16): n is a, c, g, or t
  misc_feature (30)..(30): n is a, c, g, or t
  misc_feature (1031)..(1190): n is a, c, g, or t
cccacccccccacccnacccaacacaggtncatcaacggtcctaggtagcgaggcctgggtggcgattccggcacgagggggacggggcctctggccgcctggctccaacatcaagcaccgggctccgagtggccgggatcagcgccccgaggcagaggccggagggcgcgcgcactgctaggaagtgctggtcccccgcgccgctctgccagcttggtcccccggcagacgcccctgtacgatcgccgctcgccccgcgggcgaggctgcggtggacagcgcggggctccggctggctcgccttcccgcctgccgtgtcctgctgagcgaccctggagtacacatccagatgccagcccagctaccacaggggatccctctgggagactgaaagtacaggttctggggcccaggttgaagccgaccaaccctgagcctcaggccaggggaatggcagcccccttggaggcccaggaccaggcccctggggagggagaagggcttctgattgtgaaagtggaagattcctcctgggaacaggaatctgcccagcatgaggatggcagggattccgaagcctgccgccagcgcttccggcaattctgctacggggatgtgcatgggcctcatgaggccttcagccagctctgggagctctgctgccgctggctgcggcccgagctgcgtaccaaggagcagatcctgggagcttgctgggtgctgggaccaagttccctgaccagtggctgcccagggggaaaaatccaggggcctggggccggcgttgaaaccaatccacccccgggggaaaacccggtttggaaaggggaagggccttggtttcgcccccctttggggttggggggaaaggggaacccccttaacccaagggaaaagaccccggccccccaagttgggaaaaaagagcccctcttgggggccgggaaacaaggggggattgggttgggccccccctttccggggaaaggggaaaggggcccggcgaacacccccccaaaaaggggctttnnnnnnnnnnnnnnnnnnnnnnnnnnnnnnnnnnnnnnnnnnnnnnnnnnnnnnnnnnnnnnnnnnnnnnnnnnnnnnnnnnnnnnnnnnnnnnnnnnnnnnnnnnnnnnnnnnnnnnnnnnnnnnnnnnnnnnnnnnnnnnnnnnnnnnnnnnnnnnnngggggcgagacccaccttgcctccaaaggctccaaattaaaacgcg

SEQ ID NO: 98492 - DNA, 904 bp, Homo Sapiens
  misc_feature (74)..(91): n is a, c, g, or t
aagaccattgggcccccggctttccccctatttgaccccgtgttgccaaattccctggcttgtttgttccaatnnnnnnnnnnnnnnnnnncttcgtttgtccctttccccctggaacgaaacgccctccccactcgccgggaacccagtgcatgcttgatgcagtagatgacggcccggcgactcctcggcctggaaggccttgttcaacttgatgaaggtgtcgatctcgatcctcctgcgcttggccagtgcctcgatctccacctggcagatggagcacacgtacaggtggttcacggcggggccacccccgaatctgttgtacaggtgctcccagacgttctggggcaggatgaccaccaggtcgtcgatgtagtggtatttgtggggcgggatgcctccgtgggagcagaggaaggtctggttggtgatggggcctggctctgcgaaggtgttgaacttgttgagccactcgcgggacacgtagaaccgcagcaggctgggctcccgcatggcggccagggacaccacctgctgtcgctcccgcatggcctcctcgctgctcttcctgtagaagagtacgtagccctcggcgttctgcaccaccgtctcgtggacttctgtgacgtactggtcatcaaactcgtaccactgcccattgatcacgttctggcagtaggcgatgtagtgcccactgcctgccgtgccgtggtggcagatgaccgagaggaggtcgtaggtggtgatctgggatgtgcactccttggcaaggaaggggcgcaggtcgagcccctcgagggggaaggagacgtggctgttgatcttgaatgagtacatcacctcgtgccgaaagcgctttaggtgaatgcacaggatctcgggcaaccgcaggactttgcag

SEQ ID NO: 98493 - DNA, 1679 bp, Homo Sapiens
  misc_feature (313)..(313): n is a, c, g, or t
  misc_feature (473)..(473): n is a, c, g, or t
  misc_feature (596)..(596): n is a, c, g, or t
tttaaatgtgatagagctggcagatgcccggcgtgtttggcgagccctcgggcgactcgtagtggaaggagagggcggagcttatggtcgcgagacaacccagcgaagggggaagaacaaaatctaatgtttgtagaagcaactcccatttgcctacacgaccatccgctttcgattcacctatataacaacatcgcaatccattggcgatgcatctcccccctcttctgctctgagtggtgcaacttaatgcgtggataggaaaagaatcggaaccgaacgctacaggtttggagatcgaacaagtattggntgagccaaaccgccggcccgttcccgcccttaaaatgttagggtgaacaatgattttcctggacggtccaattacaggttaatgttacaacgggccagtccatggcaaagggtccacctggagggggcgattggcaacatactgccgcccacttcccggnccgcctctttcctagtggtcgcgaattctaattatttcgggatggccaaggtatgtgggttggcggagttgggataattgtcacttacaagtaaaacactcaaacacacttcccctagatganggggttggcgcaactagtatgctctccccgcacactacgcgccccaccccaatgggaaaaagggttgtgatattgatggttttgtgggattaatgattataggtcatttttgtcctgtgatcccaacgatatatgcacaagaggggcccatactcccgcgcaagataccatcggacagcaggatgtaaggccaggagatgccccgaatgggagagaggcgaagagaggagcgtcattctctcgctaacgtgtctctgaaggggtccgaaagaaaaaggacacgatttgcgcggatgtccagtgtcaagtagcaaaaagagagccggcggttcaaatagagcggagagggatgctggggatgattgggccaccaccacgcggagcgctccgccccaaggggggccccagccaatggccatctgccgggcgtgggaccagacgcgccaggtcctgtaaggagggggcctacttccaacccgccatggccggcaggacgctgggagccaggggcctagtttcccactccagaggggagaagcaggagcaacaaaacctgggtccccattagtcatgggggaaaagcaaaatgggggagacagggacaaatccaggccgtgggtgggctgcctgtcagggggagtgatatccaaggaggaactggtggtcagagtggggtgggggatacccggtacaatttgttcatgcctcaacaccagccacagcgggcctgccagcccggtgtgccctccctggcccggagtccacagggtgcaaaaggctgaccgcacaggacctcccgtgagaaccctacgctgcagagctcgttctcttggcttccaggcctttttatacgctgtcctgctgcttggacatgccagtccccacccctgcacctaccgagctcctgcggcactcagctgtcacccatctgggacgcacacctgtccgaggctctagatcaaggtgggaggttagtcctcactcccttcaggggctggacagcgagctgaagcctcgtgccgaattcgccacccaggcttcgttaccctggactcgataagaaacaattaaccacgacaaaaa

SEQ ID NO: 98494 - DNA, 1044 bp, Homo Sapiens
  misc_feature (880)..(880): n is a, c, g, or t
aaggtagcgaggcctgggtggcgaattcggcacgagggcccggcccgccattcccagccccgagccatgatgaagactttgtccagcgggaactgcacgctcagtgtgcccgccaaaaactcataccgcatggtggtgctgggtgcctctcgggtgggcaagagctccatcgtgtctcgcttcctcaatggccgctttgaggaccagtacacacccaccatcgaggacttccaccgtaaggtatacaacatccgcggcgacatgtaccagctcgacatcctggatacctctggcaaccaccccttccccgccatgcgcaggctgtccatcctcacaggggatgtcttcatcctggtgttcagcctggataaccgggagtccttcgatgaggtcaagcgccttcagaagcagatcctggaggtcaagtcctgcctgaagaacaagaccaaggaggcggcggagctgcccatggtcatctgtggcaacaagaacgaccacggcgagctgtgccgccaggtgcccaccaccgaggccgagctgctggtgtcgggcgacgagaactgcgcctacttcgaggtgtcggccaagaagaacaccaacgtggacgagatgttctacgtgctcttcagcatggccaagctgccacacgagatgagccccgccctgcatcgcaagatctccgtgcagtacggtgacgccttccaccccaggcccttctgcatgcgccgcgtcaaggagatggacgcctatggcatggtctcgcccttcgcccgccgccccagcgtcaacagtgacctcaagtacatcaaggccaaggtccttcgggaaggccaagcccgtggagaaggacaagtgcaccatccaatgagcgaaggatgcntggggcgggggcttgggcagtgccttcaggaaggggggcccagatgcccactgtgcgcatcttcccacccgagcccccggcagcagtcttggttcacagactttaggcaaccagactggaaggccccccgggccgctggccctccgcaacatttcgtctggctt

SEQ ID NO: 98495 - DNA, 1005 bp, Homo Sapiens
  misc_feature (128)..(128): n is a, c, g, or t
taccaagggccccaatttccccctgggaccccgttttttggctgggctttcccaccggggcggttgggggtcttcttgtcttggggcgttccccggcctggctggtgtttcccccagccacccccggncttgggagccctggctcttcagccaagcattccagtggtttgttgaaatgaattaagtgaaattgagcccacatccccaggatgtgaacggaactctcctcaaggattcaacaaataggaactacccagagcagggaaactgggagaggagtgaggtaaacagaaaacaccctcaccccaatccagagaaaaatggagggaaatttttttaaaatggatatttagaaaattataggaagggcaggaaagagaactgcgcccctcagtgaaccagcgtgaagaaggaagatgcaactccggggctctggcccttttctgtctgacgtggcagtccctggccaagtgtggttgtttaaagtgacaatcccgcttcccaatcacagacccagcttcaagcaccaacagtcacacgtggccagtggctgccaagtcaaacactgcagaatagaaggcttccaaggcctggaaagtcctactgcaatggcactcatggaggagggagcctgggaagggcgtccctgggcctggaggtgtccaggtgtgaggtgcagccccactaccgctgggctggacgcaggccctgctccaggtcagctggaggaaacgctcggcacgccaggggccctgggcctgctcttatcagggtggacttgggatgtgggagggtgagcagacagggaggggggacctgcagtggccccagggatgcagggcagccgaggaggcagggaccatcgcccccagctcacagatggggaaacagaagcatggcccccctactgtggggagccagaaccaggggccccacatagaaaccaacaggatgggggcgaagatcagcctcgtgccgaaatcgccacccaggcctcgcgtcctt

SEQ ID NO: 98496 - DNA, 920 bp, Homo Sapiens
  misc_feature (884)..(884): n is a, c, g, or t
gagcgaggcctgggtggcgaattcggcacgagggcccggcgaaacaccctcccgtgcagccgagcccagccgctctccggccgccgtccccggcggccccatgccccgatgccccgcgggggccatggacgaggggcccgtggacctgcgcacccggcccaaggccgccggactcccgggcgccgcgctgccgctccgcaagcgcccgctgcgcgcgccctccccggagcccgccgctccccgcggcgctgcgggccttgtcgtccccctggaccctctgcgcggcggctgcgacctgccggcggtccccgggcccccccacggcctggcccggccggaggcgctttactaccccggagccttactgcctttgtaccccactcgggccatgggctccccgtttcctctggtgaacctgcctacacccctataccccatgatgtgccccatggaacaccccctttctgctgacatcgccatggccacccgtgcagatgaggacggagacacgcctctccatattgctgtggtgcagggtaacctgccagctgtgcaccggctggtcaacctcttccagcaggggggccgggagctcgacatctacaacaacctacggcagacaccgctccacctggctgtgatcaccacattaccgtctgtggtccggctcctggtgacagctggtgccagccccatggcgctggaccgccatggccagacggccgctcacctggcgtgcgagcaccgcagcccgacctgcctgcgagccctgctggacagcgcagctccgggcacgttggacctggaggcccgcaattatgacgggctcaccgccctgcacgtggcagtgaacaaagagtccctagaaaccgtgcagctcttgntagtgtatggtgccgacatcgacgcagtggacatta

SEQ ID NO: 98497 - DNA, 1526 bp, Homo Sapiens
aaggtagcgaggcctgggtggcgaattcggcacgaggatcaagagggcccaaggacggaagcgctttgggatgaagaattttaagaagagatggtttcgcttgaccaaccatgaatttacctaccacaaaagcaaaggggaccagcctctctacagcattcccatcgagaacatcctggcagtggagaagctggaggaggagtctttcaaaatgaaaaacatgttccaggtcatccagccagagcgtgcgctgtacatccaggccaacaactgcgtggaggccaaggactggatcgacattctcaccaaagtgagccagtgcaaccagaagcgcctcaccgtctaccacccgtccgcctacctgagcggccactggctgtgctgtagggcgccatccgactcggctccgggctgctcgccctgcactggcggcctcccagccaacatccagctggacattgatggggaccgtgagacggagcgtatctactccctcttcaacttgtacatgagcaagctggagaagatgcaggaggcctgtgggagcaaatctgtgtatgacggcccggagcaggaggagtattcgacgttcgtcattgacgacccccaggagacctacaagacgctaaagcaagtcatcgctggggttggggctttggagcaggagcacgcccagtataagagggacaagttcaagaagacgaaatatggaagccaggagcaccccatcggagacaagagcttccagaactacatccggcagcagtccgagacctccactcattccatttaaagtctgcgggacgcgcccagtggcgccagcaagctgcccatgcaaagctgcagcctttgggagggagaagagaaggaagagcgcagagccggcaaagtgagatgcacgccgtcccggcccatagacaagtggcgctggggtttccctctcccagaaccgctgccaccaccgccacgccctccgcagaaagcccacctggccctgtggaacgtgtcgtcatttgattctgtgctttttgctccttgtttgtggggatctggggatcagctgaaggatcaggaagtgtgggctgtgccctagccacaccacagccagcctcagggagccacggcccgtctagtcgactgtgacatgcacctccggccgtgtgtgcgtcagtctcgtgcacgtctgtcttgcgtgcacggtgcgtgtgacgctgggctctgtggctctgtgcccgggaggcctgctggccccgcctcggctttcggcttcatcacattgggaggttcagagcattactctcccactgtgcctgccatccaggcagccatgggaggcggcctccctgttccactttcgaggttcgtttgattcctggctgaggggtcagttttatggcctgggaggtgcagaattacacagaaagtcccaagtcctgaggatgtcccttggtgcttgggggggaataccggtttctggtccacacgagtcccttgggaggagggaaaaagggggcgcgcccttccaa

SEQ ID NO: 98498 - DNA, 1069 bp, Homo Sapiens
gagcgtgagcggccccggtgccccgttccccacggaggccatgggcgacccagcccccgcccgcagcctggacgacatcgacctgtccgccctgcgggaccctgctgggatctttgagcttgtggaggtggtcggcaatggaacctacggacaggtgtacaagggtcggcatgtcaagacggggcagctggctgccatcaaggtcatggatgtcacggaggacgaggaggaagagatcaaacaggagatcaacatgctgaaaaagtactctcaccaccgcaacatcgccacctactacggagccttcatcaagaagagccccccgggaaacgatgaccagctctggctggtgatggagttctgtggtgctggttcagtgactgacctggtaaagaacacaaaaggcaacgccctgaaggaggactgtatcgcctatatctgcagggagatcctcaggggtctggcccatctccatgcccacaaggtgatccatcgagacatcaaggggcagaatgtgctgctgacagagaatgctgaggtcaagctagtggattttggggtgagtgctcagctggaccgcaccgtgggcagacggaacactttcattgggactccctactggatggctccagaggtcatcgcctgtgatgagaaccctgatgccacctatgattacaggagtgatatttggtctctaggaatcacagccatcgagatggcagagggagccccccctctgtgtgacatgcaccccatgcgagccctcttcctcattcctcggaaaccctccgccaaggctcaaatccaaaaagtgggcctaagaaattcattgaacttcattgacacatgtctcatcaagacttacctgagccgcccacccacggagcagctactgaagtttcccttcatccgggaccagcccacggagcggcaggtccgcatccagcttaaggaccacattgaccgatcccggaagaagcggggtgagaaagaggagacagaatatgagtacagcggcagcgaggaggaagatgacagccatggagaggaaggagagccaagctccatc

SEQ ID NO: 98499 - DNA, 935 bp, Homo Sapiens
  misc_feature (857)..(857): n is a, c, g, or t
aaggtagcgaggcctgggtggcgaattcggcacgagggggcaagggcacgtatggggtggtgtacgcgggccgcgatcgccacacgagggtgcgcatcgccatcaaggagatcccggagcgggacagcaggttctctcagcccctgcatgaagagatcgctcttcacagacgcctgcgccacaagaacatagtgcgctatctgggctcagctagccagggcggctaccttaagatcttcatggaggaagtgcctggaggcagcctgtcctccttgctgcggtcggtgtggggacccctgaaggacaacgagagcaccatcagtttctacacccgccagatcctgcagggacttggctacttgcacgacaaccacatcgtgcacagggacataaaaggggacaatgtgctgatcaacaccttcagtgggctgctcaagatttctgacttcggcacctccaagcggctggcaggcatcacaccttgcactgagaccttcacaggaactctgcagtatatggccccagaaatcattgaccagggcccacgcgggtatgggaaagcagctgacatctggtcactgggctgcactgtcattgagatggccacaggtcgcccccccttccacgagctcgggagcccacaggctgccatgtttcaggtgggtatgtacaaggtccatccgccaatgcccagctctctgtcggccgaggcccaagcctttctcctccgaacttttgagccagacccccgcatccgagccagcgcccagacactgctgggggacccccttcctgcagcctggggaaaaggagcccgcagcccccagctcccccacggacatggctccacgggcccntccagatgccccccttcctgcccaggtccccaactcccctttcagaccaaaacttcaaacccacccccaaggtccttc

SEQ ID NO: 98500 - DNA, 1073 bp, Homo Sapiens
gagcgaggcctgggtggcgaattcggcacgagggagaaggaccagctccaggagcagctccaggccctcaaagagtccttgaaggtcaccaagggcagccttgaagaggagaagcgcagggctgcagatgccctggaagagcagcagcgttgtatctctgagctgaaggcagagacccgaagcctggtggagcagcataagcgggaacgaaaggagctggaagaagagagggctgggcgcaaggggctggaggctcgattacagcagcttggggaggcccatcaggctgagactgaagtcctgcggcgggagctggcagaggccatggctgcccagcacacagctgagagtgagtgtgagcagctcgtcaaagaagtagctgcctggcgtgagcggtatgaggatagccagcaagaggaggcacagtatggcgccatgttccaggaacagctgatgactttgaaggaggaatgtgagaaggcccgccaggagctgcaggaggcaaaggagaaggtggcaggcatagaatcccacagcgagctccagataagccggcagcagaacgaactagctgagctccatgccaacctggccagagcactccagcaggtccaagagaaggaagtcagggcccagaagcttgcagatgacctctccactctgcaggaaaagatggctgccaccagcaaagaggtggcccgcttggagaccttggtgcgcaaggcaggtgagcagcaggaaacagcctcccgggagttagtcaaggagcctgcgagggcaggagacagacagcccgagtggctggaagagcaacagggacgccagttctgcagcacacaggcagcgctgcaggctatggagcgggaggcagagcagatgggcaatgagctggaacggctgcgggccgcgcttgatggagagccaggggcaagcagcaggaaggagcgctgggcaccaggaaaagggaggtggcgcggctgacccaggagcggggccgtgcccaggctgaccttgccctgggagaaggcggccagagcagagcttgagatggggctgccgaacgccctcaacga

SEQ ID NO: 98501 - DNA, 1038 bp, Homo Sapiens
  misc_feature (666)..(698): n is a, c, g, or t
  misc_feature (766)..(776): n is a, c, g, or t
aaggaagcgaggcctgggtggcgaattcggcacgagggtctgccaggggtgcctcagctggttcctgctcccaggcctagccccgaagccttaggggccttctcagccttagccctgggtactggggtgaagttggcaggggagagcttgacacttcgcctccctgatggccatgctgagggacagtggtgaccctggtcacttggtgctggtgtaggggcctgtgcccttccagggccagtgagacagccttctactcccccgacccagagctgagtccgaggaccccaggcccacctcctggccctcttggaggtctgtgctcttacctcccagcccccaccctgcgggagagcagccccagcgcctcatctccccaaaggcggcagatgcttgattctcctgccctctttcttccttccctcgtatttatttatttatttattgcttgtgctaaagaccaaaatagtctccctctttagtgcacttgaagcgggagggcggatgggatgagccaggagcgaggaagacttggcccctggggagtgtgtgtgtggaggcgtgtgcctgtgtgagcctgcatgcatacatgtgtggtgcacacatgcacactcggctcttcatgtgtatgactgggttagtaatacagatacgtgatctataccnnnnnnnnnnnnnnnnnnnnnnnnnnnnnnnnnatgcaggcggttatgtgtctgtctacccccaggggtttccgggtacaagttccctggggagggagggnnnnnnnnnnntccgggttgggcactgggcccacggggaaccccccacagtccccgaccctttggcccggattaagaccgtcctgcctccggaggggggaccttgggttccccggatgaaacctcctcgggagtggagccggtggccccccggggcccgcgtggataggaagggtccccgcgctggcccgcgcaagaccggggcacctcgcgccccggcccggccgcctaatagtttagtgtggcgcccgcccaggccatcctcgcacccccg

SEQ ID NO: 98502 - DNA, 984 bp, Homo Sapiens
  misc_feature (935)..(935): n is a, c, g, or t
aaggtagcgaggcctgggtggcgaattcggcacgagggatgtcttcctcctggtcactgaggtccatctgaacaggatgcagcccagcagcctggtgcagcggaacacacgcagcccagtggagaccctccacgccggccgggacactctgtgctcgctggggcaggtggcccaccggggcatggagaagagcctctttgtcttcacccaggaggaggtgcaggcctccgggctgcaggagagagacatgcagctgggcttcctgcgggctttgccggagctgggccccgggggtgaccagcagtcctatgagtttttccacctcaccctccaggccttctttacagccttcttcctcgtgctggacgacagggtgggcactcaggagctgctcaggttcttccaggagtggatgccccctgcgggggcagcgaccacgtcctgctatcctcccttcctcccgttccagtgcctgcagggcagtggtccggcacgggaagacctcttcaagaacaaggatcacttccagttcaccaacctcttcctgtgcgggctgttgtccaaagccaaacagaaactcctgcggcatctggtgcccgcggcagccctgaggagaaagcgcaaggccctgtgggcacacctgttttccagcctgcggggctacctgaagagcctgccccgcgttcaggtcgaaagcttcaaccaggtgcaggccatgcccacgttcatctggatgctgcgctgcatctacgagacacagagccagaaggtggggcagctggcggccagggggcatctgcgccaactacctcaagctgacctactgcaacgcctggctcggccgaatgcagcgcccctctccttcgtcctgcatcacttcccccaagcggctgggccctaaacctagacaacaacaatctcaacgacttacgggntgcggggagctgcagcccctgctttcagccgccttcactggttctcaaa

SEQ ID NO: 98503 - DNA, 1190 bp, Homo Sapiens
  misc_feature (30)..(31): n is a, c, g, or t
  misc_feature (1071)..(1071): n is a, c, g, or t
ccccccacgccagaagggaaccccccttgnntcccctaaggtcctaggtagcgaggcctgggtggcgatttccgcacgaggcaggaggggggaggctgctactttcaaccagtttggatgccaaggatgagttagaggagagattggaaaggtgtatgagcattgtgacatcgatgactgctggtgtctcggagagagaagccaatgatgccctcaatgcgtatgtgtgcaaaggcctcccccagcatgaagaaatctgcctgggcctgtttactctcatcctcactgaacctgcccaagcccagaagtgttaccgggacttagctctggtgagtcgtgatggcatgaatattgtcctgaataaaatcaaccagatacttatggagaagtacctgaagctgcaggatacctgccgtactcagttggtgtggttggtacgggaactggtgaagagtggggttctgggagccgatggtgtttgtatgacgtttatgaagcagattgcaggtggagatgttacagccaaaaatatctggttggcagaaagtgttctggatatcctgacagagcaaagggagtgggtcctgaagagcagcatcctcattgccatggctgtttacacgtacctccgcctcatcgtggaccaccaatggggactgcccagcctccaggccccttgcgacgaaaggaaagtagaacttctgcaatcttcactgctttcggggaacgggttccatggaaatgtcctgaatggattgggccccggaatcctccgaaaggacctacctttccggaaatggtgtggctaggggaaaacccagccaaacttttggaaccttggcttctctggaacacagaaactttatttctcctacaaatcccgttcacgggcgctattgagagacccccttcccgatctctacgcaggggttattccgcaaacaaggccttctctcttccctggtgctgcagggagcaggtcttccgggaaaaaaattttcctcttatagatgtgtggcgcgtgctcacaacccaccacacgcaaacaaattggggaacaacctcatgaangccccccgccctttgtcttccgggcgcaccctttccccttctggggatcctgggggtataatatttcggcctatctctcaaacccaaaaaaactgatgcgaacaaatctgcgcccgcca

SEQ ID NO: 98504 - DNA, 1076 bp, Homo Sapiens
  misc_feature (150)..(150): n is a, c, g, or t
  misc_feature (386)..(399): n is a, c, g, or t
  misc_feature (701)..(709): n is a, c, g, or t
  misc_feature (726)..(1014): n is a, c, g, or t
aggcctacgcgcgcaggcacgtctgggagcgtagggctcagcggaggaggggggctctataggaggggtggtggggggagggatgtgcgtcacctcttgggttgcccgacttcgttgctcgagcgtagtggagcatgtcggctcccagtnaggggccgcttatgatgatcgatcggcaggtatgagtattaggtggtgtcggtacaattagatctcgtccgctactgcgaactttgtgcatcccgccatagtggtcgcaacgccaaccgccggcagcgtgtcgactatcttgggattgtggggccgtgggtcagatcgcacgagtttgcttccgtggaatgtcctgagcaagggttggagggttgagcgccgccatttggtgccannnnnnnnnnnnnntggtgttattgcaccccatctcaaggagagaattttaaatttctggaagtccagctgcttttcagatatcctctaaattgcaggtcttatcaacagatggtttcctcaacatggggcagaaatggcctctgcttcttacatcctccatagggagggcacatctcccattgacctcaggcccacatttagaatgggtctacagggggaaaagaatagagaatgcctgaccactatccagccattatggagctctctcctatcttaatctcttctcagttttgacctctagaataataatgttnnnnnnnnngtaaggataataaaacnnnnnnnnnnnnnnnnnnnnnnnnnnnnnnnnnnnnnnnnnnnnnnnnnnnnnnnnnnnnnnnnnnnnnnnnnnnnnnnnnnnnnnnnnnnnnnnnnnnnnnnnnnnnnnnnnnnnnnnnnnnnnnnnnnnnnnnnnnnnnnnnnnnnnnnnnnnnnnnnnnnnnnnnnnnnnnnnnnnnnnnnnnnnnnnnnnnnnnnnnnnnnnnnnnnnnnnnnnnnnnnnnnnnnnnnnnnnnnnnnnnnnnnnnnnnnnnnnnnnnnnnnnnnnnnnnnnnnnnnnnnnnnnnntggaaaataaaaccctcgtgccggtatcgccacccaggcctcgctacttaggaccgtggagg

SEQ ID NO: 98505 - DNA, 954 bp, Homo Sapiens
  misc_feature (882)..(882): n is a, c, g, or t
aaggtagcgaggcctgggtggggatcaaagacgagggccgccgccgctgtcggcgctagagatcgcggctcggtgcaggcggcgcccatgcctcctctcctccactagcccgcgcgccagtccgcctgccggggccggctctccgcctcctgcctcccgtcgcagccgcgcagccgccgcagagtccgcggcgccaccgctcgccctccaggttctgccacttgctgggaaaacagcaacagaaggatattaaggagccacccctataatttacccagatagccccagcaaggtcaaagacatatcatgtcccaaggagaaaagctgcaggcatctgaggataaatcactgtgaaacagctttgaccataaagctgacttggaagactttgactccaaggtgcaaggtggtttggacaccctcaatattgcctgctcttttctagtcaaacctgattcatgaaatggaatgaagctgaaaaatcatctacttctttgtttgtggatttgagagaagattgggatggtcttaagtgcataaaacgagactctaactgcagcgatgagttcagatgagaagggcatttcccctgctcataaaacatccactccaacccatagaagtgcctcctcttcaacatcctcccaaagggacagtaggcagagtattcacatactggaaaggactgcttcctctagcaccgagccctctgtaagtcggcaatttgctaaaaacggaagccagtccccctcctccaaggaagctgacagctgggaaaattattagaaggggctgaaaataggccaaacccatgtccagaaaccagacaaacatgaggggctttatgctgaagaaaagaaaaatggcccttaaaaggctggncaccaagcgttttttttggcctcggaataatggcaaggttaaaggaatttcaaaaggccacccactttcgaa

SEQ ID NO: 98506 - DNA, 1097 bp, Homo Sapiens
ccccttctgtattagaaccgaagagatatgtcccgcctctccaaggcccccccgcccgccgccagaggagccggcccgccacccgaaaagaccccacccctttttggttataagcttggggcggggaaaggcccaaggagagctcctccgcggccatgggaggggaaatattctttggtcgagaaattaaggggccccccgccaatggggtagccaccaccatatacctttcacagggtgtggaaatgggggccaaagcttgcccaaaagttcgtaagtggtgcctggtggcccccttatgctggttcgttgccccccactcccagaaatgctggcttttgccaccacagcccatggtctcaggaagcttgggccccacgccccactggccccactggcccgggcccagggcctcagagaacaggtcttcacccaatatcttcccctcgcacactcagggtgtggtccagcctgcagatgaacctgacgactggacactgattgtaggcaccaaccactcgcaccacatcacccaggcggcacctggtgaggctggcgcggtccgtcagcaccagctcatactccttgccctgctgggcctcggccaaaaggagggtggaggcagcttcctcctgggtgccttccttgactgggagcagctcgataaagggggccccagggggcagaaggtagagcccatggggctgctctggctgtaggtttaggcccagcacccctcccgaggcagcataagcaggagagaagaaggctagtccttggcaccacaaggccccgagggcagccacagcctcggcctggcctcctgcatccagagtcaccaccacctgcagctttggccagagccgaagggccagtccccgtggcccctgctctagggcctcccggagctcagctgcccgttcacggagaggcgctccagggttcccggcagctatcgccccagctagctcttcaccatcagtctccaggcccaagaaaacatccagaagttcgacagccgtcccagcctccagtgccctcagccctggggacctcagtgcgtccagcagcagggcacctagggtccttggttccag

SEQ ID NO: 98507 - DNA, 999 bp, Homo Sapiens
  misc_feature (23)..(23): n is a, c, g, or t
  misc_feature (69)..(124): n is a, c, g, or t
cggtctaggtagcgaggcctggngtggcgaaattcggcacgaggggtaccccgcagtggtctgcttccnnnnnnnnnnnnnnnnnnnnnnnnnnnnnnnnnnnnnnnnnnnnnnnnnnnnnnnntagtcccgtcagcagggtctggatcccctgtgccgtcgcctcttcctttttcgacgcctccgccgccgcctgaggaggcgagctagccgggagttacaccgcccacccgccaggatggatagaatgacagaagatgctcttcgcttgaatctgttgaagcggagcttggacccagcagatgagcgagaatgatgtcctggcaaagcgactcaaaatggaggggcatgaggccattggaacgtctgaaaatggttggcattgcttcaaaaggaaggatttggcaaatcttgaggtgccacatgagttacccaccaaacaggatggcagtggtgtcaagggctatgaagaaaaacttaacgggaatctcaggcctcatggagacaacaggactgctggaaggccaggcaaagaaaacatcaatgatgagcctgtggatatgagtgctagacggagtgagccagagcgaggaaggctaactccctcaccagacatcattgttttgtctgacaatgaggcttccagtccccgttccagttccagaatggaagaaagactcaaagcagccaacttagagatgtttaaggggaaaggcattgaggagcggcagcagcttatcaagcagctgagggatgagctacgattggaagaagcccgactggtcctgttaaagaaactgagacagagtcagctacagaaaggagaatggggtccagaaaactccagtttgtacagaatgcaccaatctatttgttcagcccatcttcctggccccatgtgggggacaggccagggctcttatcttaaaacttcccctcctcgggcctggggggccccaaaggggggttggaaacctccaaaaatttgtgagaaaactc

SEQ ID NO: 98508 - DNA, 1805 bp, Homo Sapiens
  misc_feature (267)..(327): n is a, c, g, or t
  misc_feature (443)..(487): n is a, c, g, or t
ctgctatatagaggtcagtacaacaggcgccgtagctctggcacgcgcggacgcgtaggagcatagcggcgctctagcgttcatgataaggcgtggtacatgctgcttagtccgggtggccgcaggtacggcagcgctcggtatggtgggtacatcggtggcgaggaataggggccgccgcccggcgccggccatgattaagttttaggttgggcaggggcggcgggcggggtccggcggtgagtggtgggagccggccgggcaggnnnnnnnnnnnnnnnnnnnnnnnnnnnnnnnnnnnnnnnnnnnnnnnnnnnnnnnnnnnnngcatgtgcgggctcgtttggggagggcgtgcgccacgggtttgtgcgagtttggactacctatacttagttgggcaagggcggggcgcgcccgtactggggcccgtccccgcgccnnnnnnnnnnnnnnnnnnnnnnnnnnnnnnnnnnnnnnnnnnnnntggccgagctgggccgggcctctgggcccatccgccgggagggggccatagggagggtgtcccgcgggccgcgggaaggcaagtccaggcccttcctctgaggagaaaggggtggtcgccactgtcccagtggagggccccctcccgcggaggaatctggtgggggtggattctccagaggtggggacaggggcagctgagtggccctggctcagtcggggacctcagggtgggcaggcagtccgctctcgccgcgccggtaggtctcccagaaacctctgtccagctgctccagctgtgggcccagtggcaggtggccggccaggtgcatgcggagggtctccagccagtgttccagcttcacaaaggatggcctcttctcggggtccagatcgcaacagcgcacggtgatggggaagaagctcggggggcagtttggggggcagtagcggtccaggaatcctcgcacgttgaggccaaagtcccatggtgcggggcaggtagtcagggtctgcgttcacccgcccgatgatctcgcacaggacgatcccaaaggagaacacatccaccttctcatcatagctgcggccgttgatcatctcaggtgccatccagtaggggttgcccaccacggtgtagcgcttcttgcggtctggcttcttgaggctccgcaggccctcaggctgagtcttctcgtccaccatgagacgcgccagcccgaagtcagccaccaccacattcttgttctcgcggaccaggcagttgtgggagttgaggtctcggtggatgatgttcatggagtggaggtaggccatccctgatgcgatgtccttggcaaagctcactctctggctccatgggtactggctgtccatgctcttgatgatgccccggagcgtgccgcccttgatgtactcagtgatgaagttgagcctcttgtccttgtagagcaccccgatgaacttgagcacgttggggtgttccaggcatcgcatgaccttcacctccttgaggaacgtcctctgggtctcctcgtcgaaccggatcagctccttcatcaccatcacctcacctgtctcacggtgtgtcaccttgatagcctggccgaagcagcccttgcccagcacctccccgtggatgaggtccgacggccggaagatgcggtgtggccggcagactacgcggagggactcagagcgacccaggtccttgcgctgggaggccggggagcccagtgagccagcgcccggagacctgtcgatgctgcagctcctcaagacaggtttctgccgggcagagctgcccgcctccccgctgg

SEQ ID NO: 98509 - DNA, 958 bp, Homo Sapiens
aaggtagcgaggcctgggtggcgaattcggcacgaggggagttctcttctggccctgggggccgcaggactgtccaggaatacagtttccaggtgagatcttacttgaaacaccggtagttctagcacagctaaaatggcatctacttgggctatccaggcccacatggaccaggatgaacctttggaagtaaagatagaggaagagaaatataccaccagacaggattgggacctgcgtaaaaacaacacccatagcagagaggtcttccgtcagtacttcagacagttctgctaccaggagacatctggtccccgtgaggctttgagccgactccgagaactttgccatcagtggctgaggccagagacccacaccaaagaacagattctggagctgctggtgctggagcagttcctgaccatcctacctgaggagctccaggcctgggtgcaggagcagcatccagagagtggggaggaggtggtgactgtgctggaggatttagagagagaactggatgaaccaggagagcagagtgagtctgtcagctacatctcattttcctcaggtctcagtccacactggggaacaggaaatgttcttgcaggagacggtacgtctacgaaaagaaggagaacccagtatgtccctccaggccatgaaagcccagcccaaagtatgaatctccagaacttgaatcccaacaggagcaagttttagatggtgagactggaaatgagtatgggaatttaaaacaagaagtttccggaagaaatggaaccacatggggaagacatccactaaatttgaaaaggagcatggccccgccgggtaggtggtggaaaaactcgtcgaacccggggggaatcaccccacgagccccccggcttggctccggaagaagaagaacaccgccgaccgtgggggtgaaacacggaacggagacctctgaccc

SEQ ID NO: 98510 - DNA, 1052 bp, Homo Sapiens
  misc_feature (249)..(249): n is a, c, g, or t
ggtgccagggatgaaaggctgccctacccggccattcggtgtaccccaattataagaagggtttcccttggttccttctgggtccttggtaacctatacctcaggataaggtccccactccctttgccgctgaatccatgtagcttgtttccctttcccaagttgtaagccacccgggggcgcccgaagtacacagtgttctggggtgaagcccaccgctgggtgccccagctggcacatgcccgtctnccaggtagtctgtgttgctattgcacatctcgttgtggtaggtctgccagtcatcactggagtccagctctaggtcattgcctcgcacgtagcacttgccccaccatgcggccgctggtcttctgaccctgaccacagccacctgggtgtagcggtgggcacagaccagaactctgcctgcagggccctggctggccacagtcactccaagccacatgtcctcaataatgtgatggccagggtcatttttcactgtgatgttcatccgctcacagtcatccttgtgggcagtgagtgggcacaggtacacagcaccagtccggttggtgtagccatcgggcacagcgagctcccggggggcaccagccaggagcaggtagcgctgctgccgctctgtctgccgatggagggcgaccgagtagccgaagaggctgcccgggttcccggcctccttcactaccaggaatcgggtatccaggttgaaggcggagacgacgcagccgccggccgccaccatcaaggcgagcgcacagagcatcaggcgtggggcgcggggcgcgcggctgcgctctcggatcccttcctaagatccgtgggtctatcttcctgcctccccagcggccgggtcgccgccgtccctgccccgggcaaccggcccccagcttgtcccggccgcgcccccttggccgcgctgtcgccttcgatcccggcttcgcggcggatctggcaagcgcaccggtcgaccgcaaggaggacaggagggaggggtcccccggccctcgtgccgaaaagccacccaggcc

SEQ ID NO: 98511 - DNA, 902 bp, Homo Sapiens
ggtccaaggtagcgaggcctgggtggcgaattcggcacgaggcctgagctcaccttgaccccatccgaagatccaagagggctggccctggggggcccccggccctgggccctgagctcaccttgaccccatccgaagatccaagagggctggccctggggggcccccagccctgggccctgagctcaccttgaccccatccgaagatccaagagggctggccctggggggcccccagccctgggccctgagctcaccttgaccccatccgaagatccaagagggctggccctggggggcccccggccctgggccctgagctcaccttgaccccatccgaagatccaagagggctggccctggggggccccagccctgggccctgagctcaccttgaccccatccgaagatccaagagggctggccctgggggcccccggccctgggccctgagctcaccttgaccccatccgaagatccaagagggctggccctggggggccccagccctgggccctgagctcaccttgaccccatccgaagatccaagagggctggccctggggggcccccggccctgggccctgagctcaccttgaccccatccgaagatccaagagggctggccctggggggcccccggccctgggccctgagctcaccttgaccccatccgaagatccaagagggctggccctggggggcccccggccctgggccctgagctcaccttgaccccatccgaaaatccaagagggctggccctggggggccccccggccctggggccctgagcttcaccttgaccccatccgaaaatccaagagggctgggccctgggggggcccccggccctggggcctgaacctccccttgaccccttccgaaaaatccaagagggc

SEQ ID NO: 98512 - DNA, 1122 bp, Homo Sapiens
  misc_feature (363)..(363): n is a, c, g, or t
  misc_feature (389)..(447): n is a, c, g, or t
  misc_feature (569)..(569): n is a, c, g, or t
  misc_feature (720)..(720): n is a, c, g, or t
aaggtagcgaggcctgggtggcgatttcagcacgagggtcccatgccgaatgcctgcgtccacgctgccaagcctgtgacgagatcatcttctcccctgagtgcacggaggctgagggccgccactggcacatggatcacttctgctgctttgagtgtgaagcttcactaggagggcagcgctatgtcatgcgtcagagccgcccccactgctgcgcctgctacgaggcccgccacgcggagtactgtgatggctgtggggagcacatcggcctggaccaaggccagatggcttacgagggccagcactggcatgcctcagaccgctgcttctgctgtagtcgctgtgggcgggccctgctgngccgcccagtgcggccgcgcccaggnnnnnnnnnnnnnnnnnnnnnnnnnnnnnnnnnnnnnnnnnnnnnnnnnnnnnnnnnnncacggccggccaccgagccgccgggccaaccgacacgcccgccccgaagcccaccacaaacgaacgggccgcgccgggcgcggcgcgccaacacgcagccccccaccgagccgcgccgcgcnccgaagacgagacgccccgagcaccagcgcccccacagacgggggcacgcagtgcacgaggcggcccccgcggccccgacccaccacgccagccgcgcacgcccgcggccgaatccgcgcagctgcgcagcacttcgccactccggggacnatagcagctgacttgagatgaagtctgacttctaagggccgccccacgcctggtgtcttcccaccagtagaaggcggcgccgaacgctaccgcagtgcgctgcgaccgttagacgactaccggcgcgatactctgctagggcgccagggtggagccgcgcgctgcgggccagctctgtggtcgtgctccgactggcccacccagtgtcctcgtgcgacagaatcctgctccaggcgtgaggtgcatcatcccacccgccccgcggtaatcagctgcagagagagagacgtgacgggtacctgcagcacgcatgcgcccggtctgaagcgcgtagtggattttctatcgcgcggcagtcgcgtatcgcgggccgcgacgagctgactcacacgcgctccaatg

SEQ ID NO: 98513 - DNA, 1503 bp, Homo Sapiens
aagaagcgaggcctgggtggcgaattcggcacgagggagttaaaaagactgtaccaagaactacagattcgtaaccaacttaaccaggaacaaaattcaaaacttcagcagcagaaggaactcttaaataagcgcaacatggaggtggccatgatggacaagcgaatcagtgaactgcgtgaacgtctctatgggaaaaaaattcagctgaaccgtgtgaatggcacgtcatcaccacagtcccctctgagcacatcgggcagggtcgctgctgtggggccttatatccaggttcccagtgccggaagctttcctgtgctgggggaccctataaagccccagtctctcagtattgcctcaaatgctgctcatggaagatccaaatccgctaatgatggaaactggccaacattaaaacagaattctagctcttccgtgaaaccagtgcaggtggccggtgcagactggaaggatccgagcgtggaggggtctgtcaagcagggcactgtctccagccagcctgtgcccttctcagcactgggacccacggagaagccgggcatcgagattggtaaagtgccacctcccatcccgggtgtaggcaagcagctgcctccaagctatgggacatacccaagtcctacacctctgggtcctgggtcgacaagctccctggaaaggaggaaggaaggcagcttgcccaggcccagtgcaggcctgccaagtcgacagaggcccaccctgctgcccgccacaggcagcaccccccagccaggctcctcacaacagattcagcagagggattcccgtaccgccaagtcccacgtacccgccagcgggaccacctgcatttccagctgggggacagcaagcctgaactcccactgacagtggccattaagccctttcctggctgaataaagggtcaaggccaaagtctcccaggaaaggaccccagacagtgaattcaagttccatatactccatgtacctccagcaagccacaccacctaagaattaccagccggcagcacacagcgccttaaataagtcagttaaagcagtgtatggtaagcccgttttaccttcgggttcaacctctccatcgccgctgccgtttcctcacgggtcactgtccacgggcacaccacagcctcagccaccttcagaaagtactgagaaagagcctgagcaggatggccccgccgcccccgcagatggcagcaccgtggagagcctgccacggccactcagccccaccaagctcacgcccatcgtgcattcgccactgcgctaccagagtgatgcagacctggacgccctccgcaggaagctggccaacgcgccccggccccctgaaaaagcgccgctccatcacagagcccgacgggcccccggcgggcccaacatccacgaacctgctgtaccagcgcttcaacaccctggccggtgccctggacggccccctttctaccagcccagtccctcccaggacttcatggg

SEQ ID NO: 98514 - DNA, 1283 bp, Homo Sapiens
  misc_feature (322)..(384): n is a, c, g, or t
  misc_feature (947)..(1004): n is a, c, g, or t
gtagcgaggcctgggtggcgaattcggcacgaggccgaaagatattgggaagggtttccagaaggtgggaaatgtcacctgattcacactgaacttttgaaagctccccacccccaaggagccgcgcacaccctcgctcgcggccgccctcccacagccccacacactgggagaccgcccaccgcaaaccgcggagacccccgtctagatttaaagcgcggctgcgcccggcttctgacgtccattgaatcgcgcgggcggccggcggcgagcgcggggctgcgccgggatcgctgcgccctccgccgctggcctctgcgannnnnnnnnnnnnnnnnnnnnnnnnnnnnnnnnnnnnnnnnnnnnnnnnnnnnnnnnnnnnnncccgcgcctgcccccaggatggtccgcgcgaggcaccagccgggtgggctttgcctcctgctgctgctgctctgccagttcatggaggaccgcagtgcccaggctgggaactgctggctccgtcaagcgaagaacggccgctgccaggtcctgtacaagaccgaactgagcaaggaggagtgctgcagcaccggccggctgagcacctcgtggaccgaggaggacgtgaatgacaacacactcttcaagtggatgattttcaacgggggcgcccccaactgcatcccctgtaaagaaacgtgtgagaacgtggactgtggacctgggaaaaaatgccgaatgaacaagaagaacaaaccccgctgcgtctgcgccccggattgttccaacatcacctgggaagggtccagtctgcggggtggatgggaaaacctaccgcaatgaatgtgcactcctaaaaggcaagatgtaaagagccagccggaactggaagtccaggacccagggcagatgtaaaaagaccttgtcggggatggttttctggcccaggcaggctccacatnnnnnnnnnnnnnnnnnnnnnnnnnnnnnnnnnnnnnnnnnnnnnnnnnnnnnnnnnnagtttggcccagaaggccttgctttcccccctgagagagtaatcctccggaggggaaatgattgggagtgcaccctaacttccaggtggcctggcccacctgaacaatacggcctccccggcgcccggccgggggcaagatgctattttgggatttaaccctatatgaggggggaagcgggttttgctgaaggccagaaggccgcggtgttggaagttattctcgggcggcgcctggtcggggggagcaagacaatggggtgtattggcgggagtctct

SEQ ID NO: 98515 - DNA, 869 bp, Homo Sapiens
caccttctataatcttactcagatgatgttcgttcggatgtcttgttcaattgcaccaaggtgatatgcacgagtgttggaataatcttctagttgaattctgggactcccagtttaaacatgacatcaaattcattaggggcagaatctgtcacgtgctcatagtagctcccggtgttcagcagcccgacgcctctgaacgcggagtcgcacgtcagtctgagcagcaggtggtccacaaccccgtgtgtcgaccatccccgccgccgtggagatatcatcgcggctgagcttcaactgtctccaaaaccgcccggagcttcgaggccccaggcgccgcatccctccgtacgagaatgggggccgagaccggcaggccggggctgggcacgtcccagggcccgggcgggggtcttggcttcgtggagcagcgcgcgcccctctggcggcaagaaccagccctggaaagagccggctcccgagccgcaggaggctccagcccctctgccccaggggcgcatggtggcgtcagacggctgcgtgtcctgggcgcgctgaggggcctttttggcgcgggcccacagttgcgcaggacgggcggcctctcctgggtgtccggggcgctctttttctgccgggatcccgacttcctggcggggccgaactttcccgccttaggcagggcggcctcgggggcagccaggagactcgttgggatccatcggggcgcacctggcattccgtgcggaagccttgggggcagtggctccggcctcggaagctctctgcatggcctttccgtgccaaggctgcatggctggcgctttctgttccccgaaagaagaatccgtttcaggaaaagccgcaag

SEQ ID NO: 98516 - DNA, 1013 bp, Homo Sapiens
  misc_feature (727)..(727): n is a, c, g, or t
  misc_feature (735)..(735): n is a, c, g, or t
  misc_feature (748)..(748): n is a, c, g, or t
  misc_feature (793)..(793): n is a, c, g, or t
  misc_feature (797)..(797): n is a, c, g, or t
ggggcgaggcctgggtggcgaattcggcacgaggccgcacgccgcggagcagggcgctcgcgaggtcccgggattacgtgtgctcgagcacgctggtggcgaaaagacccgggacttgaacagtgttgtgcggcgccatgcaggtctccagcctcaatgaggtgaagatttacagcctcagctgcggcaaggtcccttcctgagtggctttctgataggaagaagagagcgctacagaagaaagatgtagatgtccgtaggagaattgaacttattcaggactttgaaatgcctactgtgtgtaccactattaaggtgtcaaaagatggacagtacattttagcaactggaacatataaacctcgggttcgatgttatgacacctatcaattatccttgaagtttgaaaggtgtttagattcagaagttgtcacctttgaaattttgtctgatgactactcaaagattgtcttcttacataatgatagatacattgaatttcattcgcaatcaggtttttactacaaaaccagaataccaaagtttgggagagatttctcttaccactatccatcctgtgacttgtactttgttggtgcaagttctgaagtttataggttaaacttagaacaaggacgatacctgaatcctctacaaactgatgctgcggagaataatgtttgtgacataaattcagtgcatggcttgtttgccacaggaaccatanagggttanaagtggagtgctngggacccaagaactcgaaacagagttggcctgttagactgcgccnttanacagtgtcacagcagattcagagataaacagtttaccaacaatctctgctttgaaatttaatggtgccttggaccatggcagttggacaaccacagggcagggttttattataaggacttcgatctgataagcatggctagttaaggatcccccgtatgggctgccccattaagtccggtctttcccggattcttataaaaccgggatttgggccg

SEQ ID NO: 98517 - DNA, 1147 bp, Homo Sapiens
  misc_feature (38)..(38): n is a, c, g, or t
  misc_feature (966)..(974): n is a, c, g, or t
ccacagacaccatctatccttaaaaaatattcaaaaancccctaagtagcgaggcctgagtggcgttcccagcacgagggaaacccggaagtgagcggcggcagctgcgaggctcggagaaacaggcgccgcgggctccgcgcccggccggacccgggcccgagatcatgctgctgccgccaccgccgccaccacggagcgagaagcccagatagacgccccggcggccccgggtcctggagtcccgccgcctgctgcccggccgaggaccccaccccgcctgccgcccgatgcttgcagtggggcccgccatggacagggattacccgcagcatgaacccccgccggcgggcagcctcctgtacagcccgccgcccctgcagagcgccatgctgcactgcccctactggaacaccttctcgctgccgccataccctgccttctccagcgacagccgcccgttcatgagctccgcctccttcctcggcagccagccctgcccagacaccagctatgcccccgtggccaccgcctccagcttgccaccaaagacctgcgactttgctcaggactcctcctattttgaggacttctccaacatctccatcttcccctcgtccggggactccctgtcggacatcgggggacacgccccgacttcctgccggctgacagcctcaacccggtgtccaccatctgggacgataaccctgccccctccccccacgataagctgttccacctcaaccggccgtttgcaaggcttcgaggacttttctgccttcccacagcagccccgcttctcggtcggctaccaggaagcaaaatggggcaaaagcccccccctagggacgaaggaccaaggctgaacgaaggaggaaggcggaaagatcctggggcaccccagaaaaacctagccccgaactacggtggccgctcgaaggtcccaaaattggggaaaggcgnnnnnnnnntgaccgcgcgtggggcggggaagactaggccaccatttgttcccggcgcgtcccacaccctcccgaacactttgccccttatacgccttggggcctcctgccccctccggggaaaaggcggggggcccccgtgtttcggccccccgtgtcgttcattagaaggagggcctttc

SEQ ID NO: 98518 - DNA, 837 bp, Homo Sapiens
catgactcttcccaccctccaccacccctggccccaggcctgagtcaatgagggtgaggatgagcacacacagcgggcgaacagcaataacttaggggaggagcgccaggagaacacagagtgactgctggactccacagctgaggaggctgcctgtctagaggtccgaagggctgggcctggggtaagtgagcaaactgaggaaggtgggtgaaaagagaggactagggactggagaaacttcactgagtcgtgggagataaagtgctcaatgctctagatttgggctggaagggctggagtcagctacctccaggggggcagggcccgggactggcgggtgcgtgacctccgcccggctagagtccctggcagtggctggcgggaggcagggggccctagctggcgctggctgcgtggtagtagccgggggattcgggtgggccgttcaccccgaagcaggccccagctggccagtggtgtggatggcccacgggggcaagtgggatgctaaaccctggctggcccgtgccaaacgccagttccagcccttgcacaggacccagacccttgccaaaaaagctaatgggtgttgggtggtgcgggggattacgccgccggggcccagggacgggcaagcggctgcgggaaccatcctttgttggttttggggtacagtgcaaaaaaaccccggtcccccacagccccacagccctgcagggccccggaaggccaggggtgaacaggcgcaacaaaaacccccaaccaaaagtcaaaaatatgccccggccgcaccccgggggccctgctgccgaaaccaatttggcccccccgttt

SEQ ID NO: 98519 - DNA, 1054 bp, Homo Sapiens
  misc_feature (522)..(522): n is a, c, g, or t
  misc_feature (524)..(528): n is a, c, g, or t
  misc_feature (530)..(534): n is a, c, g, or t
  misc_feature (536)..(537): n is a, c, g, or t
  misc_feature (540)..(544): n is a, c, g, or t
  misc_feature (556)..(566): n is a, c, g, or t
gggcgaggcctgggtggcgaattcggacgagggcggacacccccaacactcgcgggagaggggtgctggctccctttgagcagcccgcccaaccctgcctccaccctcccaggctggacagggaaggtgctccctggggcttcagaccccccttctgactccccctgcaacgggacctcacgaaaggaagggtggagagaaggttcgggaagacgagggggctgggaggtttggaaagacagctccaggcccccgttcccacccccgccccaggctggtccgggaggggcagcctctccccgcccccaggtccgcgcggccgctccctcctcccccggcaggagccccggccaagtgggcgcgcccggcccggggccggccgggatccggtgtcggttgcagctggcagtgcggcgggcgcgggcgccggagcgaggggcccgcgggcccggctattaataacgcggccgccagcccggggtcgcgcagccatggccagcccggagccccggcgcggcgggncnnnnncnnnnntnnccnnnnncccggcccgcgnnnnnnnnnnnagcacaaggaccgcgacgcggcgaaaagccacgggcacgccgcaaggggacggacagagtgaagaatggtgcgaacatcacgaacgccccgacaggtgatatgaggaaaaccggcatagaggggagccggggcgggaggggaatttgagagagagacgccgtcgattcggcggggggcgcgcggtggagggcgttaatcggatccggtatcattagggggccgctgacgtgcccgccccgctcatttttttggcccctgtttgttggacgcggggagaccgcccggagtcggtggggcgctttaccccccgctgccctgtcgttaccccgcccgtgttggcgtcgtgtttaggcgcgacttgagcgtgggaggtgagggacgccatcactcggtactgatatggattctcgagcgggtttgagccgctgggcgttttatgcgcgatgagtagtgtccgccgaattgggccgggcggtgcttatgggca

SEQ ID NO: 98520 - DNA, 1102 bp, Homo Sapiens
  misc_feature (59)..(59): n is a, c, g, or t
  misc_feature (166)..(166): n is a, c, g, or t
  misc_feature (172)..(172): n is a, c, g, or t
ttctccttccatcgtctgtactatcttcaaggggtgcgggtcggagcttgtgactcganaaaatgtatgagggggcgcggtgcgctgtgtgacgctgtgatattgtcgccggggccgctctccgcgtgctggctgtttgtgtgtgtgcgcgggcgggtgaggtggnaaaaanatttgtagtgcctccgatgctgctattaaagttctgcggggggtcgtgggcgatcccgcatgggtggcggccgtcattcgggtctcatttttgtataagtgatgggcacctccagcggggcaatagcgctgcgagtgacattctttgcacgccggccagtggcccaggggcgtttttcccctggatttccccccatcagaaatttggagggcttcctccttaagtgccccggaccatcaacagaggccgctttgtttttggggcattaactggcccccgcgatgccaccaaggccaattacaggatccgagagtcacccaagctgagccaggctaacgggaccccaagcattcctgctggccccacagagccttgatggaagccctgatccagcccacagcatgggacctgacaccccgggagccacccgaggctgcactctcacccatgtccatcgactcagccaccagtgctgacaccacgctggacacgacaggggacgtcacagtggaagatgtgaaggatttcctgggctcctctgaggagtcagagaagaacctgaggaacctggcagaagacgaggcccacgcctgtgccatcctgatcaaatgaggaaggccagaactatcccgacctccacctgccctgctcggagctggagtgctggatccctggcacctgcctggccccttaacatagaaccacgcctgctaacctgtaggctccactgggacctgctgtcctgtcccgcctgaccctgggccctggagcagcaccagccccagggtgtgggcctgggacctgggccagaactgagccctcctgcaggcatttggctgccctgggggcccactgcctagggaagaggacaggtggggcccagcacctgtgcctcgtcccgaatcgccacccaggcctcgctaccttgga

SEQ ID NO: 98521 - DNA, 1054 bp, Homo Sapiens
  misc_feature (120)..(120): n is a, c, g, or t
  misc_feature (227)..(228): n is a, c, g, or t
  misc_feature (241)..(241): n is a, c, g, or t
  misc_feature (446)..(446): n is a, c, g, or t
gaattcaggaataatatctttcaacttgttccaggggaaacttaaaatttaacccttgggatcccttttactcaaggccccaacagttgccagtttagaaagatccaatcgggcccactntgcagatggtctttgatacgaccagggtgttcccaaccaaagatgtccaataccatttcgaaatatggattaatttggctttgatatgatgttccacccataaaaannccacgcccacggngtgagttctcctagttatatctttgaagtctttggctacttggtttgccagttccccttgtgggagccaaaaacaaataccccttggtgagcggctttttttaattgtttcttgatttctttggagtctttcaattaaggggatggcaaaagagaatgtctttcctgttcctgtccgtgcttgagctattaaatcttttccttcnatatacaggaccaaaggtcttaacttgaataggaaagagatatgttacccctcgacctttcagaagctttatagtctcttcagaaataggaaaattggagaaggctccttctttctgttcacgtgttaaggtctcctctagtttattatcacttgatttatgagtagaagtatctaaagatgatactcgctttgattttttttcatattcatctatatctccatttggtagatcttttcttcttgacttatgagatttggagaattcatctgaaagtctattaaatccttcttcagtgtctccatttagcttctctttcattttagattttttggccttgggagcatccaggtcatctgtaacaccattttctcttgtttctgatttctcatccgagtcataatggtgccttgacttccttctgtcactcttttgcctctccttcttctggctctcggactcctccaagggtgcttccagctccataatgtccccccagaggagtttcccaggcattactggccaccgccgcctccctccgggcacagtggccacaaccacctacgggccctcgtgccgaattcgccacccaggcctcgctaccttag

SEQ ID NO: 98522 - DNA, 980 bp, Homo Sapiens
  misc_feature (159)..(167): n is a, c, g, or t
  misc_feature (818)..(818): n is a, c, g, or t
  misc_feature (838)..(838): n is a, c, g, or t
ggcctgggtggcgaattcggcacgagggggaagtgtgcggagggcttccagggaatcaagtgaccctcccgctgaatttcggtgcctcttccccccgccccttgctcaacatttcagtaggtcacaggccaaatggcagcccaaaaggtgggcagagannnnnnnnncttcccctcacccctgcttattaacacaattgtgacaactactttaccttacatcccagggcaaacggacagcttgcggtacctccaaaaatttggaaaaccctgagtctaagaccacctcttgataaaagaggcctttgctcacattttctgctcggaatctttctttgccattggtgggtgtatgtcgtcccagctgagactgcgggagagctgagctccagcttaaaccgcttttaatggcccttccctactgggggatcgctggagcccatgccaggttacggtagtcattttaaacctctgccacaaggccacgccatagaatcaatttccaagtcaatgttcttggccctaaaatgtttgcgcccactgaggatttcattaccaggtggaagatggggggaacatatgccacgttaaagagcaagtgctgagtgtgccaggacttgagaaggaccttaggctgaggagtggacagtctggtatttatttcgcctctcccaagtacccagcacagagtggggaaaaagaagaaactgctcctgacttccagtagctggcaacttgacatcaagaaacaaaaacattcgtagctggaccccccgtcctttcatcgtgcccaagtcttacatggtgggcttaagctgncccccttggaggccgtaccntttctctttgggactgtgacagtgggacacctaacagcctgagcccatgtgtggctgtcttatccccccaagggttgtccaggccgttttcttcaagggcttttttgtgtaaactgcaaaaaatcctttacctaccacagaa

SEQ ID NO: 98523 - DNA, 1316 bp, Homo Sapiens
  misc_feature (140)..(140): n is a, c, g, or t
  misc_feature (369)..(369): n is a, c, g, or t
ggcatttcgagaggggatcccggaagttccttgcggaggagaaattctcccttggaagcccagaatttggatgagaatccactggaggcctgggaaatcggaataagactatggactggccagtatgaagaagctttcantatccagtccagtgcagatgtacagaacgcgcttgaccaccacttcccattttagcaaggaatttgtgggcaaccctactattttagacactattaataagactgaattggcctgtaataacacagttattgttcccaaatgcagttacagctgggaagagtcactcgtgttcaaaagcaccggaagatcctgagggctgcaagagatttggctttggacactcttatnaatagagtatcgtgggaaagtcatgttacgacagcaatttgaggtcaatgggcatttctcaaaaaaaccataccccctttgtgctcttctactcaaaattcaatggtgtagagatgtgtgtggatgcccgtactttcggtaatgatgctcggttcatcagaagatcatgtacaccaaatgcagaggtgcgacacatgattgcagatgggatgattcacctgtgcatctatgctgtgtctgccatcaccaaggatgctgaggtcaccatagcatttgattatgagtatagtaactgtaattataaagtggactgtgcctgtcacaagggaaaccggaattgtcctatacaaaaaaggaatcctaatgctacagaactgccactcctaccacctcctccaagcctacccaccattggagcagagactagacgtagaaaagcacgacggaaagagctagagatggagcagcagaatgaggcttcagaggagaataatgaccagcaatcacaagaagttccagaaaaagtaactgtatccagtgatcatgaggaagtagacaatccagaagaaaaaccagaagaagagaaagaagaggttatagatgaccaggagaacctagctcatagcaggaggaccagggaagatagaaaggtagaagccatcatgcatgcttttgaaaacttagagaaaagaaagaagcggcgggatcagcccttggaacagagcaactctgatgtagagattactacaaccacctcagagactcctgttggtgaagagacaaaaactgaagcccctgaatctgaagttagcaactctgtttcaaatgttaccatcccaagcaccccacagagtgttggtgtgaatacccggaggtcttcccaagcaggggatattgctgcagaaaaactagtccccaagccacctccagcaaagccttctaggccc

SEQ ID NO: 98524 - DNA, 1076 bp, Homo Sapiens
  misc_feature (458)..(490): n is a, c, g, or t
gggcggcggcggccccaccgcgccatcttcgggggcgcaccggacagggcaagcaggggcgggaagcgggtgccccgccggcgcctcccgccttcctccatccccggcgcgcgctcaacggctctggcccgcgcggcactccggcgtacgcgggtggccactgacggggccgcgctatgaacgaccgcccgggaggctattgcgcgcgctcagatcgccctcatcgtctcggcgcgcggcggcaaaaccgcttcgggcttcgtggaatgcgaggtttcgccccgccgggggaacgcccgccttgccgcatccccgaaaggcgggacggccccaattcccgggctcccccagttgggcccccagccggttcttggaccgaacccggcagtcgggggcagaaaaaggagcacctccccctccccaggggggaggagggcaatattgacccggtgaactcnnnnnnnnnnnnnnnnnnnnnnnnnnnnnnnnnctacagggctaagtaaacaccagcctgctgggtttatacaaaatgagtgaaatttaaaaggggcaggagagtttgtccagggactggctggcagccagaacccaccttcaagcaagttacaaggacttgggggaaagtgctgagagcagaggctttagtagggggcagggccagactgctccccactgggaaagcacaccccttaaaggagcccttcccccttgcccagaacgggggatgcttccagaggaaggctgaggcttttctggtaaggaagccagctccggaccagtccagccacagcccacctgcctctctggcatccgccccagtctgggcagctgaccctgagggcagagaaggactttgcttgctccaaccttcctgcaggaaaaccagctgctcaggacccagccctgggcagagggcacggtcggtgctcagacctttctcagcacgggtctcagacctgagctggagctaactggaggaagaggcagcacccgttcccgccgggctgctggaccctgggcctctgactgcacagcaggcagtgaccaggagtccttgtgggcgtacggtacca

SEQ ID NO: 98525 - DNA, 813 bp, Homo Sapiens
acatcatgatgccattccggtagagcttcagcgggatgggctcgagggtacgcaaccgtgccccgccgggcactggtgtcacttgggtgtcaccctctaccaccaactcactaagatcctgcaggctggccagcagcctgtcaaagtccaccctcagggggcgccaatgagtcccctggcttccagaacttcttggctgtcatccagtccctctcgccatgctctgagactgtcttgctctctgagtcctcctggtccatgggctcgcccacccactgcaggccatagtcactgaggaaccgctccatctccctgacctgccgctgcagctgcacacacatcgtctccagttcctcctgccgctgcagggttgcctcggctgggtgtggccggagggtctgcaccaggtcctctagggccgctatcttctgatccttggacagtatctcatcagtctgggccttcacctgctgctccaggtcccacaacttcctcgtcatgaaggccatcagctccgagtcatgggatgcagggacatctccatagatgcgcgattcctcgcctcccaggattcataggctccgagggcaggggcacttttcgggtcttgctaagggaggccaaaggtgagctcatagttctacttctagaatccagctgtcaggaactcccttttgcctcttccactgtctccacagaggtttctggaagtttctgttatctgcctgctcctctgggtatacggctttctgctctgaactgagagacctttggcctggtggtgcttgggaaagtacacgcaggccgctagcc

SEQ ID NO: 98526 - DNA, 995 bp, Homo Sapiens
taggaagcgaggcctgggtggcgaattcggcacgagggagccgtggtgcaggtgcccccctcgctgttcgggtcagttcttggccatgcttggcctgtcacacgccgggtctcaacaacatcgtgcgaggagacagtgactggtttcagcccaagagtcaactgttgagcatgacatcaggaagcctgtactgtcctgatcccaccaggcttgggttaatttcctattgcttcagagaaagagaggcgctcttgtgcttttgagagagctctcatgttaaaaagaggttgtctttgcactgcgcttggtatgatttgttttcttataaaacaggaagagaacctagaatgtgcctttcgtgaaggtctgacaaatggggtctcagagtcctaggacccgcaccaaggtcagagtccacctgtagaggctgagcatttctacatgcacccagggtgctgggctgaggctaagggtggacgcgtagaccccatcacaggcttccttcctgagcccaagtcccccatttggtcactatcccttctcagagcaagtggattctcttttcctcacttggaatattcaatgttgaagtagtggcctggagtggcctttccctcagctgcctgtctgggctccctggcttcccggatcttcatctcatacgtgaggcaataggaggagtttctattcattgagacaaacagtgagcgggcaccaacaggccagcagcttggcccttttcacagaggtggccctgggagtctggagtctgggcagctgtctgcctctctacggctctgcttcccagcgggcacacgggtccggagcctccaaaatgaagtggggcaaaagcgccagggcacacctaggagaaagctcaatgaccacccaaaccctttgagggaaagaagggggttgccttggttaaaagaaatggcaaacccccaggacctgggccgggttctggcaaggccccgtgggctggatttcccacc

SEQ ID NO: 98527 - DNA, 1101 bp, Homo Sapiens
  misc_feature (865)..(865): n is a, c, g, or t
ggtccaaggtagcgaggcctgggtggcttttctcagacgaggctgagccagcggcttctggtgcaggagcaggagatggaactggtaaaggcagccctggcagaagcccttcgcctgctgcggctgcaggtgcccccttcctccctgcagggctctggcacaccagctcctccgggggacagcagtcttgcagcccccccaggactgccacccacgtgcaccccttccttggtgagccgaggcacccagacggagacagaggtggagctcaagtcatcccctggaccccctggcctgagcaatggacccccagcccctcagggggccagcgaagagcctagcgggacccaatctgaaggagggggcagcagcagcagtggtgctggctcccctggccccccggggatcctcaggcccttgcagcccccacagcgtgctgacacgccgcgaagaaattcttcctcctcctcatccccctcagagcggcctcggcagaagctctccaggaaggcaatctcctccgccaacctgttagtgcggtccgcgagcacagagagccgtgggggaaaagaccccctctccagccctgggggccctggatctcggaggagcaattacaatttggaaggcatctcagtgaagatgttccttcgagggcgccccattaccatgtacatcccgtctggcatccgcagccttgaggagctgccgagtggcccaccgccagagaccctcagccttgactgggtttatgggtacaggggtcgtgactcccgctctaatctgtttgtgttgcgctctgggggaggtggtctactttatcgccctggtgtggtggtgctgtaccggcctggaggaggcccanggggggcctgggaggttgggcggcagagacattaccggggggacacagactgcgttcggatgccttgctggtccaccctggaagggggttccgggtaccctcgggaaaaaacgctggaaggggaaaaagggatggaaaagcccctggacagccgggtgggtcaccatctggggaactcaaaaaaacgcttgttggaaaacttgccgggaaaaatgggaactggggggggcctttcc

SEQ ID NO: 98528 - DNA, 1160 bp, Homo Sapiens
  misc_feature (984)..(984): n is a, c, g, or t
  misc_feature (1102)..(1102): n is a, c, g, or t
ccaaggtagcgaggcctgggtggcgtatctcagcacgagggcgggctcccccgcccgcttcaccatcgacaccaagggcgccggcacaggtggcctgggcctgacggtggagggcccctgtgaggcgcagctcgagtgcttggacaatggggatggcacatgttccgtgtcctacgtgcccaccgagcccggggactacaacatcaacatcctcttcgctgacacccacatccctggctccccattcaaggcccacgtggttccctgctttgacgcatccaaagtcaagtgctcaggccccgggctggagcgggccaccgctggggaggtgggccaattccaagtggactgctcgagcgcgggcagcgcggagctgaccattgagatctgctcggaggcggggcttccggccgaggtgtacatccaggaccacggtgatggcacgcacaccattacctacattcccctctgccccggggcctacaccgtcaccatcaagtacggcggccagcccgtgcccaacttccccagcaagctgcaggtggaacctgcggtggacacttccggtgtccagtgctatgggcctggtattgagggccagggtgtcttccgtgaggccaccactgagttcagtgtggacgcccgggctctgacacagaccggagggccgcacgtcaaggcccgtgtggccaacccctcaggcaacctgacggagacctacgttcaggaccgtggcgatggcatgtacaaagtggagtacacgccttacgaggagggactgcactccgtggacgtgacctatgacggcagtcccgtgcccagcagccccttccaggtgcccgtgaccgagggctgcgaacccctcccgggtgcgtgtccacgggccaggcatccaaagtggcaccaccaacaggccaacaaggtcactgtggagaacaggggagctggcacgggcggcctgggcctggctgtaaagggcccctnccgaggcaggatgtcctgcatggaataccgggacggcagctgctcggtcgagtacatcccttatggaggctggcacctacagcctcaacgtcacctatgggggccatcaagtgccagncagtcccttccagggtccctgtgcatgatgtgaacgaatgccgtccacagggccaaga

SEQ ID NO: 98529 - DNA, 774 bp, Homo Sapiens
ccagaagaactttgcataaatgactgaatcatcaaggaagagttaaattgttcctgtttaaaaatcagggaagcacaagcatcactttagtagtatttttgcacaaaaaagtttataattagggaaaaacgaaggttttggtgctacatttgtaagtttcagtttatttgaaaattattcttctggcctcttagcaatattttcaatgagatttactgtatttcttaacctttgtgtactggttagaagagtatacccaattaaataatgaataagaccactatctaaaaatttgtagacgttggcaaagaccaggagttcacagtcaaatcaaagggtgctggtggtcaaggcaaagtggcatccaagattgtgggcccctcgggtgcagcggtgccctgcaaggtggagccaggcctgggggctgacaacagtgtggtgcgcttcctgccccgtgaggaagggccctatgaggtggaggtgacctatgacggcgtgcccgtgcctggcagcccctttcctctggaagctgtggcccccaccaagcctagcaaggtgaaggcgtttgggccagggctgcagggaggcagtgcgggctcccccgcccgcttcaccatcgacaccaagggcgccagcacaggtggcctgggcctgacggtggagggcccctgtgaggcgcagactcgagtgcttggacaatggggatggcacatgttccgtgtcctacgtgcccaccgagcccggggactacaacatcacatcctcttcgctaca

SEQ ID NO: 98530 - DNA, 985 bp, Homo Sapiens
gtccaaggtagcgaggcctgggtggcgattctcggcacgaggtgggagtgagagagtgaggacgctgggctgggggaaacgggaagccgctgcaagtccaccgcctcagctacccagattgggatctgcccaggcccgctttatggactagtgtgggcggcaggctcctttccgtccctgccctgctgtaccccgctccttggagaccccctgtatccctcccgcaaggtggaatccgcaggctggaggctcccaggggaggcaaacgcctggccctgccctgccccacgccgcaccatgaccctcctgctgctgccccttctgctggcctctctgctcgcgtcctgctcctgtaacaaagccaacaagcacaagccatggattgaggcagagtaccagggcatcgtcatggagaatgacaacacggtcctactgaatccaccactctttgccttggacaaggatgccccgctgcgctatgcaggtgagatctgcggcttccggctccatgggtctggggtgccctttgaggctgtgatccttgacaaggcgacaggagaggggctgatccgggccaaggagcctgtggactgcgaggcccagaaggaacacaccttcaccatccaggcctatgactgtggcgagggccccgacggggccaacaccaagaagtcccacaaggccactgtgcatgtgcgggtcaacgatgtgaacgagtttgccccagtgtatgtggaaccggctgtatcgtgcggctgtgacagaggggaagctgtacgatcgcatcctgcggggggaagccattgacggggactgctccccccagtacagccagatctgctactatgagattctcacaccccaaacccccttttcctctttgacaatgacgggaaccattggagaaccccgaaaaagctgccagtaacagggggtgaaaggcttcttataagtttacaggggacagccttattgattgggggaa

SEQ ID NO: 98531 - DNA, 961 bp, Homo Sapiens
tcctaggtagcgaggcctgggtggcgaactcggcacgaggggacccagaatacattgcgcctgaggtgatcctgcgccagggctatgggaagccagtggactggtgggccatgggcattatcctgtatgagttcctggtgggctgcgtccctttttttggagatactccggaggagctctttgggcaggtgatcagtgatgagattgtgtggcctgagggtgatgaggcactgcccccagacgcccaggacctcacctccaaactgctccaccagaaccctctggagagacttggcacaggcagtgcctatgaggtgaagcagcacccattctttactggtctggactggacaggacttctccgccagaaggctgaatttattcctcagttggagtcagaggatgatactagctattttgacacccgctcagagcgataccaccacatggactcggaggatgaggaagaagtgagtgaggatggctgccttgagatccgccagttctcttcctgctctccaaggttcaacaaggtgtacagcagcatggagcggctctcactgctcgaggagcgccggacaccacccccgaccaagcgcagcctgagtgaggagaaggaggaccattcagatggcctggcagggctcaaaggccgagaccggagctgggtgattggctcccctgagatattacggaagcggctgtcggtgtctgagtcgtcccacacagagagtgactcaagccctccaatgacagtgcgacgccgctgctcaggcctcctggatgcgcctcggttcccggagggcccctgaggaggccagcagcaccctcagggaggcaaccacagggagggtatatggggtcctgacacccccatctgggagaggggggtatctggggcctgtcactgaacactcaggggagcagcggcccaagctggatgaagaagctgttggccgga

SEQ ID NO: 98532 - DNA, 995 bp, Homo Sapiens
aaggtagcgaggcctgggtggcgaatctggcacgagggtggggcagggctaaccaagtggtctctgaactcaccgagcgtctgcacttggttgtgaagttaatgggagtacagagagcgtctggccttggagaggggttgagagcctcctttttggttcttcattcctgagctcttgcctgcccacaaatctgacctctttgaatggggacgcagtccttcaacagagaagtttctatggcaaagaagtttctatttagctctagatccagcagagtcatccattctaactgccctgaagtctagagcaggggagggaacccagaggctggggatgagactaggcagaccctggttaccatatggacaaggacaggggaaagcacccccttcctcaatttctgaaagttctatctttgggttcgcaagactttgaggatgataaagaacatataggtactagcttgttgttgctggtccaaagcttccacagccctgagaatttggctttcgtggctgctctggcagctgagcgaagggaggaaggcagccgctctggtggggactctaggcaccttccctgctgtccacttggataggcggtgagccccagggtactgagaggagcctgagcatttacctgccattagtgcctcttccttcaggagactggcttgaaacgtgtgttcatgtgcgcgtgcacacacacacatgagcacctgtatgtggtaatgaatagcttttcttggttaatgctttttaacttctgttcctttccgaaagtggatgattcaaaaattaacgtgaccttgcctgggcgcagtggctcccaccctgtaatccccccacctttgggaggccaagggaagccggatcccccggagggccaggaatttccagaaccagccctgaatcgggtatgggtgtaaaacccccggttttcttccttaaaaattcataacaatttaacccccggccttgtgtggcgtcgccccc

SEQ ID NO: 98533 - DNA, 1002 bp, Homo Sapiens
  misc_feature (384)..(393): n is a, c, g, or t
cggtcctaaggtagcgaggcctgggtggcgaattcggcacgaggcctcgtgccgattcaccaaacattcttactaacgtttccttatatctaaatcagattgattctatattttgctttgtttgtaatcaatagccaatgaagaataaggagtattggaagaagcagtgagtcagctttaggtgacctggttcttgtctcaactttgtgatttggggagatacagtttactttccctgagccttaattcttgtgtaactgaagtctaacttaacttcttaatgtccttccagaactaaaattttattgttcattctaatcgttggactactcttgtgaagtttatattttgagttaatacagtttccaaattaacatacatttnnnnnnnnnngggtagtatttttccatttctctgtgtgcacttaggataaacagtgaagtatagcttataaaacaattagtttgagggctgagagtgtaagaggaactataccaaaagtcaggaaacctgagctcttaccctaactctgttaccaactttgctgtgtgaccttaatcaaaacacataacctggaccccatgctcctcaccagtaaatcaagggcctgaattttatggcttagtattcccttccaagctccgaagttgcgtgattctgtgaaaggcagtgattgattcctttgtactcatcttccttttgacctgtttcctcatgatatattggggaacaaatactaaaaagtgttttatactagctttcttgattgacatttccctataatactgatgaatttgggtgatggaaagtaatggaaaattgttaaaagttctgctctcaaatctgagtctccttgccctgtgtgccaatggttaaccatatttggctaatcctaaacccatattgccgagggatcctccaggaatggatacctgggtccaagaaatttgggggcccttttgaaagccccagtttttccaaaaataaatacctaagggattt

SEQ ID NO: 98534 - DNA, 944 bp, Homo Sapiens
  misc_feature (45)..(64): n is a, c, g, or t
  misc_feature (73)..(322): n is a, c, g, or t
cggtcctaggtagcgaggcctgggtggcgatttcggcacgagggnnnnnnnnnnnnnnnnnnnngagatggannnnnnnnnnnnnnnnnnnnnnnnnnnnnnnnnnnnnnnnnnnnnnnnnnnnnnnnnnnnnnnnnnnnnnnnnnnnnnnnnnnnnnnnnnnnnnnnnnnnnnnnnnnnnnnnnnnnnnnnnnnnnnnnnnnnnnnnnnnnnnnnnnnnnnnnnnnnnnnnnnnnnnnnnnnnnnnnnnnnnnnnnnnnnnnnnnnnnnnnnnnnnnnnnnnnnnnnnnnnnnnnnnnnnnnnnnnnnnnnnnnnnnnnnntgtgtgaaccactgcgccaggccacaaagtacacattaattttataattggaagtcagtaactttgaaataatattgcataaaattgttccgtactgagcccttctgattcggcctgacctcccttcccagtgggcatgaatgggcttgactttagagtacactgcagtgggaaaagcttggatcgggagtcagagggagcctcccagctcttgctgaagttgtttcctttgcctaaggatgcccgtactccctgcgtgttgagccctggctaagatgccacttctactgtctcttctgctggagcacccatcattcatcactccgcactgcctgccgtttatctgtttacatgccttcctcttccttctctgggcctgcagaagttctccttctgtaactgacagggtgacttggaggtggcatttctgctccctgggactggctgcaatactaaagaaaaccacacgagggcactagagccacactggtggcttcctgccatcctggtcagatcacagcttaggaaactgtccccccagccagagatgacaccagtcactacaggcctgggatgctcccacttgggggagcccatggaggaaagaaatggctcatcaact

SEQ ID NO: 98535 - DNA, 1423 bp, Homo Sapiens
  misc_feature (873)..(881): n is a, c, g, or t
actcactccccgtagcgaggcctgggtggcgaatccggcacgagggaggagttggggatccgagaggaatgtggcgtgttcgggtgcatcgcctcaggagagtggcccacgcagctggatgtaccgcatgtgatcactctgggactcgtggggctgcagcaccggggtcaggagagtgctggtattgtgactagtgatgggagttccgtgccaacattcaaatcacacaagggaatgggtcttgtaaatcacgtctttactgaagacaatttgaaaaaattatatgtttcaaatcttggaattggacacaccaggtatgccaccacaggaaaatgtgaactaaaaaattgtcagcccttcgttgttgaaacacttcatgggaagatagctgtggcacataatggcgaattggtaaatgctgctcgattaaggaaaaagcttctgcgtcatggtattggtctgtctacaagttctgatagtgaaatgattacccagttactggcgtatacccctcctcaggaaacaagatgacaccccccagactgggtagccaggattaaaaacttgatgaaggaagcacccacagcatactccccatggcttataaatgcacagcagatggttatttatggcaagttaccacgatcccttattggcaaactccgccccccttaatgccacttgggtccggttctttaatttcccagatggcgcctgaactaactacacattggacctcatccgaagcaacaataaaattccatttcctagaaaaaaaccattataaacgggacctgcggggttggggggatggtctcccactttcacaatgagataaatctccctctttgtcggctaccgcccccttttctnnnnnnnnntaaaattcccctacacttttgcggcggcctgggcccccacagccacctatcatattttttgacccgcgcaagtagggaaagagggtctcccccctgttgggcccccctgtggtgctaaatgtaaaaaaaattttctgggaggggggggaaacaaacattttgattttccctccatggtgcatcatcccctatctagtcggtggtccgcctaaaaacaaacacccttcctcttctgcgcccacccttttttcaacgctatatccccccgacggcgggtccctgtataataatacggagaaaaaaacactccccaagcgctgtggcgccttttttatcttgggccggtatcgacttgtcgggcacacaaaaaccgccccctcatacttttgaggcgccgctaagcaacacaaacctgacacagtgcgatcgggctcgtcgcccacacaataaccccacactcggcgggttgtatatttacccgataccaccgagaatactcccattacacacatccacccccctccaccatttaaccttactcc

SEQ ID NO: 98536 - DNA, 1417 bp, Homo Sapiens
cttctcgccagcgcaggatcagcctgttcctgggactttccgagagccccgccctcgttccctcccccagccgccagtaggggaggactcggcggtacccggagcttcaggccccaccggggcgcggagagtcccaggcccggccgggaccgggacggcgtccgagtgccaatggctagctctaggtgtcccgctccccgcgggtgccgctgcctccccggagcttctctcgcatggctggggacagtactgctacttctcgccgactgggtgctgctccggaccgcgctgccccgcatattctccctgctggtgcccaccgcgctgccactgctccgggtctgggcggtgggcctgagccgctgggccgtgctctggctgggggcctgcggggtcctcagggcaacggttggctccaagagcgaaaacgcaggtgcccagggctggctggctgctttgaagccattagctgcggcactgggcttggccctgccgggacttgccttgttccgagagctgatctcatggggagcccccgggtccgcggatagcaccaggctactgcactggggaagtcaccctaccgccttcgttgtcagttatgcagcggcactgcccgcagcagccctgtggcacaaactcgggagcctctgggtgcccggcggtcagggcggctctggaaaccctgtgcgtcggcttctaggctgcctgggctcggagacgcgccgcctctcgctgttcctggtcctggtggtcctctcctctcttggggagatggccattccattctttacgggccgcctcactgactggattctacaagatggctcagccgataccttcactcgaaacttaactctcatgtccattctcaccatagccagtgcagtgctggagttcgtggggtgacgggatctataacaacaccatgggccacgtgcacagccacttgcaaggagaggtgtttggggctgtcctgcgccaggagacggagtttttccgacagaaccagacaggtaacatcatgtctcgggtaacagaggacacgtccaccctgagtgattctctgagtgagaatctgagcttatttctgtggtacctggtgcgaggcttatgtctcttggggatcatgctctggggatcagtgtccctcaccatggtcaccctgatcaccctgcctctgcttttccttctgcccaaaaaagcgggaaaatggcaccagttgcttgaaaatgcaagttgcgggaaatctctgggcaaagttccacacaggtgggccatttgaggcttctgtcgagccatgccctaccacttctcaagttttgcccaccaaggacggcccaaggccccgaaagtttaagggaaaaaattgtctgcaacttaaagaccctcgttcctagaaagaaagctccctgga

SEQ ID NO: 98537 - DNA, 503 bp, Homo Sapiens
  misc_feature (125)..(125): n is a, c, g, or t
ttttcgccccttgatgcgaaacgaatcctgttcaaagcccatcacctttggccagcccaacaggtacttagcacattcctgtgatacagctgtgttgctttttccttttgtcccttggatttatnttgcctcttgtgtgagttgtataacagttcattgggtcgcgggcacgctcccgtccctcgactctcgggcacaactgagtccgggactggggcattccgatggaatgccgctggcgacctacccgctcgtgattggaatgtgtcgccggaagagataggggagggggtcgggataccgggagccgcctcctttctcctccgccgactgcggctcccgcaggctggccgggcgtcctcgcacactcgcccagtttctcacagcctcgcgtcccgtcagcttctccctcaccccactcccacacactctcactcccacacactacacccgcccgctcctcgttccctactcgatccaaaatcccggccgacagccgactt

SEQ ID NO: 98538 - DNA, 1031 bp, Homo Sapiens
  misc_feature (939)..(939): n is a, c, g, or t
gagcgaggcctgggtggcgaatcggcacgaggggccagatttttttaaaagtaggtatcttgtgggatttatgttctgagagatacacctaaggaaatgctgccctacagtgtttttgctagttcatactcattacaaaggtttcttgttgttgggtgcccctctagccagtggtagtaaaatgggaagagacaggtcaagactcccttggaccatggcattgagagagggatggctgtcggcatagatatgttggttatttaggcatttgtgagggaggcccctggctcttccagcctgtttccttaggatcccagttggccgggaacagctgtacaagggtctgctgaactggtggtttcagcagactacccagttcctaagcatccatgagacagagggaaccaacttgtatttccagaacaattttccaaaccttttctggctgtactttaaaagtgccaaaaaggcaatgggtgtttatgacactaaagtcacatacaagctagtatgatacatacatcatagaaagcttatagttgctcagtgacaaagcaaaggaagtttaatattttccagttttgttcattaccgaagacagtctacggttcatagttttcactaaattctaagcagattctatatcctaaaacatttaaacctcactaggcctgcaattttgagagggttagctaaatatgtttggtatcacttcagagtctaaaaccagattactaatcgtgtgtaaggaggcattttgtgtgtctttgcaatgtatacaattggattatttggaacaccattttgaatgtgtattttgagagaaagctcgcctggtgggttttgaagttgtggtgtaatgggtgaacatgtaaccacgtgaaaaggccgttgggatccttggttctggatccttcagtcgtcttcctgcaaattccngagaatggctttttaatcatttcgtttacttatccccaaaatcttggaaatcatgaaaatataacttggccagagtttgcatcagcccctcg

SEQ ID NO: 98539 - DNA, 1006 bp, Homo Sapiens
aaggtagcgaggcctgggtggcgaattccgcacgagggagctcccacctccgcttacagctcgctgccgccgtcctgccccgcgcccccaggagacctggaccagaccacgatgtggaaacgctggctcgcgctcgcgctcgcgctggtggcggtcgcctgggtccgcgccgaggaagagctaaggagcaaatccaagatctgtgccaatgtgttttgtggagccggccgggaatgtgcagtcacagagaaaggggaacccacctgtctctgcattgagcaatgcaaacctcacaagaggcctgtgtgtggcagtaatggcaagacctacctcaaccactgtgaactgcatcgagatgcctgcctcactggatccaaaatccaggttgattacgatggacactgcaaagagaagaaatccgtaagtccatctgccagcccagttgtttgctatcagtccaaccgtgatgagctccgacgtcgcatcatccagtggctggaagctgagatcattccagatggctggttctctaaaggcagcaactacagtgaaatcctagacaagtattttaagaactttgataatggtgattctcgcctggactccagtgaattcctgaagtttgtggaaacagaatgaaactgccatcaatattacaacgtatccagaccaggagaacaacaagttgcttaaggggactcttgtggtgatgctctcattgaactgtctgatgaaaatgctgattggaaactcagcttccaagagtttctcaagtgcctcaaccccatctttcaaccctcctgagaaaaaatgtgcccctggaagatgaaacgtatgcacaatggacctgaaacccgaggtggactggaaccgctttggcctggtgcctggggaaattgggtctggacacccatgacctggggaccgaaaaaaatccgaagggggggcccaaaccccgaaccgaaggggggaatggccccaattttgtcccgggagctccaaaaaa

SEQ ID NO: 98540 - DNA, 978 bp, Homo Sapiens
  misc_feature (893)..(893): n is a, c, g, or t
ggcctgggtggcgaattcggcacgaggagcagagatagggagaggaggtgaggggcacctatagctcttagccatgagttatgactccctccatccaagggagacccaaggacatgaaaggggactcagttccaaggatcagagggaacttgggttgttttgggataatgactgtggcttgggatgtcacggagatgaacaccagaattggtgtgcaacagatgagctccagtacccctgatagtttgcatgggttttgctctgctgatgatggtcagggacagcagtgaggccctctacaatgccgccttctgcctaaacacaggcagtgcccacaaaaggggagctgtcattatggagcctaggaatggatagtcagagagcagcggctgggcagtgcaactcctgcattggacaaggtcctggctagagaatgtcaatgtccacactgcatgtagccctatcgaggagatgatgtagggggctgtcagccttggagactctagcctaagtaccccaccaccactctggctggcttccaagggcacaaatcagctttctgaatctgacttggcttcctgtgatctgcattcatgaacattcttactagagttctcatggaaaatgaatacacaactatttggtctgaatgtgtctgagtttggtgtctccaaaacaattctctggattagatggagaatgaagaaacttcacaaagggcaaaaagacaggtccccatctcgacccccagagaccacttctcagagtctctatctgttcgtctctggtgttagccacgttccctttacttttccctcatttctgtggccactcctgtgggcttcctctcctttcaacctgcaggctgctgctgccctgcctcagacccctgnaaggcttctgtagagatgctactcagatggggggtggagctagatgcaaaactgaaacccacctaagagatctagctttggagag

SEQ ID NO: 98541 - DNA, 817 bp, Homo Sapiens
gggcctacccggccctaaaggtcctaagtagcgaggcctgggtggcgattcaagcacgagggtgaccaccggctcgcggcgcgtggaggctgctcccagccgcgcgcgagtcagactcgggtgggggtcccggcggcggtagcggcggcggcggtgcgagcatgtcgtggctcttcggcattaacaagggccccaagggtgaacgcgcggggccgccgccgcctttgccgcccgcgcagcccggggccgagggcggcggggaccgcgggttgggagaccggccggcgcccaaggacaaatggagcaacttcgaccccaccggcctggagcgcgccgccaacgcggcgcgcgagctggagcactcgcgttatgccaaggacgccctgaatctgccacagatgcaggagcagacgctgcagttggagcaacagtccaagctcaaagagtatgaggccgccctggagcagctcaaaaccgagcagatccgggcgcacgctgaggagaggaggaacaccctgagcgaggagaccccggcagcaccaggccagggcccagaatcaagacaagctggcccgccagcgctacgaggaccaactgaagcagcagcaacttctcaatgaggagaatttacggaagcaggaggagtccgtgcagaagcaggaagccatgcggcgagccaccgtggagcgggagatggagctgcggcacaagaatgagatgctgcgagtggaggccgaggcccgggcgcgcgccaaggccgagcgggagaatgcagacatcatccgcgagcagatccgcctgaaggcggccgagcacc

SEQ ID NO: 98542 - DNA, 1007 bp, Homo Sapiens
  misc_feature (17)..(17): n is a, c, g, or t
  misc_feature (47)..(47): n is a, c, g, or t
gggcgtcccggtgcttncagggtccaccccacccattggggggattncgtcatgccattgaccagttccccagctccctcacgggatggtgaaggatgtccagccagggccctgggttggggtggtttttcggaccccatattcccccaagcattgatcactggcctccggcagtgcttggcggccagctccactgctccaggctgggggtgccggagcacgacgacgtcggcatagcagctcatggtctgcacggagtcagccagggattcgcccttctggacggacgatgtggcttccgagaagctgagcacagcacctcccagccgggccatggctgctgcaaaggagctgctggtccgtgtgctcacttcatagaacatggaggccatgaccttccccttcaggatgtcgaggctccgctccttctgcaccatcatacgcagtgtgtgtgccacattgaacaggtgagacatctgatccttggtgaactgctggacggacaggatatgttggcccactaatgagtgcagcaggggtgaggtctgggggtgcagcaagccaggggtccccaggttctggggagatgcctgtctcggtactggtggtggagggtagcaggtgccatcaggggttcccatcagctctggctcggctaccttccgagaggacttctcctttggctcctcagctggcaaacctgggtcggaggctcgatggatttcggggcgggcagatgaaagcggccatcaggaagccctgggatgccacggcggggtctttcaggtgtcgtggtcatctcactagtggcaggggctgagggtgggagctgaggaacagccccctgtggccacttccgtacatcctgtccatagcccgggggtaccagaacctgcccatcgatataggcaacctcccctcgcaggaccacacggcggacggtgcccttcactttctgcccttcaaaaggtgccctcgtgccgaattcgccacccaggcctcgctac

SEQ ID NO: 98543 - DNA, 1035 bp, Homo Sapiens
  misc_feature (46)..(55): n is a, c, g, or t
taattctccttggggcccaaggggggcccccgggaaattccgggcnnnnnnnnnntgtctcccgggggtcccccgccgggcccgtttggttgccgggttggaatcccaaggggttttttagttaggcgccacaaaggttttccaattggggcaaccccgggaacaggcagggttccattttccgcccttgaatccctgcggaaattgccgggttggcccgggttgatgggggaagccctttcactgggtagcagcagccgtccaaacttgttctgcaccttgatgacagctccaaaagctcctttaccaagaagttgtaattcttcaaactcaaggaagtatcgggaaaactgtctctgtgtctcactaaagaaggcagcactgggtagccggttgctaggaataacagtctcaacataatcttgtcctccagaatcttcaggactttgttccactagaggcatttttggctggggatttataaagctgtgtttcaacaactgctggggactccatctttccttgtcatccaagcacacacatttctttagaaaatcttgaaagtcagctggtaagtcactagggatggtcacagggtactctccacattcctgtccttggctgagggacagcagcagaaggccaagacgccaaacatctcctttcttccccgttttataaggcagagcattgtcactaaaacgaactcgggtttgctcaaacacatcctccttgcaaatgtctgcgaggcgcttagaaatgctatagtccgtaatcttgacggtgccttctgcatccaccaagacattagatgcactcaggaccttatgcaccacagaattgctgtgcagataatcaaggcctgacaggagctgagctgtgtacctgcgaagctgatgcacagggatggggcctgagtggctcaggtgtgcagcaagagagaccccactaatgtgctccactaaaatgtccaccacgatggagtcgtcttgctctttgagattcattgcaaggtagcgtactacatttggatgg

SEQ ID NO: 98544 - DNA, 932 bp, Homo Sapiens
agcgaggcctgggtggcgaattcggcacgaggacagaacaggctggggcatccctcgccctggctctttgagcccggaccagacagagatgtgataatggatcatcatgtttctaccatcaagcctcgaagaatccaaaaccaaaatgtcattcaccgcttggaacgccggcggatcagttcaggcaaggcaggtacccactggcaccaagtccgagtgttccatcagaatgtcttccccaacttcacagttgtcaacgttgaaaagcctccttgtttcttgcgtaaattctcacctgatggacgctactttattgctttttcttcagaccagacatctcttgaaatctatgagtaccagggctgccaggcagcagaggacctactgcagggatacgaaggagaaatcctgtccaatggcaatgaccagcggtcagtgaatatccggggccggctctttgaacgcttttttgtcctgctgcacattaccaatgttgcggccaatggtgagcacctgaaccgggagtgtagtctcttcactgatgactgccgctgtgtcatcgtgggctcagctgcctacctcccagatgagcctcaccctccattttttgaggtatatcggaacagtgaatcagtgacccccaacccacggtccccctctagaagactattccctccatatcattgaccttcacaccggccgcttatgtgatacacgccacgttcaagtgtgacaaggtgggtcttgtcacacaaccaagggctgtacctgtacaaaaacatcctggccatcttgtctgtgcaacaacagaaccatcatgtcttccaggggaactccctgaaagcaactttctttgatgtgcgggaccattggccgccttttgctatgaggatgacccgctcactgtgtcagctgtttttcccgtgaggtac

SEQ ID NO: 98545 - DNA, 905 bp, Homo Sapiens
  misc_feature (42)..(42): n is a, c, g, or t
  misc_feature (433)..(443): n is a, c, g, or t
tcagttgccaaaagaacttgtcacaagtttgggacatcaggnttatgataaagatagacactagaagagagaatgatgatcaatttccaatgggcccagaagtcaccctggatgctgtcagagtgccattaggatgccagtagaggaagaggtaaggcccaggtgtaggatagccttcagtctgtgtcaccaaatggcaagtgcattactaaccacacagtggtcccagtttatcaggctgcagcagaacaaagtcaacatccctgtctataagaagcttaggacttgcctctcatctgactggggccactcagtcaaccagggcccttagcacaaaagggcagaagacacttttggtctactgcacacccaccatcactgaaagtgaaaatggcaagaaaccaatcaagaagtataaacaaccctatcaggnnnnnnnnnnnctccaaggttttcatctaggaccctttttacctacctaaagctgtgacatctgccataacttgaccagacacagttcccccagccaccagttcaggccatactaaccaatctcttctcagggaccactgggttatctcttaatcattgtcacctctttgaccagcctgtctccaacacacctgcccccagcctgggtcagtatggtacagtggtgtaaatcaccaaaaaggaaggggtgaggacacaaggaccctccccatcatcattacactcgccatgcagtattcaactccctgtgccactcagagggaggcagaagtcagggcctggaaaagatcttgtctagagactccccacaggcccacacagaacagaacccaggggcacctgtcctacttctttatctggtcttggattccaggaagttgactggctccctcgtgccgaattcgccacccagc

SEQ ID NO: 98546 - DNA, 1007 bp, Homo Sapiens
aaggaagcgaggcctgggtggcgaattcggcacgaggatgtctttagatgaagcttacagatttgtgaaagaaaaaagacctactatatctccaaacttcaattttctgggccaactcctggactatgagaagaagattaagaaccagactggagcatcagggccaaagagcaaactcaagctgctgcacctggagaagccaaatgaacctgtccctgctgtctcagagggtggacagaaaagcgagacgcccctcagtccaccctgtgccgactctgctacctcagaggcagcaggacaaaggcccgtgcatcccgccagcgtgcccagcgtgcccagcgtgcagccgtcgctgttagaggacagcccgctggtacaggcgctcagtgggctgcacctgtccgcagacaggctggaagacagcaataagctcaagcgttccttctctctggatatcaaatcagtttcatattcagccagcatggcagcatccttacatggcttctcctcatcagaagatgttttggaatactacaaaccttccactactctggatgggaccaacaagctatgccagttctcccctgttcaggaactatcggagcagactcccgaaaccagtcctgataaggaggaagccagcatccccaagaagctgcagaccgccaggccttcagacagccagagcaagcgattgcattcggtcagaaccagcagcagtggcaccgcccagaggtcccttttatctccactgcatcgaagtgggagcgtggaggacaattaccacaccagcttcctttttcggcctttccaccagccagcagcacctcacgaagtctgctggcctggggccttaagggctggcactcggatatcttggcccccccagacctctacccctttccctgaacaagaagctggtaattttgccaccgaagccctcacaccttctactctgcctcagcccatttacggaggggggggcccagtaactctggcctaaagcg

SEQ ID NO: 98547 - DNA, 979 bp, Homo Sapiens
  misc_feature (22)..(22): n is a, c, g, or t
  misc_feature (52)..(117): n is a, c, g, or t
  misc_feature (152)..(171): n is a, c, g, or t
aaggaagcgaggcctgggtggnaattcggacgaggctcactcctgggcttannnnnnnnnnnnnnnnnnnnnnnnnnnnnnnnnnnnnnnnnnnnnnnnnnnnnnnnnnnnnnnnnntctcctttaaatgcacctccttgagcatgcatgannnnnnnnnnnnnnnnnnnnaatgcagtcatgtgccccaggaatctagctggactgccttctgcttgcaaaagctgagctcttgccatcagcttccaaaggtggattgttaaaggaaaaagcaacctttctgcttcctaattatgaggaagagagaggcctaatgagctcaatggaaataaatgaattcgttcagcagacattcagtgagtacctactggtcctcaggtctggtggatacagtggtgaatgggactcagcccctgccctcaagaagtttccagtgtgtaaaaacaacccaaggagctgtgggatcccagatgagagggaattgaatctgcttgcagcggtcagggaaagttgggccttgggggatggtaggagttcagcagagatcctggcgggctggatggtctatgcagagataacaggtggtagaatcatcagggtgagtccatcagagcctaatgtggtgcagcctgcccctgggtgggaggtggccagactcctgggactccagaggcctcattccgcagaggcaaatgaacagggcaggggcagggagggtctccccaaagatggggagatgctggccacctgtttcctagaggacctggaattcttaaagagaaaaaggcagggacacaagtcttggcacaaaatctgccattgtttgcctgccaccatcgccatgatgacagcataaggaagcccaggtcccacctggaaagtctgccccccaaccccttcctaccctaaacctggaagggggaaaggatttcccccaagaaggttggggggcccgcttccggggaggaattcctcgaaa

SEQ ID NO: 98548 - DNA, 985 bp, Homo Sapiens
tctaaggtagcgaggcctgggtggcgaattcggcacgagggaaaatgcccggggttaccttcaagctcttgcttccaagatgaccgaagagctcgaggctttgaggagttctagtctggggtcaagaacactggacccgctgtggaaggtgcgccgcagccagaagctggacatgtccgcgcggctggagctgcagtcggccctggaggcggagatccgggccaagcagcttgtccaggaggagctcaggaaggtcaaggacgccaacctcaccttggaaagcaaactaaaggattccgaagccaaaaacagagaattattagaagaaatggaaattttgaagaaaaagatggaagaaaaattcagagcagatactgggctcaaacttccagattttcaggattccatttttgagtatttcaacactgctcctcttgcacatgacctgacatttagaaccagctcagctagtgagcaagaaacacaagctccgaagccagaagcgtccccgtcgatgtctgtggctgcatcagagcagcaggaggacatggctcggcccccgcagaggccatccgctgtgccgttgcccaccacgcaggccctggctctggctggaccgaagccaaaagctcaccagttcagcatcaagtccttctccagccctactcagtgcagccactgcacctccctgatggttgggctgatccggcagggctacgcctggcgaggtgtgttcctttgcttgccacgtgtcctgcaaagacggtgccccccaggtgtgcccaatacctcccgagcagtccaagaggcctctggggcgtggacgtgcagcgaggcatcggaacagcctacaaaggccatgttcaaggtccaaaagcccacggggggtgaagaaaggatggcagcgcgcatatgcagccgtctgtgactgccagctcttcctggatgaactggccggaagaaaatcccccaagcctggtgtcat

SEQ ID NO: 98549 - DNA, 1031 bp, Homo Sapiens
aagcgaggcctgggtggcgaattcggcacgagggaggagcccatcaacaaaatgtcacttcacaacctggctaccgtgtttggacccacgttactgagaccctcagaagtggagagcaaagcacacctcacctcggctgcggacatctggtcccatgacgtcatggcgcaggtccaggtcctcctctactacctgcagcacccccccatttccttcgcagaactcaagtggaaccagcccctccagcctggggtccaactcagacttgaaagactgcaatagaaaactcccaaacccagcactccagactcgagggaagccagcttccaagaactggaatgcgtacgtcttttgtgccaccttgtacaaagccggctgcccagccccagcctcaccaccgcatcccacctcctgccctccatacctctagttgtgtctgatgctccgtgctgttcgggaattgttttatgtacacttgtcaggcagaaaaggtagtgaccggcccggcgtgggcacacagacagcccgctttgttctttcatttcctccagcactttctttccgcctgagtccagcccaaggccttttattttgcgctgtgtaactgctgccagcttctcttggccctgctcccagatggcggtctcctggcagcctcccctcagtcttcctccacccgctcttccttcccagcctgcctgcatgcatgtgcacccttggtcttcgctccatcgccttgaaagctctgaaaaggccctgggttgccgcggcaccagtgggtctgtttgaggctgccgttttgccgctgccggcccctcctcagactccgcctttgggagcacacctgctttgccttgctgcctgtgcaaatgttggacaagcagacacactcacacttcgtccccagcttagcacagagctgggagcgcccattttctggaaattttccgtttggggaatctccacttcctggggggtttacctggttcgggcctccttggcctatcagtggaaggcatttcctggactgt

SEQ ID NO: 98550 - DNA, 1010 bp, Homo Sapiens
ggtcctaggtagcgaggcctgggtggcgaattcggcacgagggccagcttctcttggccctgctcccagatggcggtctcctggcagcctcccctcagtcttcctccacccgctcttccttcccagcctgcctgcatgcatgtgcacccttggtcttcgctccatcgccttgaaagctctgaagaggccctgggttgccgcggcagcagtggtctgtttgatgctgccgtttgccgctgccggcccctcctcagactccgcctttgggagcacacctgctttgccttgctgcctgtgcaaatgttggacaagcagacacactcacactcgtccccagcttagcacagagctggagcgcccatttctggaattttccgtttgggaatctccacttctggggtttacctgttcggcctcctgcctatcagtgaggcatctctgactgtttcttctactgcttttcagttcccttccctgctgttctatttcctttgagtgtaaagactcacaggtgacctgctatcgagatagccagagggtcaggagagaatgggggaggaggcggtcaggctgctgaggaaacaccacaggctgaacgggggaggaatgcacatgccacgctgggtgtcccgggtcgcggggaggcagctcagctcttaggagcaagttgtgggggcttttcaagaggggccaggcttcctggagggtgactgatgtggccgaagcaggtgtccaggcaggtaggctgcagccaggagctccctggcaccgcaggacctcgtggtactcttgccttagattttacacacactccacaagccaagaactgccacggtcctccaggacctgggaaagcaaaggcacaggccccacggggggccagcccatggggggggcgcccccgctttcgggaaacagcctttttgggaaacccctgggaaccccccaaactttggggggagaagtcgggaaatcaaaacggcccgccctaagggcgtggcgcgcttgcg

SEQ ID NO: 98551 - DNA, 785 bp, Homo Sapiens
tggctacttctcatgaagcccagattaacttttctgtgaatatggcctgtgaactgttgctggaattaaattggagtctagcacaaattaagttaatctactctgtattaatcattgggaaaaagaaaagcttcatttgaaaacagtctttttccttcacccacactaatagaaaaaggagagtaatttgttcatactgtattccacgtgggatgaaaagcatgttttgctctttgtttctgggccggtgtgatccgtgtgttggtgcctgagctggaggaaggagcttcttgcagggaaacagccactggggccacattgagggccagttgggaccttcctttccagtcacactctgtgtcctcacgggccccttcacagtctagataaggagcctagtttcattctcaaagaaaaaggatttggtcttcaacatagaaagcacaaaagcccagacgagactgagcacactgttcgaatccactgccagctcatctgtggtcaggggctggcttctcctgtcctgtgtccagggctgcaagcccgtggttatttgagtccatcaaatcttccgagggccctcggaggaaccatttctcgtcacccccagctctgtaaaaggtcaaaacactgggcagcctctcaaggcacccactgtggtgggctcccacccggggaaaggcctgggccaaactggggtccttaaaagcctgtccaaggtaagggcaggaaaactttccctaaccctccggccggggatggaaatgcaaaccagagggtccccc

SEQ ID NO: 98552 - DNA, 1008 bp, Homo Sapiens
  misc_feature (951)..(951): n is a, c, g, or t
ccaaggtagcgaggcctgggtggcgaattcggcacgaggggaaggaaacctacctgtgagcgccaagtgcactgtgtgcgacaagacctgtggcagtgtgctgcgcctgcaggactggcgctgcctctggtgcaaggccatggttcacacatcgtgtaaagaatccttgctgaccaagtgcccacttggcctgtgcaaagtgtcagtcatcccacccacggctctcaacagcatcgactccgatgggttctggaaggccagctgtcctccttcttgcacaagcccactgttggtcttcgtcaattcaaaaagtggggacaaccagggtgtgaagttcctcagaagattcaaacagctactaaaccccgcccaggtcttcgacctcatgaacggaggcccacacctcggcttacggttattccagaagtttgacacattccggattctggtttgtggcggggatggaagtgttggctgggtcctctccgaaatcgacagcctcaaccttcataaacagtgtcagctgggagtgctgccgctcggcacagggaacgacttggcccgagtactgggctggggctcagcctgcgatgacgacacccagctcccccagatcttggagaagttggagagagccagcaccaagatgctggacaggtggagcgtcatggcatacgaggccaagctcccccggcaggcctcctcctctaccgtcaccgaagacttcagcgaggattccgaggtacagcagattctcttctatgaagactcggttgcagcccacctttctaaaatcctcacctcggaccagcactcggtggtcatctccttcggccaaagtgcttctgtggaaacggtgaaaggacttccctggcaccgggtgggggaaggccctatgagaaagaccacccgcaaagctcgggagggagtcagaaggtccatggcccaagnaaaatgcctctggtccctgaaaaagagaaacttggaatttccctcttttcaagaacc

SEQ ID NO: 98553 - DNA, 1405 bp, Homo Sapiens
  misc_feature (522)..(531): n is a, c, g, or t
  misc_feature (604)..(614): n is a, c, g, or t
taggtagcgaggcctgggtggcgaatcccgcacgagggccaggcgggagctgcgctcggggccgccccggggagcccccggccgcctcctccgccgccggcgacgcgggctggcccaacaagcacacgctccgcatcctgcaggacttcagctccgacccctcctccaacctctcgtcccactcgctggagaaactgccgcccgcggccgagccggccgagcgcgccttgcgggggcgggatcccggcgccctaagaccccacgaccccgcgcaccggccgctgctgcgacaccccggcccgcgtcggtcagagtcgccccccggccccggcggagacgcctacctcatggccaggctgctcgagcacccgctttaccgggtggcggccccgccgctcaccgaggagcgagtcctgatctttggggacccgtaccacccgccttagcccaccccaggcgcaaacccagaccccgcctcgcttgaacggtgcccgacccctcccaaacccaaccaccctcctnnnnnnnnnngcccagaggaatcgacgagcggcgttatcgcgtgcgatgaggccgcacccttatgctcacagcgcgcagcaannnnnnnnnnngaaacgccgctgggaggacgcggcgaacagtctcctacactaacccccgccccatttttcaccctttcacccccaacaacgaccgttaccgcccccctcccgataggaaccataacgcggccgcaactgcccgagcctaagagtccgccaccgatcgatcacctcctagagacaccgcgcgctttatccgcttgaccgcattacacacgtatcccgaaatgcaaccctatcaatccgccccccaacatttaacgacacaccaatttgtgcgccgagcacacagaaccccgttactcccctcgcgcgccgtgactatgcgccccccccagcagagacagtgttcatggccctcctatgattaacgcctgagcggagcacccactctactataacgccacccagcacaacacaaaaataccgcgtacagaaactctgaacacactcgtatgtgaacaccgcacgcgccactcgtcttgctgctatacatctagactcatacgtgtatgatgcccgagcccgctgatccgcgccgcacgcgcgctattcattgtatactacattcctcgcccctgatcatatcactgcacaagaccctcgccgtaaatcaccgctacgtaccagcccgcgctcccggtaatattctatccgagcaccgccccgcccagtctctatcgagcgccattatatttcatgcccctcaccccacagttattgatcaccaaccacgccgctctctcgatgtcccccacgcgcttttctactcctaccgttagcgcaccccccatctcccc

SEQ ID NO: 98554 - DNA, 486 bp, Homo Sapiens
ggccctgataccacgcatggggcgtgctccgtggagcaatagtaggaacactcgccgtagaagcagatgttgttggctggagagatgaagaaggtcctccagagcttcttgtcccgtgtgacgtcccggatctccttggtcatgttgaccatcctgccggccacgggagggacccggcggaagtccaggatcctgtccaggtggaaggcagcaatctccgcattgtgcctctcgtagtcagagaaataaaaaaagtcagggggtgtctcctgctccctcgtttgtttcatgggtttgaacagcgcttgcccgtaattctggaaggtcatgatgagcttcagctgcgtgccccccgacttcatggccacgctggtgatcctctgggagctgaggtcgtgcagcagggcctcgatggccgggttgtgtctggagtacagctcgtaccggttgataccaatgtggaacttgccatgcgtggattgccag

SEQ ID NO: 98555 - DNA, 857 bp, Homo Sapiens
ggcctgggtggcgaattcggcacgaggggaaggtggctgctagtgttctaagttactactgatgtgaacagattctgacctttggctgcctagttgtttttgataaattaactcttagaataatgatgaatgtcttggccgttcctcaaaaacctttggctgtttgcagcagatgatggatgtctagaaaacacccctgacactgcagagttcagtcgagagttccagttgcaccagcatctctttgatccggaacatgactatccaggcttgggcaagtggaacaagaaactcctttacgagaagatgaagggaggagagagacgaaagcggagggtaacacgtgcctggctggattgttgcggggatgcttggagctttctgagtggggcagtgaacaggctgaaaccctcgcttgttgggaagtcacagaatcctcccttgtgtagtcctgagaaacactggtccatgtgacaagggccacacccagaaagtctgtccttggtttctgcgatggcttccccaggctttagcagatgatttttagtggaacgcgcagtctgtagcgattctagcaactccattccgttcaggaaatgtgtattgcttcccccatcagtgtgggacatatctggggggacatgagggtctgtctgccctcccaaggtctgtaagccagtgggggaaaaactgatcacacatctgcatcaattctataaaaacaccgggacagaaaacagggaaagtggctgaaactgccatgcttccagggaaaattaacttttgaaaggaaattccggcgaagcaaaaaaggatggaggaatggaaccaaaaccttacaatttttccctcccctt

SEQ ID NO: 98556 - DNA, 858 bp, Homo Sapiens
gttcgcccgttcctggcctgacccccaccaaggcccataccgcagtaggctcctcgggctgcccctcggttgacaatggtctccaggatggtctataccatgctattctggcctactgttttggctggcatctggatggactccagcatttgcttacagcccccggacccctgaccgggtctcagaagcagatatccagaggctgcttcatggtgttatggagcaattgggcattgccaggccccgagtggaatatccagctcaccaggccatgaatcttgtgggcccccagagcattgaaggtggagctcatgaaggacttcagcatttgggtccttttggcaacatccccaacatcgtggcagagttgactggagacaacattcctaaggactttagtgaggatcaggggtacccagaccctccaaatccctgtcctgttggaaaaacagcagatgatggatgtctagaaaacacccctgacactgcagagttcagtcgagagttccagttgcaccagcatctctttgatccggaacatgactatccaggcttgggcaagtggaacaagaaactcctttacgagaagatgaagggaggagagagacgaaagcggaggagtgtcaatccatatctacaaggacagagactggataaatgttgttgcaaagaagtctgtcccccatttttcagatgaggataaggatccagagtaaagagaagatgctagacgaaaaacccacattacctgttaggcctcaggcatggcttatgtgcacgtgtaaactggagttcctgtgaatgacagctgttctttccataggattattatgggctacaaagcagctgatgtagatg

SEQ ID NO: 98557 - DNA, 953 bp, Homo Sapiens
gcgtttccttgaaagcgggggcccctgtggagccagccagagggccgtggtggggggctggcgtccggggggcgggtgagtgctggggaaagccacgggtgcgaccctcgggctttctggccatactgcacaggctgaaacaacctgctggccttcagctttgctgctgctggtcgggctgctgggggctgctgaagtggagatttcctccatgagtttccgcggtatctttttcttagacagcaactctggcctcgtgacgagtgattttattttctaagccgatgagatcaaacatagaaagatctgcttccttccagaaatctctctcccagtgccttcaggattagagatgcggacggatactccagtggccccgccacgtaggaagagcctgggtgccggggctcgacgagcccagggtggttgcagatgcgctgcagccgcacaaggatgctcaggacgttgacaaagtgcccgctcttcaaggcctcctgagtgccaggttgcaggataacgtcctcgtataaggctttttgtcggttagaaaggcgacacttcaaaacatgctcatatttctttgttagttgcttttccacatctctcttagttctcctcaaaataaatggctgtgtcaccctgtgtaaccttatgaccactttatggtagtaatcctggctctcttcactgggggccctcagaggggagctcaggtagggcctggagatccctgggaccaggaagtgcaccatggtccagagctccaggaaggtattgtgcagcggcgagtcgatcagaagcagacgttgttggctctgcagggtgaaaaccgcttcccagtgcctctcggtcatgcccttcacgcgctgcatctcatcaatgaccaggcacttccagcgcactcgtgtgaaggcggtgcctcgtgccgaattcgccacccaggcctcgctacc

SEQ ID NO: 98558 - DNA, 1581 bp, Homo Sapiens
gagcgaggcctgggtggcgaattcggcacgagggctacttcagtcagcaacagagggaccagcgacctgcagcttgttcgagatgctctccgcagcctgcgcaacagcttcagtggccacgatcctcagcaccacactattgacagcttggagcagggcatttctagcctcatggagcgcctgcatgttatggagacgcagaagaaacaagaaagaaaggttcgggtcaagtcacccagaactcaagtaggtagtgaataccgggagtcctggccccctaactcaaagttgcctcactcacagagctctccaactgtcagcagcacctgtactaaagtgctctatttcactgaccggtcacttacgcccttcatggtcaatataccaaagaggttggaggaggtgacgttaaaggattttaaagcagctattgatcgggaaggaaatcaccggtatcacttcaaagcactggatcctgagtttggcactgtcaaagaggagattttccatgatgatgatgccatccctggatgggaagggaaaattgtagcttgggtggaagaagaccatggagagaattaatgccaagtatcagattgagggcttatggaacctggtcactccctggctgcttcactcaggaaagggaactaaaaccagaatacactaagaagtttctagtttgtgtgccaaaacagaagcttctccaagcatgatggccacaggtcagtcctcttttctgtgcctggcatatctggtacttaaaattctgtccaaatgtagaccatggggtcatctgggagttccttgtccgtgggaacacagtgttctattctactctgaggacaacaaaacgaaagccttaaacgatgggggatggatgatcccgcctctgtaggggcatggctgctattatctggaaattaggaattggatgcatcattcctgggtggttacagtataattttaattggcctcaatggttgcagcaatcagagtcccagcgtttgtactcacagacaaggcaaaggtaccagcttttctgtttctttgaacctactgcaaaccaagaataactcatgaggtggtaccaaagatgaaagcccagacttcagtaatcttttgaaccagacgtggatggtgctgaattgtcgcttggatggcaaaaagggctgcccatgttgtgctacactatgctaaaactgtaatttagtaagaccttgggctgcctcttctgtcttaactggttctgcagcttgtccttttgcccacatagggcctatttcatgtactgttagttatctctggggactctttaactttagagccatttctttttcttcaaactgatgaacttttgtttgaaaggcataagggagtgaaaaagcttccttgaaaatccagggcggggtatggaaaggtggctgctacccaatatctgttagagcttccttggtgcatggactttaaactcatggacattctcctatgtagtcaaaaggagaaacagaccagtaattttagacatatcttgggtgattaataaggtcatgggcctgacagttactggtatggccctta

SEQ ID NO: 98559 - DNA, 987 bp, Homo Sapiens
  misc_feature (63)..(63): n is a, c, g, or t
ggcctggggtggcgaattcggcacgaggggcaagtccttgagcagtttgttcctctgtcttcncgcttcctggtgccccgactgcgtccccacgaacgccccgtccttaccgccggctgctgtggagtgcctcgctgtctcccaggtccccgagttcctggtttcagagaagatgaccgaagaagtggatttcctgggacaggactctgatgggggtagtgaggaagtggtcctaactcctgcagagctcattgaaagattggagcaggcctggatgaatgaaaagtttgcccctgagctgctggagagcaagcctgagattgtagaatgtgtcatggaacagctggagcacatggaagaaaatctcaggagagccaaaagggaggacctgaaggtcagcatccaccaaatggagatggagaggatccgctacgtcctcagcagctacttgcggtgtcgcctcatgaagatagagaagtttttcccctcatgtccttgagaaggaaaaaacacgtcctgagggggagccttccagcctctcgccggaagagttggcctttgccagagagttcatggcgaacacagagtcctatctgaaaaatgtcgcccttgaagcacatgccccctaacttacagaaggtggaccctctttcgggcagttcccaaaccagatctagatttcttacgtgtttctgagagtgagagaacgacaagaaaacatactggtagaaccagacacagatgagcagagggactacgtgattgacctggaaaagggctcacagcacttgatcccatacaaaaccaatgcacctctgggtgcatctggagctggccagctaatttaaaattagggttaaaccgcccggcattggggacttcagccctggtattcccgggacctttggaaggccaaagcggggcgaatctttaaggtcgggggttcaaaaccaacccgaccaactgggtggggcccccttctttatt

SEQ ID NO: 98560 - DNA, 559 bp, Homo Sapiens
  misc_feature (72)..(189): n is a, c, g, or t
cacttctggaggctaatgcagggggatgtcgtgaggccaggatttcgaagaccactgtaggcaacatggtannnnnnnnnnnnnnnnnnnnnnnnnnnnnnnnnnnnnnnnnnnnnnnnnnnnnnnnnnnnnnnnnnnnnnnnnnnnnnnnnnnnnnnnnnnnnnnnnnnnnnnnnnnnnnnnnnnnnnatgcagtgagccattatcatgccactgtgtgaccagaaaccagatgtagccatttcaagcataaaacatgatatttttgttttccttggactgaaacatagtctgggtcctcaacgttgccggtgatgatggttgaacatcatgttttttataaaccttaatttctcatttaataggaagaaaatctcaggagagccaaaagggaggacctgaaggtcagcatccaccaaatggagatggagaggatccgctacgtcctcagcagctacttgcggtgtcgcctcatgaaggtttgacgtggagatacctcaaagtctccgacctccggggagccgagagcgggacgtgggagccgggcttgggcggccgc

SEQ ID NO: 98561 - DNA, 1378 bp, Homo Sapiens
  misc_feature (104)..(149): n is a, c, g, or t
  misc_feature (250)..(332): n is a, c, g, or t
  misc_feature (373)..(428): n is a, c, g, or t
  misc_feature (481)..(489): n is a, c, g, or t
cgtcgcccgcgatcataaaaaaaatatattgggggcggcgccggcggtggggtaattatcctcccccaaaaaagggcgccccccctcttggtggctctcttggnnnnnnnnnnnnnnnnnnnnnnnnnnnnnnnnnnnnnnnnnnnnnngccgtgttgggggggcgcccccaaaaaagatcccccacatatggggaggggcgcccccaagaggggttgttttcttccccccccaccggggagaaatggcnnnnnnnnnnnnnnnnnnnnnnnnnnnnnnnnnnnnnnnnnnnnnnnnnnnnnnnnnnnnnnnnnnnnnnnnnnnnnnnnnnntgaaaaacccccgcgggtggccccttttttccccgcaaagnnnnnnnnnnnnnnnnnnnnnnnnnnnnnnnnnnnnnnnnnnnnnnnnnnnnnnnnagggtttggaaggaaattttggggccaaaaaggggtaagaagtccccgcttgnnnnnnnnncccacgggctggcaagaccggggaattgtttgccccccggccaatttccgaagttttgcccgggcaagcctttggatgtcccccgttggtcataagccccttgccttatcccgcaaggatcactcttcaggggcctggaacttcttccaggtccctccctggtgagggtgatggtgtggtacatcatggcgcccacggcttcgtttagaaacattcttcgtggatttcctgcgtcgactgcgcgtcacagaaggccacagtggccaggtccttcaggatgggcatctccacagtgcagtcgcggccgtccagcagcgccaccagggggcgggggtgcagggggccgttcatgatctgggggcggataccttcacaaattctgtccaatcgctgtctcttgactttgtgcttatccacaagggccattctttatggaactttgcaactctcagatcaaaaggcaaagcagtcctctaagaacttaggggaacttgcaggagtctgcgtgcatgacgccactatgaacccaatataaatctgtccacaaactctatagttcacacgatgggctgtccgtctttttaagggaatacaccttcattggttcaaaaccatttaaggtgatgaaaccctcgtcccgaacgatcggagtccacggcgaaacggcgcccaccctggagcacggcggacggcggcgtctcccgcccctcccaccccacaccggcggcggtggcggtgacggcggctgtgcggccacccacctcagcgcaggcatggctcccgagtcggtcacctcgctcctcggaccgccgccggctcctccgggccgctcccgagccaccttaaaatgacacacgcctcgtgccgaattcgccacccaggcccgctc

SEQ ID NO: 98562 - DNA, 973 bp, Homo Sapiens
  misc_feature (820)..(820): n is a, c, g, or t
  misc_feature (892)..(892): n is a, c, g, or t
aaggtagcgaggcctgggtggcgaattcggcacgaggacaggacaggagggagtgagggaaaggggccatgattggctgctttgtggttttattttggttctttccattctccgccattcattggaggcttcgttccagacctgcctgggaaaacagcttctgagccattttggggagcagttcttcatctgaatggatggacatctgggcttccttcaagggccattgaatgggaactagaaaaccactggaaactagaaatttgagctattgggcccaccagtagcagcatgtgatactagatggttaaaatcatgaaagcagtcactatccaattagaagcagagtcacaacaactgttgggaaatgtgactcttggaggaaggtggggagggagtggccttgccagccctgtgggacgtcccctgaagtttgtaataagaccccttttccaaagggatgtgaattggagtgaaaaggaaatctttcatcttagaaaacttctggtccttaacgcagggtggtatttgggtatgtgcttggaaattgagatctcaagagtgtttgccttggagccagctccccaggaggccttttccagggacaaggcaaaagttgaaattctccatgggtagctagaaagccaatacatctagccctgctaagtcagaaaaagattatgaaaaatgttgaaatttacattcaaagcctcatttgcttatcttgctggagccaacccagtctaatagcaaaatagctgtcattgatacagaaacatcctcaatttttaaatgtctgctttaccctggttactggagntttgagatgacttaaatcactggtgtttgaccctcttctgaaccaaatctttagcattgatggaaaatagtntattttaattctttacatccttcaccccacactatggtcagggcatgaaaccaccctggtgatcccttcccagctcggcac

SEQ ID NO: 98563 - DNA, 1089 bp, Homo Sapiens
  misc_feature (778)..(786): n is a, c, g, or t
  misc_feature (922)..(922): n is a, c, g, or t
  misc_feature (927)..(927): n is a, c, g, or t
  misc_feature (1019)..(1019): n is a, c, g, or t
  misc_feature (1052)..(1052): n is a, c, g, or t
aaagtagcgaggcctgggtggcgaatccaacacgaggggacagcccgagtcgcttgcaccgcggccgggaggacagcctgcccaagggccacgtcatctacgaaggcaagaagggccacgtcttgtcctatgagggtggcatgtctgtgacccagtgctccaaggaggacggcagaagcagctcaggacccccccatgagacggccgcccccaagcgcacctatgacatgatggagggccgcgtgggcagagccatctcctcagccagcatcgaaggtctcatgggccgtgccatcccgccggagcgacacagcccccaccacctcaaagagcagcaccacatccgcgggtccatcacacaaaggatccctcggtcctacgtggaggcacaggacgactacctgcgtcgggaggccaagctcctaaagcgggagggcacgccctccgcccccaccgccctcacgggacctgaccgaggcctacaagacccacgccctgggccccctgaagctgaacccggcccatgacggcctggtggccaccgcgaaggacgcgggccgctccatccatgacatcccgcccgaggaactgcggcacacgcccgaactgccccctggccccgccgccgctctacgcaagggctcccatcacgcacggcaccccccctcaaattaccacacccggccgcgcccaacacccggtctcccaaaaacgcaccgacgtaccgctcccctccctcaggcacgccccgcgcccggaacgttctccaccccgtcgnnnnnnnnntgggaacgctgaccgggcccaactcccccgcggggaactcgcgaaacgtcgtccctgccttcccgtctgcacaacagcccttgaaaaaaccccggtccagagggaccccgcccaactctatttccgcgccgggggnccatncattgtgcctcgtcggcgacggaccaccgagtaaactctgttgaccctaacaaccctaggggagcatcgcatgcgcgcagataaagtacccnctcttagcctctccatggacagaacacaactcngcgggcccatcacctctacatgacggagggcagccac

SEQ ID NO: 98564 - DNA, 919 bp, Homo Sapiens
  misc_feature (656)..(656): n is a, c, g, or t
  misc_feature (815)..(815): n is a, c, g, or t
  misc_feature (832)..(832): n is a, c, g, or t
  misc_feature (856)..(856): n is a, c, g, or t
  misc_feature (866)..(866): n is a, c, g, or t
  misc_feature (883)..(883): n is a, c, g, or t
gagcgaggcctgggtggcgaattcggcacgaggggcctgcatgggccgcccttgtccgagggcttgcagccttacccagctttcccttttccttacttggatacttttatgaccgttttcctgcctgaccccgctgtctgtcctctgttgtcgccatcgtttttgccatgtccattcctgggggcgacagcctcttctgcgatatcaccctcaatgtcgtcagcaatgagtccaactctggacccacccccttcagtcaccagccaaaggagagaggaggaaaagtgggaggcacaaagcgaggggcacccgttcattacttcgagaagcagctcacccttgcagttaaacttacttcaggaagagatgcccagaccctctgaatctccagatcagatgagaaggaacacgtgcccacaaactgagtatcagtgtgttacaggcaacaatggcagtgagagcagtcctgctactaccggtgcactgtccacggggtcacctcccagggagaatccatcccatcctactgccagcgctctgtccacaggatcgcctcccatgaagaatccatcccatcctactgccagcacactgtccacgggatcgcctcccagcaggactccatcccatcctactgccactgttctgtccacggngtcacctcccagcgaatccccatccagaactggttcagcagcatcaggaagcagcgacagcagtatataccttactagtagtgtttattctttctaaatctcccaaaatgggcagcaatctcaggacgtacagaaaaaagaaacatttcctaatgtcgncgaagagcccatctggnagaatgatacggcagaacccctgnagcgcatttnctcatgacataccaggntaccttgagaagggtttaaaagaaagtttgtactaa

SEQ ID NO: 98565 - DNA, 1043 bp, Homo Sapiens
  misc_feature (674)..(674): n is a, c, g, or t
  misc_feature (803)..(803): n is a, c, g, or t
  misc_feature (910)..(910): n is a, c, g, or t
ggtagcgaggcctgaggtggcgaattcggcacgagggccgcctccgcccgtggccggagagccccaggcccgagccacgcggtcttccgggcccgggtcggggctcaatggctacgtggaggcgggacggccgactgacaggcggccaaaggctgctgtgcgctgggctggcggggacgctcagcctcagcctcaccgcgcccctggagctcgccaccgtgctggcccaggttggcgtcgtgcgaggccacgcccggggacctgtgggccacagggcaccgggtgtggcgggcagaggggctccgggccctgtggaaggggaacgcggtggcgtgcctgcgcctcttcccctgcagcgccgtgcagctcgccgcctaccgcaaatttgttgtgctgttcacagatgacctgggccacatttcccagtggagctccatcatggctgggagtctcgcaggcatggtttccaccattgtaacatatcctacagacctcatcaaaacccggttgatcatgcagaacatactggaaccatcgtacagggggctcctccatgctttttctactatttaccaacaggaagggttccttgccctttatcgaggggtttccctcactgttgtaggtgctctcccgttctctgctggctcccttcttgtttacatgaacctggnagaaaatctggaacggaccccgagatcagttctctctccccacagaactttgctaatgtctgtctggctgctgcagtgacccagaccctctcccctccctttgagaacgtgaaagaaaagatgcagggntcagagccccctaccttcccacacagtgggagggagaaaatgtcccatttctccaggaccagtgggactgctttcccgggagaaaagtggaaaggccccaggggggntcctggggggcctcctgggaatgggaattggacagcccacaatttacctgggaaaaaaaggttcccaataattttgggaaaaattaatggtttaaaaccacccccttttgagaagttcccggcaaaagaaaat

SEQ ID NO: 98566 - DNA, 983 bp, Homo Sapiens
  misc_feature (15)..(15): n is a, c, g, or t
  misc_feature (38)..(38): n is a, c, g, or t
  misc_feature (48)..(50): n is a, c, g, or t
  misc_feature (839)..(839): n is a, c, g, or t
cgcgcaccccgaagngaagaagaaagcgcctcacggcngccgttcagnnnctaggtagcgaggcctgggtggcgaattcggcacgagggtcatctcgaagtgaaagggtatgctggtgggcatcgtggggaaggtcggctgtgggaagagctccctgctggctgccatcgctggagagctccacaggctgcgtgggcatgtggcaatgcgggggctgtccaagggctttggcctggccacccaggaaccctggatccagtttgccaccatccgagacaacatcctctttgggaagacatttgatgcacagctgtacaaggaggtgctagaagcctgcgccctcaatgatgacctcagtatcctgcctgctggagaccagacagaggtgggggagaagggtgtcacccttaacggaggacagcgtgcccggattgcccttgctcgtgctgtctaccaggaaaaggagctctatctcctcgatgaccctctggccgctgtggatgcagatgtggccaaccacctgctgcacaggtgcatcctgggcatgctgagctacaccacacggctgctctgcacccaccgcactgagtacctggagagggctgacgcggtgctgctgatggaggccgggcgcctcatccgggctggacctccctctgagattctgccactggtacaagctgtccccaaagcctggggctgagaatggacaagagtctgactcaaccacagcccagtcagtacagaacccagagaaaaaaaaggaggggctggaaggaggagcaaagcacatctggtcgcctgctgcaggaagaaagcaagaaagagggcgccgtggncttgcacgtgtaccaagcttactggaaagccgtgggccatggcttggccttagccatcctcttctctctgcttctcatgcaagccacgcggaaacgctgtctgactggtggcctctcccactgggatctcctcaccctgaaggc

SEQ ID NO: 98567 - DNA, 1084 bp, Homo Sapiens
  misc_feature (135)..(143): n is a, c, g, or t
  misc_feature (204)..(212): n is a, c, g, or t
  misc_feature (326)..(334): n is a, c, g, or t
cctgagggatatataatctggccccccaccggcgcaccccccgctgtgtgcccggcgcgcgctccccttggcgggcggtctccacgtccccccggggcggccccttctgctccctttccatgcgcccctccacannnnnnnnnagccgccttcgcacttctcgcgccgcaggctccccttctatagtccctgtctcgggcggtnnnnnnnnncacccccttgcgtgggagagagcccagtaagggggcttcaaccttccagggctaccctgggggaagcccggggggcggggatcttccccacggccgcctttgcggggcccccannnnnnnnnaccctttaggtggcttctttggggccccgggggtgccccctgcttctgagatgctccgggagttctgccacccagattccgctgaaggtcagcctgggtctcaggggacacgggccgctccagctgcagcttcctagagcccttggagaagatgaaactggccgttgaggcaggggactggggagcccgtggctctgcctcaggcggtccgttgggctgagcacttgagaggccttcactggcggccaggctgcagcccttgagtcggaccgcagcatggagccctgaggagggggcaggcactgggctggcccgccctgacagggcccttcgcagtggtttctggggggccgatggccccagtgctggggtgggagcccctcctggagcacccacggagcgcagccgcaccatctgcaggagcgagggcgtgaccaggggcgcacctacgtcctccctgggaggcccaccacccttgctacagcccaccggttccttctgagggagcttggccacatgccctggggcggaactagcaggagctggggctggcggagctggaggagggtctgggctacccgggggctgaatctgcaaagcagtagctgaggaggacgaagcagccggggagctgacaagctctggggagcctgaagggcctgcaggctcagggctggccacagagaaaaaagcctcctctggtggggggaagtcagcctcgtccgagaacgccacccaggcctcgcttcc

SEQ ID NO: 98568 - DNA, 923 bp, Homo Sapiens
aaggtagcgaggcctgggtggcgaattcggcacgaggatgaagcattttctaaactcaagctttatgcacaagtctgcagatatgacctaggtccttatcttgcttccctgccattggacagctctctactttcccagccaaatttagttgcccctacaagtcagtctttgattactccacctcagatgacaaatactggaaatgctaatactccatctgccaccttagcatctgcagcgagcagcactatgacagtgacttcaggtgttgccatatctacttcagttgccacagctaattcaactttgaccacagcttcaacttcatcttcatcatcctccaacttgaatagtggagtatcatcaaataaactaccttcgtttccaccctttggcagtatgaacagtaatgctgcaggatccatgtctacacaagcaaatacagttcagagtggtcagctaggagggcaacagacatcagctctacagacagctgggatttctggagaatcatcttcacttcccactcagccgcatcctgatgtgtctgaaagcacgatggatcgggataaagtgggaatccccacagatggtgattcacatgcagtcacgtatccacctgcaattgttgtttatataattgatccttttacatacgaaaatacagacgagagcactaactcttctagtgtgtggacattggggctacttcgatgctttctagaaatggtccagactcttcctcctcatatcaagagtactgtttctgtacagattattcccttgtcagtacctggtgcaacctggggaagcatgaagatagagaaatctatccccagcatttaaaatccctggactttttcggccttttaccccagggtccggagggccacttcccacatcaaaccaattgtggaaaacat

SEQ ID NO: 98569 - DNA, 624 bp, Homo Sapiens
cctgggtggcgaattcggcacgaggaagaactgcagcaatccacagtaatgttggttacttctgagtatttgataaaggaacaaagtcaaaatgaatgtatttaataagcttctttctcatttccattgtttttataaaaatattttggtattgttgcctgcattttagccacttctaactttttgtattatgaatttggagaggataacaagccaactttagaccctctgccagtggcgatggtgtttttcttccatgggtaagccattgtgaatggaggctggtggagcagcacactgtgtgaacctggcagcgctcatcttggcttgtttagcagtgcctctgtttacaccataagatgttccgcatgtgtccaaaatttcgcctgctctgaaaaacatgcccccgaggctctgtgcagtttggggccttggttcccacctgcagatgcggtcagttgcctggctcctggggccagagtttcctctgttacttgttgagtctcttgtcttcactgtcagaagctgaactgacttgggggctttgctgttgatccactttagcaaaccctgctgcagaggactgtaaaaacaaataactaaaaataaacttagaaaatacaa

SEQ ID NO: 98570 - DNA, 948 bp, Homo Sapiens
  misc_feature (43)..(87): n is a, c, g, or t
tccaaggtagcgaggcctgggtggcgtctcaagacgaggccannnnnnnnnnnnnnnnnnnnnnnnnnnnnnnnnnnnnnnnnnnnnggccagctcaggttgcagcttctctggggaactgctcacctttccggagcaggggaagctgccccgtgcccgggagggagcgggcgcaccgcggcccccaggacacgcgctgacccggctgcccagtccctcatgatcatgaacaagatgaagaactttaagcgccgtttctccctgtcagtgccccgcactgagaccattgaagaatccttggctgaattcacggagcaattcaaccagctccacaaccggcggaatgagaacttgcagctcggtcctcttggcagagaccccccgcaggagtgcagcaccttctccccaacagacagcggggaggagccggggcagctctcccctggcgtgcagttccagcggcggcagaaccagcgccgcttctccatggaggacgtcagcaagaggctctctctgcccatggatatccgcctgccccaggaattcctacagaagctacagatggagagcccagatctgcccaagccgctcagccgcatgtcccgccgggcctccctgtcagacattggctttgggaaactggaaacatacgtgaaactggacaaactgggagagggcacctatgccacagtcttcaaagggcgcagcaaactgacgggagaaccttgtggccctgaaagagatccggctggaggcacgaggagggagcgccctgcactgcccatccgaaaagttggtctctggctgaagaaccctggaaccccccccataattggtgacccctggcatggaccttcattccaccccagaatcgggtccccctcaccccctggggtggtttgcgacgaacccttgggaacaggtggtacccctgggaaagcccagcac

SEQ ID NO: 98571 - DNA, 1174 bp, Homo Sapiens
  misc_feature (1158)..(1158): n is a, c, g, or t
cgcgccgtgagggaaaagcgccgggaaagtggggtgtgtttttatctacggccaaaaggggggccgagggggcaccggggcccaaggggcggccagatgttttgagaagggggtttcccttttcaattaaaagcgcccatctgggccagggggcgcaaataaggtttgtgtggggcgggcacagggcccgccgaggaaggtttccgcttcgccctgtggcggaagaaatatttatgttgcacaagcttggccacagtgtgcgcccagcgcataaaatattaggccgttggggggtggggtttggcccccggttcccctttgtccacacacggaaatgtggttagggcgctgcccttttcccaagttgggggggttggaaaattaaggggggaaattaaccccgggttttcgggccattgggattatttgcatccaggaggccttgggcgggggcccagattctcctgtgggcaacaaattgacccaagccagggcgcccccatttgccctcgcgccggccaggtcaattacgttttccagagtcatccggcgtcacctgcagccccagcttccagtgggaggcccaacagcgtggtgtatgttggggcgcgtgaccggagtggctgtcttacaggcgtcctgcgccagcttaaagagcagggccgggagagtggatgttctgctggatggagcccagtaccgtgtgcagccacttggggtctcccttggcggccgtcaacatggtggaagccagttcacactggcgggtctccaggtggccaaggatgaaccagcgggggaagcggttgctcatgatggagtccagcgggctgggatgaggttctccagcaggaaatgctgtctccagtatgggcagcctcatagctcgcagcgcgaggcgataggccaggtccgggtcatgaggcagcagtgcggtgaacaggtagcgggcacaggtgtgcatgggcacgctctcccggaacagcacctccccaaagccactgaagggacccccttccagcagcagccccgcctgcttgcgcagcacctgcaccaaccgctcatccaactccacctcctccagcagggcccctcgtgccgaaatcgccacccaggcctcgctacctaggaggtgtagtggtgttttttatagggganaaggggaaggggggaa

SEQ ID NO: 98572 - DNA, 1094 bp, Homo Sapiens
  misc_feature (77)..(103): n is a, c, g, or t
ggaggccagaaaggtcttcccaccctggtgtgcacaggaacttttttgtttcttggagctcgggggaaatatataannnnnnnnnnnnnnnnnnnnnnnnnnnaaatttgaaagtaagggccccctgtcacgaagtgtgcgcgtttgtcacctgtcctttattttaccgcgagttgggaggttcccccacagaagaggcgatggggcccccaagagctaaagggggtttggacctggtggaccaaaaaaagggggacagcaaaggtattggccaagaggggggctatgaaagtgtcttgagccaggcactggacaggggctggccaacagaccccgggaacttatcttagttgggggccccaaccctaaggttgaggttttggagtagcaattacagctgagaaaagctgtgccccggactcccagcaggtgcccatttcttgggttcccagaaagccacaggggcttgggaattcagggactttgcggctctaggctatgtcactatccaattgtgtgaccttggagcaagtcacttcccatctctaggcctcagcatcccttaaagggtgagacccacggggctccactgttcttccagtcctgcagctccaagtcttcaggctttgctcctgacagccagaagaggcccctgtcctcatgtgtcagggatagtttggtcatggatactagaggttaaaactgggctgtgttgcctgaaggtatctagaggtggtggtggtgcatcctgaacaccatactcaccaaagggatcctgggagggaggcaacaacaccagcctacagaaaggcatcatttttgggcagaggaggtgagacattctttagaggcttgatgcctcctggaataaagggcatcccaggcatagagatcgcttagcaaaaggcaggcccaccctgctgattagggcagagggtgaggcagtctggcccttggacccttcggcctactctgccctttcagtgcgcgggaaaggggtcagctgtgttcattcagcctcgtgcctgaattcgccacccaggcctcgctacctagacctatgaggggcctggacgaaagaacgcaacccagga

SEQ ID NO: 98573 - DNA, 1130 bp, Homo Sapiens
  misc_feature (610)..(650): n is a, c, g, or t
gcggcaacgggccctataggtcctaagtagcgaggcctgtgtggctttacaaaaacgagggggcagattcactccctctgcagatgttctgggaaagagaacccagaggccacccaacacccagagaataggtcccagacactccttccctaggcagtggccccgttagaattcctgaagacctatcccattccaggtaagagaccccccgcaacagagacatctttataagagtcccccagatcaccccagaaacgggcagtgaaggacaccatccccgtctcagatagggaaggcccctcatccacctgacacaccctcttaccgcacacagactttcccacagacgtttccgggcagcacccccaatcctagagcttcctctccccacctcctcgtccagtgacagcacgggctcttgtccctcttcctagtcaccccggcccggagctcaccaggtagttctcatcctggaaggcgaagtgcagctgcgtgatccaccgccggtccccattcacccaacacgctccctctcctcacggaagcacgacaactgcagggcacccggagggagctgcagcccgggagacggggccgcggatcctcaaannnnnnnnnnnnnnnnnnnnnnnnnnnnnnnnnnnnnnnnntctttcaggcatgttcccaccttgtttcattgaatcttcctatgggcattaccaaccttgcgcccccgacgtggcctttcattcctctcacctaacccggcttatccttgaaggggtccgccacaatctattggctttcaccaccccctcgggaaaccaacgggccctccgaaaaaaccacagcacgggtgcttctgcccctcagaacctcaaaccttctacccccgcgtttttctggccaccccaagcccggtgcgcccctcgaccgcccacccttgtccccacaaaacgcgcccccttgtggttacccccaggaccccctcccttctagtttcacaaccccctccaggttcctaaagggctcccggccactttcgctcacactttcctaaaggtccccgaggttaatcacaacgcctacggtggcggcgaatacccccgcgtaattgtacacgggccccctgggtcataacgccgggt

SEQ ID NO: 98574 - DNA, 1091 bp, Homo Sapiens
cccaacctctaagtacgagcctgggtggcgaattccgcacgagggaaaggaggtcagattgtactccaggctcctgggctgagtgtgtctgggcctcaaggtcacttggaaagtcggatctggaaaagtaacattccctaaaatgaagatccccaaatttaccttctctggccgtgagctggttggcagagaaatgggggtggatgttcacttccctaaagcagaggccagcatccaagctggtgctggagacggcgagtgggaagagtctgaagtcaaactgaaaaagtccaagatcaaaatgcccaagtttaatttttccaaacctaaagggaaaggtggtgtcactggctcaccagaagcatcaatttctgggtccaaaggtgacctgaaaagttcaaaggccagcctgggctctctggaaggagaggcagaggccgaagcctcttcaccgaaaggcaaattctccttatttaaaagtaagaagccacggcacccgctcaaattcattcagcgatgaaagagagttctctggaccttccacccccaacggggaacgctgggagtttgaaggtggggaaatggctcctgggaaggggggaaaagtaaagggaaaccccgggaagctgaaatttcggtaaccttttgggggattggcgcccaaagaacaaaaggtcctttatgaagggggactggggaaccccatgaatgaaaaccgggccaagcttaacagggggaattggggggcgcctccctgggccctcttaagaaagtcccccgaattggcccctccctctttctaagccaatggacaaggggggaaactaaaaggtttgcggaattccaagacttccccaaaggggtgagaccttcgttccaattttcccccctcaaggaaaaggacgttcggcaggggcctctttgcacattgggtgggggcccttatcttttttcttttctataaaccaataacccctcctccccctgtggaggggggagggtgtgtccctcaagaataaaaactctccccaaaagtgcgaaaaaacccgcccgaaaagtggctccttcaaacaaaatccatgggcagacga

SEQ ID NO: 98575 - DNA, 970 bp, Homo Sapiens
acggacgcgaggcctgggtggcgaattccgcacgaggctggctaactaacttacattttgtggggaagccaacagacacagcaggaggagagggaggtggcactggtggaccaaggatctgtgctacccgctcccctccttggaggtgcagtgatgatgggagttatttttaccatccgggcgctgatagctgcactattaataaattgcatgtgttccttttgaaggtaggggatggttctgggtgagaggggagcaggctgagccggcgggggatctgctgtcctcccttttgagtcagttctaatcccatgtgtgtctgggccaccagaccgaaatggttgctgagaaacttgtctgttcatgtcccaaggcataacttcccaacatttaagaaaccccaatagacacctctgccctggccacgttcacagatccttctcttgaccggaaaccctgggaccctaagaacccctgaagcttggggtgggtgtgtgcttctggggtctcttttgggacctcctttgtcagtaccccttcttttttctaagcagctaataagaggttgggtgaaagagtgcatctcctcccaggattccacaacaaaattcttatcttccatggatgctttaattggaagtgggttgcccacccccttgtgcctaaaaaaggcctttgcttgcgtttcctttgtatgcttcacccttcctagttggtttttctaggcctggctggggagaaggaaggcacccctgcaccccacctaattctttttcccttaagggcccaaggcggacaattgtcaccccctttcgccgtcttcgatggccttaacgattccctaccatcttacagcacgtggcccgtcttctaatatcccctccccctccatccccgcgcacgtcgtatatttccctccccatacccaccctccttctcccgcccccgttgctcccactgtcccccccgt

SEQ ID NO: 98576 - DNA, 1144 bp, Homo Sapiens
aaggagcgaggcctgggtggcgaattccgcacgaggctcggtgctgctgcctcgaacactcttccagaggacgaaaggccggagcggggaggctgagaagagactcctcctggtggacttcagcagccaagccctgttccaggacaagaattccagccaagtcctgggtgagaaggtcttggggattgtggtacagaacaccaaagtagccaacctcacggagcccgtggtgctcactttccagcaccagctacagccgaagaatgtgactctgcaatgtgtgttctgggttgaagaccccacattgagcagcccggggcattggagcagtgctgggtgtgagaccgtcaggagagaaacccaaacatcctgcttctgcaaccacttgacctactttgcagtgctgatggtctcctcggtggaggtggacgccgtgcacaagcactacctgagcctcctctcctacgtgggctgtgtcgtctctgccctggcctgccttgtcaccattgccgcctacctctgctccaggaggaaacctcgggactacaccatcaaggtgcacatgaacctgctgctggccgtcttcctgctggacacgagcttcctgctcagcgagccggtggccctgacaggctctgaggctggctgccgagccagtgccatcttcctgcacttctccctgctcacctgcctttcctggatgggcctcgaggggtacaacctctaccgactcgtggtggaggtctttggcacctatgtccctggctacctactcaagctgagcgccatgggctggggcttccccatctttctggtgacgctggtggccctggtggatgtggacaactatggccccatcatcttggctgtgcataggactccagagggcgtcatctacccttccatgtgctggatccgggactccctggtcagctacatcaccaacctgggcctcttcagcctggtgtttctgttcaacatggccatgctagccaccatggtggtgcagatcctgcggctgcgcccccacacccaaaagtggtcacatgtgctgacactgctgggcctcagcctggtccttggcctgccctgggccttgatcttcttctcctttgcttctggcaccttcagctgtgctcagcac

SEQ ID NO: 98577 - DNA, 1076 bp, Homo Sapiens
  misc_feature (976)..(976): n is a, c, g, or t
atatacggtcctaggtagcgaggcctgggtggcgatttcggcacgagggacgcacaagtgggcctggttccggaggtactgcatggcctcccgtgttgctgtggcccttgacaaaagaacaccgttgccccgtctgtttcttgatgaggtggctaagaaaattcgtgaattaatggcagacagcgaaaacatggatgttctgcatgagagccatgacatttttaaaagagagcaagacgaacaacttgtgcagtggatgaacaggcgaccagatgactggactctctctgctggtggcagtggaacaatttatggatggggacataatcacaggggccagctcgggggcattgaaggcgcaaaagtcaaagttcccactccctgtgaagcccttgcaactctcagacccgtgcagttaatcggaggggaacagaccctctttgctgtgacggctgatgggaagctgtatgccactgggtatggtgcaggtggcagactaggcattggagggacagagtcggtgtccaccccaacattgcttgaatccattcagcatgtgtttattaagaaagtagctgtgaactctggaggaaagcactgccttgccctgtcttcagaaggagagagtttactccttgggggtgaggcagaagatggggaagttggggcctgggcaaacagaaagtcccgtgtggacccgccctcccgtgtcattcgaagtcctctgaaaaggaaattgaaaggtgggtcccaatggttgcttgcctgggccgggagccccacaagccggccttggtgtcaacagccaagcccggggggaccctcctaccacactggggggcccaaaagggcccgcctaaccgggcccgggcttggggggccacaccccgcaccagtgagaggaaccacacctgtgaagctccccaaccctgtggtgggaaagggccctcttccaagggccccccccggggtggtngtttgaacctttcgaccctgttggggaaaaagggaaaaaatggcccccaaaaacccctccctgccccttcaacaaggaatgggaccaaaacctcttggtt

SEQ ID NO: 98578 - DNA, 1282 bp, Homo Sapiens
  misc_feature (1188)..(1196): n is a, c, g, or t
gggggccttggattcagccccgagagaggggagagaccattcctcctgtggagtgggttccttatcaccagaccggccactctcagaactggcgtccactgtaaatccaggtgccttacgtgtggctctgtcccttatgctgcaggggaaagctgcattgccattgttcccacctcctcactggcagaaagatgccagggctgttagcactgtctcctcaccttctgtttctcattgtggctcctcaaatgggatttgcatgttcctgtcaagcgtaacaacaatcccttctctctttgacagaggcccaggtgggacagtttctactatttgatatttgagtattatctgggatgtggttctggagctgcccagagctgtgcttagtagagtgtgtcttggaaacatgcccctgggcacactgtatctgctacattagtgggctatctcttatctgcagtgttcgcttttgctagaaagaggatgtggaggaaggaggaggtgggcaatctggcttgagttgtgctgtatcctcttccttgttagcttgccttagtctcactggagaccatttgcggatagtgcttggtccatgcccagcaggacagggctttgctgcttctgaaagtctggtgttctgtatctggggctgtgggttcctgtgtctagctgctcaggaaatcttgagaagcattccactctggggtgtaaaccagtatgagtttgaaattcaagcgtttgtacctgagttggggagagaattgcaaggcatactttctctgaaagtaacagaaccattcaggctgccatgttattaaggaatctgaactgttgatagcagttaccttgtgggtgatacaatgggaggcggcaaaaaaactacctgcataggagaccctgccctttgtcaagagctgggagcacatttcatcagagtaacaggcccacctggtgccagagggcctgccccctcctgcttctgtttcctttgcccttgcacgtttcctggagagcaccctctctttttcctgtacacccctttgtggctaaaatgccccttcttacctttctccaaacgaagattctgagctcaatttttcatttttatggctttctaccaaggtataaagggaccttaacccagccgacacggatacttcttcgggcctaaaagcctaggcttaccgnnnnnnnnntaaggccactttaattcccacccctgcgttttttacagaaagaaacacactcttttttcacccccctcctgattttcccctggatt

SEQ ID NO: 98579 - DNA, 976 bp, Homo Sapiens
  misc_feature (899)..(899): n is a, c, g, or t
gtagcgaggcctgggtggcgaattcggcacgaggggtcactgagtacatgagccagaacgctaatttccagaacccccgctgtgagaacaccccactcattgggcgcgagtccccgccgccctcatacacctccagcatgagagccaaatacctcgccacgagccagcctcgccctgactccagcggcagccactagaccgcgcccggcagccacccaccccacgtgccaacttcccctccccgtgccagcactgccgcttccacctgggccacccaccggaccctcgcacgccgtgccaggcctgccccagacgcgtctgcaggccgcttgccctcctgtcccctccccgcaggggcacagtggagacgcaggggctctgggcccgtaccgccaactcgggtcacacctgaacgctgctgccagccgatgccccagccctgcacgccacccactatcccggcacgctccctctgcagatggtcgccgcacctacaagccctggccgcacccaacctgtgttgttgccgcccggcccttccctccacagctctccttcctcccgcccggcacttctgtggaccccttcttagttcacaggcacggctggggccgctctgtgctggcgcctgctggccactgagggacagagacacgtgccacctgctcatctctgccctgaggtcaccccgtggtccctccacgtgcccatctctctgcagtgccctcctcgcctgtgcagcccgcccacccacaggctcacccctcctgccggctgccagaggcccccctccagcagggcctctctccgttgccccagcttcactctctccctcagcacctgccctgctggaggccccagccctccgtggacagcaggggcccacgtggagcccgggncgctcacccggcacccagggctggccgcccttcttggtgccaaaccccccttcccccacccagagactggggcagct

SEQ ID NO: 98580 - DNA, 904 bp, Homo Sapiens
  misc_feature (819)..(819): n is a, c, g, or t
  misc_feature (821)..(821): n is a, c, g, or t
ggcctgggtggcgaattcggcacgagggaaaaaatggccaaggctactgggaaactaaagccaacttctaaagatcaggtattggccatgctagagaaagccaaagttaacatgccagccaagcctgctccacccactaaagcaacttctaaaccaatgggagggtccgctccagccaaattccagcctgcatcagcacctgctgaagattgtatttccagcagtacagaacccaaacctgatccaaaaaaggccaaagctccaggattatcctctaaagcaaagagtgcacaagggaagaagatgccaagcaaaaccagcttaaaggaggatgaagacaaatccgggcctatttttattgttgttccaaatggaaaagagcaaaggatgaaagatgaaaaaggattgaaggtgctaaagtggaattttactaccccacgggatgaatacattgagcaactaaagactcaaatgtctagctgtgtggctaaatggttacaagatgagatgtttcactcagactttcagcatcataacaaagcccttgctgttatggttgatcacttggagagtgaaaaagaaggagttattgggtgcctggatcttatcttaaagtggcttaccctgaggtttttttgacaccaatacaagcgtcctgatgaaagcactagaatatttaaaattgctcttcaccttgctaagtgaagaagaatatcatcttactgagaatgaagcatcttccttcatccccctatctgtcgtcaaggttggagaaccaaaggatgtcattcgtaaagatgttcgtgccatcctgaaccngnatgtgccttgtctacccagctagcaagatgtttcccctttatcatgggaaggaaccccaatcaaaaactctaagcaaagagca

SEQ ID NO: 98581 - DNA, 966 bp, Homo Sapiens
  misc_feature (832)..(832): n is a, c, g, or t
ggagcgaggcctgggtggcgaattcggcacgaggatctcgtgctggaccagctgcgctgcaacggtgttctcgagggcatccgtatctgccgccagggcttccccaacagggtggtcttccaggagtttcggcagagatatgagatcctgactccaaactccattcccaagggtttcatggacgggaagcaggcgtgcgtgctcatgataaaagccctggagctcgacagcaatctgtaccgcattggccagagcaaagtcttcttccgtgccggtgtgctggcccacctggaggaggagcgagacctgaagatcaccgacgtcatcatagggttccaggcctgctgcaggggctacctggccaggaaagcatttgccaagcggcagcagcagcttaccgccatgaaggtcctccagcggaactgcgctgcctacctgaagctgcggaactggcagtggtggcggctcttcaccaaggtcaagccgctgctgcaggtgagccggcaggaggaggagatgatggccaaggaggaggagctggtgaaggtcagagagaagcagctggctgcggagaacaggctcacggagatggagacgctgcagtctcagctcatggcagagaaattgcagctgcaggagcagctccaggcagaaaaccgacctgtgtgccgaggctgaagagctccgggcccgcctgaccgccaagaagcaggaattagaagagatctgccatgacctagaagccagggtagaggaaggagaggagcgctgccaccacctgcaggcggagaagaagaagatgcagcagaacatccaggagcttgaggagcanctggaaagaggaggaaaccgccccgccagaaactgcaacctggaaaaaggtgacaaccgaggcgaaactgaaaaaagctgggaggaggaccagatcctcctggaaggaccagaacctgtaagcctggcccaagg

SEQ ID NO: 98582 - DNA, 1081 bp, Homo Sapiens
gcccaaaaggtgtcccatctctggggtatcaatgtgaccgatttcaccagaggaatcctcaccccgcgcatcaaggtgggacgggattacgtccagaaggcgcagactaaagagcaggctgactttgccatcgaggccttggccaaggcgacctatgagcggatgttccgctggctggtgctgcgcatcaacaaggctctggacaagaccaagaggcagggcgcctccttcatcgggatcctggacattgccggcttcgagatctttgatctgaactcgtttgagcagctgtgcatcaattacaccaatgagaagctgcagcagctcttcaaccacaccatgttcatcctggagcaggaggagtaccagcgcgagggcatcgagtggaacttcatcgactttggcctcgacctgcagccctgcatcgacctcattgagaagccagcaggccccccgggcattctggccctgctggacgaggagtgctggttccccaaagccaccgacaagagcttcgtggagaaggtgatgcaggagcagggcacccaccccaagttccagaagcccaagcagctgaaggacaaagctgatttctgcattatccactatgccggcaaggtggattacaaagctgacgagtggctgatgaagaacatggatcccctgaatgacaacatcgccacactgctccaccagtcctctgacaagtttgtctcggagctgtggaaggatgtggaccgcatcatcggcctggaccaggtggccggcatgtcggagaccgcactgcccggggccttcaagacgcggaagggcatgttccgcactgtggggcagctttacaaggagcagctggccaagctgatggctacgctgaggaacacgaaccccaactttgtccgctgcatcatccccaaccacgagaagaaggtccggcaagctggacccgcatctcgtgctggaccagctgcgctgcaacggtgttctcgagggcatccgtatctgccgccagggcttccccaacacgggtggtcttccaggagtttcggcagagatatgagatcctgactccaactccattccc

SEQ ID NO: 98583 - DNA, 968 bp, Homo Sapiens
gggaagggggcccaatagtgatctccccaatgcgatgtgggtgtgaaagagaacccaggccggaggggccctgggttggcttggtgcctgcttgcccagggccggggttattttaggcggttctggcccaccctttctgttttggcatacccttcatgcaggagtcgcccgtggtgcgggctggaacgaggcctttcgactttcgttaaggcagcgccgggggggtcatctcccccaaacttcagtttcatggggcagctgctgcagttcgagaccccaggtgctgtgtcactgaggtggtgcccctctgcctacctgccccactgtgctgacaggagctgactgtggactgctgggctcccctctgggccagcacagtcccctcacctctggcagggctgctacctcctcagagtttcagaagcccccacatggcggctctaggaatgccggcatgctggtctttccgacctggtgctcttctgctgggggactgaggctggccctcattcggggtcgggaaccaagggtgtgtctgctctttccctccccatcctctggcagaaatcagctagacgctataccgtggactctccctggtccaccaccatgttgaagcccttggcagcctgagagctccaaggaacaagctgtgacaaccaggagccctgtctgtgggttcgtctgcccagggcctggagcccaagccctgtgttcctggggaagctggggacttgggaagtgatgggtgtgtcatgttgcgtgtgtctgtctgtgagcctttcacacctgtgctggcgctggaaaattatttgtgctcagctgacatttaacactccctcccccgcttcctcctagccctgtgggcaggggttggaaacttagcactttatatttatacagaacattcaggatatgtcaataaaatattgttatatttaaacctcgtgcggaattcgccacccagg

SEQ ID NO: 98584 - DNA, 939 bp, Homo Sapiens
  misc_feature (159)..(159): n is a, c, g, or t
tttctggtaaggcaacatctcttgatcatccatccctatgctttgaaatccggctaataaagtcaaagaacccttcatctccaatagtatctgcactgattttcctctgagaatttgaatttcgtgggtcaatagaattactggcatcttggagaactntagtggaggaattcgttttgtattttttccccttcagtctgttgacaaagagtagctttgcagaaggtttggcaataagaggtttttgcttagcaagaatttcactgttccagttctgtaccttttctggtgttaacttcataagttccatattttccatactatgccggcgtcccaacttggggcgtacaccattcaaactgctatcaatttcagtattttcagacattatggagttatttgtgctgtagctcagaccaagaaccatttgaaggtctgagagattaagtcgtgctgttagttcaccacttttatccccaacctctcttgaaatttccaagtgcttttcagcaaaatgcattgcttgatcatgatttcctagtgctgtgtatgcatttccctaagctccaacatgctcttccttcaccaattctatcattcagctcttgagcaattgctaagtgcttcagatgataatcaatggccttttcatagtcttgaagtaaagtatatgtatttccaagactgtaacaagactgtgcttctacagctcggtctttaagctgtcgggccaacagtagtgtcttcttgtagtattccgaggcagtttcaaattcaccaagaaatatatatgcatttccaaggttgctatatgctcttctttcagctgctttatctccaaattcttttgcaataaggagacgctgctcatgagctataactgcatccctgaagttgccaagcctcgtgccgaaaacgccacccaggcctcgctacctt

SEQ ID NO: 98585 - DNA, 1561 bp, Homo Sapiens
  misc_feature (148)..(148): n is a, c, g, or t
  misc_feature (1194)..(1269): n is a, c, g, or t
tgggcctgctggcacagccaggagccttgctggcctctggcatcaaggacccatgctgaatgaggctgagtgctggtctctgagactggctgctgagcaggcacagctctggctgctccaccaaggccttgctgcccctggggccctnggcaccgtccttctctgggtctgaagactcctgtgtaggtggtgctggctgctgctcctggtggtgcctgggcctctatggccatgtgctgggcccactcagatgccactgcttagatcagtgatgacgcgagctttcaccagcttccgcagaaactctttctctcgctggatattgtgcgtccaggactctttgatggctgccatgcgaacggtctcatagtagtgcaggggtgcgttgggtgtgctcatgtcatagccaaatcctgcgactgccaagggtagggatgttcccccggcccatgaggccattgttgaagggcaggccaatgagggtgaaggcggcctcctggatgaaatatgggttgaggattcgaatctcagggggctccttgggcactcgagtggccacagatttccagaagccatccgatgcactcactctctccttgtagacgatgtatttcaaccacttaaagtcctgccacttgaagccggcgaggacaaagagagaatcgcgctcgtactgctcaggccgctgcatggcgcccctcgggggtaggtgatgccgcagtgtcgtttggctgcccacgtccttctcaaaacctttccactggtgctgaatttcagtctcaccacaatgtcatagtcgtcaattcgtgaccccagagacttgttggcaagaacgcctccatttgcccacgatgatgcagcggcggcagcggaggctgtccaaggcaggggtcaggcggtactctttggtgactgacaagatggctttgatcagattgtcttgacctttgatcccaaaaggcggcacgaactcccggattctagcccacttgcgaaaggagtcatccaggaacatgggtgctggcttggagaaccgggggaagatggccgtcatcaaggctgaagcatagccaggcttgcaagctccctctgaaaagtttgcgtacttggtggctaattcagcaggcctgggcagctttaaaaatcctaatgcaaaggctgcgtcctcgctcagtgacttcaaaatctctagannnnnnnnnnnnnnnnnnnnnnnnnnnnnnnnnnnnnnnnnnnnnnnnnnnnnnnnnnnnnnnnnnnnnnnnnnnntgcagagagtcctcggtgagagtttagagtccagattcaggaggaagcccaaccgatcatactctgagcctagtgtttgtccagcggagtcaaaggaaagaaccactgaattggagtcctcctcccactggagtaagtgtagcttccacgcagaataatacaaaaatcccagtaccagaaagaggcagagggctagcagcagattgcgcacaaataccaagagtcccatcttcacatgatttacgatttcctaaatgaccacagcggagagggaggcaggggggaggtggcg

SEQ ID NO: 98586 - DNA, 858 bp, Homo Sapiens
gctgaattagccaccaagtacgcaaacttttcagagggagcttgcaagcctggctatgcttcagccttgatgacggccatcttcccccggttctccaagccagcacccatgttcctggatgactcctttcgcaagtgggctagaatccgggagttcgtgccgccttttgggatcaaaggtcaagacaatctgatcaaagccatcttgtcagtcaccaaagagtaccgcctgacccctgccttggacagcctccgctgccgccgctgcatcatcgtgggcaatggaggcgttcttgccaacaagtctctggggtcacgaattgacgactatgacattgtggtgaggcccaggctctgagtgggcctgctctctgtagactgaattcagcaccagtgaaaggctttgagaaggacgtgggcagcaaaacgacactgcgcatcacctaccccgagggcgccatgcagcggcctgagcagtacgagcgcgattctctctttgtcctcgccggcttcaagtggcaggactttaagtggttgaaatacatcgtctacaaggagagagtgagtgcatcggatggcttctggaaatctgtggccactcgagtgcccaaggagccccctgagattcgaatcctcaacccatatttcatccaggaggccgccttcaccctcattggcctgcccttcaacaatggcctcatgggccgggggaacatccctacccttggcagtgtggcagtgaccatggcactacacggctgtaacgaggtggcagtcgcaggatttggctatgacatgagcacaaccaacggacccctgcactactatgagaccgttcgcatggcagccatcaaagagt

SEQ ID NO: 98587 - DNA, 772 bp, Homo Sapiens
ggcctgggtggcgaattcggcacgaggcgccgccaggccccgggccacagccgggcctggcggggggaccatgggcgcctcggtctccaggggccgggccgcccgggtccccgcgccggagccggaacccgaagaggcgctggacctgagccaactacccccagagctgcttctggtggtgctgagccacgtccccccgcgcacgctgctcgggcgctgccgccaagtgtgccggggctggcgagccctggtggacggccaggccctgtggctgctgatcctggcccgcgaccacggcgccaccggccgcgcgctgctgcacctcgcccgcagctgccagtctcccgcccgtaacgccaggccttgccccctgggccgcttctgcgcgcgcagacccatcggacgcaactttattcgcaacccctgcggccaagaaggcctccgaaagtggatggtgcaacacggtggggacggctgggtggtggaggaaaacaggacaaccgtgcctggggccccttctcagacgtgcttcgtgacttcattcagctggtgttgcaagaagcacgtcttggacctagaggaggagggtctgtggccagaactgatggatagaggcaagattgagatttgtgtctctgactggaggggagcccgacacgacaacggctgtatgtacagactcctcgtacaacttttagacgccaaccagactgttctagataaattctctgctgtgcctgatcccatcccgcagtggaacaacaatgcctgc

SEQ ID NO: 98588 - DNA, 1140 bp, Homo Sapiens
  misc_feature (86)..(86): n is a, c, g, or t
  misc_feature (169)..(169): n is a, c, g, or t
  misc_feature (362)..(362): n is a, c, g, or t
  misc_feature (367)..(367): n is a, c, g, or t
  misc_feature (468)..(468): n is a, c, g, or t
gtttcatctggagaaaataatcttcccccagtattttgagagaatccattttctgcccaggatcttgaataaaaaatcccccaagncttcccagtcagatggtgcagcaatagatgcttttggagccccgctgaatactgcagttcttgcaggacacatttttactgtnccaatggtcagcgcctccacaagtagacaggaggtcagggtcacactctcggacagccaggtagcacgggcactgcttggtgttgcactgtgctttgcagcggcatcccggaaagcggttttgacactctgaactacattgacaaaacttttcaccaaaaatttttgtgctatcacacaaagggcacgaactngtcancaaggctgccgtggatgatcacagggttgatagttgtaaacatggttagaggagccgtccttttccagctgtatctttctgcagtgtgcagcccacaaccnggtgtttcctcttctttttccttggaggagtatccacatcctcagcgggagctggagctatgatgctagattctttgactctaaactcatacacctgtctacatgttttggtcccaattaacctagcaatggcacagaaattgtcatagtaagtgccaatgaggactctaaacattgaggcttcagcaccactccactccacattctcaggaggttcaatatttggcttcatctttattggtgtttgacaccgagaatttgcttcagaggagctcgaagtttcatctttcttctcttcttcttctttatcattgttctctccccccgtttcagtccctgcttccctatcactgtctgtatcctttgattccagcacattaatggtgggggtgctgggcctgctactgttattgggaagccgtcctcttctgcggcctcctggacgttttggtggggtctttatccgctcagcggtgagagcagcagcaaactcctttgctccctccaaatgctggtaacactgtggtccacaaggtttgttgtctagagctgtttctgtgttcttccgcttataagtgttgggtgttgcatgaaaaggatgtaggaagcagtcatatttaaaacatcgcctacagaaaagcgtatgaaaggagtgtaagctttgctctctct

SEQ ID NO: 98589 - DNA, 1341 bp, Homo Sapiens
  misc_feature (964)..(964): n is a, c, g, or t
  misc_feature (1180)..(1180): n is a, c, g, or t
  misc_feature (1215)..(1215): n is a, c, g, or t
aaagaagcgaggcctgggtggcgaattcggcacgaggacgaggtgtacccagcggagccagccacaggccctgcggcccccagccaggagctggaggagcgaccgctgtcccgtcaggtgttcatcgtgcaggagctggaggtccgagaccggctcgcctcctcccagatcaacaagttcctgtacctacacacgagtgagcggatgccgcgacgtgcccactctaacatgctcaccatcaaagcgctgcatgtggcccccactaccaacctgggtgggcctgagtgctgtctccgcgtctcgctgatgcccctgcggctcaatgtggaccaggatgccctcttcttcctcaaggacttcttcactagtctggtggccggcatcaaccccgtggtcccaggggagacctccgctgaggctcgccccgagactcgagcccagcccagcagccccctggaagggcaggccgaaggcgtagagaccactggttcgcaggaggccccaggaggtggacacagcccctcccctcctgaccagcagcccatctacttcagagagttccgcttcacgtctgaggtccccatctggctggattaccatggcaagcacgtcacgatggaccaggggggcacttttgctggcctcctcatcggcctggcccaactcaactgctccgagctgaacctaaagcggctctgttgcaggcacggcctcctgggtgtggacaaggggctgggctatgcccccaaccagtggctgccaggacatccgcaagaaccagctggcccggcctgctgggaaggcgtgggccccatgcactcggttgtccagctcttccaagggttccgggacctgctgtggctgcccattgagcagtacaggaaggatggccgcctcatgcgggggctgcagcgaggggctgcctcctttggctcatccacagcctctgccgccctggaatcancaaccggttggtacaggctatccaggccacagctgagaccgtgtatgacatcctgtccccggcagcccccgtctcccgctccctgcaggataagcggctctgcgcggagggctgcgcaggggccagcagcctgccgacctgcgggggagggtgtggccaaggcctacgacacagtgcgagagggcatcttggatacagctcagaccatctgtgacntggcatcgcggggccatgagcagaaagggctgacnggcgcccctgggggggccgtgatccgccacctgcccccgaactgtggtgaagcccgctcatccctggccaacgaaggccacgttccaccctgcttccgggggaatgccgccaaccagatttgtccc

SEQ ID NO: 98590 - DNA, 1811 bp, Homo Sapiens
ggcctgggtggcgaattcggcacgaggggtagtcccacacggcggccctcggctcccgggccccgccccggcctcctgcatttgcccgaggccccctccccagcactggccacaccccagggtagccccgcccccagagctcctcccccagcggccggggtagggtggcggctggcccagccgggcccccgctgccctctgccctgggcgcttggtcggagcgggctgggcaaagcgggacagggcgatgcgcggcggcccgggggaacaaaagcgaagatggcgtccggcaggcgcgccccgcgcaccgggctgctggagctgcgcgccggggcgggctcgggggccggcggcgagcgatggcagcgggtgctgctgagtctggcggaggacgtgctgaccgtgagccccgccgacggcgaccctggtcccgagcccggcgctccgcgggagcaggagcccgcgcagctcaacggcgccgcggagccgggctgccgggcccccgcagctgccagaggcgctactgctccagcggcgccgcgtgacggtgcgcaagggccgacgccggtgggctgggcatcaccatcaaaggcggcccgggagaacaagatgcctattctcatttccaagatcttcaagggattggcagctgaccagacagaggccctttttgtgggggatgccatcctgtctgtgaatggggaagacttgtcctctgctacccatgatgaggcggtgcaaggtcctcaagaagacaggcaaggaggtggtgctggaggtcaagtatatgaaggacgtctcaccgtatttcaagaactctactggttgggacctcggtcggcctgggactcacctcctgcctcaccccttcagcggtagccttcctcccctggccccacaccccggaacttcagcgaggccacacacatgtcccttgaagatggcctatgtctcgaagaggcgcacccccaatgacccggagaccaggtatcctggagatctgctcggcagatggccaagacaccctcttcctgagggccaaggatgaggctagatgcgaggtccgtgggacgactggccatccaagcctcaggctcaataactcccgacgcccgccggagtccacggaatgagacttgccacggaactgtatgggtaagccaaccaagttacaggcttgggtagcccagggaatcattcacagccaagaatttgggcctgggcattaaacctggaagacagccttgcccccacaggcggggcgcgacatcataacgccatccgcactccgtgtggtggttccccccgcccttcaaagcatgtgtacaattacatgacagcgacgcgggaccattcaccttcccataaagcctttgcggaaataatgccgattgcaccctctcacacaggaacaccatgcggcgtacgataggggccgccctctggggacagtcccccggggggcctcccaaaacgcccaccgcgtctacactttgacgcacccctcaacccgttctgttatccggtcctccaccataccaagcaaatggagacgatgtgaacacagcatacaagggagtcccacccaccttccgccggagagtggcagggctagacacgacagtgactctcatcttacaccgccaatcgccccactacaaacacattacatgctcatgtcatctagggccacaccttgatacgccatccgacgatgtggtataacatctcctctcattctccgacgaccaccgtctggagctaacacaccgatctacatgctactcgcggagtgacagtcaacgcaccta

SEQ ID NO: 98591 - DNA, 982 bp, Homo Sapiens
ggtctaggagcgagcctgggtggcgctccactgtcttgactgatcatcatggcttcagtttggaagagactgcagcgtgtgggaaaacatgcatccaagttccagtttgtggcctcctaccaggagctcatggttgagtgtacgaagaaatggcaaccagataaactggtggtagtttggaccagaagaagccgaaggaagtcttctaaggcacatagctggcaacctggaataaaaaatccctatcgtggtgttgttgtgtggcctgttcctgaaaacattgaaatcactgtaacactttttaaggatcctcatgcggaagaatttgaagacaaagagtggacatttgtcatagaaaatgaatccccttctggtcgaaggaaagctcttgctactagcagcatcaatatgaaacagtatgcaagccctatgccaactcagactgatgtcaagttaaaattcaagccattatctaaaaaagttgtatctgccgctcttcagttttcattatcttgcatttttctgagggaaggaaaagcccacagatgaagacatgcaaagtttggctagtttgatgagtatgaagcaggctgacattggcaatttagatgacttccaagaagataatgaagatgatgatgagaacagagtgaacccaagaagaaaaggcagctaaaattacagagcttatcaacaaacttaacttttttggatgaagcagaaaaggacttggccaccgtgaaattcaaatcccatttgatgatccctgatgctgcagaattaaaatcccattgggagatcctggattccaaagaaccctatcactgaaaacggctttccccctagaaaaaaccgaagaactccttttttattaataaacaggctataaatccccttttaaagaagggtggcagaacttccacccggattttgaaaccccatttcccaatgaggccagaaaggccttttggggacaccctaa

SEQ ID NO: 98592 - DNA, 1046 bp, Homo Sapiens
cgggctacaggcaatgcagatccactggtccgggaggcaggtatataatcgggcgtatcaggtgtggtcaatcgagcggcgaataacggaggggggggcttgtagcggtgattgctttcttcgggcgctggggatggaatgtgtagtggagtgtgttttcgtggggatatgagtcggcgggaaatccgtgagggccaggtggacgggggccagtagtgggataagggcacgatctggcatgacaggggcagccggccccaggggtcttgccccttagttgacagggaaatcaacctccgcttcccgtgtgcgttcgtgaagttccggtcatccaggcccctgctctgtgggcagcgttcggccggcctcggccacgcccagcgcttgcaaggccgcccggctcactaccagcacgtcgccgggcagcagctccaggtcctccggccgctcccggcggaacgggtacagagcgcggtactggaagccctcagggcccgccatgcccgcgtgagtggggtggggtctggatggttagggggctgcttgaagccccactggccccattggttgaagcagggctgggagggtccgctgggttggcttggggtgctgggacctctatctccagcagtcacaggcgaccacaggggccgctcatgcctcgcttcaaattattccatgacccttacaagggccactcgtcactgggtccaccattcgtcagctggtgggagggagttggtggtgtggtgtcaggtcactgggccattgagtcctccatcagcaggtgaggctggggcaggccgctcacgccctcacacggagggccatgggcgcccaaggctggcggctctgctggctgcaccagacaagggagccaagggtgcaggctgccaccatgctcggccagctgaggacgccgacctgggcgcccctcggtactattcgaagccccattccaggcagggcctcccttcatttggggcctcggctccagtccggtatcttggacgcggggagtctctccccattctgccccgaccgtc

SEQ ID NO: 98593 - DNA, 895 bp, Homo Sapiens
aagttgggacctttgtaaattaagagggaaacggggggatttccaaattccatcttttttccaggccaacttggttgatgaaactcattatcccggaccatgatgttgccttagttgatccagattccgccccaggtgggaccctgcatcccataacgctggaagaggtaaatagaagtcataggcctggagcacctggtaaaagaactcggccaagctcatgccctcggggctcttgagccgcagctgcacgctctgccggctcagcagcgtccccatgcggaagtgaccccccactgccgccaggaagtccaccaggtgctgcttctggtaccaggccgagttgtccagcacagtgaagctgccccaggagcgcccatcagtgaaaagctgctggtgattagccgccagggcctcaagccctaggcgcagagctcgcgcgttggctcgcacgcgctctgtctccagcgcctcgcgttccttggtacggccgctcgggtctcccaggcgcgccgtggcgcctcccaccagcgcgatcacgttgtggcccgctcgctgcaaatgaaacaggcccagcagcgcaagtagatgacccacatgaagcgagtctgccgtggggtcgaagccacagtaaatggtttggggaaaactcgccgtgccacggtcgaagagctctgggagctctattttcgtccccgtctccgggaagaagtccttgaacagacctcgagccttctgcgctgccagtaacccctgagcgcccgagtgggccttacgcagccccaagggcaacaatactgagagatttagggtaccagaccaccggccccaggaaaaggaccgcaagatgggcgccgccctcgtgcggaattcgccacccaggcctcgcgtcctt

SEQ ID NO: 98594 - DNA, 1367 bp, Homo Sapiens
  misc_feature (743)..(752): n is a, c, g, or t
cccacaagtgggacacgtgttcccaagatttggggccaaggaaacaaaaacccgggaccacgtggttttttccccagggggcccctgctcttccccccctgggcccggaaccattaaatccccagaggcaagaaccggtggggccaaggggaaaaagattttttgccaaaggcaagcccaagcccaggaagaaaccacttccacccatccaaaaaaatctgggctgaagttctagatgcatatggcctacctttgggtatgaaccttctaataccttgtgatctgtctcagtggcgtctggcagaaaagctccacgaaaggggcaaagggacagaagagcaggcagtggcagtttccaggtaacagtgctgccacccaggtgaccatggccatcctaggagagaagtctctggatgagaggaggcccccagccagtcactccagggttctccttcccacccgctgctcgccacgggtggaagggcttggccctgggaggtttggggagtgtcccgtactgcttgggacccatggatcagtgctcggctccaaccacccaaagcccccacccgccctcactctaggctccccccgtaacgccacgttcttgctccccctccctctccaggtggtagaaaaaacccaagtcatcctccgagagtacggcttccgctttgtagaggcgaagccccatctttgttaaaggggaagggggcaccctgctgacacttccttctttgaannnnnnnnnnatcaacctaatcccacctttcccccaatgggcacccttctcggtcacaccgggcccccaccaacggtggggtgggaaccacttccctgaaattgggacccccgagcccttggtaaataattcctaaatcccggcaagaggggaaaaaactccatatctctgctggaaaaccggcaagagaaatgccccccgaaccatctctctgggaataccaaggttcgcaccccctgactgggaaccatttagggcgcctagaaaaacccccccctcaaatcacctaaattataggatacacgagaaaaagttattcagagtctattaaagggagtgtacccctggaaggaatctcccatcaggattgcgagtccttaaaccttgttctcccctcaccaacacgggagagccacaaccatgcgccgtaaagaacgctctgcaaagagtcccgcccttcgttccacacaatcccacccgctgccccaatttgcccccctctcttcgcgctgcctatgggtccatccctaagtgtgggggacatctggtaatcgcaccgcagtcatgcagcacaaccccggcgggtgagggttaaagaataaacatctcatagaaacccacacat

SEQ ID NO: 98595 - DNA, 1119 bp, Homo Sapiens
ctggggtccacagcaatatccaagggactgcatgacagggtcaattcctgctcaaaagacctctgcaagcttactgcaaaacttatagactcgggatgtctggcgattatagagccaggcattgtggaacatgagccagacgtcgtccacgtactgccaggggctcttggtattgccctgtgtccagcttccgcttgatggtggagaggtccatgggattctttacgatgtcaaaatagtctgaattcccgaggagctggggatctacaggctgccggaaaggtaatgactctgggtcctgtcgatacagtgcttctagggttggcatgagggcctggcgtaactcctctggtttaaagatttttttgcgcggctgcgaaggagatgttgactgagaggctgtgccgttactgctactctcttcttcctctttaacttctactttcacttcaggtttcttttcatccacttccattggttctgatttctgctctgctatgtctgtttcttctttaacttgggaagctccttgcaaatcctcctccatcatctcagacctgggctcccctttggattcaccaggatcgggctcagtgtcctctgcttgggtctccgtcttcatttccagcacaggtacgtcaggtcctggctgctgggaattggtttctgcgctggccaccgaggagggggtagggactctgttatcaatgctggctgctgcctgggaaagcgggtgtgccaggaggctgggcgtgcacaggcgtcggctgttgctgcgatgactgagggggtagccacaagacgggggctgaactggggtttgaggctgcggggtcacctggccctgggctgctgcctggactgtaggggtgctctgggtttgggtagcactggcacctgagccaggattcgggttgggagtctgcccggaagacgacacaggagttgatgcctgaatgggactgctgcctggggaggatcatcccaggtgtgtcgtgtcctggagagatgcatcccagcaccgtggaaccaggagcgttcttggtgcagtgtgactgtgtcactggaggcaagatagctggctgcttacgcccagcatgttgggaggctatcagcgta

SEQ ID NO: 98596 - DNA, 279 bp, Homo Sapiens
cggaatatttcttctccggaagagaggaggaatcataaatgcaactctgactagaggaaggttttaacaaacctgttttaggcttgtaagagtcttcccgtgaggttgcggtaacataaaggtgtttgatattcatatgttatctgtaatgtttttctcaagatgatggaggaggatttgcaaggagcttcccaagttaaagaagaaacaggcatagcagagcagaaatcagaaccaatggaagtggatgaaaagaaaccggaagaagaaatattccgg

SEQ ID NO: 98597 - DNA, 1027 bp, Homo Sapiens
  misc_feature (813)..(821): n is a, c, g, or t
actcccctaggggggagaggaaaagggaaaaagccagagctcttcccaaaacaaggggtattgggcctcccctccaaaaaaagacagggggcccaggggggacccaaaagaaggggccacggaggttgaagatcttgacaatttttgtttggggaggaacaacccccttccccttcaagcttgcttcaagggccccaggactagctccgggtaaggtgccaagagccaaggaacccagctctctaggagaaaagggacagagctgggcgcttggttggtcctcactaacagggaagtattatctgcggttctaattcaacctggcgaaatccaccccagaggggtcccaaattgcttgtgaggctgatgagttgaggacactgccctccctcttctacccagtctggctctacaacgacagggaaggaggaagtgaagagctcatctgggtcagatgttgccttggcactctacaatgattatttctccctgttctgttcctcctctgtgtccaaaattaagagagaaccgcagctgtacaaacagactgaaaaggagactggccacacctgagttccggagtcttcctcggaaggaaaccatctttgtcagattcttgccaaccttttgggcagagtcacctttccaaatcaggccttttcagtttgatgtttccaaaggacccagcttacactaactctccattttaaaaataccttttaattcctaaagtttgcataagatgattttttcaatatatttgactcatactggttgttacatagcacctctcatgtgagatcatagggaagnnnnnnnnnctacagcgccataggcatctctcaggcatctcccccgtaagcttctctctcatttgttgagaaaacacaatttaaggtgaaagacagagcgaagacttttcagtgttttccagccaacactgaccctgactggagggtgcaggtgtatctctctgaggcgttggcctcgtgccgaaatcgccacccaggcctcgctacctaggacc

SEQ ID NO: 98598 - DNA, 974 bp, Homo Sapiens
  misc_feature (282)..(345): n is a, c, g, or t
  misc_feature (956)..(956): n is a, c, g, or t
aaggagcgaggcctgggtggcgatttcgcacgaggagagcaggcacaaggttctctgccatgactgatgtgaagcgacctgacgcacaagcggagacttttctccttggcagccaacaacctgcagcaggcaaggcgggcgggggaggaaaccccgaggaggcgctcccggccgcctctttgctgagatagcaggagcagcagcctgaggagccacgagctcagcgtcactgagctagtgcgggtgcaggggcgctcaggcaggcgcacaggccgggagccnnnnnnnnnnnnnnnnnnnnnnnnnnnnnnnnnnnnnnnnnnnnnnnnnnnnnnnnnnnnnnnnggcccgcgagcgggaggagccggcagccgcgctccgcccggcgctgagattcgtgccacctgcctcgaacaccacggaggcgagaggaacccagagagctcggcctctcgtcccgttctcgaaaagcagcctatcgtgacggagccgggagaaggctagcgtttcaatcctgtgcaggactgggatttttcttctcataatttgggggagccggagtagaggtcacagggacaggcgaggatctcaaaaagagaaccgagggtcgcgaacatggttacccccctcctatcatgggaaaatctccttgacatttttcacacctttgaagccagctgcagctggtgtcgtcggaaaagggggtgggaaaaaacacagggggcggggagagcgcccgcagaccccgccaagagccctgagcgggtgcctccctcccctgcccaatccttggaacctgttgcccccgagccacctggcacccgagggagggaccccttactccgggggggaaaaacacgggggtctttggacggcctacggaaaaacacacagccctccaattggcaagacgtgggtttcccccgccccgggtgggaatgaaactctggcgcagncaggcgcacgaattattg

SEQ ID NO: 98599 - DNA, 958 bp, Homo Sapiens
  misc_feature (609)..(702): n is a, c, g, or t
  misc_feature (722)..(722): n is a, c, g, or t
gtagcgaggcctgggtggcgaattcggcacgagggcagagtcccggggtgcccatgcagacgccctgcttcacgctgcagtacgctgcccccgagctgctggcgcagcagggctacgacgagtcctgcgacctctggagcctgggcgtcattctgtacatgatgctgtcggggcaggtccccttccagggggcctctggccagggcgggcagagccaggcggccgagatcatgtgcaaaatccgcgaggggcgcttctcccttgacggggaggcctggcagggtgtatccgaggaagccaaggagctggtccgagggctcctgaccgtggaccccgccaagcggctgaagctcgagggactgcggggcagctcgtggctgcaggacggcagcgcgcgctcctcgcccccgctccggacgcccgacgtgctcgagtcctctgggcccgcagtgcgctcgggtctcaacgccaccttcatggcattcaaccggggcaagcgggagggcttcttcctgaagagcgtggagaacgcacccctggccaagcggcggaagcagaagctgcggagcgccaccgcctcccgccggggctcccctgcaccagccaacnnnnnnnnnnnnnnnnnnnnnnnnnnnnnnnnnnnnnnnnnnnnnnnnnnnnnnnnnnnnnnnnnnnnnnnnnnnnnnnnnnnnnnnnnnnnnntcataggggctgtgacctgngagcccggctcactcccggaggcctctgcctgcggctgacctgatccccaagggactgtcctttcctctcctaccccacccactcccagacagagcagaagtatttttataagcagaagattttttatgtcttaccagatacagttgcagggaagggggggctgctgggaaaagtggggttttggcccgccacaacacacctgatctactgctcccgcagccccgcccccttgaat

SEQ ID NO: 98600 - DNA, 913 bp, Homo Sapiens
aaggaagcgaggcctgggtggcgaattcggcacgagggttcgaactctccggggacttgagaaaaaggcaactgttatctggctgctctcaattgtttacgacttattcgtccagaatatgcgtggattgtgcagccagtgtctggtgcagtgtatgatcgccctggagcatcccctaagaggaatcatgatggagaatgcacagctgcccccacaaatcgacaaattgaaatcctggaactggaagatctggagaaagagtgttccttggctcgcatccgcctcactttggctcagcatgatccatcagcggttgcagttgctggaagttcatcagcagaggaaatggtcactctcttggttcaggcgggcctctttgacactgccatatcactctgtcagacttttaagcttcccttaacgccagtctttgaagggcttgccttcaaatgcatcaaattgcaatttggaggagaggcagcacaagcagaagcctgggcctggctagcagccaatcagctctcatctgtcatcactactaaggagtctagtgctacagatgaagcatggcgactattatccacttacctggagaggtacaaagtccagaataacttgtatcaccactgtgtaatcaacaagctcttgtctcatggagtgcctctgcctaattggcttataaacagttacaaggttgatgctgctgaattgcttcgtttatacttaaactatgaccttttagaagaagctgtggatttggtgtcagaatatgtggatgctgtattgggaaaaagaacatcaatacttccgaattggagtttccactgtccgcaacagcccccaatggtgtgggcttcccatactccctcctattgatcagcctccttccaagcttctgggaagagaacaatgc

SEQ ID NO: 98601 - DNA, 967 bp, Homo Sapiens
ggagcgaggcctgggtggcgaattcggcacgagggaggaaaagagagtcctgcttctgcctggcttccccatcggggaggggagttgaagtgacagcctcctgacagcttagaaatgtggaggacgcagcaagttctggacatggccagccatatgaatgatatcttctctttctttgaaccatctccacctgctcttatggacaccccgccttggggcaaggcaagggatgggcacaacttggaagattttggctttgtgatcctcagtgtccagtgtcacccagatgggccggaagctgcctttgaagccaacgaatgccatttgctctgaaaagcaatgatgagtctcctgagcaaaagccatgcacagcaggaaatggggcaaactgtaagggaggagacctcctaggaacctgcctaccttcgagctgcccctaggacaaccagcaagtccctgcccctctctgaagcccagtgttcccatccatcaaatgatggcattgatctacaagatctccttccccactctatcactctgtggctctagaaagagttctgagaggtgaagaaatctgaccaagagtgtggagtaaatggtgcaccccagattagaactctaaacccctgaaacccacacagcactctccatcttgcagttcacagcttgagcatccgaggggcatgggaatccacgtctatactcagcccatcttggcaggcaacatgcatttatcaccaccgggaaagtgccattcaacttaggtcaccttacatacatcagctttgggcaaccgggatcttaatttaaaagacagaggctccaaaatgatttcaggactgggcctggaaaggatacttctcctttccttatgccctcccttggctggtttgaaaggtttgcattgcttctgatttttctcattgccccatatgatggggtttctgatttttgatgttttccataa

SEQ ID NO: 98602 - DNA, 1028 bp, Homo Sapiens
ggtccaaggtagcgaggcctgggtggcgaattcggcacgaggctgactcagtgacctcggggtcgttaggcctccacgtcctcgctggagctgcggacctcagtcgtccatccacacctcccccctgccgcccccgcccatctcactctcccaaccctgggcaccagggcaggtcgacagcccgaggcactcctctactgcgtttccaggcccaggagacccactccagcgccgcggttccttgcgacccggcagccgttcagcagacctcccattctttcctgcatcatcgggcattgtggaggcaccctacggtgattcctctcagagcctgtttgtaggtgaccgtgacagagacaaaaccatggaagtgactgggtttggagtgaccaggtgttcctccctcccctttcccagacacgcctcttgctgtaggtctctggttaagtctctctctctcattcccttcctgggagacagtagctccctaggcctgcaatgagggaggctggcttggggaaggagacgggaattgggcgtctttgaagacctgtgggcagagggagggagggagggtgtttgtcctgggtggggctctgggccaggtcctctgggtagctgtgaagtggtgaaagaaggggtgggaacgctggacttctggactttgggcagggcagatcctctgactctctggctgcagaacagtttccttccgtgctctggcctgagtgccacagccagggccctctgctctgtacacagaccgggcaaggtcccccaggccaggaatgtcagggcctggtggtgggggcaaccgggaatgaaccctgccaggccacccggctcaagcccaagaaggaaatcccggggggaacaccacggctggttcagcccaggggcctagagaggcccctacccaagggaaacaccccaggcccggtgatggcaaaaaccccggtccccaagacccatttgagatgggtcttgcaccaaaaggagtaggctccacgcaaaacgaaaagggctca

SEQ ID NO: 98603 - DNA, 978 bp, Homo Sapiens
caaggtagcgaggcctgggtggcgatttcggcacgaggcagacttaagccagaagctagaagaattgcagagacactactcaacgctggaagagcagagagatcatgtgatagcttcaaaaacaggtgcagaaagtaagatcacagccctggaacaaaaggaacaagagctccaagcactcattcagcagctttccattgatttgcaaaaggtcactgctgaaactcaagagaaagaagacgttatcacacatttgcaagagaaggttgcatccttggagaagagactagaacagaacttatcaggagaagaacacgtgcaagaactcctgaaagagaaaacacttgctgagcagaatttggaggataccagacaacagctcttggcagccagaagcagccaggctaaggccattaacaccctggagactcgggtgagagaactggagcagaccttgctctggagcagcagttcttggagcgcacccaggcgctagaagcccagatagtggccctggagagaacgcgggcagctgaccagaccaccgcagagcaagggatgagacaactggagcaagaaaatgcagcccttaaagaatgcaggaatgaatatgaacgttctttacaaaatcaccaatttgaactaaagaagctgaaggaagaatggagccaaagagaaattgtgagcgtggccatggctcaagccctggaggaggtgcggaagcaaagggaagagttccagcaacaggcagctaacctggacagccataatagacgagaaggaacagaatctggcggaaaaaaacgaagtgcttctccagaaaagacaggagattctccagctggagcgaggtcacaactctgccctgctgcagatacaccacctgcaggccgagctggaggccctgaagaacctcaaggcgaaggaggctgcaagggtcccggagcaagaagaacctgcttgaagctgcggggccca

SEQ ID NO: 98604 - DNA, 999 bp, Homo Sapiens
aggagcgagcctgggtggcgaattcggcacgaggggtctctgagctggcggagtgtgtcagggacttcctgaggaaaacgagcacggtgctgaagaacagggccttggaggatatcacagcttccattgccatggccgtcatccagcagaagatggaccgccatatggaagtgtgctacatttttgcctctgagaagaagtgggccttctcggacgagtgggtagcctgcctggggagtaacagggccctcttccgagagccagacttggtgttgaggctgctggaaacagtgatagacgtcagcacagctgacagagccatccctgagtctcagatccggcaggtgatccacctgatcctggaatgttacgcagacctctccctgccaggtaaaaataaagtccttgcaggtatcctgcgttcctgggggcgaaagggcctctctgaaaagttgctggcttatgtggagggttttcaggaagacctcaatacaacttttaaccagctcactcagagtgcctccgaacagggcttggcaaaagctgtggcctccgtggcccgcctggtcatagtgcacccggaagtcacggtgaagaaaatgtgcagcctggctgtggtcaatctcggcacccacaagttcctgggccagattctcactgccttccctgcccttaggtttgtggaagagcagggtcccaattcatctgccactttcatggtgtcatgcctcaaagaaaccgtctggatgaagttctctacacccagggaagaaaagcaatttttagagctcctgaactgcctgatgagtcccgtgaaaccccaagggaattccagtggctgctccttcttgagccaaacgaggggctgaagggaatttgtcctgccctttcttgaaggttaaatgttgaaaaagtaaaaccctccgtctgaaggatcttcattccagactcaaaaaggcaaacccctggcccaagaaggaatactgggttcccgaactg

SEQ ID NO: 98605 - DNA, 1494 bp, Homo Sapiens
  misc_feature (1264)..(1264): n is a, c, g, or t
gctgagtggcgaattcggcacgaggcaagatcaagtacggtgacaccactacctcagagggcgtcctcttcgccacctactccgccctgattggggagagccaggccggcggccagcaccgcactcgcctccggcagatcctggactggtgtggggaggccttcgagggcgtcatcgtgttcgacgagtgtcacaaagccaagaatgccggctccaccaagatgggcaaggctgtgctagacctgcagaacaagctgcccctggcccgcgtggtctacgccagcgccacaggtgcctctgagcctcggaacatgatctacatgagccgcttgggtatctggggcgagggcacacccttccggaactttgaggagttcctgcacgccatcgagaagaggggcgttggcgccatggagatcgtggccatggacatgaaggtcagcggcatgtacatcgcacgccagctcagcttctccggcgtcaccttccgcatcgaggagatcccgctggccccagccttcgagtgcgtctacaaccgcgcggccctgctgtgggccgaggccctgaacgtgttccagcaggcggccgactggatcggcctggagtcgcgcaagtccctgtggggccagttctggtcggcacaccagcgcttcttcaagtatctgtgcatcgcagccaaggtgcgccggctggtggagctggcccgagaggagctggcgcgagacaagtgcgtggtcatcgggctgcagtcccacgggcgaagcgcgcacccgggaagtgctggggggaaaacgatgggcacctcaactgcttcgtctcggccgctgaaggcgtgttcctgtcgctaattcagaagcactttccgtccaccaagagaaagcgggacagaggagcgggcagcaagcggaaacggcgacctcggggacgcggggccaaagccccccggctggcgtgcgagacagcgggcgtcatccgcatcagtgacgacagcagcacggagtcggaccctggcctggacagcgacttcaactcctcccccgagtccctggtggatgacgacgttgtcatcgttgatgcagtcgggctccccagtgacgaccggggacccctgtgcctcctgcagagagacccgcatgggccccggggtcctgggagcgggtggagcggctgaagcaggatctgctggacaaagtgcggcggctggggccgggaactgccagtcaacaccctggacgagctcatcgaccagctgggcggcccccancgggtgggcggagatgaccggcaggaaaagccgcgtggtgtccaggccccgacgggaacggggggcccttcgagtcgcggggcagaaccaggggtctggtccattcgaccacgttgaaccctcagggaagaaagcaaccgctttctttgagccggcaaaaaaccttcgtgggcccttcattcctccgaagggcctccccagcttgggggtggtctcccctttccaagccc

SEQ ID NO: 98606 - DNA, 1088 bp, Homo Sapiens
  misc_feature (995)..(995): n is a, c, g, or t
gccagtcactggtacagtgaagcctcttccctgtgcattcctctcatgcgccaggcgcgtggccgctcccacctgcccccgtggaaatcagcagggtgacctgaaaccaatagagccatggcgactccctctgctgccttcgaggcccttatgaatggtgtgacaagctgggatgtacccgaagatgctgttccatgtgaactgcttcttattggagaggcttcatttcctgtgatggtgaatgacatgggccaggtcctcattgctgcctcctcctatggccgtggccgcctggtggtcgtgtcccatgaggactacttggtggaagcccagctcacgccctttctcctgaacgcagtggggtggctttgctcttcccctggggctcccattggtgtacacccatccctggcacctttggccaaaatcctcgagggctctggagtggatgcaaaggttgagccagaagtgaaagactccctgggggtttactgtattgatgcctacaatgaaaccatgacagaaaagctggtcaagttcatgaaatgtggtggcggcttgctcataggaggacaagcctgggattgggccaaccagggggaggatgaaagggttctgttcacgttccctgggaacctcgtgaccagtgtggctggcatttactttactgacaacaaaggggacacgagtttctttaaagtctccaagaagatgcccaagatcccagtgttggttagttgtgaagatgacctctccgacgacagagaagagcttctgcatgggatttcagagctggacatcagcaactcggattgtttcccatcccagctgctagtgcatggggctttagcctttcctctagggttagattcctaccatggctgtgttatagcggctgcccgctatggccggggcccgggtgggttgtgactggccataaggtattattcactggtggtaaactgggcccctttctgctcatgctgtccccttgnttggatgggggccccaaaggcaaaattgtggtgcaaacagacctgaaaaaccctgagggcctccttcgccatgggggggcataaaccccagca

SEQ ID NO: 98607 - DNA, 972 bp, Homo Sapiens
  misc_feature (67)..(67): n is a, c, g, or t
  misc_feature (621)..(641): n is a, c, g, or t
  misc_feature (922)..(922): n is a, c, g, or t
gtccgtgtccaaagctttccattgctggccattgcagctactttggtgatgagcccattaggacggnctgtgaaaagaggcttggctgatgtgcacagcccatgccaccttgttatttagactgccgggccccttttggtggagtatttacatgggtcaccaaatatctcccccggggctcattttgaggtgttcatttatatgcctctttcctgattttaaacgtctccttattaacatttatccaatagaattccttccacaatcctaactatcccaggaaactattggacactcccatgaatcagttttagattcttacagacaaattggccaatggcatgtaccacttgaaattccacccactgtgaggctttttccttgtttgctgtcctttggggccatctcacatataaggttgcagctgttcatttccagcagattccatcatatcttgggcagtcatcagtgaacagagctgtttcccctcctctaccaagtcctcttggggccttaggtgtgggatgagagaaggatagccacatagcaggagtcagcatattgggaggaggagttctcttttcctgcaacttaattgtgacctcaggattctccgtgttnnnnnnnnnnnnnnnnnnnnnatacacatgtgtatgtatccattgataatggaatgcttcctgatattgtggctaggtggatcagataactctagttgataatggaccactcaggtaacatggttctttggtgtcctgtggtcagggatagctcacctggtgaatgaattagagtggcctgcacagttacatacatatcacctccaaattccgaagaggtctaccaaagctgtgcctctttcttatggatgagtggcataaggtagaccaacttgtcctttacttgtgtcttgaactcccangaaactgctctgcctcgtcccgaaaacgccacccaggcctcgctaccttg

SEQ ID NO: 98608 - DNA, 929 bp, Homo Sapiens
agtagcgaggcctgggtggcgaattcggcacgagggttgcggtgtcgtgaggagccacctcgcttgctgggaagccgcttccaggagaggttctttctgctgcgtggccgctgcctgctgctgctcaaggagaagaaaagctctaaaccagaacgggagtggcctttggaaggtgccaaggtctacctgggaatccgcaagaagttaaagcccccaacaccgtggggcttcacattgatactagagaagatgcacctctacttgtcctgcactgacgaggatgaaatgtgggattggaccaccagcatccttaaagcccagcacgatgaccagcagccagtggtcttacgacgccattcctcctctgaccttgcccgtcagaagtttggcactatgcctttgctgcctatccgtggggatgacagtggagccaccctcctctctgccaatcagaccctgcggcgactacacaaccggaggaccctgtccatgttctttccaatgaagtcatcccaggggtctgtggaggagcaagaggagctggaggagcctgtgtacgaggagccagtgtatgaggaagtaggggccttccctgagttgatccaggacacttctacctccttctccaccacacgggagtggacagtgaagccagagaaccccctcaccagccagaagtcattggatcaaccctttctctccaagtcaagcacccttggccaggaggagaggccacctgagccccctccaggcccccccttcaaagagcagtcccccaggcacgggggtccctagaggaacagctgctccaggagctcagcagcctcatcctgaggaaagagagaaccctgcaggcctgggaaagtccttcccagccatcccggcccccaatcccccagccccactggcctttccacacagacacctgg

SEQ ID NO: 98609 - DNA, 1674 bp, Homo Sapiens
  misc_feature (88)..(97): n is a, c, g, or t
  misc_feature (124)..(124): n is a, c, g, or t
  misc_feature (301)..(309): n is a, c, g, or t
  misc_feature (468)..(528): n is a, c, g, or t
ctgccccccctttgtgcaaaaagaaaacgggtggtcagggaaaccactctaaggcccccggggccccgttcccttcacctcttttctnnnnnnnnnngagcaatagagcgcccggagaggagcnagttcgcgcggccgatttccaaaatgttgccggtgcgttttttaatttgaaattattgggaataattttccgttctcccccggaagtgggggaaggtccttcccgggaatccaggtgggcagactccctccggggggcccagggcggagacggggtctgtacatcccccccctcgannnnnnnnnccacccccctgcctggtttttccagaggaaaggggcccccggcgaggacagggctggccagcccaagccggaaagggggtcccggcgttcgggaaggggccgcggcccggtcgggggccgtcgcgcttgggggcccggctaagggaccccccaacccannnnnnnnnnnnnnnnnnnnnnnnnnnnnnnnnnnnnnnnnnnnnnnnnnnnnnnnnnnnntccacgggggaggaaggcccgggtggaggcgcggaggcgtggtgcgatcaccgcttgaagcggtaggtgatgggcagcagcagcttgctcttcttgagcgcctgcaccttcttgagcgtctcgtcgtccagggccagaaagcagcggcgggagtactcgagcaggcgctccttggaggggtcgaactcgcccacctcggccagcttctcgggggccacaatgagcagctcggcgatgggcgtggtcagcgccacggtgttcctgtccacgcggtggtgctcgaaggcccgcgacatgctcttgagcttctggaaggtgcccaggatcttcttgtaccggcagaggaccccgtcggcgtccttcactcgctgcctctcccgggccttgggcttcccaaagcgcctccgactagcacctcccttctgcttctgccgcctcctctcactggcactgccttcttcggacgctccgctgagggaggaggctgctgactcagggtccgaggcctcgcccccagccccaccacggctgtccccctccatccgcctgggcccaggcttcatccggcagtggtcctctgcctccatccgagcagaagagatgaatttgtccagctggcaccgcaggaagtccctctcttgcctccaggtcctcgatgcgcttctgcagccaggagttcctctccagagccatgtgcagctgggtcttgacgctgttcatcagagccagggcggaggacgcagcctccggaggctcctcgaagtttctccgagaggggctcagactgtaaaagatctgtgggtctaggtggggtgcctcatcgaagggaatggagatctcgaaggtctcatcgtccttcattgtccgcctccgactgctccggtcattcatggcgcggcttcctgcggaccccagcagccgagggcctcaggggcaccgctcgcggaatccggctcggggaccgacggcggcggcgcccatgcccggcgccggggagcgtctgcaaagtgtcacggggagccgagggaagcgcccacccacccgcgaacaggcggggcggcaggggagcgtgtcgtggaactgagcagacggaacgggcaggacgcggggactcgcccagtcgggccaggctagcgcccctcgttg

SEQ ID NO: 98610 - DNA, 1153 bp, Homo Sapiens
  misc_feature (31)..(31): n is a, c, g, or t
  misc_feature (148)..(148): n is a, c, g, or t
  misc_feature (168)..(168): n is a, c, g, or t
  misc_feature (426)..(476): n is a, c, g, or t
  misc_feature (523)..(523): n is a, c, g, or t
  misc_feature (549)..(579): n is a, c, g, or t
  misc_feature (689)..(773): n is a, c, g, or t
cggaatcacgcacgcgatactcgcatatgcncgcgcccgccgtcacggtgagttttggctggcgtgcgtcttgcagctgcggcgcggcgtttatctgtaccgcttgcctatcggggcgggataattggcggacggggtgattggttanttggaactcgcgcccctcgnccgccgcccccggcaacaccaggggcggcggccactacatacatagtgatgtcagcggtctgcaggccgctccgctcttaccatctgcgcatcttcctccgcgcgcgtcctctgcgccgccggcgcggaatcactccccgctgccccccggctgctcgcccgcctccggtccaacccgctgccgttcggttccgcgcggggtggcggtatggcgagcggcgccctcccgccgccgccacccggcgctccacgtgacannnnnnnnnnnnnnnnnnnnnnnnnnnnnnnnnnnnnnnnnnnnnnnnnnngggacacggccgcgacgacgcatgcttcgggctggctgtccccgctnagccgtgtggcggcgcgacccggtgnnnnnnnnnnnnnnnnnnnnnnnnnnnnnnnctagtcatccccaccgggcgaggcgcgccagacgggcaaccctcggcgaggagggcaggccgtcgcgcatcccgccccgcgcacctcccgagccccgcggtcaccgtttnnnnnnnnnnnnnnnnnnnnnnnnnnnnnnnnnnnnnnnnnnnnnnnnnnnnnnnnnnnnnnnnnnnnnnnnnnnnnnnnnnnnncccacgcgccgacgcctccgccttccgcctcccgccctggtcgcgcccgctcctcagccgcccgcgcggcccccccttcttccctcttgtgctcttccttcttcgtgcggtggcccctgccatccggactcctcctgagcaggctccgccgctcaacgggcagctgtgcgccaagcaggcgctcgccaccctcggcgcctggactcgagccattgtcgccttctagggacccccgagggcacagggacccggggccccgcggggctggggccagacaaagactcggcaaaggggcgagaggagggaacgagcgggcgccgggccactcggggctgagctgggggcgagcgggggcaggcggctgatgttttataaattgt

SEQ ID NO: 98611 - DNA, 1010 bp, Homo Sapiens
  misc_feature (637)..(637): n is a, c, g, or t
  misc_feature (640)..(640): n is a, c, g, or t
  misc_feature (642)..(644): n is a, c, g, or t
  misc_feature (646)..(646): n is a, c, g, or t
  misc_feature (648)..(648): n is a, c, g, or t
  misc_feature (657)..(657): n is a, c, g, or t
  misc_feature (663)..(664): n is a, c, g, or t
aaggtagcgaggcctgggtggcgatttcggcacgagggtggggttcaaatcccagcagcctttgctgtacacagctgggggtctcttgagcctcttgggagtcaaggccagctgggaggcttagcccttcagccccagcagaaggccctggggctggtggggctcagaatacccctaccttgtggctgctccccaccccctcccggatgctgtgaggagctcaggcaggggcctggaggggaacaggggtcatcctgaaggggctccacccccagtcaacccaggcctccctcagggacacctgtcaccctgagtgccaccaggtcccctctgcctttggtccagaagagttgtccaaaccagccagcatctggctccagccctccaaccctggcgaccagaccccatggggtgccatcaacggccccgcgacaggcatcaattcaaaccccaggacactctcgacagctccaaccatccggagggctgtgcagatggcaggaaccaaggaccctccctggcagctgaagagggcagttacggttgggcgtggtgaccagaacacacccagcagcctgcgaagcctccccgtccccagcctgtgctcctgatccccgccagacgcttgtgagctggntgngnnngngnaaaggaagnccccgnncttgctgggccctaccctgtcgcacaggatgccctctgcacgcctgcagacggtgccctctcctctccaaaacttgctgctgtccctcgagggctggcactgctatctcccggggctggggttgactccaaagccagacaggggggaagggaatttggttcctgcagggacagtgaaaaagggtctgtggtccccggcaacccctggggaacacggctcgggttgccctggggctcacggcattgaaaaaaactccgaaggggggccatcttcccctctggggaatgggttggggtcttggggcgccctttgggcctgtcggacaagggggccagggccccccctc

SEQ ID NO: 98612 - DNA, 1428 bp, Homo Sapiens
tccattctctccctcagagaccccatctgtgcaacccctgcatgagaccccctctcaatcccgcattcattccctgcgtgaaagcttccggcctatgagccgccattctggcccctgaagtcgggctggacaaattgggtgtgggaaggtgggtttctgggtgcacacaccacctctgctctccctgccccgccaggctctggcccacgtggaggcctatatcgatttcggcgaggatgacaacctggaggagggggtcctggagcaagccgacatcgaagtacgggcactgcaggtggccctgggtgcacatctacgagatgccaggcgcgggcagaggctccgctcaggggtgcacgtagtggtcactggaccccccaatgcgggcaagagcagcctagtgaacctgctcagtcggaagcctgtgtccatcgtgtccccggagccagggaccacccgtgacgtgctggagaccccagtcgacctggccggatttcctgtgctgctgagcgacacggctgggttgcgggagggcgtggggcccgtggagcaggagggcgtgcggcgcgcccgggagaggctagagcaggctgacctcattctggccatgctggatgcttctgacctggcctctccctccagttgcaacttcctggccaccgtcgtagcctctgtgggagcccagagccccagtgacagcagccagcgcctcctcctggtgctgaacaagtcggacctgctgtccccggagggcccaggtcccggtcctgacctgccccccgcacctgctgctgtcctgtctgacgggagaggggctggacggcctcctggaggcgctgaggaaggagctagctgcagtgtgtggggacccgtccacagatcccccgctgctgacccgagcaaggcaccagcaccacctccagggttgcctggatgccctcggccactacaagcagtcaaaagacctggccctggcggcagaggcgctgcgggtggcccggggtcacctgacccggctcacaggtggagggggtaccgaggagatcctggacatcatcttccaggacttctgtgtgggcaagtgacgggatccagggaagtcgcacccaagctgcgtggagacccaggagcctcgggggatctggaaacagtttaggccaattgggattctcattcgcctgggaaagaacttgattctcaaatagtgaagcaacacagctgagaggtagtgagatccctgcagggactccctggagattcaggccctggaataggggctgaatggaggtcccgttcgacccttgatgctggggcatccgggttgggatggagataggaggatctcagtatatttgtttcgtagttttttatttattttgcaaataccaaaggaatgtaaaaaaaactcaggtgatctagaagtgttta

SEQ ID NO: 98613 - DNA, 980 bp, Homo Sapiens
  misc_feature (220)..(253): n is a, c, g, or t
  misc_feature (650)..(690): n is a, c, g, or t
cccacgaggagaaggatggggggttcggatgcagttggaggggcgggggccagccctgtttccccctttttggaggggtctttttccagcccaggagaattgccctgaaaggctggggggtggtgggcttggggggtgcatgattttcccctcgcggggcccatattcctatgggatcccccttcctcctttctgttttcaggtgtgagcaaagcccttnnnnnnnnnnnnnnnnnnnnnnnnnnnnnnnnnncaggagaatcccaaagccacaccagcagacatgtgaggcactgcttgggaaaagtctgttttggtatcactggcaacaagtcctgctggtactgctttgggtccgcctccccaccttgccctgccgggaggtcaagggtggtggactgaccccacactctgtaccattgagcaatggatgggcagcggtgtcattttgaaggtgagactctcaggaagtgtctgacgtggcagaaatggggcaagatgggaggatgcggaggaagctggattgagagatgtatgtcccagcgccctccaaagagaaagtaaaatccggggtctcagagagagaatccagaccaagatacaaggtagccactatatattctgtattatgagaaacaaattccaaaatnnnnnnnnnnnnnnnnnnnnnnnnnnnnnnnnnnnnnnnnngccctacactggaggtcaaagtaccattggggaggccagagtgggtaggggggctgcttgctgtctcttctggagggctggacagttgctcctggctccagaacctgtcttgcaagggacagtggggtgcagccaagtctgtctgtgcctggaatgctgctgtctctcaaggtcctggggcagggaaggtggaattgtctgctgcctggggacctgcagggggacccaggtctggcccctaagcggctctccccctcgtgccgagaatcgccacccaggcctcgctcctt

SEQ ID NO: 98614 - DNA, 995 bp, Homo Sapiens
  misc_feature (818)..(818): n is a, c, g, or t
  misc_feature (953)..(953): n is a, c, g, or t
tccaaaggtagcgaggcctgggtggcgaattcggcacgaggcctcggggtctctccaggcccagcagagctcttcaggggtcctgacactggaagaagagaccacttgagccatgtctttttcacggccaactcctgcctctaaggatgtctgagctcccctctggccagtactgcccacctctaccttgtccagggccccttccccgccctgtcgacggaccgccaggcagggcactctgccttctacctcccggggtctcccatgcgctcctcaagccaggtgtgcacgtggccctggccctggcctgcaggacagctggggggcacccagcccccagaagacccctgtcctacatccctttctggaagtgagtgtccctacagtggattgcaacacatgtcgtccacttcgaccctagctggagtgcctcaccagggggccccactaggaacaaagccaggacaggccccgcgtcaggcacacactaacaaaaccagaagcatggggcagggcagggcggagtgagggcatcacaggggaccaagaagggctgtccttgggggaggcccaggaccacctgtcggggagggggaccgcagtcatttctcattcctcagtgtccaccttgcgacggggatagccacgagtcagcagcttcccggaaagagcaacgtattttaaaaaggaaagtaaagcccacagaggggaaatcaagggtttttttgagcaaagggggtcttctgaagggaacttattatttttttctttccaactgtgtgtcacctatgacccttttctgatggagatgcattttnctttttccaagcgttaagcttcctaatgtgctgtgcgtggcttcctacccaaccaacccccgagcagccctgccccggccaggcactggggcctcccaggggggactgtcacccctgggccctggaagttggcanccgcctgggcaaccagccttaaccagggttgggggtggaaag

SEQ ID NO: 98615 - DNA, 930 bp, Homo Sapiens
ccaaggtagcgaggcctgggtggcgaattcggcacgagggtggtgcgcttggagagctttcccgaactcatgacggccgccaagttcctgctgatgaggtcggttatcgagatctgccaggaagtcatcaaacagtccaacgtacagatcctggtaccccctgcccgcgccgatataatgctctttcgcccccctgggacctcggacttgggcttccctttggacatgaccaacggggcagccttggcagccaacagcaatggcatcgccggcagcatgcagccagaggaggaggcagctcgggcggctggtgcagccattgcaggccaagcctctttgcctgtgttacctggggtggaccgcttgcccatggtggctggacccctatccccccaactgctgacttccccattccccagtgtggcatccagtgcccctcccctgactggcaagcgaggccggggccgcccaaggaaggccaacctgctggactcaatgtttgggtccccagggggcctgagggaggcaggcatccttccatgcggtctatgtggtaaggtgttcactgatgccaaccggctccggcagcacgaggcccagcacggtgtcaccagcctccagctgggctacatcgaccttcctcctccgaggctgggtgagaatgggctacccatctctgaagaccccgacggcccccgaaagaggagccggaccaggaagcaggtggcttgtgagatctgcggcaagatcttccgtgatgtgtatcatcttaacccggcacaagctgtcccaactctggggaagaagccctactcctgccctggggtgggggggttggcgggttcaaagaagaaaaagaccgcatggtcctaccatgtgccggtcccccatggaaggggggtccgtgggggcaagccctttacattcttg

SEQ ID NO: 98616 - DNA, 938 bp, Homo Sapiens
caaggtagcgaggcctgggtggcgttccggcacgaggggaaagaggagcgagagcccggcgatggcggctgcgccggccttgaagcactggcgcaccacgctggagcgggtggagaagttcgtgtcgccgctctactttaccgactgtaacctccgcggcaggctttttggggccagctgccctgtggctgtgctctccagcttcctgacgccggagagacttccctaccaggaggcagtccagcgggacttccgccccgcgcaggtcggcgacagcttcggacccacatggtggacctgctggttccgggtggagctgaccatcccagaggcatgggtgggccaggaagttcacctttgctgggaaagtgatggagaaggtctggtgtggcgtgatggagaacctgtccagggtttaaccaaagagggtgagaagaccagctatgtcctgactgacaggctgggggaaagagacccccgaaggcctcactctctatgtggaagtagcctgcaatgggctcctgggggccgggaagggaagcatgattgcagcccctgaccctgagaagatgttccagctgagccgggctgagctaggctgtgttccaccgggatgtccacatgctcctggtggatctggagctgctgctgggcatagccaagggcctcgggaaggacaaccagcgcagcttccaggccctgtacacagccaatcagatggtgaacgtgtgtgaccctgcgccagcccgagaccttcccagtggcccaggccctggactccaggttctattggcacacatgggggtgaaagccaacacaccattcatgccacaggccactgccacattgatacagcctggccttgggcccttcaaagagactgttgaggaaatgtgccccggagctgggtgaccgcccctgcagctcatggaacggaa

SEQ ID NO: 98617 - DNA, 718 bp, Homo Sapiens
  misc_feature (133)..(133): n is a, c, g, or t
  misc_feature (172)..(172): n is a, c, g, or t
aagttataaggggaaaatcagatcattttctcttcataaaacacagagaatacttaagtagagtgctcaagcacttatctcgaattgcaattttatttttcaaatacgtaagaacctagaaaatcaactcagnacttacttcctagatacctgtgttaggaaaagttctacntcaccacatttcctctgtacctttaataattcaaactcaataaaatgctgctttaggattcctgaaagcaattgtatttgtgcaaagcctaaacaggaaaacaaagtggatgacttggcatttgaagaatgaaaaagccaaacagcactgtcacaaccatttctgccttcagtctccagtgcctttttctttcattataaaatccatagaaatggcaaggaaagatataggaaagtttatcacagatacagtagctattacagaaatttggaattcagcagatgttttaagtcaaaattttctgtgtaacagatgaatttgcaaagttttgaaaacacagtccacaaagtaatttaaaatgtgataattaaatttgttttaaaaagcaaattaacaccttttattttctgtgaagataaaacaataaaagaaaaatgttcatatatccaaacctatgctggaagtacacaaaaagacaatttgtatacattactggcaatagtcttgttttggacagaatataatacagaatatccattgttaaaa

SEQ ID NO: 98618 - DNA, 964 bp, Homo Sapiens
  misc_feature (663)..(663): n is a, c, g, or t
  misc_feature (684)..(684): n is a, c, g, or t
  misc_feature (727)..(727): n is a, c, g, or t
  misc_feature (928)..(928): n is a, c, g, or t
aggagcgaggcctgggtggcgattccgacgaggcaacaacaaagatggatctaatcataaagctgaaagtggagctctaatagaagctgcaaaatcaaagatacatcagtacaaagtacgagcttatatccaaatgaagtctctgaaagcatgtaaaagggaaatcaagtcagtcatgaatacagctggaaattccgcaccctctctctttcttaaaagcaattttgagtacttaagaggtaattatcgaaaagccgtgaagctattaaatagttcaaacattgctgagcatccaggattcatgaaaacaggtgaatgcttgagatgcatgttctggaataaccttggttgcatccattttgccatgagcaagcacaatttgggaatattctactttaaaaaggctctgcaagagaatgacaatgtctgtgcacagctcagtgcaggtagcactgatccaggtaaaaaattttcaggaagacccatgtgtacgttactaaccaataagagatatgagttgctgtataactgtggaattcagcttcttcacattggaaggcctcttgctgccttcgaatgtctgattgaagctgttcaggtttatcatgcaaatcctcgcctctggctacggctggctgaatgctgcattgctgccaataaggngacttctgaacaagaaactanaggccttcccagcaaaaaaggaattgtacagtctattgttggntcaaggctatcatcgtaaaatagttttggcatcacagtctatacagaatactggttataatgatgggcagtcttcggccattcctgtagccagtatggagtttgcagccatatgtctcagaaatgccttgttgctgctaccctgagaacagcaagaatcaaagcaggaaaatgggggctaaaaatagtaatcaaattaggntgggaaccccgagagcagcgaaaagcagtgaaaact

SEQ ID NO: 98619 - DNA, 1098 bp, Homo Sapiens
  misc_feature (1013)..(1021): n is a, c, g, or t
ggcctgggtggcgaattcggcacgagggtcagacactttctatgaccatgaggacaccaccactgacaagctgaagctgaccctgaaactgcgggagcagcagctggtgggcgagaagtcctgggtacagttcaacagcaacagccagctcatgtatggccttcccgacagcagccacgtgggcaaacacgagtatttcatgcatgccacagacaaggggggcctgtcggctgtggatgccttcgagatccacgtccacaggcgcccccaaggggatagggctcctgcaaggttcaaggccaagtttgtgggtgacccggcactggtgttgaatgacatccacaagaagattgccttggtaaagaaactggccttcgcctttggagaccgaaactgtagcaccatcaccctgcagaatatcacccggggctccatcgtggtggaatggaccaacaacacactgcccttggagccctgccccaaggagcagatcgctgggctgagccgccggatcgctgaggatgatggaaaacctcggcctgccttctccaacgccctagagcctgactttaaggccacaagcatcactgtgacgggctctggcagttgtcggcacctacagtttatccctgtggtaccacccaggagagtgccctcagaggcgccgcccacagaagtgcctgacagggaccctgagaagagcagtgaggatgatgtctacctgcacacagtcattccggccgtggtggtcgcagccatcctgctcattgctggcatcattgccatgatctgctaccgcaagaagcggaagggcaagcttaccccttgaggaccaggccaccttcatcaagaaggggtgctatcatcttgcagacgactggacgactcaagccccaccctctccagcatgcactcattctgcagaggagaggcctcccctacccctcctgagaccccaaccaaaaggggcccaaaacaattcctttggaaccggaaacccctgggaaagtaannnnnnnnntgcgggattgaggatcccaaagggggccctccctataaaaggccccccacccgcccttttttaagaggacccccctt

SEQ ID NO: 98620 - DNA, 914 bp, Homo Sapiens
gggaaccacgtagggttgggcataactgggttcttttcatccagggggttattaaggcacctgttgggacccgtcgttcattggtgcaacacctccatcgatgagcacagcggcgcttccgtacgtgagggcgtgagtaacacacttctccacaacattgcttgcaaatttgtgctgactcaatacaagtacattgcctcggatttctgctacaattttgctttatcttcaggacgaccgtgctccagtacatgttggattacataatttccatattgatcctgtacaagctgctctgtgtgctggtgaagctcctctaaaatagggagtgtctggtcagggagacagtgctccaggattctctgaatcactcggcagccataaggatgtgtggataaggcaaatacctgtcccttaaacgcatcgatgataaattgcaaagactggggctgtacacattcaatgcatttctgaaccacgtgattgccattctgatctttcacacacttcaagacatggccatctagttcccgaaccatctcattctgctggtctgaaggaataaaactcaagagctttctggataacacggcagccatacatctgtagtgccaatgacaggacgtggcctcgaatccgttctgccaaagccagcttctgttcaagactgccaaattcaaagaacttctgaatgacgtaattaccaaacacatccaccatgagttggtaggcagcctggaggatttcattgaagacaagctggcgctcagctggtgtggcacgctccagtttcagctgaatgaatctggacccatgctggtcttgggaaaattccattatatgtccagcaatctcccgcagttgtaaattggggtaccggttgtttcctcgtgccgaattcgccacccaggcct

SEQ ID NO: 98621 - DNA, 1294 bp, Homo Sapiens
  misc_feature (134)..(226): n is a, c, g, or t
cctatacggtcctaaggtagcgaggcctgggtggcgattccggcacgaggaggggaggagagcagcatcgagtcgccgccgccgccgcgccgaggctggcgctgaaactttgcctcgccggggaccagcgcgcnnnnnnnnnnnnnnnnnnnnnnnnnnnnnnnnnnnnnnnnnnnnnnnnnnnnnnnnnnnnnnnnnnnnnnnnnnnnnnnnnnnnnnnnnnnnnccgcggctgccgcagcattcccgggaaggacagaatgaccgagaacatgaaggagtgcttggcccagaccaatgcagccgtgggggatatggtgacggtggtgaagacggaggtctgctcaccactccgagaccaggagtatggccagccctgctctaggagaccggactcctcggccatggaagttgagcccaagaaactgaaggggaagcgcgacctcatcgtgcccaaaagcttccagcaagtggacttctggttctgtgagtcctgccaggagtacttcgtggatgaatgcccaaaccatggccccccggtgtttgtgtctgacacaccggtgcccgtgggcatcccagaccgggcggcgctcaccatcccacagggcatggaggtggtcaaggacactagtggagagagtgacgtgcgatgtgtaaacgaggtcatccccaagggccacatcttcggcccctatgaggggcagatctccacccaggacaaatcagctggcttcttctcctggctgattgtggacaagaacaaccgctataagtcccatagatggctcagacgagaccaaagccaactggatgaggaatgtggcacacctggctgagcgtaagaggaagcccaagttctccaaggaggcagctggacattcttgtcacagaggtgacccaccatgaagcagtgctctttgggagggagaccatgcggctgtccatgctgacagggacaagatttgggaaggcatagcccggaaaatcacctccgtcagccaggtgccccgctccgttcaaggaccttaagcacagatgggattgacctgaaaccggagtgaccaaggacaaagctggccttcatgcagcagggtccccctggtccgaggccccttggggcccgaggggccggggccccccaagcaatcagtggctcacaggacccacgcagaaggcgccacccaaggatcaggcgacatgctcaacgagacccgtgacagaggcagcgggttacccccacggcggcaagctggataggcacgcgaaaagacccatacaaccaagcacatgatca

SEQ ID NO: 98622 - DNA, 969 bp, Homo Sapiens
tgacatcgggaaaagtcttggtcagcccggcaccggtacttcttgcgtctgagtgcgtttgcagatgggcccgaaggttggacggtcggcaaaggccctgctgcagtgcgagcaggcatagggcttctcccctgtgtggttcggacatggccctcaagtaaccagggcctggagaaggccttgcccacaagatcttgcaagatgcagggcagcgtgtgagtgcggatgtgcatcttgagggcacccaaggctggtgtactccttgtcgctagtacttgcaaggtgaagacacgccccaacctgcaaggtggcagttgcaagctgccggtgcctggccaagcccgaccagcgtgttggtagggtttgtggcagtgaaagcactcaaagccgcaccggggctcggggcatccagctcaggccccaagcagtttttccggagccccgtgcacggtctgggcccaaaggtcgggggaccaccgtgtgggcagcaccagcagtgggggcaggttgaggtggttcaggctgtctttgaggggtacaatggcggcccggctggcccgagggtcgacctcgctgacttccaaggcagtccagcccagaggcccccagagcttcctcgatccgtggcaggaggggcagggagatgcaggcgacggccgaggagcggtcccagggctggggaaggtcaccgggcacagaaggggcctccttgtctcggggaaggaggggcaccaccagccccccacaggccagagcaggcaccaatgaagtctctctgcgtctccagccaccgctagttggggaccactcgtggctggatgtgcagtatttcacgcaggaaggagcgcggcatgttcgccctcacgggcggtcagtccggggtggtctggggcgggaggggcgcgcctgggtccggactgctgcgtccgccggcgcttgaagatcccgtaatcccgggggcgtaccagg

SEQ ID NO: 98623 - DNA, 938 bp, Homo Sapiens
  misc_feature (861)..(861): n is a, c, g, or t
  misc_feature (884)..(884): n is a, c, g, or t
  misc_feature (894)..(894): n is a, c, g, or t
  misc_feature (912)..(912): n is a, c, g, or t
gaggcctgggtggcgaattcggcacgaggctgcaaccctaatcagagcccaaatggcgcagtgggaaatgctgcagaatcttgacagcccccttcaggatcagctgcaccagctttactcgcacagcctcctgcctgtggacattcgacagtacttggctgtctggattgaagaccagaactggcaggaagctgcacttgggagtgatgattccaaggctaccatgctattcttccacttcttggatcagctgaactatgagtgtgcccgttgcagccaggacccagagtccttgttgctgcagcacaatttgcggaaattctgccgggacattcagcccttttcccaggatcctacccagttggctgagatgatctttaacctccttctggaagaaaaaaagaattttgatccaggctcagagggcccaattggaacaaggagagccagttctcgaaacacctgtggagagccagcaacatgagattgaatcccggatcctggatttaaaggctatgagggagaagctggtaaaatccatcagccaactgaaagaccagcaggatgtcttctgcttccgatataagatccaggccaaagggaagacaccctctctggacccccatcagaccaaagagcagaagattctgcaggaaactctcaatgaactggacaaaaggagaaaggaggtgctggatgcctccaaagcactgctaggccgattaactaccctaatcgagctactgctgccaaagttggaggaagtggaggccccagcagcaaaagcctgcatcagagctcccattgaccacgggttggaacagctggagacatggttcacagctggagcaaagctgttgnttcaccctgagcagctgctgaangagctgaaanggactgagttgcctgggntagctatcaggatgaccctcttgaca

SEQ ID NO: 98624 - DNA, 1674 bp, Homo Sapiens
ccctccccggtgggaggttcaaactccctgggcctgggcttcctgggttcccataccccgttgattgccacggcccccggaactttatatttgtggtcaggcagcaaggttctggacgttgaaaagagggggctgcggcatggggctagtcccttcccccttcttgttggcggagtcccagatctcgatgctgtaggcctgtacagcactgcccccatcatatgaggagcccatcccaggccagggtcagtgaggagctccgaatgtcagaggcacaaggtgtgccagctggggggtctggcttatccacgacagtgaggttgacctggggcctgcctgctgcccagcttgttctccaccagcagtgtgtagcagccgcagtgctcctggcgcgcggccaggatggtgagcttgctgccattctcgctgttctccaccttcatgtgctcgctttcctggatctgctttcggaacttcatccaggtacaggtgatgggctgagtgcctgtcactttgccaaacagctccactgactctcctgcgcgtaccttctggtcctcagggaactggatgatctgagggggcattgctgccttcggaggtgtcttgggggcaggtttctttttcacagtcgcatcactctcagttcctagcacgggaggaagagagctcttgggcctccgggatttcatctctggggccttggtgttctcactggctggagcatcatccacagtgacttggcaggagcactccgcctggccagcgtcattcttggctacacacttgtataagcctctgtcctcaggcagtgccttctcgatggagacggagcagagtgagccttcctgggagaggatgatgaacttggtggtcttgagggtctttccattcagcgtccagatgatggtggctggggggtcagaagacacctggcactggagcagcagcttcttgccctctgccacatgaacatcttgcagcttctgcttgaaggctggggctgtcccctggctctctgatctcttttcattatctgtggtccctgcatggcctctcttgcagttcacatcattcttaacgtctttcttgagttcttctttgctagcggatttcaggttctcatcaggcttggcattgcccatgggcttcagggtctcggcaggcttggcgttgcccattggcttcagggtctcagcaggcttggcgttgcccacgggtttcaagggccctgaaggctgtgcattgctcaggggcttggaactctccactgccttggcattcagggtctcggcactgctgctgccattctctgctggtaatttcttcttgccacccagcactgagcgaaaatccggggtggcaggttttggcggtggcaccttctcaggcacgggggtcttggaagtccccttcttggccaggacagagcgaaaatcgacctgctgggggctgtgcaccttcctctcttcctcagacacagtctttggcttcacttgccgctgcaggttggcacggaaatccatctgctcggctgggatctccttcagtcgtcttccgatagggtctttgtactcaccttcttcccaggagtctcggaagtccagctgctccacctcctgtgcggatgcctcctcagtgtgagaccccttccacagagatcctctagatgac

SEQ ID NO: 98625 - DNA, 983 bp, Homo Sapiens
  misc_feature (77)..(77): n is a, c, g, or t
ccaaggtagcgaggcctgggtggcgaattcggacgaggggacatttacgctatcgaagagctccgggcacggggtcntggaggtcacagatgattccccaaagtacaattaccatttggactccagtggtagctatgtatttgagaacacagtggctacggtgatggctctgcgcagggagaagatgttcgtggaagaggtgtccacaggccaggagtgtggagtggtgctggacaagacctgtttctatgctgagcaaggaggccagatctatgacgaaggctacctggtgaaggtggatgacagcagtgaagataaaacagagtttacagtgaagaatgctcaggtccgaggagggtatgtgctacacattggaaccatctacggtgacctgaaagtgggggatcaggtctggctgtttattgatgagccccgacgaagacccatcatgagcaaccacacagctacgcacattctgaacttcgccctgcgctcagtgcttggggaagctgaccagaaaggctcattggttgctcctgaccgcctcagatttgactttactgccaagggagccatgtccacccaacagatcaagaaggctgaagagattgctaatgagatgattgaggcagccaaggccgtctatacccaggattgccccctggcagcagcgaaagccatccagggccctacgggctgtgtttgatgagacctatcctgaccctgtgcgagtcgtctccattgggggtcccggtgtccgagttgctggatgacccctctgggcctgctggctccctgacttctgttgagttctgtgggggaacgcacctgcgggaactcgagtcatggcagagccttttgtgatcgttgacggaaagaaaccattgccaaggggtatcccggaggattggggcttggcacagggggccaaggccccaaaaaggcccttaggaaaaccaaaagacttttaagaaattgcctct

SEQ ID NO: 98626 - DNA, 989 bp, Homo Sapiens
atcacgatgccagttatatttaatgagcctctgagcttcctacagcgcctaactgaatacatggagcatacttacctcatccacaaggccagttcactctctgatcctgtggaaaggatgcagtgtgtagctgcgtttgctgtatctgctgttgcttctcagtgggaacggactggaaaacctttcaacccactgctgggagagacttatgaattagtgcgagatgaccttggatttagactcatctccgaacaggtcagccatcacccaccaatcagtgcatttcatgctgaaggattaaacaatgacttcatctttcatggctctatctatcccaaactgaaattctgggggaagagtgtagaagcagaacccaaaggaaccatcaccttggagctccttgaacacaatgaggcatatacatggacaaatcccacctgctgtgtgcataatatcattgtgggtaaactgtggatcgaacagtatggcaatgtggaaattataaaccacaagactggggacaaatgtgtgttgaattttaagccatgtggcctttttggtaaggaattacacaaagttgaaggctacattcaagataaaagcaaaaagaagctctgtgccctctatgggaagtggactgaatgtttatacagtgttgaccctgccacgtttgacgcttacaaaaaaaatgataagaaaaatacagaaagagaagaagaacagcaaacagatgagcacctctgaggagttggatgaaatgccagtgccggattctgaaagtgtattcattatccctggaagcgttcttctatggcgaatagccccacggcctccaaattctgcccagatgtataattttactagttttgcaatggtttttgatgaagtagacaaagacatggagagtgtgattcccaagacagactgcaagttacggccctgacatcagagccatggaaaatgggagagatagatccagctagtggaag

SEQ ID NO: 98627 - DNA, 1364 bp, Homo Sapiens
  misc_feature (86)..(137): n is a, c, g, or t
  misc_feature (784)..(857): n is a, c, g, or t
  misc_feature (1023)..(1062): n is a, c, g, or t
  misc_feature (1180)..(1180): n is a, c, g, or t
  misc_feature (1191)..(1191): n is a, c, g, or t
  misc_feature (1203)..(1203): n is a, c, g, or t
  misc_feature (1242)..(1294): n is a, c, g, or t
ccccccacgacgtacggccgcctcgcgttcctctccttctatgtcggctggcaccggcccggcatttctgggatgccggcccggtnnnnnnnnnnnnnnnnnnnnnnnnnnnnnnnnnnnnnnnnnnnnnnnnnnnnggcccggcacgggcggcgcgatgtgaggcgtccgagcccggagcctccgcctggcatcagctccacgtagcccagcgccggcacgcgcgaggccccccttctgcagaggccgggctggaggagaagatggcggccaagcagcccccgcctctgatgaagaagcacagccagacggacctcgtgagccgcctgaagacccgcaagatcctcggcgtgggcggggaggatgacgacggggaggtgcatcgctccaagatcagccaggtcttaggcaatgaaatcaagtttaccattcgggagcctttggggctcagggtctggcagttcgtctctgctgtgctcttctccggcattgccatcatggcgagcctgcccaccctgaccagccccatcacacccggccccgtgatggcgcccccagcccttcgcagcctcaccacaagcgcctcctcaatccgggcccctcctgcagcggcccatctgtcaggctctgaccctgcctccaagaatcctgtaccactacacgtaccaagcctgtacctactcctaaggagcacactagatcccatgaaacctttcgttcattcttccgggttccatcattctttgcgccggttccccttgccccctctcccagtcctttaaannnnnnnnnnnnnnnnnnnnnnnnnnnnnnnnnnnnnnnnnnnnnnnnnnnnnnnnnnnnnnnnnnnnnnnnnngctcttacgttctgtggcccttccactcttgcgccattttctgctccattcaaccgttccgctttcaccacgctttttttccgtcgcatacactctttctttccaaccggtttttttccgccttttggccccctcgtgcttggcgcgggtccttcgcgcccgggtnnnnnnnnnnnnnnnnnnnnnnnnnnnnnnnnnnnnnnnntatacaacacaggttccggtattttcggccacccacccccgtagcactattccccgtttccccatccggttccccgcacctggccccccccaggtttaccccgccattgggtctccgncccgccgcggnttaccttgagtncacatgcaccttttttattgttcccccctaactgtcctnnnnnnnnnnnnnnnnnnnnnnnnnnnnnnnnnnnnnnnnnnnnnnnnnnnnnacgcccctttccccgcttgacgctctcactccctgtaggcgcgcgtttagccggttaccctttagtttcg

SEQ ID NO: 98628 - DNA, 1042 bp, Homo Sapiens
  misc_feature (752)..(765): n is a, c, g, or t
  misc_feature (854)..(854): n is a, c, g, or t
ggtagcgaggcctggggtggcgattcagaagagcccggaccagcagccccctttcctgcgcgctgccctagggcccggccgacccgcggcccggttggtcagcacattgtctcaagtagccttttgatgtcactgtggccatggccaactggtaggaccagcaccccataccccgaagccagttcagaatgaccgaagaagcatgccgaacacggagtcagaaacgagcgcttgaacgggacccaacagaggacgatgtggagagcaagaaaataaaaatggagagaggattgttggcttcagatttaaacactgacggagacatgagggtgacacctgagccgggagcaggtccaacccaaggattgctgagggcaacagaggccacggccatggccatgggcagaggcgaagggctggtgggcgatgggcccgtggacatgcgcacctcacacagtgacatgaagtccgagaggagacccccctcacctgacgtgattgtgctctccgacaacgagcagccctcgagcccgagagtgaatgggctgaccacggtggccttgaaggagactagcaccgaggccctcatgaaaagcagtcctgaagaacgagaaaggatgatcaagcagctgaaggaagaattgaggttagaagaagcaaaactcgtgttgttgaaaaagttgcggcagagtcaaatacaaaaggaagccaccgcccagaagcccacaggtttctgttgggagcaccgtgannnnnnnnnnnnnngcttgttcgggggcactcagaaacatttcctggctggcaaagccattcacttcccagaccctccttccagcctcgggattgccccgggnaaggtgctcaataccccctccgcccccctgggggtccggaagggtggggagccagccaaggccggttcacttccgaaaagattttgggggtgccaccaaggggtgcaaggcctccccacaggggtctcctccacttgggcgcccccccacctttcgatgccaggaggaagggggtgctttctaatccc

SEQ ID NO: 98629 - DNA, 710 bp, Homo Sapiens
  misc_feature (623)..(623): n is a, c, g, or t
ttctagggtaccatgaaagtgttctctagtttgttggattttgaatgatggactatttcagtgaagtgcctgactcccagagatcccaaacactgcatgttctcagagaggaaattagatcctccatctttgagaatatgtgtatccatccttgccctctttaatatatttttagcagtacatcccggggatatatttaaaatataaagttatccatgttacttccgtgtctaaaagcctccactggaatttctaatttgagataatggagtaaacataagtttaccttccctccctccccaggccccactgaaattgaagtcaagaaatgcaaaaaggaactgacacatctcagcaaagaaaactgaagggatttggttataagtggagaggatctcagcatatttctggaagatagaaagtggatgaagcatgataatgaaagagtgaagaacctttcagataaaatgtaagctgatctgaacaacataaccccaaagagacttgcgcacctgaaaagcttgtctactgaagaattactccagttgtaagattgagccctctcctactctcccccaactcttatgcacagaacacaggcagtctccactattgataccagntaaaaatttcttgttattgttgctggtgttggtttgataaaggaattgaacaggctgctttgcaaagagataagaggttgtggctcc

SEQ ID NO: 98630 - DNA, 1369 bp, Homo Sapiens
  misc_feature (377)..(389): n is a, c, g, or t
  misc_feature (534)..(570): n is a, c, g, or t
  misc_feature (630)..(655): n is a, c, g, or t
  misc_feature (695)..(705): n is a, c, g, or t
  misc_feature (788)..(788): n is a, c, g, or t
  misc_feature (791)..(792): n is a, c, g, or t
  misc_feature (794)..(795): n is a, c, g, or t
  misc_feature (797)..(802): n is a, c, g, or t
  misc_feature (805)..(806): n is a, c, g, or t
  misc_feature (809)..(809): n is a, c, g, or t
  misc_feature (813)..(813): n is a, c, g, or t
  misc_feature (819)..(819): n is a, c, g, or t
  misc_feature (946)..(946): n is a, c, g, or t
  misc_feature (1096)..(1096): n is a, c, g, or t
  misc_feature (1125)..(1125): n is a, c, g, or t
  misc_feature (1169)..(1169): n is a, c, g, or t
  misc_feature (1256)..(1256): n is a, c, g, or t
  misc_feature (1288)..(1288): n is a, c, g, or t
  misc_feature (1300)..(1300): n is a, c, g, or t
  misc_feature (1326)..(1326): n is a, c, g, or t
acggtctaaggagcgaggcctggggggcgaatttgctgactgctaagccgggcgcctcattgcaaaccgcaccggctccagcgctcgcctctcgccctcgcttctccagcgctccttgctcgcaaggcgggggaggcggcggcccagccacgatgatacatttcatattgctcttcagtcgacaagggaaattacggctacagaaatggtacatcactctccctgataaagagaggaagaagatcacccggtgaaattgttcagattattctctcccgtggtcacaggacaagcagttttgttgactgcaaggagctaattttcgtctttttaaggcacgcccacccaaaacccggccgagccacagtttttcccgnnnnnnnnnnnnnggggggagtgattgtggatgcgatacgcgctccttcctgcacaaatatacaagccccggcctccccccctttttattctctacccttcttatcatggcgccgcccgcccactgaccacactcccctttgataattgcaccctctnnnnnnnnnnnnnnnnnnnnnnnnnnnnnnnnnnnnnaccgactcccacaccgagccgacacccaccaaaacaactccaccaacaatagcgtcatcnnnnnnnnnnnnnnnnnnnnnnnnnntgcaatctacccgcgcacactacccaaccacctataacannnnnnnnnnnacgtctcacctaacctcccgcccccaccgtcctataccatacgcccaccaacgtcccgcggccactaatccgtcgcccccggncanncnnannnnnnagnnatngaanccgccnatactactgaaacacaccaccccccagcaaacgaacagcaataatcggcgcgataactcggaatacactgattctatggtatatcacacacttctcattatttatcatccccgcctcgcccgcaatntgttgcgcgtcccgactcgtatgtacgcgccgctcctccacgccagctctttcgcaaacgtagcgctaagcgcggtcgcgccgctcacttcgattttttatcacattatcataccgctatatccgctcctcttcactgtcgcgactctcnccgcaccatcgacgactcatacaatatangaaaggagagtctcgcgcgctcgcacgatctcgcagtcttcagntattctcagctcgacgtctgtgattgatatcactccctcatcctcacgaactaccgtcgttgcctctggcgtacgctacacgtgagnatgaaccctcgcgcgcatcttaacattagtgntgatctctcacntaacctcgtcggctcacctctatagncgcaattgcacgctcgtcacctcatcctcgcccgtttcccgcc

SEQ ID NO: 98631 - DNA, 973 bp, Homo Sapiens
  misc_feature (11)..(11): n is a, c, g, or t
  misc_feature (136)..(144): n is a, c, g, or t
  misc_feature (189)..(247): n is a, c, g, or t
  misc_feature (289)..(289): n is a, c, g, or t
  misc_feature (291)..(291): n is a, c, g, or t
  misc_feature (357)..(357): n is a, c, g, or t
cggctttcagncgctcaccgtacaacagcatatgtaggcatggcggcccggccggcggatctgcggtggagaaagtgcttgcgcacccccgccggggggagaacggcgggggagggaatttcctcaccgaagcggnnnnnnnnngaaaatactgtccccgccggccctccgcggccccccacaaacacnnnnnnnnnnnnnnnnnnnnnnnnnnnnnnnnnnnnnnnnnnnnnnnnnnnnnnnnnnngggacgcgatgggctccggatctatggcgcggcacccctttntncacgcacggtctcttttagagggacctccttcccacctccagggccttgctgggtgaccgggaacntttcccgggggggtggttcgtctccccaaaaaaaatttccaggaagtcaaagctggggaggttcaaacccagttccattctttccatcattcaatcatcaagcccaaggtgctcctgacccccaggtaggaccctgccctggggccacgatgccctctgagccctgctttcccctcctgacctgcggggccaccaggagctccctccgctcgccctaggctcacgtgcttttacctgctgagacttggcgtgacttggtgcgtggggtgggggcagccttgcccctccccttgcccccgctgccaccacgagcctggactacagtgggggccgtgctgggatggcatctcctctggcaacagagagtcaaagccaatcttcccagactcgctcccccacctgggcttgcagccagctcagaccacagcagacaggccgggagcctcccaaccttattttggctacgctcgagacactggagagaacagtagcttccaccgggctctgggggagccaagtccctcccttctcatcctgccataggaccaccggggggtccctgtcccccaggcactcccagacacacaccctgtatcgtcccctctcccccacactt

SEQ ID NO: 98632 - DNA, 980 bp, Homo Sapiens
  misc_feature (61)..(61): n is a, c, g, or t
  misc_feature (697)..(697): n is a, c, g, or t
tctccgagcttctttacacaggccttgggcctacggctctgggggtacttgggggggcggnggcaggtctgatgagtaacccctccccccaggttccagaggaagaagcctccacatctgtctgccggcccaaggagttccatggcctccacttcccgccgccaacgccgagaacgtcgctttcgtcgttacttgtctgcaggacggctggtccgggcccaggccctcctccagcgacacccaggcctcgatgtagatgctgggcagcccccaccactgcaccgggcctgtgcccgccacgatgcccctgccctgtgcctgctgcttcggctcggggctgaccctgcccaccaggaccgccatggggacacggcactgcatgctgctgcccgccagggcccagatgcctacaccgatttcttcctcccgctgctaagccgctgtccctccgccatgggaataaagaataaggatggggagacccctggccaaattttgggctggggacccccctgggattctgctgaagaggaggaagaagatgatgcctccaaggagcgggaatggagacagaagctccagggtgagctggaggacgagtggcaggaagtcatggggaggtttgaagggtgatgcctcccatgaaacccaggaacctgagtccttctcagcctggtcagatcgccctggcccgggnaacatgccccagaagtgcccagcagcagcaggcgagaagcagagtggatcctgtcgaacccccaacgtgcttgaagggctccagcccagagctgggcgacagccaggagggagcagccagcggcttctttcagggaagcgagccccgggcccaaggaagggaaaagctgcggtgaagagccgcaccccaggaagggccgccagggaggccttctaaggggggacccgaaaaaccccaaggcctaacccagggcccgggggcccccgggaaagaagccacccca

SEQ ID NO: 98633 - DNA, 981 bp, Homo Sapiens
gggagaggggggcgctggcgaaagggtggggctgcgaactttatggggcgtattataaaggagtgccatggggcgggaaaagttgtgggggtttaacgggtggggatctaaaaaggaaaaggagttgggggaaaagaatgaaacaaacccccggtgtgaggggggaataagggcaggtcgggtgtagttgggggggatggggaacaaaccgagtgggctgtcgcgaagggggggcccgaggcgccagaaaccccgtacctcggccccagggggaaggggggaataccaggccccaggggagactgtgggtattacaggggcccgtccttgccttcaagggttgctgccaggcgcactaaccaagggcttgggagggtcggttggcgcgtatgccgggatctgggtgttattgtgaggggctcaaggaacaccttcgagcttttgcagacctgcgtcaggccctccatgcgccaagattaaagcagcggaaggggagacctgcagccgcagcacctgccccacctgggcatctcccattaagtcacataatgagggcagagaggcagagggcctgtttttgcgggcacgttaagtacagcatggaccagacagagcaaggcgccggatcagatcagttccagaagatatgcagcagctgctctcatttcaggtgaaatgtgtgaaaccatgcacaggactttggacaactatcaactgtagcaaatccagtttccccttgggcctgccagaagcagggtcctgtctccgcgcagaagcatctcccgtggcaatgactgcacctcggcatccgcattaccagtgcttgcgtggcagtccactaatcgggtaagaaccatattgctttttgcatctcaatgaagcaatagtagcaatttatcaagcacttttttttaccagacatggtataaaattgtatgtgcttttgtaaaccatttaacaataaaagtaagatacaaaagg

SEQ ID NO: 98634 - DNA, 937 bp, Homo Sapiens
  misc_feature (806)..(815): n is a, c, g, or t
ggatgccgggggactccgtcctctggggcgagtgatggctcaccaggtgctccaccaccgtgtgtttggacatgtgcttcatcaggtaggtctccgaggtgtatgcccgcccacacatgctgcagcagtaggccttggcgtgcttgatggcgtgggccgagaggtggatctgcaaagaagcggagtccgaataggcccggtagcagttgggacacttgtagggcttgtccttgttgtgctggcgctggtgagactggaggttggagagctgagtgaaagccttctcgcagccaggatgtgggcacttgtagggtctgtcgcctgtgtggattctggtgtgctgctggaggtgggagagctgccggaaggacttatcacagtaggagcagtggtagggcttgacgcccaggtggatgcgcaggtgctgggccaggtaggaggcgttggcaaaggacttggagcagtgcgggcacttgtggggcttggcctctgtgtgcgacttggagtggatctgcatctctgacttggtgaaaaaggtcagtgggcataccttacacctgtacgtcttgccctccttggcagtctcgcccgaggccaggatgggataggggactacaaggacaggcggaccccccgggttctccgccttgatctttttgcggccgcgttcggacttgggggggcccaatccggcgtgggccccgcattggtcttgatggaggccaagaaagggggcgctggcgatcccctgtacatgagggaggacgcaccacgctgccccagcggcttctggtttttttctgcgnnnnnnnnnngcttctttttttcctcgagccctcctctgtaccccctcctttcttggcctctcgtattcttcgtccccactctggcccaactattgctcgccctcttatgcattaccgccgccgccggttcc

SEQ ID NO: 98635 - DNA, 989 bp, Homo Sapiens
gaatgatggacaatcaatgactggagaataaatagatggataaacatacaggccgactaatcaatatggagactgcggctcaggcaggccaccccgcagccctgaccagtgagcacggccccatcttccctgcagccccgcaggcagccacaccttccacatattccatgaccatgcagaggtggcgccgagtctcaaaggagcagaacatgccgaccacaaacgggttctcggcgaaggtgaggatatcgcgctccacaaaggcctgctggatctggttgcggaggatcaagttctgcttgttgatctttttcatggcaaagcgctgccgcgtgtcgcggtgccgcaccaggtagacagcgccgtaggcaccgttgcttatgagcttgatggtatcgaagtcattctcccccggcggtttcttggccttgctgctgcggccctcagagagatcgtcttgctcaggggtgttggaaccaccactgtcctgttcctccagatgcaccacgtctggaaaggtgtcacgggtgaggcccagctggcggatgatgtagcgggggatgtccgtcttcacaaggtggccctccttggcgtgtccttcggccgcctccagcaggtggtagaactcctcggggttgaattccaggcactccagcagcctcgcagggcgtgagatgataataagcaacttcttcaccagctgagtaacgaaggccacctcccaagctctcagagcgttcataggccgtcttgaaggagcttctcccaggttctcctgcaattcatagaaagtagaccgtggctgatgagggccgtcacgggacttggtcaggcagtcccgggccagctcgatgatctggtggtggatgaagctgagcccgccatgcgccagaggcagaacgctgtcgggttcgtaggcgcgggtaaagccgcgcagcttctcctccatctcgcagtggctgcgggagggacggaggaggggcgccggc

SEQ ID NO: 98636 - DNA, 1353 bp, Homo Sapiens
  misc_feature (429)..(469): n is a, c, g, or t
gagaggatcgtttgtcatcccccttcgtcgctcgtatgtttttcagagcgacgaaggtcctgaaccagaggctgaggaatcagacctggacagctggcagtgtccacagtgcctcaggccggcctgatggccctgtccgcaccaagaaactaaagagaggccggccaggaaggaagaagaagaaggtcctgggctgtcctgcagtggccggggaggaggaggttgatggctacgagacggatcaccaggattactgtgaggtgtgccagcagggtggggaaattattctgtgtgacacctgccctcgtgcctaccacctcgtctgccttgatcctgagcttgaccgggctccagagggcaaatggagctgccctcactgtgagaaggagggggtccagtgggaggccaaggaggaagaagaagaatacnnnnnnnnnnnnnnnnnnnnnnnnnnnnnnnnnnnnnnnnntgatcacatggagtactgccgcgtatgcaaggacggcggggagctcctgtgctgtgacgcgtgcatctcctcctaccacattcattgtctaaaccctcccctgcctgacattcccaatggtgaatggctgtgtccccgatgcacatgccccgtgctgaagggtcgagtgcagaagatcctacattggcggtggggggagccacctgtagcagtgccagcccctcaacaggcagatggaaatccagatgtcccacccccccgtcctcttcaaggcagatcagagcgagagttctttgtcaagtgggtaggactatcctactggcactgctcctgggccaaggagcttcagctggaaatcttccatttggttatgtatcgaaactaccagcggaagaatgacatggatgagcccccacccctggactatggctccggcgaggatgatgggaagagcgacaagcgtaaagtgaaagacccgcactatgctgaaatggagggagaagtactatcggttttggcatcaagccagagtggataaccgtccaccgcatcatcaaccacagtgtggataaaaaggggaattaccactatctagtaaaatggagggacttaccatatgaccagtccacgtgggaggaagatgaaatgaatatccctgaatacgaagaacataagcaaagctactggagacaccgagaactaattatgggggaagaccctgcccagccccgcaagtataagaagaagaagaaggagctacagggtgatgggcctcccagttctcccactaatgatcctaccgtgaaatatgagactcagccacggtttatcacagccactggagcacctgcacatgatcagttggaagggctgaactggtacgg

SEQ ID NO: 98637 - DNA, 918 bp, Homo Sapiens
aacgggtgatgcggttgccatgctcttgaagcctggttttccccagctgggagcggctttgttccgtgccccgaatcttctgggttcaggaggaggctccgtggctccccttggggcttgttctcccagcttctttcaccagtcctcctgtgatgcttcttctggacagatgtgaccttcatcctggatgatggcaccatcagcgcccacaagcccctgttgatttccagctgtgactggatggctgccatgtttgcggggccatttgtggagagctccacccgggaggtggtgtttccctacacaagcaagagctgcatgcgggccgtgctggaatacctctacaccggcatgttcacctccagccccgacctggatgacatgaagctcatcattctagccaaccgcctctgcctgccacacctggttgccctcacagagcagtacacagtgaccgggctgatggaagcgacccagatgatggtggacatcgatggggacgtccttgtgttcctggaactggctcagttccactgtgcgtaccagctggccgactggtgtctccaccacatctgcaccaactacaacaacgtgtgccgcaagttcccccgagacatgaaggccatgtccccagaaaaccaggagtatttcgagaagcatcggtggccacctgtgtggtacctgaaggaggaagatcattaccagcgggcacggaaggagcgtgagaaggaggactacctccacctcaagcggcagcccaaacggcgttggctcttctggaacagtccatcctccccgtcttcctcggcagcctcctcctcatccccatcttcctcctcggctgtggtctgagatgctgccaccctcttctgaccctgctgctgttgtccccaaccgccttcacccctctgctcttcc

SEQ ID NO: 98638 - DNA, 1065 bp, Homo Sapiens
  misc_feature (874)..(882): n is a, c, g, or t
tggaccggtccggaattcccgggattgcagactgtggagccgggagccggcagtaagcccagaggtctccaccccacgggaggaaggctgaggccaagaccccggaagagatggaccgcgtgaccagataccccatcctgggcatccctcaggcacaccgtggcaccggcctggtgctggatggagacaccagctacacataccatctggtgtgcatgggccccgaggccagcggctggggccaggatgagccgcagacatggcccactgaccacagggcccagcagggcgtgcagaggcagggggtgtcctacagcgtgcatgcctacactggccagccgtccccacgggggctccactcggagaacagggaggatgagggttggcaggtttaccgcctgggcgccagggatgcccaccagggacgtccaacatgggcactccgcccagaggacggggaggacaaggagatgaagacctaccgcctggatgctggggacgctgaccccaggaggctgtgtgacctggagcgggagcgctgggccgtcatccagggccaggcagtcaggaagagcagcaccgtggccacgctccagggcactcctgaccacggagaccccaggacccccggcccacctcggtccacgcccctggaggagaacgtggttgacagggagcagattgacttcctggcagcgagacagcagttcctgagtctggagcaggcgaacaagggggcccctcatagctccccggccaggggggacccctgcaggcacaaaccccaggggccagccaggccccccaaggcctccaacaagcccccacctggccaaacgggcacgtggtttcccatcaagccccaaggggaaannnnnnnnncccagggaaaaacaaacaagggggcgtggattgggcccaaccttggggccagtgggccaaaagtgggtgggataaaacccgtggctctccttgtgcccctcctcggggaggcccccccgcgtgtaaccccccatcggaaaagacccccgaccatctatagcggcgcagaaatatcacgcccaa

SEQ ID NO: 98639 - DNA, 177 bp, Homo Sapiens
aagaagcaaagtttaatcatacttattaagcaagacttttcacaagaattgagtataaattcaatctccatatttcagttaacttcaaaccttgtttcaaattatcctttccaagtttcaataatatggcaaataggacaaccagtaaacttttattgcttaagaatatcaatctag

SEQ ID NO: 98640 - DNA, 974 bp, Homo Sapiens
acgggtgcggtggtggctgcggcggcggcggcgggagcagcatggattggggcactgagctgtgggatcagttcgaggtgctcgagcgccacacgcagtgggggctggacctgttggacagatatgtaaagttcgtgaaagaacgcaccgaagtggaacaggcttacgccaaacaactgcggagcctggtgaaaaaatatctgcccaagagacctgccaaggatgatcctgagtccaaattcagccagcaacagtccttcgtacagattctccaggaggtgaatgactttgcaggccagcgggagctggtggctgagaacctcagtgtccgtgtatgtcttgagctgaccaagtactcacaagagatgaaacaggagaggaagatgcacttccaagaagggcggcgggcccagcagcagctggaaaatggctttaaacagctggagaatagtaagcgtaaatttgagcgggactgccgggaggcagagaaggcagcccagactgctgaacggctagaccaggatatcaacgccaccaaggctgatgtggagaaggccaagcagcaagcccaccttcggagtcacatggccgaagaaagcaaaaacgaatatgcggctcaactgcagcgcttcaaccgagaccaagcccacttctatttttcacagatgccccagatattcgataagctccaagacatggatgaacgcagggccacccgcctgggtgccgggtatgggctcctgtcggaggccgagctggaggtggtgcccataatagccaagtgcttggagggcatgaaggtggctgcaaatgctgtggatcccaagaacgactcccacgtccttatagagctgcacaagtcaggttttgcccgcccggggcggacgtggaaattcaagggaattccagccaggcccatgaacccgtgcacccctccaacggaagtctggggcacccccctcggaatgggacgg

SEQ ID NO: 98641 - DNA, 661 bp, Homo Sapiens
tttacgcttactctgtgtaggggacagaaccggagtgagggagccaccatcccaaagacagcagggtgggaaaccaaggtttcagggattattgggatgtcatccagtaagtaggggtcaagggagtactggaagcctatgggggagggaaggtccaggtctgacaaagagggcagctccctgactccggatccgcaaccctgcccccatgcctccgggccacagtcactgctacctctgcaaactcacattctccagctgtttaaagccattttccagctgctgctgggcccgccgcccttcttggaagtgctacagaaagaagagtgataaggctcgccagggttccagcagaagccctttgtaaaacctgaatcggggggctcctcaccatcttcctctcctgtttcatctcttgtgagtacttggtcagctcaagacatacacggacactgaggttctcagccaccagctcccgctggcctgcaaagtcattcacctcctggagaatctgtacgaaggactgttgctggctgaatctggggttggatgagaatcggggaacagggagtcaggcccctcctcccgagcaggctgatgccccaggacgcacctccaggtggaaaagggttaagccccaagaatgtaatccttgaagcga

SEQ ID NO: 98642 - DNA, 955 bp, Homo Sapiens
  misc_feature (776)..(776): n is a, c, g, or t
  misc_feature (805)..(805): n is a, c, g, or t
  misc_feature (810)..(810): n is a, c, g, or t
  misc_feature (853)..(853): n is a, c, g, or t
atgactgaccttggctcttgcttaccttcttgccttaccacaagtgttagatgctaaccggtgctttgaaaagcagtccccctctgcattatctctccagctggcagcgtattactatagcctccagatctatgcccgattggccccatgtttcagggacaagtgccatcctctttacagggctgatcccaaagaactaatcaagatggtcaccaggcatgtgactcgacatgagcacgaagcctggcctgaagaccttatttcactgaccaagcagttacactgctacaatgaacgtctcctggatttcactcaggcgcagatccttcagggccttcggaagggtgtggacgtgcagcggtttactgcagatgaccagtataaaagggaaactatccttggtctggcagaaactctagaggaaagcgtctacagcattgctatttctctggcacaacgttacagtgtctcccgctgggaagtttttatgacccatttggagttcctcttcacggacagtggtttgtccacactagaaattgaaaatagagcccaagaccttcatctctttgagactttgaagactgatccagaagcctttcaccagcacatggtcaagtatatttaccctactattggtggctttgatcacgaaaggctgcagtattatttcactcttctggaaaactgtggctgtgcagatttggggaactgtgccattaaaccagaaacccacattcgactgctgaaaaaagttttaagggtgtttgcatcanggtcttaatttacaaaagctgacagatgnaaaancatgagtcctcttgaagccattggaagcccagttctttcaagntcaaaaatatccttgtctaatttccaaacttgttcccaaaatcccctggaaaagggatgggacagatggctttcccccaagctctctgtacacatcttgggg

SEQ ID NO: 98643 - DNA, 1254 bp, Homo Sapiens
  misc_feature (101)..(101): n is a, c, g, or t
  misc_feature (167)..(167): n is a, c, g, or t
  misc_feature (194)..(194): n is a, c, g, or t
  misc_feature (1120)..(1120): n is a, c, g, or t
cgggggtttccaggccccaaggttcaggaagccagggaattataaataaataaaattccaaaaaccgggccggagttgcctgggccagcccttccgggggnttttggggtcagtgctcagtgagtgacagttgcagaatcccgctgtaagtcctcctcctccctggntggccgcgccgcttcccgtccttctgnttccccgtgaagacaactccagggccaaggcgcagctgctcttcaagagctggggggacctgggggctgggggtgtcctggcgaggaggatcctgggcccctggcctctgtggacatgctgcaggctttcctgaagggcccgctccagctgaagctgttcctcataaaccgtggcctggggaggagggcgggcaccgggccgggtgttggtcagggcttcccagacggtcacctgctccgcctcagtgcccgcttcaagcaggctctgctggatggcgaactgcaggaggtcatcgtcctcgtcccggaggggctcgttgcgctccatgcccagcacgctgtacccgttgggcacttcaaacacggtggggtccacctcgcacgggaaagggttccctgatgcggcgacagcagagctgggggccggcacccacacggagctcaggggctcatcacagccacacaggttgctgaaggtgatgcgggcattgagcacgtggaaaaggggaatctcaattttgacggggaagccaggtggaaggcgcagagtgatgaagtcgcgcagcttggcaaagtgagcgttgctgatggccattaggtcgatgatgggggtcacctggtcacccagggagagcgggtgctcttcactcagccacagtgttgccttgaacctctgtactttgctggacatctcgatggggcggccaatgttccgtgactccaggctgaagttggggtcgaagtactcctcaggggagatggctgtggggttggtggggctggctgcctgctgcacggggggccccggtgtgggaggaatgctgctgcgccatccccaggaaggactggaatggagtcttccccgctttgctcctcgacttgtcctgatcagagaggtgctccgtgcgtgtgcgtgtcaccagctncacgttggtggcactgtacacctggggagcaggggacacggggagctgggggctcagagcctgctccccacactcagcctcaccagtgcagaacccagtccgccgtcccaaagcacaaaggatcctctagatga

SEQ ID NO: 98644 - DNA, 1259 bp, Homo Sapiens
  misc_feature (516)..(516): n is a, c, g, or t
  misc_feature (1160)..(1160): n is a, c, g, or t
  misc_feature (1192)..(1193): n is a, c, g, or t
  misc_feature (1226)..(1226): n is a, c, g, or t
ccatagtcggtgagagccccaaggggtacagcagcgaggagctgggccgttggaacaagccaacatggcctggaggccgcagagctgggaactgaggtgaccacatctgcatgggcaatggcccgagcagcgtaggagagctggggaacgcaccagccttgcccacccgtccgtcccccaccaccatgtccgaggtgagggtctgggagcccgtcagccatcaggagacggctcaacatgggtgacacggcaccagcgtacttatgtggctggcttaggcagcagcacgccctggagggacctgttttcttcctttcttcccaacagggctgcacgtgggaagagggaccaccacaaggaggccacagcagggctcaccccacaccgctgcacagagaggctcatccagcccatcctgctgaactgaagtgtacgcgttcatggccagcttgactcagggctgggaagctctgggccccccggaaggtccagcgctgatggacgggcccctgccancaacccttcatccctctgtggaccccggcccctagggacttccctttcgtccctctcctctccaccaccctctgcccctttggcagccccggtctttggcggccccagctcagctgcacgagggttccctgcatgctctgggcactgtcagcatgtcgggacctgctggtcttggcatcctcatggtctgacggaaccactccagggtgttggagtcccgaatccagctcaggctggaccttcctgcctctacttgacctccaggatggacgggttggtctccatgatggccacgatgatcctgtcgatgtagtcctgcaggcggaagttgatctcctcctgcttctgaatcgcctccatgagctcatctcgggagacggagctgatctctgcagccagggactcggagaaggctgtggagaagaggctcttggcgccctggatgctgagggtaatgatctgcccgttcagctcctcgttctgctccttcaggttgcggttgtcctgcttcagcctgcggacctcctgctccagctcgctctcccgggcgcggctgtggtactcctgcaggcccatgctgctgctgcggccccgccgctgctcggcctccagcttgaggagctgcaggtgcgacagctgctttncggaggtcctcgattccgaaaattccggaccnnggtacccagccctgctttttgacaacgaaaaanattttggtggagaaggagagtggggggggtggg

SEQ ID NO: 98645 - DNA, 1097 bp, Homo Sapiens
aatttccgggatattttcttgacatctgacccccagcaagagtaaggatcccagaggtcaaaacagtggtgagagccaagctgctcacagacacccacttgatgccacagccatgccatgaggcttcctcccagctgctctgctggcttgctgaagccagctctgagtcacagggttgccttggaccctcggctgtagggggcacctgtctggctccgggccctttgtcctggatacactgacagtaatgtgagcgcagcacttcagagttcaggcccagcaggtcctggcaagtgcattccacccgaacttttaacccaagcggtggggaaggaagccaaaactccaagctgcactttcttggggttctggccatgcacttcttagccttctctctgactttacaggacaaaaggtaccccacgccttcagaatcatgcttacctgcacggcagcatctgactggatggctggctaggtctcatccaccccaaattactgacccttgatttatgttgttactgctcacgttatgctcagatgcccctggttgcctgaaaatggtttaactgcaggcccttcacacaagtcacgtcaagcaagagagggctgggcctctaacccacaagagggcagatttgatggccaaaaaggcttcctggcattccacccccaggcccaagggaatcaaggggggtgcccagagaaggaatcctttaaagctgggagactgtacactggagggcttggatggggaaaagccatggggccagccatggtaactttcaacccctttaactcaccccaaaccccccttcgggaaaaatcctggaaatgggagcccttctaagcccttaacctgttaagcaatatcgggatacaccatggaaaaagcaaaaccctccccaacaacatggggaggcccttaaaaggggcggcagggctgaccctctttcgacgagcctttattcctttgcccccatatcagcgcaatctcgtcctatccatcggtcccccgcccatgatgatattgggcattccctctaaacatcctccttccccgcatagagtagcaaccaaaaccactctcaatatag

SEQ ID NO: 98646 - DNA, 984 bp, Homo Sapiens
  misc_feature (57)..(351): n is a, c, g, or t
  misc_feature (530)..(542): n is a, c, g, or t
  misc_feature (900)..(900): n is a, c, g, or t
tctttctaatctgttagcagttatctcccagaagtatccctagcatcctgaagcaannnnnnnnnnnnnnnnnnnnnnnnnnnnnnnnnnnnnnnnnnnnnnnnnnnnnnnnnnnnnnnnnnnnnnnnnnnnnnnnnnnnnnnnnnnnnnnnnnnnnnnnnnnnnnnnnnnnnnnnnnnnnnnnnnnnnnnnnnnnnnnnnnnnnnnnnnnnnnnnnnnnnnnnnnnnnnnnnnnnnnnnnnnnnnnnnnnnnnnnnnnnnnnnnnnnnnnnnnnnnnnnnnnnnnnnnnnnnnnnnnnnnnnnnnnnnnnnnnnnnnnnnnnnnnnnnnnnnnnnnnnnnnnnnnnnnnncaaacaaaccaaacaactgagagagggcatgctagtggagggaaaaggagagagtacaagagttgatactgcatcagagttccagggcagatactaacaagtgactgaactttgactgtgaagtcttcccatttatttttgaaatgggagtcgatgccttttgtacgttatcaaagtgnnnnnnnnnnnnncctcctttactcagacatagagcatcaaaatatcacgagtaaagccaaaccccagcttttcactggggctgatatcttcctccccatggcccactgccccctcatattccccagcacttggactgtgtcacatggggtattgattgtatacttgttgtcttggcctcatgcaaaaaggcctgggtctagatctagtcagatgagttttttttagagcatgttgatgatacaacacctgtttaaatgtctgccttatatgttatttggtcccactgttaataatagatttattactatgtatatttactattgaagatgggaatgtgatctgcatagttatcagtctattttgtatgtngtaaaaagcttctaatttaggtttaaggtgggctggctacaagagcactaaaactcctcaccttttaaactgctctttttatct

SEQ ID NO: 98647 - DNA, 945 bp, Homo Sapiens
ccaagtagcgggtcatggagtcccgaaccctcctcctgctgttctcgggagccgtggccctgatccagacctgggcagattacaattacaatcaaggcagaaatgatctcatttttacattacaactctggaaaaggcaatagactgagatgcaagtgtgcccccaagtgatgggcagaaggagagaaggtgttttggatgcattctagaacacaggtaatctaaggagagttgatcaaggccgtggaagagtcctccagccactattggccatcaaaggagtcctctgtgtcccaggaatggtcctgctttggtgtccctggtgtgacccatcacccgctgggaacagcctgagagaagtagggcctctgcaccaatgctgctgaggatgtcagagcacaggaacgaggccttgggaaattacctggaaatgcgactgaaatcttccttcctgaggggtctgggctcttggaaatcaaaccctctcaggttgggtggctggacgattctcctcacacttacaatgggacaaggggaaccaggaggcccccaaggggatccctgggttccacacgaactcctcctaccctcattgtgtgacagcagccatgcctcctcctggggatcaggatctattacctgtgcctggagagaaggggactcctcttctcacccgctggtctctggacacatactgtccaattcccctgtggcaagctgtacatgttgtaattcaactgggcactcatttgtcccccttttaagggtaaccctccctttagaaatcccgggaccttcctaccctgcagaggtgtggtcttggggacgaaaaagtgcaaaattcccggacaaggtgagttcgacggacatgggactatggggccacaattcacttacgacccctggagactgggaccacgtgtccttccatcggagcattaccga

SEQ ID NO: 98648 - DNA, 801 bp, Homo Sapiens
  misc_feature (255)..(265): n is a, c, g, or t
acgggccaggtaggatttccgggagaggctgctgtggaggctgaggaggcggcggcggagatctggaaacagtatctcacctccctaaactggttaatagtggcatggaagatccatttgaggaagcagaccagcccactacagagccaggcatggtcctggacagtgtggaagcaggagacacaacacctcctaccaaaaggaagagcaagttctcaggctttggcaagatcttcaagccctggaaatggaggnnnnnnnnnnngtagtgataaatttaaagagacttcagaagttttagaacggaaaatatctatgcgaaagccaagagaagagctggttaaaagaggggttctgttggaagaccctgagcaaggtggtgaggatccaggaaagccaagcgatgccatgttaaagaatggccataccacccccatagggaatgccagatcatctagtccagtccaagtagaggaagagccagtaagattagcaagtcttaggaaagctattccagaagaggacctaaagaaacgactaggctcaactggaagccagcctaattctgaagcagagtctgttcctgagaatgtacccaaaccacctttacttcctcccaaaagacccttgtcctcttctcatgaagcaagtgaaaggcaagcaaaaggatgccacttcctctggcgggcacgggcaagggttcatcattctccaccttccatcaccacaggcacccggctggccaccactggtggcccacaaagcccttgccaaaggaactggttaaatctcccccgggcc

SEQ ID NO: 98649 - DNA, 902 bp, Homo Sapiens
  misc_feature (627)..(627): n is a, c, g, or t
  misc_feature (630)..(630): n is a, c, g, or t
  misc_feature (633)..(633): n is a, c, g, or t
cgcgaggcctgggtggcgttctcagacgagggggccgccggcgccgcatccctctctacctgccaacatcctgtattagagaacttgtggccggaggtgtggctgtggagagctggccggggagggacgctgctcagctgctgctctgctcctgtctcctgtcccctcccccggtcatgacagagacccgtgagccagctgagactgggggctacgccagcttggaagaagatgatgaagacctttccccaggccccgagcattcctctgattcagaatacactctctcagagccggactccgaagaggaagaagatgaggaggaggaggaagaggagaccactgacgatcctgaatatgatcctggctacaaggtgaagcagcgccttggcgggggccgtggtggcccatcccgccgggccccccgtgcagcccagcccccggcccagccttgccagctctgtggccgctcaccccttggggaggccccaccgggaaccccaccctgcaggctctgctgccctgctacagccccccaggaagcaccagcccctgaaggcagggccctcggggaggaagaggaggaaccacctcgggctggggagggccgaccagctgggcgggagnagnagnagaaagagaaaagaagggaacctaccactgtacggaatgtgaggattccttcgacaacctgggggagctgcacgggcacttcatgctgcatgcccggggtgaggtgtaggcagagcccccatacggggagcttggcagaaggggtggggtgggaggagggggctgaggaaattggggttgtgacagtggtcatgggggatggggtactgccggtctgtgttgtcttagaagtagatgtgtgatggccagaataaaagccaaaatctgta

SEQ ID NO: 98650 - DNA, 1218 bp, Homo Sapiens
  misc_feature (1099)..(1160): n is a, c, g, or t
ggggccgtggagacagcggcagactggggctaggcaccagggagtcccacagctgcccccagcaggtgcccatgcccccaggacaggaagctcagcgagttgtatgtggtatcgattcctccatgatcctcactgtgcctggccaagccctagcctgtgggagcaacaggttcaacaagctgggcctggaccacctctccctgggggaggagcctgtcccccaccagcaagtggaggaggccctgagcttcacactactaggctctgcacccctggaccaggagcctctgctgagtatagacctgggcactgctcactcagctgctgtgactgcctcgggtgattgctacacttttggcagcaatcagcacggacagttgggcaccaatactcgccgaggcagtcgggcaccctgtaaggtccaaggccttgagggcatcaagatggcaatggtagcctgtggggatgccttcactgtagctattggggcagagagcgaagtgtactcttggggcaaaggggcgcgaggtcgattggggaggagggatgaggatgccggactccctcggccagtgcagttggatgagacacacccttacacggtgacttccgtgtcctgtttgcatggaaacaccctcctggctgttcgatcggtcacagatgagccggtccccccctgaagaaccccgattcacctctggacccaccctgaaattgcttctcctctgaatgctctgaaaaatgcaggggcccaaagcatgacttgcagctgtctcctggattgtgtcatcatggggtatcagggctggcaaaacccctgctctgcttttggccttggatatggaaacctcaaccactttgttctcctaccacctctttgcccttcctaccccttcctcccttcagtcagtgtccccagggtccagcctgggctagaagttagaagggcagacctagccctttgggaagcaggggtgggccttcccagagccctttgcccattaaaaaaggggctgaaaaggcaggccccgagggcggccaaggtgggggtttccagggccccctgggttaaattccccccgagccgaacctttttggnnnnnnnnnnnnnnnnnnnnnnnnnnnnnnnnnnnnnnnnnnnnnnnnnnnnnnnnnnnnnntctcccgggggaaaaattgcggaaaagaaaccccatttcccttggggggcttaaaagc

SEQ ID NO: 98651 - DNA, 989 bp, Homo Sapiens
cctgatggtggggccatacccatgtgtcgcctctcactctggcagcctcagaggccccttgctgctggctcccatctccctcccatttgcagaccaggaaggaagagcaagctgtacaaagggaagcagagcctggggtgggtgtgagcagggtgacccctcatctgaaaggcccaaaccagggggaagcaccagcctcagtgcagccccctcctgaccccacctagaatggaagcctccacctgcagccccaggcctccctcccccggggtctccacctcaggggagacttaggccagaggtgaacattcatgtgtaggaagaggccgctgcagggtggcatcttagggtaggggaagtgtgctgaggtgggccttccatgggcatggccgttgcctctctgccagccgctggtgcccaccagctggctctgcagcacattgccctgaggggcctgccactctcctgaggagcagcccacctgctgcccgtgaggagggggagaagggttagacaagcctggaggacaaaacagcgggagtgtgggggtgccatggtgttggaggggcaggcctttttgagccaatcccaccataatgtgaatatgccagtgactgctgcgctgtgctggtctctaggcctgaactaggtgctggcatgtctgggtcgtcttttgaaaagctcacttcaagctcaccctgctcctacctatcataaggtcttattcttgtgcactttatcttgggaccaaaactgcctacccaccccttcccgccctccccctgccagaggcctggtgccctggcccagcctgtggcctcagcatctcataactcatttgctttgtctcccggatgatttccgtcatgctcccaaatgcagcttcaggtgagccaaggggtctgctcctgtggcgggtgcagtggcaaaggatccagatagcctagggtgagggtgacagagggacagtgggctatgccacttaggcc

SEQ ID NO: 98652 - DNA, 1081 bp, Homo Sapiens
  misc_feature (821)..(821): n is a, c, g, or t
  misc_feature (1054)..(1054): n is a, c, g, or t
aggaagcgaggcctgggtggcgtttcggacgagggccatcagtgtgagaagagaaacatgacagagccaggtggagctggagagccagcattatggaaaaacaccagttctagcatggagccgactgcacccctggtgactcctccacccaaaggaggaggcgacatggctgtggtagtgtcaaaggaaggttcctgggagaaacctagtgatgacagctttcagaagtctgaagcccaggccatcccagagatgcccatgtttgaaatccccagtcctgacttcagttttcatgctgatgagtacctagaagtctacgtttctgcttctgagcaccctaaccacttctggatccagatcgttggctcccgcagcctgcaattggataagcttgtcaatgagatgacccagcactatgagaatagtgtgcctgaagacttgactgtgcatgtaggagacattgtagcagcacctttacctacaaatggttcctggtatcgagcccgggtcctcggcaccttggagaatgggaacttggacctctattttgttgactttggagataatggagattgcccactgaaggacctcagggctctcaggagtgacttcctaagccttccatttcaagcaatagaatgtagtctggcacggattgctccctcaggtgaccagtgggaagaggaagctttggatgagtttgatagactcactcattgtgctgactggaagcctctggtagccaagatctctagctatgtccagactgggatctcaacttggccaaagatctacttatatgatactagccaatgggaagnaaaacttgatattgggctagaattagtacacaaaggatacgcaattgagcttcctgaagacctagaagaaaaacgagctgtcccaaaacatgttgaaaggacatggcccacggaaacagatgccctctctcagcacgttgcctcactggagaccacaaaagagctctgggagagcattacacttacccttgttcctggcctcagctttatccagaagcctgcttttcatgtcngggtggatgaataaccctttggaaaag

SEQ ID NO: 98653 - DNA, 847 bp, Homo Sapiens
  misc_feature (765)..(765): n is a, c, g, or t
ggcctcagttaccggcactacagcatcagacccactgcaggggcccaagagggcacccaggagccggctgccactgtggcgagcacccttcaatttggccgcaggctgaggagacgcaccagccatgcgggcaggtacttggtgcctgtggcaaacgactgctacattgtgctgctcgaccaggataccaacctgatgcacagcatctgggagagacagagtaaccgaacggtgcgcgtgacccaggaattcctggagtaccacgtcaacggggatgtgaaacagggccccatttccgataactacctgttcacaccgggcaaggccgcggtgcctgcgtgggaagctgtggaaatggagattgtggcgggacagcttgtgactgagatccggcagtacttctacaggaacatgacagcacagaattacacgtatgcaatccgctcccggctcacccatgtgccgcagggccatgacggggagctgctctgccaccggatagagcaggagtaccaagccggccccctggagctgaaccgtgaggctgtcctgaggaccagcaccaacctaaacagccagcaggtcatctactcagacaacaacggctaccagatgcaccggaggccctacgtttcctatgtgaacaacagcatcgcccggaattaataccccatggttcagtcggccttcatggaggatggcaaaagcaggcttgtgttgctgtcggagcgggcacatggcatctccagaccaaggggaatgggncaggtgggaggtcatgctccaccggcggctgtggaacaacttcgactgggacctgggatacaacctaacgcagaacggaact

SEQ ID NO: 98654 - DNA, 953 bp, Homo Sapiens
  misc_feature (898)..(898): n is a, c, g, or t
gagaaggtggagggagacgagaagccgccgagagccgactaccctccgggcccagtctgtctgtccgtggtggatctaagaaactagaatgaaccgaagcattcctgtggaggttgatgaatcagaaccatacccaagtcagttgctgaaaccaatcccagaatattccccggaagaggaatcagaaccacctggctccaaatataaggaacatggcacccaacagcttgtctgcacccacaatgcttcacaattcctccggagacttttctcaagctcactcaaccctgaaacttgcaaatcaccagcggcctgtatcccggcaggtcacctgcctgcgcactcaagttctggaggacagtgaagacagtttctgcaggagacacccaggcctgggcaaagctttcccttctgggtgctctgcagtcagcgagcctgcgtctgagtctgtggttggagccctccctgcagagcatcagttttcatttatggaaaaacgtaatcaatggctggtatctcagctttcagcggcttctcctgacactggccatgactcagacaaatcagaccaaagtttacctaatgcctcagcagactccttgggcggtagccaggagatggtgcaacggccccagcctcacaggaaccgagcaggcctggatctgccaaccatagacacgggatatgattcccagccccaggatgtcctgggcatcaggcagctggaaaggcccctgcccctcacccccgtgtgttaccccccaggacctccccagaactctcaagtccaggggagttccctccagtttgaaccctcagaggtatccagcatgtgcacagatgctggcctccaatctttcccccatgctccatgggactatcattacatttgtcctgngaagtcccgatcacaagtgccatatgggcatgactaccctcgagcaggctaaccg

SEQ ID NO: 98655 - DNA, 1083 bp, Homo Sapiens
acccctagagctgtcccccagcaatcccaagggactagagggctgcaatggactgacctccccctcaccagggtggcaggagaggcagagcctctgtggcctagctagtgacggagagacccgatgaagccctaagcaggggccccgcctgactcagggacaggacagccactcctgccaacgtgtgttctccctacatgagggagggcgtggcaagggacccctgccactgtcccctgctgcagcacgtgcccctatgccctttgcatgtggtgccagaataggcaggctacgccgtggctggcccctcagcgggctgggaaaagagtggccacggtgaccgtcacccgcctgccggcaccatgaagtgctccctgcgggtgtggttcctctccgtggccttcctgctggtgttcatcatgtccctgctcttcacctactcgcaccacagcatggccacgctcccctacctggactcaggggccctggatgggacgcaccgggtgaagctggtgcccggctatgccggcctgcagcgcctcagcaaggagaggctctcgggcaagagctgtgcctgtcgccgctgcatgggcgatgccggtgcctccgactggtttgacagccactttgacggtaacatttcccccgtctggacccgagagaacatggatcttccaccggacgtccagaggtggtggatgatgctgcagccccagttcaagtcacacaacaccaatgaggtgctggagaagctgttccagatagtgcctggcgagaacccctaccgcttccgggacccccaccagtgccggcgctgtgccgtggtggggaactcgggcaacctgcggggctctggctatgggcaggacgtggacgggcacaacttcatcatgaggatgaatcaggcgccaaccgtgggctttgagcaggatgttggcagccgaaccacccaccatttcatgtaccctgagagtgccaagaacctgcccgccaacgtcagcttcgtgctggtgcccttcaaggtcctggacccttctgtggatcgccagcgccttgtccacggggcagatccgattcacctac

SEQ ID NO: 98656 - DNA, 808 bp, Homo Sapiens
ccgggagcgcgctgcccgaggccggggggcggtggggacagcacatggcggggcggccgaatccgagaccttcccaccccgccccacgcctggttggggacctgacgcgccgtcgtgagtggggcgggtgcaggtgtccctggggggccgggggcagacactggtgctgggacgacctgctcccgagggggtccgcatggccacacccagagaaactggggcgcctccagtcacctgccgctggtccgccccgcctggaggctttgaccccctgaatcagcgtcggggcagggatccgcgtggggtggaagaggctgggaaacttgggagtcccgggcctcctctggagccgcccgcccttggctggctggtccgttctcttcctcggctcccgccgggctgggccctgggccgccctcactccctcccctctgcagcctcccttgcgtttgtcattcactctgccaggctctccttctgcctccgcatgcccaacgatccggagaaaaacacggaccatgacatcaaaaggcctttggccaaggaatcgtgattattgtgatacaagattctgcacctcaaaggggatcccttgtagtgagtttcggaaaacgtacaaagcctgacttacaatatgcctgttatctgtggcgttcatctggggaacttacttttccttgatagggtacactattctcatccagagtatgtccctcagtctggtacaaagtccatggttgccctacatctattagcgggaagtgaggaagggcagtgggcattggatcttgcttcttttgaaaagccc

SEQ ID NO: 98657 - DNA, 1056 bp, Homo Sapiens
gtccccggtaaactgcagtttctggttcgagactccaatcctgtttcgaattgctgcttgctgccccttgggctggggataatggaagttctttcccttcccaactctttccagacccaagcactctgggactcactccatagtccaggagttccaggttccggattatgttccatggcagcagtccaagcaggaaaccaagccatctactctgcctccagtccaacaagccaacagccttcatacaagcaaaatgaagactttgactagggtccaaccagtgtttcacttcaagcccactacggtggtgacaagctgccagccgaagaatccaagagaactacatagaaggcggaagttggaccctgggaagatgcatgccaaaatctggttaatgaagacgtcgctcaggagcgggagggccgctctgcgagagctccgaagccgtgagaacttcctcagcaagctcaaccgggagctgatcgagaccatccaggagatggagaacagcacgaccctgcacgtgcgggccctgctgcagcagcaggacaccttggcgaccatcatcgacatcttggagtactcaaacaagaagaggctgcagcaattgaaatctgagcttcaggagtgggaagaaaagaagaaatgcaagatgagctatcttgagcagcaggcagagcagctgaatgccaagattgagaagacccaggaggaagtgaacttcctgagcacttacatggaccatgagtattccatcaagtctgtccagatctccactcttatgcgccagctgcagcaggttaaggacagccagcaggatgagcctggatgacctcggtgagatgcgcagaaaaggccctggaatccttggtccgacagatccgaagaagaagaaaaaattcttgagtttggtgggggccggaaaccaacggtccctatgaaaaaggtctccctacaaaaaatgggggaaaaggccacgaacatccttgaaatggcaggaaaaggttcacaaaaaaagggccttggggcaaaggaaaggggtttggtgcccttgaa

SEQ ID NO: 98658 - DNA, 852 bp, Homo Sapiens
gtcatccagcttcatcctgctgctgtccttaacctgctgcaagctggcgcataagagtggaagatctggacagacttgatggaatactcatggtccatggtaagtgctcaggaagttcacttcctcctgggtcttctcaatcttggcattcagctgctctgcctgctgctcaagatagctcatcttgcatttcttctgtgttcttcccactcctgaagctcagatttcaattgctgcagcctcttcttgtttgagtactccaagatgtcgatgatggtcgccagggtgtcctgctgctgcagcagggcccgcacgtgcagggtcgtgctgttctccatctcctggatggtctcgatcagctcccggttgagcttgctgaggaagttctcacggcttcggagctctcgcagagcggccctcccgctcctgagcgacgtcttcattaaccagattttggcatgcatcttcccagggtccaacttccgccttctatgtagttctcttggattcttcggctggcagcttgtcaccaccgtagtgggcttgaagtgaaacactggttggaccctagtcaaagtcttcattttgcttgtatgaaggctgttggcttgttggactggaggcagagtagatggcttggtttcctgcttggactgctgccatggaacataatccggaacctggaactcctggactatggagtgagtcccagagtgcttgggtttttgtaagacatgcgccattggggaaaatggaagagaagttgcgagtctgtgagaccctgatcttcctggtataactactcggcttttccaacttccttgtctcagtgtagatcgcgcggtaacccag

SEQ ID NO: 98659 - DNA, 1148 bp, Homo Sapiens
gaccgctttaagccggagcgaggccaccgaggagggcggcaaccaacaaatgcacagaagagacagcttctctgaacagtcctgtgtgcctgcaaagagaaaccagacagagttgaggagcccccggcactacagtctgcactggccagaaggcttgaagggtgaagagataaagaagtgtggccgagaagggataacactgaataaatacaaccagcaataccacaagctgtttaaggatgttcccttggaggaagtggttctcaaagtgtgttcctgtgccctccagagggacttcctcctccagggccggctctacatctcccccaactggctctgcttccatgccagcctctttggcaaggatatcaaggtggtcattcctgtggtgtctgtgcaaatgatcaaaaaacacaagatggcacggctccttcccaatggactggccatcaccaccaacaccagccagaagtatatctttgtgtcactgctctcccgggacagtgtatatgacctgctgaggagagtctgcacccacctacagccttccagcaagaagagtctgagtgtaagagaattttcaggggaacctgagtctctggaagtcctcatccctgagatgaagtggagaaaggtatgcccttcctccaggtccctgtctctcccagacaacatcccttgtatccctccatcatccgtggactccacagacagtttcttcccctccaggaagctccaatgtctgaaaagtcaagaggccaagtagcttcagaaaatggtggggaggtgggccatgggccatgccaaggctggggtccctgcatagacacaaagaagattgcgaactggtctcccactgcaaagaatgctgtctattgaaaggacggcatgagcctgggagggaaggagacacaaggaagcactgggggaaacctgaagggccaggaggactttaccggggatcatgaagagccttcattgatgccgagatctgggttcatgagacagatctcataatcgaaaccgtgacgtcggcatacagccgagaaagacacgagaaatatgatacatcgagattgggaaagaacacaacccggggcaccggcgaaacacacatgccatatgtcccacatctcttccaaaaacaa

SEQ ID NO: 98660 - DNA, 1118 bp, Homo Sapiens
ccagtcctgccgcccggtaacaaaaccggggttcccgccacacgcacccggtagggctcaggacgctttatcggcgacaatggctggctgaatgggaggcctgaggtcctgaaggaaccgggggtgctggcgaccgggacctcgaggccgctgctggggaggacgctggccagcgtgcagggggcggaggcggggcgtgccgggaggctcccatctcccgccccgcacaacccgggcagggccgccgctccgccgccgccgcagatccggctctcaccctcggctcccgaggccccgcggcgcctccttctgcggactctgcgggaccctccccggcaggcgctgtgccctggagaaggcacagtggctcaggcatggccgcggggacggcggcgcggaaggcagcgccggtgctggaggcccccccgcagcaggagcagctctctcatacaaagctttctgcagaagacacatggaacctgcagcaggagaggatgtacaagatgcaccggggccacgattccatgcacgtggaaatgatcttgatcttcctctgcgttctggtcattgcccagatagtgctggttcagtggagacagaggcatggccgatcctacaatctggtgaccttgttgcagatgtgggttgtccccttatatttcacgataaaattatactggtggcggtttctgtctatgtgggggatgttctccgttattaccagttacatcctcttcagagctacccgaaaacccctctcaggaaggacaccacgattggtctacaaatggtttcttttgatctacaaactcagctatgcatttggtgttgtgggttacttggcgatcatgtttacaatgtgtggattcaatctgtttttcaaaatcaaagctagagattccatggattttggcattgtgtctttgttctacggcctctactatggagtaatggggagagactttgccgagatctgctcagactacatggcttccactatagggttctacagtgtcagccggttgcctacaaggagcttatcggacaatatctgtgcagtctgtgggcagaagatcattgtggagcttgatgaagaagggctcattgaaaacacctac

SEQ ID NO: 98661 - DNA, 941 bp, Homo Sapiens
agaggtccctggaaaggcacctctgtctgtgctgcaggaacaccatccggaaagctagcttgcacccccaggctctcccccagagataagccctgggtggtgggtatgcagtccagtggtattctgggggcgtgccgctggtgacggggtacaccacctacgacgcgcaccattcagcattctcccagatggtgatcagcttctactatgggggcaagctggtgggccaggccaccaccacctgccccgagggctgccgcctgtccctgagccagcctgggctgcccggcaccaagctgtatgggcccgagggcctggagctggtgcgcttcccgccggccgacgccatccccagcgagcgacagaggcaggtgacgcggaagctgttcgggcacctggagcgcggggtgctgctgcacagcagccggcagggcgtgttcgtcaagcggctgtgccagggccgcgtgttctgcagcggcaacgccgtggtgtgcaaaggcaggcccaacaagctggagcgtgatgaggtggtccaggtcttcgacaccagccagttcttccgagagctgcagcagttctataacagccagggccggcttcctgacggcagggttggtgctgtgcttcggggaagagttccggatatggccaccttgcgctccaaactcattctcgtgcagattgaggcagctgtatgtccggcaacttggcagaagaggctgggaagagctgtggagccggctctgtgattgcaggccccgaaggagccgcgcagaacagggtcttccggatgtttccagattattggtgcctcaagccagagatcattttcagagcaaaccaacagatacccgtctaagtgggtcgttgggcgcccaaacccgataggcgtctggattcatctccgtgtaaggggccgcatatgattaagatgtgatcca

SEQ ID NO: 98662 - DNA, 839 bp, Homo Sapiens
cacccttggagttgctcaggtgtctggaatgcacaatgccagcaaagcatttttatttcaagacatagaaagagagatccatgcagctcctcatgtgagtgagaaattaattcagctgttccggaacaagagtgaattcaccattttggccactgtacagcagaagccatctacttcaggagtgatactgtccattcgagaactggagcacagctattttgaactggagagcagtggcctgagggatgagattcggtatcactacatacacaatgggaagccaaggacagaggcacttccttaccgcatggcagatggacaatggcacaaggttgcactgtcagttagcgcctctcatctcctgctccatgtcgactgtaacaggatttatgagcgtgtgatagaccctccagataccaaccttcccccaggaatcaatttatggcttggccagcgcaaccaaaagcatggcttattcaaagggatcatccaagatgggaagatcatctttatgccgaatggatatataacacagtgtccaaatctaaatcacacttgcccaacctgcagtgatttcttaagcctggtgcaaggaataatggatttacaagagcttttggccaagatgactgcaaaactaaattatgcagagacaagacttagtcaattggaaaactgtcattgtgagaagacttgtcaagtgagtggactgctctatcgagatcaagactcttgggtagatggtgaccattgcaggaactgcacttgccaaaagtggtgccgtggaatgccgaaggatgtccctgtccccctctcaattgctcccagattccctccaa

SEQ ID NO: 98663 - DNA, 1029 bp, Homo Sapiens
cacgacttggagttacggtttatctgataccccggtacccctacgcaagcaagcccacatcgacacacattcacacacgcccttcagcaccccctcccagcaccacgaccatggacgacgactatgaagcgtaccacagtctgttcttgtcgctgctcggactctgcccgtctaagactcccatcaatgaaaatgctcccgtctttgatcctgaaccggtcattgcccactgcttcaagcagttccagcagaaggacttccgcctgcctcagacccgccggcgaatcatcatggtgcctcgcaaggaggatcagacaccccttaatcctgcatcccaacctcaggctcccccaaagcccatccccagcttcaaagttctggaagctagagatatccaagagcagccagaggacaggaagacctggctgagccagaggtcgaagctgcggcaggagctagagtcctttggtgatgtaaagaggtggctggagaacaagcccagcatcacgccttcagaggccaaggtcttacacatgatccacgaggagcagagtgcccagccaaatgcctcccaggcaactaccaggaccaccaggaagaaagcccccaggctctcccggctgtcccgccagatggtgccccagctccagctgcccgagccccctgccctgtcggtcatgtactcctacctgcatagccgcaagatcaagatcctggagatatttcccaaggtgggccagggtgagaaccagagaatcaccagggaggacgtcatcgccggctgtaaaggcagtcggagtccctctgaagaaccaagcaggtggacggatatagttgatctacctcaaactctcttgggaaagcacaaacaccatcacccatggataatcctggccaatacctacaagcagggtcctatggctccagccaaaggagcagcctggccactgtcaggagcattatatctcggccaagcacagagatccctgaagggtccgctccaagaagccggaggttggattcacgccc

SEQ ID NO: 98664 - DNA, 730 bp, Homo Sapiens
ggccaagggctgctggccaacgcagtcatcttcctgtgtgggaacctgacaggcgccttccacaagcaccaaatgcaggatgcgtcccgggacctcttcacctacactgtgaagtgcatccagatccgccggaagctgcgcatcgagaagcgccagcaggagaacctgctgctgtcagtgcttccggcccacatctccatgggcatgaagctggccatcatcgaacggctcaaggagcatggtgaccgtcgctgcatgcctgacaacaacttccacagcctctacgtcaagaggcaccagaatgtcagcatcctctatgcggacatcgtgggcttcacgcagctggccagcgactgttctcccaaggagctggtggtggtgctgaatgagctctttggcaagttcgaccagatcgccaaggccaacgagtgcatgcgaatcaagatcctcggcgactgctactactgtgtatcgggcctgcccgtgtcgctgcctacccacgcccggaactgcgtgaagatggggctggacatgtgccaggccatcaagcaggtgcgggaggccacgggcgtggacatcaacatgcgtgtgggcatacactcggggaatgtgctgtgcggggtcatcgggctgcgcaagtggcagtatgacgtgtggtcccacgacgtgtccctggccaaccggatggaggcagccggagtacccggccgggtgcacatcacggaggcca

SEQ ID NO: 98665 - DNA, 832 bp, Homo Sapiens
tgcaggaggtggagcggcagagaactcgagcctgggccaggagcagcctgaagccccaagcaggtcctggggaaagttgctctggagctggttctgtgggctctctggaacaccggagcaggccctgagcccagcagagaaggctgcgctagaacagaagctgacaagcattgaggaggagccactctggagacatgtctgcaacatcaatgctgtccttttgctggccatcaacatcttcctctggggctattttgcgtgattccacagacctggcttcagtgtagacagattaaacaaagcccaagcctgtcagccacagaaacaggctctcctcttactttgctgtctaaactggagatcacagaagtcaagactgcaagctcccctgaagagaatccaactcaacctgcacacttgacaagtggagaaacagaagctcagagagagcactgggtttgttcaggaccacccagaaggtgtcacacggggtttccccactctttctgatatattgccttacagacctacctcaaacacactgtttccaccctcttcttgaatgtattcagtagcctttactgaatgtgtgtcttgagagtagaaaaatggaggatacaagaaacaggagcaggaagaaatttgcaaatccaagagcacctttgctcccccttatcctccttcctcttcccctttctagttcccctacctctctatctttctattctcaccaataatctctttgttgcatgaatttacccaggagagtcctatatttccattggtggctccacagtggtggctgtcagacccgaaggggtggggagccaag

SEQ ID NO: 98666 - DNA, 542 bp, Homo Sapiens
ggttgggcagggtttccaaatctcagcggaacatttcgcgcctcccttcccctgggctcagctaggcctgggcctttgctgaggtccggcccccgtggcgtccgggagagggcagtgtctgggagggtgactctggcccggtgccctgggacactctttcttcccctatccccgcagaccgtattctccgagatgcgccaggagtgcaagtgccacgggatgtccggctcatgcacggtgcgcacgtgctggatgcggctgcccacgctgcgcgccgtgggcgatgtgctgcgcgaccgcttcgacggcgcctcgcgcgtcctgtacggcaaccgcggcagcaaccgcgcttcgcgggcggagctgctgcgcctggagccggaagacccggcccacaaaccgccctccccccacgacctcgtctacttcgagaaatcgcccaacttctgcacgtacagcggacgcctgggcacagcaggcacggcagggcgcgcctgtaacagctcgtcgcccgcgctggacggctgcgagctgctctgctg

SEQ ID NO: 98667 - DNA, 799 bp, Homo Sapiens
cgggattggtgctaccccctgtgaacagccaagcagcagggcacgcctggctttccttggatacccactgtcacctgcactatgaagtgctgctggctgggcttggtggctcagaacaaggcactgtcactgcccacctccttgggcctcctggaacgccagggcctcggcggctgctgaagggattctatggctcagaggcccagggtgtggtgaaggacctggagccggaactgctgcggcacctggcaaaaggcatggcctccctgatgatcaccaccaagggtagccccagaggggagctccgagggcaggtgcacatagccaaccaatgtgaggttggcggactgcgcctggaggcggccggggccgagggggtgcgggcgctgggggctccggatacagcctctgctgcgccgcctgtggtgcctggtctcccggccctagcgcccgccaaacctggtggtcctgggcggccccgagaccccaacacatgcttcttcgaggggcagcagcgcccccacggggctcgctgggcgcccaactacgacccgctctgctcactctgcacctgccagagacgaacggtgatctgtgacccggtggtgtgcccaccgcccagctgcccacacccggtgcaggctcccgaccagtgctgccctgtttgccctgagaaacaagatgtcagagacttgccagggctgccaaggagccgggacccaggagagggctgctattttgatgggtgaccggagctggcgggcagcgggtacgcgggtggcaccccgttgtgccccca

SEQ ID NO: 98668 - DNA, 820 bp, Homo Sapiens
ggggctgagagttcacctgtctcaggaaccacctgagcccacagatcctgtgggcagcggccagggcagccatggcttgggcaagtaggctgggcctgctgctggcactgctgctgcccgtggtcggtgcctccacgccaggcaccgtggtccgactcaacaaggcagcattgagctacgtgtctgaaattgggaaagcccctctccagcgggccctgcaggtcactgtccctcatttcctggactggagtggagaggcgcttcagcccaccaggatccggattctgaatgtccatgtgccccgcctccacctgaaattcattgctggtttcggagtgcgcctgctggcagcagctaattttactttcaaggtctttcgcgccccagagcccctggagctgacgctgcctgtggaactgctggctgacacccgcgtgacccagagctccatcaggacccctgtggtcagcatctctgcctgctctttattctcgggccacgccaacgagtttgatggcagtaacagcacctcccacgcgctgctggtcctggtgcagaagcacattaaacgctgtcttgagtaacaagctgtgcctgagcatctccaacctggtgcagggtgtcaatgtccacctgggcaccttaatttggctcaaccccgtgggtcctgagtcccagatccgctattccatggtcagtgtgcccactgtcaccagtgactacatttccctggaagtcaatgctgttctcttcctgctgggcaagccatcatcctgccacggatgccaccccttttgtgttgccaaggcatgtgggtacg

SEQ ID NO: 98669 - DNA, 926 bp, Homo Sapiens
tctctgggtttctttgccttgagtctcccggggctgtgagaagccaggcgcatctcaaaccgagctggcagctccaggctccggagccatgccctgcacggaccctcgtctttaccacgctcctgaggaatgaaaggaacccaggaccctcagaaggcagcagtgatgcggaccaaccccccggagcctgcacccttccgagggccataggcgacccagggaactggagagagctccagaaaggaaatcccagctttcccaaagtccctgtggatgctgacaaaaggagacctgaatttttggaagagcctgtactaggttacccggctgcagagtgattttcccctccggcactgactctccccctccaacccccagccgtccagagtaccatgaagaattatgaggatgtgtgacagaggtatccagatgttgatcaccactgtaggagcctttgccgcttttagtttaatgaccattgcagtgggcacggactactggttatattccagaggtgtgtgcaggactaaatctacaagtgataatgaaaccagcaggaagaatgaagaagtaatgacccattcggggctgtggaggacctgctgcctagaaggggctttccgaggcgtgtgcaagaaaatcgatcacttccctgaagatgctgactacgaacaggacacagccgaatatctcctgcgagctgtgagggcctccagtgtcttcccccatcctcagtgtcacgctgctgttcttcggcgggctctgcgtggcagccagtgagttccaccgcagcagacacaagcgtcattctcagcgcgggcattctttatgtctctgcagggttaagcaacatcattggcatcatagttgatatatcacgcaacgccggagacccggggcagcgtgactccaaaaaggttactcgt

SEQ ID NO: 98670 - DNA, 851 bp, Homo Sapiens
gctgtgtggatgcggcgaaacgctgaggcgcggccttcgctgtgtggtggggactcacaagaccgacgtcaagatgatgctttcaagggccaaacctgctgtaggcagaggcgtacagcacactgacaaaagaaagaagaaaggtaggaagattccaaaactagaggagctactttcaaaaagagatttcactggagctattaccctgttggagttcaaacgtcatgttggggaagaagaagaggatactaatttgtggattggatattgtgcctttcacctgggtgactacaagagagctctggaggaatacgaaaatgctacaaaagaggaaaattgtaattctgaagtctgggtgaacctagcttgcacctacttctttcttgggatgtataaacaagctgaagcagctggatttaaagcttcaaaaagccgactccaaaaccgcctcctcttccacttggctcacaagtttaatgatgagaaaaaattgatgagctttcatcaaaatcttcaggatgtcacagaagatcaactcagtttggcctcaatccactatatgcgatctcactaccaagaagctatagatatatataagcgaatactgctagataacagggaataccttgcccttaatgtttatgtggccctctgctactacaagttggattactatgatgtgtctcaagaagttttggctgtttaccttcagcaaattcctgatagtaccatcgcactcaatcttaaagcctgtaaccattttcgcctttacaatggcagagcagctgaggcagaactcaaaagcttgatgggacaatgcgttctttcatcctttgactttgctaaggaag

SEQ ID NO: 98671 - DNA, 1002 bp, Homo Sapiens
ctctgtctggcttcctagaggagcaggagggatgagcaagggtctcccagcgcgacaggacatggagaaagagcgagagactctgcaggcctggaaggagcgcgtggggcaggagctggaccgcgtggtggctttctggatggagcactcccacgaccaggagcacgggggcttcttcacgtgccttggccgcgaggggcgggtgtatgatgacctcaagtatgtgtggctgcaggggaggcaggtatggatgtattgtcgcctgtaccgcactttcgagcgcttccgccatgctcagcttctggacgcagcaaaagcaggtggtgagttcttgctgcggtatgcccgggtggcacctcctggcaagaagtgtgcctttgtgctgactcgggacggccgcccggtcaaggtgcagcgaaccatcttcagtgagtgtttctacaccatggccatgaacgagctgtggagagccacaggggaagtgcggtaccagacggaagcggtggagatgatggatcagatcgtccactgggtgcaggaggacgcgtcgggactgggccggccccagctccagggggccccggctgcggagcccatggcggtgccatgatgctactgaacctggtggagcagctcggggaggcagatgaggagctggcgggcaaatacgcagagctgggggactggtgcgcccggaggattctgcgcacgtgccgcacgggactggacaagccgtgctggagcaatgtgtccgagggtggccaggcacctccctggctgcctgggggagacagcggaacccagggcacacgctggaagcccggctgggtttctgctccgtccactggcaatccggcacaggcgacccccgaaatttcgagccccagctgactgcccacgttcctcattgttgcccttccactccgcgatgcgaccctgtacgacggaaggcctcctttacctcccaagatggctgataactttcgcccacccagctggcgt

SEQ ID NO: 98672 - DNA, 907 bp, Homo Sapiens
tgatcgcgctcacctgggcactctccgctgtcatctctctggccccgctgctttttggctggggagagacgtactctgagggcagcgaggagtgccaggtaagccgcgagccttcctacgccgtgttctccaccgtaggcgccttctacctgccgctctgtgtggtgctcttcgtgtactggaagatctacaaggctgccaagttccgcgtgggctccaggaagaccaatagcgtctcacccatatccgaagctgtggaggtgaaggactctgccaaacagccccagatggtgttcacggtccgccacgccaccgtcaccttccagccagaaggggacacgtggcgggagcagaaggagcagcgggccgccctcatggtgggcatcctcattggcgtgttcgtgctctgctggatccccttctttctcaccgagctcatcagtcccctctgctcctgtgacatccccgccatctggaaaagcatcttcctgtggcttggctactccaactccttctttaaccccctgatctatacggctttcaacgaagaactacaacagcgccttcaagaacttcttttctaggcaacactgagggagaggaccaggattgaacaaaagtttcttcccataattcagtggaattcccagttcatccatttcccatccccaccaacagccatgtggacgggatgaatcctcaccattctccaggtcatcttcagaactgcactggccgcttgccacctcctcagtaggaatatgactcttcatagaagcacggtgacatgatgtatctaagcttatctactatccctttctctgtgctggccagtcatgggcttggccgcaagtgtccttcctcccaaaattcactctggcatggtgatcgaaatgtctacaagaaa

SEQ ID NO: 98673 - DNA, 874 bp, Homo Sapiens
cagcggggcaggctggcctttacctcctggaagagctccagactataggtgttgtcgtcgtcagcgaagaagagcacgccgggctgcgcgcgctggtgctggtgcctctggcgcagccaggcgaggcccgcgttgcgctgctcagtggcgcgcggcagcccgggccgcttgtagcgccgcggcgtgggcacgtgcaggtgagtgctgggcagcccggcccgcgccaggaagcggctcaccagctcgctgcgcgccgccgcgtcctccaccaggatccagtgcagctgcgccacctggcggaacgtgttggccaggcgggtcagctccgctttctgcaccgggcggctgtaggtgggcgtgatggcatagatggtgggcagctgcggctccggctgtggctgcggccgagactggttgcgcttttgggtcccgtgagccgggccgcccctgcggagcgggagtcgggcacccccgcggcccaccgcgtagggacgagaagtaggggcgcggggtgagcgggggcactggccctgcgcgtgtccacgtcgagcatgatgcatgacacttaggatccaggggcaggaggataaagaagcgggtgcaaaagcgcggacttcatggtgcacgctccccggcctctcggaaaccccagagagggggcgagccgaggaccaccagtggcgcagcttggaacacgcggcgggcgcaagcacttacgaagtgcgtgactgggtgcgacggtacaatggggccgagtgacgctgaacagacctgggagccgacgaggggatcaatacccggggcgtgaaagagcggcaagatccggcaagctacaaacgaaccagggtgcagcgagcgagacaggggttgcccg

SEQ ID NO: 98674 - DNA, 883 bp, Homo Sapiens
  misc_feature (553)..(570): n is a, c, g, or t
gggatcctgctccaaatgtcttccgtagataatgcaatgcgcacatacgccttccggctctttgtggtaccccccgggagctccaggccacaacactggcacccagtaatccttcaggtcccaaagagttcttcccacttgcctggcgcgaaatctccaatgctcacttcccgggacatgaagaccggaagttttcatctactctttcatctacaatgtggtccttctgatgaacccagttcgctagtacacttgaaatagatctgggtgccagggcttgctttaccagtacaggttcacaggcttattcttcacaatataagcttcttcaggctcaataaggaaatgtggcagaggctcaggtggatcagaaggaaaagtttctgggagttcatgaaaaaagtcatcatcttgggcggcggagccagtgccgctggcgctgagcagggccagggcaggtagcacgagcatttgcagcaagtatcccagtcccagtccgcagcgggccgctgtcgcccgcagacctttcctcatcgtagacagaggtgtgccnnnnnnnnnnnnnnnnnncagagagacgcgcaaacagctgaaagccccactgggcagaagctgaatccgtgcaccgcgaagcagtccgaagaaataacgacaaccaagcgccacactccactttctccaaaggcaggggccaaaagggggaggagaggagacgccgaggaggagtttgaaggtccctctttcccaatgccttctaactgacgtctcccgcgagcgactgctctgcccccacttgggaagtccagggaggcgcaaggcggccacctccgccgctccccccagcagcaggagcagccgcagctccgccgcacgccgaagtctg

SEQ ID NO: 98675 - DNA, 721 bp, Homo Sapiens
cactgccacacgcagctcaacctgagctacacagccagatgcgagatgcttctctgctgatctgagtctgcctgcagcatggaccttggtcttccctgaagcatctccagggctggagggacgactgccatgggctgagtctgggcccccggacccacgtgcaggcagggaccctccccaagcccacactctgggctgagccaggctctgtgatcacccaggggagtcccgtgaccctctggtgtcaggggatcctggagacccaggagtaccgtctgtatagagaaaagaaaacagcaccctggattacacggatcccacaggagattgtgaagaagggccagttccccatcccgtccatcacctgggaacacaccgggcggtatcgctgtttctacggtagccacactgcaggctggtcagagcccagtgaccccctggagctggtggtgacaggagcctacatcaaacccaccctctcggctctacccagccctgtggtgacctcaggagggaacgtgaccctccattgtgtctcacaggtggcatttggcagcttcattctgtgtaaggaaggagaagatgaacacccacaatgcctgaactcacagccccgtacccatgggtggtcccgggccatcttctctgtgggccccgtgagcccgagtcgcaggtggtcgtacaggtgctatgcttatgactcgaactctccccaggtgtg

SEQ ID NO: 98676 - DNA, 797 bp, Homo Sapiens
tgcatttctcctctgtgctcactgccacacacagctcaacctggacagcacagccagaggcgagatgcttctctgctgatctgagtctgcctgcagcatggacctgggtcttccctgaagcatctccagggctggagggacgactgccatgcaccgagggctcatccatccgcagagcagggcagtgggaggagacgccatgacccccatcgtcacagtcctgatctgtctcgggctgagtctgggccccaggacccgcgtgcagacagggaccatccccaagcccaccctgtgggctgagccagactctgtgatcacccaggggagtcccgtcaccctcagttgtcaggggagccttgaagcccaggagtaccgtctatatagggagaaaaaatcagcatcttggattacacggatacgaccagagcttgtgaagaacggccagttccacatcccatccatcacctgggaacacacagggcgatatggctgtcagtattacagccgcgctcggtggtctgagctcagtgaccccctggtgctggtgatgacaggagcctacccaaaagccaccctctcagcccagcccagccctgtggtgacctcaggaggaagggtgacccatccagttgtgagtcacaggtggcattaggcggcttcattctgtgtaaggaaggagaagatgaacaccacaatgcctgaactcccagggcccatgcccgggggacgcccgcgccatacttcaccgtgggcccggggacccgaatcagaagtggcgcacaggtgctatggtatga

SEQ ID NO: 98677 - DNA, 815 bp, Homo Sapiens
ccagattgggtctggtacatgagtcagaacatgttgccccggtgaattccttgtcagctgagagttcaggtctctgctcattcctgctccagctcaagcaagcgcacctggaggggctcggcaaaggtaggagtcgtgacttccctctggggccccttctcagtaaatgcatgcacctcctggaagatgaggccttccgtggaaccgttccattcacggccaggataatgtcaccagctgcaaatggcccccattctcctcagctggctgccccggaaagagcctcttaatcctcacaagatcacttttgagatggctgcagctctctttctccatctgcacgaaactgaatcccaaaccattggcattcttttttagtttgacttcaaacttaggaccatctgtcactgagacacagctcgaaggcctgccaggcaaggctgttaccaaggaaacagccgtgcgttcatctcccatgctgtcattagcagaaggacactgctgtgtactcctggggactcttctctctaagaccagtcttgcaacctgcccaggacccttcaggcactgcacagcctgcttgtgggtgaggccgcacagaatcactccatccacctgcaggagtcggtcaccctgtaggatctgcccttccttggcagctggtcctccaggaacaatggatttcacatagataccaccatatggcacactggtgttaatgccaccctccgactggcactgtcttctgtattcacctgttcgtttagattgtattctccactgagcaataagattaggtgttcataagcttaaca

SEQ ID NO: 98678 - DNA, 1025 bp, Homo Sapiens
  misc_feature (906)..(907): n is a, c, g, or t
  misc_feature (914)..(914): n is a, c, g, or t
  misc_feature (947)..(947): n is a, c, g, or t
  misc_feature (964)..(964): n is a, c, g, or t
  misc_feature (990)..(990): n is a, c, g, or t
gggtccggaattcccgggattgctcagagaggcaggattcctgctgactccagggggacacctggcacctcagcttcctttcccacttctccaggctgcatggaggggtgccgggcaggggcctcctggaagggaacctcctgcagcctcaagcaccaggtcatgacatgacatctatccctttcccaggtgaccgactcctgcaggtggatggagtgattctgtgcggcctcacccacaagcaggctgtgcagtgcctgaagggtcctgggcaggttgcaagactggtcttagagagaagagtccccaggagtacacagcagtgtccttctgctaatgacagcatgggagatgaacgcacggctgtttccttggtaacagccttgcctggcaggccttcgagctgtgtctcagtgacagatggtcctaagtttgaagtcaaactaaaaaagaatgccaatggtttgggattcagtttcgtgcagatggagaaagagagctgcagccatctcaaaagtgatcttgtgaggattaagaggctctttccggggcagccagctgaggagaatggggccattgcagctggtgacattatcctggccgtgaatggaaggtccacggaaggcctcatcttccaggaggtgctgcatttactgagaggggccccacaggaagtcacgctcctcctttgccgaccccctccaggtgcgctgcctgagctaggagcaggaatgggcagacacctgaactcctcagctgacaaaagaattcaccaggggcaacatgtactgactcatgtaccagccccatcctgggatcaagaggacagctgggagggacagtgcctcccccagatgcaggggaaagggcctgggtctcagggccagaagtctttccccaaaaggnncatcagnagaaggccacaatggggggccaaaaaacagagnagaagaacctttggggnccagtttccctttgaaccacaattcntccctggaagttccccacccccttcatttttatgg

SEQ ID NO: 98679 - DNA, 956 bp, Homo Sapiens
catctccagccagagggagcgcttccgtgcccggaaccaggagcttgaggccgagaaccgcctggcccagcacaccctccaggccctgcagagtgagctggacagcctgcgcgccgacaacatcaagctctttgagaagatcaagttcctgcagagctaccctggccggggcagcggcagtgatgacacggagctgcggtactcgtcccagtacgaggagcgcctggaccccttctcctccttcagcaagcgggagcggcagaggaagtacctgagcttgagtccctgggacaaggccaccctcagcatggggcgtctggttctctccaacaagatggcgcgcaccatcggcttcttctacacactgttcctgcactgcctggtcttcctggtgctctacaagctggcatggagcgagagcatggagagggactgtgccaccttctgcgccaagaagttcgctgaccacctgcacaagttccacgagaatgacaaacggggctgcggctggtgacttgtggcagtgataccccggggcctccccccgtgacaatgacggctgcgcctccaccccgactgctcagtgcatctaatcacttagactcccctgaagaatccccatggaaactgcccttatccgctgttccagcagctgccagaggccccaggtcacctcgggtcccttgaaaggaattggctcggtcacatcaggccccggtaggtccagaaagcgagcccccaatggccggccagcgtaagccgcaaagacccttcttcaagccccaaccttcagggttaagggccctggccagaaggcctgaacctcttaggcctggttggcagagggtccctcagctggaaaaggtaattgggtgtaacaacacgaatccaaggtgcgggaaatccacggtggggccaggcatggactggaacacactagggctccctaaatcccc

SEQ ID NO: 98680 - DNA, 857 bp, Homo Sapiens
  misc_feature (309)..(331): n is a, c, g, or t
  misc_feature (552)..(585): n is a, c, g, or t
cctggatcttcccagggattccctctacgctccctcctcttcttcaataaccccaaagagcaggagaagaactgccccggagcgcagcagccaccctccgaccatgccccggtgaggggggcggacttcgagggcaacttgccgcggactgcctgggcttagccagcgagctacgcgctcccgggagcccggaattgcacggcgcagcccggcggggggctatcgtctatgtcttcttggggcgccagacgaatcggggtctcgtttttgctggaagagcccagtgttggtggcttcaggtggctgctnnnnnnnnnnnnnnnnnnnnnnntgctagtgcggtttccgccgctggtgcgaagagaagagacacgcgagcggggagacctccaaggcagcgaggcatcggacatgtgtcagcacatctggggcgcacatccgtcgagcccgaggggagatttgccggaacaattcaaactgcgatattgatcttgggggtgactgtccctggccggctgtcgggtgggagtgcgagtgtgcactcgctcggannnnnnnnnnnnnnnnnnnnnnnnnnnnnnnnnncgggctccccccttcccccgtttcccgtcgagctgatgccacttggaatgagaatcagaggatgcgaactagtctgggaggtgcttacagcttcttcaggccaatttcatcgtctgcatatcagctcaagagaatccaccgaaactccactgacaggctggctgggcatacaacgcaggtggccccaggcaactgcggtcccagcccttctcactggggatgggtcgactccagctggaacctcggcccggggggaaaggcagcgccagcca

SEQ ID NO: 98681 - DNA, 605 bp, Homo Sapiens
ttgaaaaggaaggtggctgaacaggaggagcggcagggcatgaaggtccaggcgctggccagagagaacgaggtgctcaaagtccaactgaagaaatatgtaggagctgtccagatgctgaaaagagaaggtcaaacagctgaagtgccaaatctttggagtgttgatggagaagttacagtagctgaacagaagccgggagaaattgctgaagaactcgcaagctcctacgaagagaaagctcatcgaggtggcagagatgcatggcgagctgattgagttcaacgagcgcctgcacagggccctggtagccaaggaagccctcgtgtcccagatgaggcaggagctcatcgatctccggggaccggtgcctggagatttgagtcaaacgtccgaagaccagagtttgtcggattttgaaatatcaaaccgggcgctgatcaacgtctggatcccctcagtgtttctccggggcaaagcagcaaatgcattccacgtgtatcaggtctacatccggataaaagacgatgaatggaatatttatcgccggtatacagagttcaggagttgcaccacaagttacaaaacaagtaccctcaaagtga

SEQ ID NO: 98682 - DNA, 642 bp, Homo Sapiens
agcatttcagcaagcggcggcagcacccgcggggaggcagagggtgcggggccgtgggggccgcggagctgccctgcccaactcagcccagactagtgcggcagcccggaccggcgggacccgagggcctggccccagcgcccggtagatcgcggcggtcagcggtgagggccagcggcccaggccagcggctccagggccagccacgatgtcctccaccgtgaacaacggggcggccagcatgcagtccacacccgacgccgcgaacggcttcccgcagcccagcgcctcctcggggacctggccgcgggcggaagaggagctgcgcgccgcggagccgggcctggtgaagcgcgcgcaccgcgagatcctggaccacgagcgcaagcggcgggtggagctcaagtgcatggagctgcaggagatgatggaggagcaggggtattcggaggcaggagattcggcagaaagtggggacattccggcagatgctgatggcagaaggagggagtgctcaccagggaggaccggcctgggggccacattgtggcggagaccccgcggctgaccgagggcgctgagccgggcctggagtacgcgccccttttgacgatgacgacggcccagttggactgtgacttg

SEQ ID NO: 98683 - DNA, 792 bp, Homo Sapiens
ggtgcgtcccccaacctgatgctagcccctttcctgttacttctcacccacagcaggagccccttgtctttcaggccatgcagccatgttccgggagccctaattgcacagaagcccatggggagctccagactggcagccctgctcctggcctctcctcctcatagtcatcgacctctctgactctgctgggattggctttcgccacctgccccactggaacacccgctgtcctctggcctcccacacggatgacagtttcactggaagttctgcctatatcccttgccgcacctggtgggccctcttctccacaaagccttggtgtgtgcgagtctggcactgttcccgctgtttgtgccagcatctgctgtcaggtggctcaggtcttcaacggggcctcttccacctcctggtgcagaaatccaaaaagtcttccacattcaagttctataggagacacaagatgccagcacctgctcagaggaagctgctgcctcgtcgtcacctgtctgagaagagccatcacatttccatcccctccccagacatctcccacaagggacttcgctctaaaaggacccaaccttcggatccagagacatgggaaagtcttcccagattggactcacaaaggcatggaggacccgagttctcctttgatttgctgcctgaggcccgggctattcgggtgaccatatcttcaggccctgaggtcagcgtgcgtctttgtcaccagtgggcactggagtgtgaagagctgagcagtcctatgatgtccagaaaatgtgt

SEQ ID NO: 98684 - DNA, 588 bp, Homo Sapiens
gtgctaagtgtaggatattttgtcaccagaacacaatgctaccgccccaaagtaaaagaaaccacttctggtcaatcaacactaccagcgtatatataagaaagacatctttctcttttctaaaagacttccctaacacttaccccatggctgcacagttggtggggtcctgccggagaggaagagacactcagaccagagaaggggtgtgcatgcgcctactcgcttgctagaagtagattctggacagtcagctcttcatctgcccaactgtgtagcatctgcattgcccagtctttcatgtgtgccaaggctgatgcaggatttgttctctgtccagcagtcacttcggccagagctgaagagttgccccgtctctgttccatgtctcctttaagagctctggtgataaggacatgatgcttttactgaactttcttatcctagcacatgcttcaatagttcaaggaacttgaaaaatacttttccttacctttaccccatccctgtctttactcctcacacttactgtaagacattagtaacataataaattaaaagtcacacgaatctcaccaacataaaaaa

SEQ ID NO: 98685 - DNA, 915 bp, Homo Sapiens
  misc_feature (874)..(874): n is a, c, g, or t
cagagcccaagatggagccccagctggggcctgaggctgccgccctccgccctggctggctggccctgctgctgtgggtctcagccctgagctgttctttctccttgccagcttcttccctttcttctctggtgccccaagtcagaaccagctacaattttggaaggactttcctcggtcttgataaatgcaatgcctgcatcgggacatctatttgcaagaagttctttaaagaagaaataagatctgacaactggctggcttcccaccttggactgcctcccgattccttgctttcttatcctgcaaattactcagatgattccaaaatctggcgccctgtggagatctttagactggtcagcaaatatcaaaacgagatctcagacaggaaaatctgtgcctctgcatcagccccaaagacctgcagcattgagcgtgtcctgcggaaaacagagaggttccagaaatggctgcaggccaagcgcctcacgccggacctggtgcaggactgtcaccagggccagagagaactaaagttcctgtgtatgctgagataacaccagtgaaaaagcctggcatggagcccagcactgagaacttccagaaagtgttagccttctcccaactgtgttataccaaccacattttcaaatagtaatcattaaagaggcttctgcatcaaaccttcacatgcagctcccatgccaacctccagaattcaccaacacaacagggccccaccagcaacagggctaccttttgcacaattatttctcttgatgaacaacctcccaaagccccccgggctcttttccaaccaacacctgtggggccccccctaaaaattggggggcctggtttggcttgaagncccccaaccccccaaattcccaagaataggggggattcccc

SEQ ID NO: 98686 - DNA, 341 bp, Homo Sapiens
cgatatttgtggttctggcaaagagctgtcagagaatgatgcaggtgagttgagccctggcagaggggtggactggcaagggtcatcctgtcagatcttcaggccagaggtcgcagctaggaactttctcgaatcgtcactgcaccaggtccggcgtgaggcgcttggcctgcagccatttctggaacctctctgttttccgcaggacacgctcaatgctgcaggtctttggggctgatgcagaggcacagattctcccatacaaagtcattctcagggtatgcttgagttattgctatcaggtggtttactctgtacagccctgcatggccagaccacaa

SEQ ID NO: 98687 - DNA, 708 bp, Homo Sapiens
gtttgcccatgcctgagatgcgggcaggcaggcagggagtggacagcaagacctcagatccaagcctccacccttcccttccctatttccagggcttgggacaccttagaaatgtttgagcacacaagggcaaaacccagtaccaggtctgtgaccacagtgatcaaaggccctgctccacttgtctcaccggaaagtgacagctgaggacacagaattcaggtacctctgttcttcacagccactgccaccatctccgccgtgggcagcatctccccataatgcagccagccacctcatgaggggccggcacagagccctggcccagagcatggaaattcatctctggctggaatcctggccatgagccctcccctctgcattcacagattctcagcaggcccctgcccaagcctgacaggtgcctggctgcccgcagagaagccctgtgggaacacagagtgttgggagggagcagagcccacatgggtggtttgtgttctgacctctgaccccaccataggagtgagctgtgtggcagagccacattccaaatgcgaaagcatggcctctgtcctttgaggtggcctccagtgttctgcctgtgtgccagaactgtttccaaggacccagtttgtttgtttgtcttgttttctctaagtgtttgctgaagctttgtgtacagaattcctcagttggttccaaaaa

SEQ ID NO: 98688 - DNA, 1035 bp, Homo Sapiens
cctggcctccacagccttcgggagctcccagacccagtgctgagtgaggaggtggtggagggcattgctgctggcattgaggcagccctctgggacctgacacaaggcaccaatggccggtacaagaccaagtatcgcagcctgctgttcaacctgcgggaccccaggaacctggacttgtttctcaaagtggttcatggagatgtcaccccctacgacctggtgcggatgagctcgatgcagctggccccccaggagctggcccgctggcgggaccaggaggagaaaaggggaccgcagatgttcatggactgcagcccacaggccctgcccatcgcatcagaggacaccacggggcagcatgaccaccacttcttagaccccaactgccacatctgcaaggactgggagccctcgaatgagctgctaggctccttcgaagccgccaagagctgcagggacaatatcttccagaaagccctaagccaaactcctatgcctgctccagagatgcccaaaaccagggagttgtctcccacggaaccacaggacaggtgtggggttgggagcagggaggtggataatccagcagggttgagggggaggccaccagctggtgcaacagacatagcactggcttttcctgtgtggccttgggccaagtcttccctcccttgggaacctcactttccccatctgtgcaatggaactaatcatcccagcctcctggcaggcccctgcacaagggccaagcttgggccagtgttccagtccccacagtagggacacaggatctgctctgaaaagaaaggaggtgccggggaagtcctcatggcctgctctgtctggccctgtcttcctgtccctccctctaaggtccctccatctggggccccatgtgcctgttgaccccaaaggccctgctgcttgcaccctgggacggtgtttggaatttctccataaggggtccggccaggccccttgctagggacagttcggtttccaggcttccccgtaccgctgcggttgttcctc

SEQ ID NO: 98689 - DNA, 781 bp, Homo Sapiens
cccgcgggggcgcggccagcgccagagtagatacctgtcccgcccgccgcggccagcagcctcggaggaagccagggcaaagagggccggcggagaccaggtccgcgccggaggaagccgcgcccggccgaggccccggaccctgcgccccgagctccacggcaccatggccccgaagctgctgctcctcctctgcctgttctcgggcttgcacgcgcggtccagaaaggtggaagaggatgaatatgaagattcatcatcaaaccaaaagtgggtcttggctccaaaatcccaagacaccgacgtgactcttattctcaacaagttgctaagagaatatgataaaaagctgaggccagatattggaataaaaccgaccgtaattgacgttgacatttatgttaacagcattggtcctgtgtcatcaataaacatggaataccaaattgacatatttttgctcagacctggacagatagtcgccttcgattcaacagcacaatgaaaattcttactctgaacagcaacatggtggggttaatctggatcccagacaccatcttccgcaattctaaaaccgcagaggctcactggatcaccacacccaatcagctcctccggattcggaatgacgggaaaatcctttacactttgaggctcaccatcaatgctgagtgccagctgcagctgcacaacttccccatggacgaacactcctgcccgctgattttctccagctatggctatcccaaagaagacatgatttatacgatggagacca

SEQ ID NO: 98690 - DNA, 806 bp, Homo Sapiens
gccaggactgcaccctgaccaccaactccagccattgcaccccaaagcagtgccagccgtccgacacggtgtgtgccagtgtccgaatcaccgatcccagcagcagcaggaaggatcactcggtgaacaagatgtgtgcctcctcctgtgacttcgttaagcgacactttttctcagactatctgatggggtttattaactctgggatcttaaaggtcgacgtggactgctgcgagaaggatttgtgcaatggggcggcaggggcagggcacagcccctgggccctggccggggggctcctgctcagcctggggcctgccctcctctgggctgggccctgatgtctcctccttcccacggggcttctgagcttgctcccctgagcctgtggctgccctctccccagcctggcgtggctggggctgggggcagccttggcccagctccgtggctgtggcctgtggctctcactcctcccccgacgtgaagcctccctgtctctccgccagctctgagtcccaggcagctggacatctccaggaaaccaggccatctgggcaggaggcctggggatgagggtggggggggacccccaggtcccggaggggaagtgaagcaacagcccagctggaagggcgtcttctgcggagaaataaagtcacttttgagtcctgaaagatcaagaggccggaggaaagcgcttggctaacgccatgaagcatgaacgggggggaggcccttagaaggaaccccatgaggggtgatcactttgacagtccaccattcctgcgtcaagcggggtccca

SEQ ID NO: 98691 - DNA, 853 bp, Homo Sapiens
gtctgcttcttgctgcctccaagttctcccagcaggccaggaggacggtcagcaggtaaaaggagaagaaatatacccaggcaaaagagcattcccactgacgtatgcctcagacgtgactgcttgagacaccagcactaacagggttttctggcggtgcccttgatcgaccggttcatcttctgcgaaggggtagaaaggcagggagcccccgcaggcttggtcttcggtcttcaccaccaccaccacataaaagctgttgctggggaagtctttgcgctgtacggtgatggccgccttcttggtcatcgtctggtacatgccgatgaaggctacgttgttgtccaggtcatagacaggacacagcacatcctgaatggagatgactgagcaggggaaggccttgttggaggtcaccttgacaattaccgagtccacgccttcagggaactcatacttgaagtactggggctgtgctgctgtggtattgaagctgaactgctccccagtcctgagcacaaaatcgtccatgcggctgacccggagctggtatgtggtgttgactggtgacagggtggacacatccacgtagaagaactgaatctccgactcattcttggtggggggctgacacagggttcgttccactttttggtagaggtacttgcgctgaaacctggaaggacaccacagcctccttctggcggaccacaaacagcaacggcgcccccttctgcttgttcaggacgttcacagacacacgcacgccctctgtcctgttgcgggtcacagtatggttgaaggtgtagatgttgaccagctcgctgttgacctcgtccacgtaggtgcgctc

SEQ ID NO: 98692 - DNA, 826 bp, Homo Sapiens
cccggtagcccgttcgctccgcgccggcggcctgtccccgcggcttggcgggctagggcaggggaaatgttgcaggaggagtcggacctctctctcattattgcccagatagtccaaaagctcaagggctccaatttgtactctcagctggaacggcaggcctgggccagtcttcagagacctgagattaaacttgaatcactgaaagaagatattaaggaattctttaaaatatcaggttgggagaagaaacttcagaatgctgtttatagtgaactgagtgtgtttcctttacctagtcatcctgctgcacctcctgaacatcttaaagaacctttggtatacatgaggaaagcacagggaagttgggaaaaaagaattttgaagagtttaaatagtatgtgcactgaactgagtatcccactggcacgaaagaggccagttggagaacagaaagaacttcttaataaatggaatgaaatgggaactgatgaaccagatttaagccttttcagacctgtttatgcacctaaggattttcttgaggtattaattaatcttcgcaacccaaattatgaaaacggtgattctcttagtttcaggactcatttgggtttaattcaacgttccactgaaagtaaaagacatccctgaattgacaagaatgctttgtggaacttggcttaaatataggacaactgggtatagatgattctacacaagtgcctcctgaacttttcgaacatgagcatgtacgtctggggcaaaaagtctagcagaacaagatagggctgctgctcaacagtacatcagacaaggaagtcca

SEQ ID NO: 98693 - DNA, 958 bp, Homo Sapiens
ctgatctccgcgcctgcgcagtgaagctgggcgccttcggggcttgagcttctgagggtcgggtccagcgcgtgggctgctggatggcggaaccccaggcggagtcggagcccctgctgggcggggcccgcggcggtggcggcgactggccggcggggctgaccacttaccgcagcatccaagtcggccctggtgccgcggccaggtgggacctctgcattgatcaggctgtggtcttcatcgaagatgctattcagtaccgctccatcaaccaccgggtggatgccagctcgatgtggctttaccgacggtattactcgaacgtatgccaacggactttgagcttcaccatcttcttgatcctgtttttggcttttatcgagaccccatcctcactcaccagcacggcggacgtgcgctaccgcgctgccccctgggagccgccctgcggcctgaccgagagtgtcgaggtgctctgcctgctggtctttgcggccgacctctctgtgaagggttacctgttcgggtgggcccatttccagaaaaacctttggctgctgggctacctcgtggtgctggtggtgtctctggtggactggaccgtgtccctgagtctcgtgtgtcatgagcccctgcggatccgccggcttctccgtcccttcttcctgctgcagaactcctctatgatgaagaagaccttgagattgcatccggtggtcgctgccggaaattggcagcgtcgggcttgcttgtgggccatccacctgttgcctctttcaccatgtttcgggaaatggtggctgtcgctggttggggacactggatgaaataccctgggtatttccccagaacacggggggcaatagtgccacttccttcaaaaaatgcttacacggtggaataggagaaccctcgtgttctggtttgaacccgcgtggtatagccactaatctcagag

SEQ ID NO: 98694 - DNA, 775 bp, Homo Sapiens
tggatctcacttaatggctgagggctccaggactcaggcccctgggaaagggcccccactcagcatccagttcctgcgaagcccaggtatgaaggcttgaagaggcagcagaggacccaggcccacctcctggtgcttccaaaaggaggaaacacacctgctcctgcagaatcgatggtcaatgctgtttggattaacaaggagagaagaagctcactgtccctggaagaggcagattctgaggtggaggggaggctggaggaggctgcccagggctgccttcaggcccccaagtctccatggcacacgcacctggagatgcattgtttggtccaaacctccccccaggacaccagtcatcaagtacatcataggggcaagcttgtgggatctgaccaaaggctccctcctgaaggagacacacacttgttttgaaaccaatcagatgactcagcaaggaaccggaatcccagaggctgcccagcttccatgccaggtgggcaatacccaaagcaaaggcagtggaatctggcttagaattcagcactcaatgtcctctttccataaagaaccacacaggtctggcaaaccagcttactatccatttccccagaggaaaacaccaggatctcccaagctgccggaacctgggcttatatggctcagcgtgaagctttctattctgccagatgtcttgaccttgaggccactatggccttataggaagaaccgagaggcagagccacgaggaggtctctaggctatgagcaagaac

SEQ ID NO: 98695 - DNA, 795 bp, Homo Sapiens
cttgaagttacgcttgaaggaggaaaactcatcaattttcggggaatcccgccttggtttcccaggctctctgagcacgatgtctgcagctcccgccagcaatggagtgtttgttgtcatcccgccaagacaacgccagtggcctctgcccacctccggccattctgcccacatccatgtgccaacctccagggattatgcacgtttgaggagccaccgcggggggcacagacaccaagggccacacagccacctgacttgcggcccgtggagacattcctgacaggagagcccaaagttttggggacggtgcagatcctcatcggcctcatccacctaggctttggcagcgtgctgctcatggttcgccgcggccacgtgggcatcttcttcatcgagggcggcgtccccttctggggaggagcctgcttcatcatctccggatccctctcagtggcagccgagaagaaccacaccagttgcctggtgaggagcagcctgggcaaccaacatcctcagcgtcatggcggcctttgctgggacagccattctgctcatggcactcccggtgttaccaaaccgggatgtggacaggcgctatctggccgtgcttactatcttcactgtcctggagtccttcacagcggtcattgccatgcacttcgggtgccaagccatccatgcccaggccagtgcaccctgtgatcttcctgccaaacgccttcagcgcagacttcaacatccccagccggcagcctctgagccccttgcctatgacaatgtggcctatgccca

SEQ ID NO: 98696 - DNA, 696 bp, Homo Sapiens
ggtggaaggacagtccagagcccttgtcatcgcacaggaactgctatcttcagagaaagcatacgtggagatgctccagcacttaaatctggatttccatggagctgtcatgagggccttggatgacatggaccatgaaggcagagacacattggcccgggaggagctgaggcagggcctgagtgaactcccagccatccacgaccttcatcaaggcatcctggaggagctggaggaaaggctgtcaaattgggagagccagcagaaggtagctgacgtcttccttgcccgggagcaggggtttgatcaccacgccactcacatcctgcagttcgacaggtacctaggtctgctcagtgagaattgcctccactctccccggctggcagctgctgtccgtgaatttgagcagagtgtacaaggaggcagccagactgcgaagcatcggctgctgcgggtggttcaacgcctcttccagtaccaagtgctcctcacagactatttaaacaacctttgtccggactccgccgagtacgacaacacacagggtgcactgagcctcatctccaaagtcacagaccgtgccaacgacagcatggagcaaggggaaaacctgcagaagctggtccacattgagcacagcgtccggggccaaggggatctcctccagccaggaagggagttctgaaggaaggg

SEQ ID NO: 98697 - DNA, 949 bp, Homo Sapiens
gcaagaggcccgacaggcaggccagggtccccggagaagccggatttcttcgcaatgtcactggtacttagcagatggtcgtgttcacaggggctagccacctgtactacggtgccgaccgcaatgcgaggaatgtggtggccactgcgatggagctggccggaggacaggtcaggtgaggtgggcctgacccctgcggggctcagggctccttccattctaaccttgagccacagtgtcactcttcagggctctgctcctggctctattttgtaaaggtgtcatcagccttcaacctccatttatatatttttataatgttaagccactgaccaactttttcatagaaacaactatcagattcgagggctccctttgtccccctgacctgggcacaggcatgggcgatggctccctcttcccagaatctgcggggaactggggcaaggcccatctgtctgcaaggctggtagctctctccctcggcttccagagtccacggcagttgcaaggctaaccagtgtggatctgctgagtcaccccaggcaccagacttaccccaggagcattgggccactgtccatggggccttccttgagaccttcccttggggctggcgggcggcggcttaccagctgggtcagtcccatctcgcccctctgtgcctatgccctggcgtaggccaggcgttaccttcccctgtaatcttactcatcccagaattatttactggccagatcctaaatagaccaagaactacctaaattgtgcaagattactcctttgacaaggcctggtccaagaccaggtgtggccctcaggtactggagaggccacccgcaggaaggagtaggaaggacagtggcagtattaggcacagagcggaggcaagggcacaggaatcaaaggggaggcgcaagcaggggaaaggagaaaaggagtgccgagg

SEQ ID NO: 98698 - DNA, 705 bp, Homo Sapiens
gatctcagctggagtcagctgctccctctcagacttctgtttacttctgtgccagcagttactccacagcgctgcaaggctgtctcctctctgcacataaaggcaagggaaggtgctgccctcctcccccacccaagactcaaggatgccctgggcagagatctctgcaccaggaaccttggaacccagagtggccccaagtggcccggacagtatgagcctcgctctgtgccacgtgcctctgcaggcatctcagccaggcctggactggtcccaggtcctcagatgtctcccttgttgctctctctggtctgtcctccgaggtctcctttcgggttgtggccagggcttccccagctcctacttttctactcatcatcctgagtccgaggcccccagggtggaagaggatttgtatttcagatccatctagactcctgtctcttcctggtgaccatgttgcttcctctctctagggtttccccccagcccccaccctcacgtagtctctcctgtggcccacctttcccatctgggcagtcaccctccaaggccttgctgggtctctcctcccctcacttccccgccccctttctactgcagctataaggggagcctctcttctgtgcctccttccttcccatcaaagagatttcaaaggccattccctctgccctaggctagaggctaccttttctactggcc

SEQ ID NO: 98699 - DNA, 823 bp, Homo Sapiens
agtggatgggggttgtgggagagaggcagctgggagacaggcctccctctggagttcatagctgagttgctgtccaaatcagtggtccctagaatctataaaacaaagctgagaacttcagaggtgcatccagagaagccacactccaaaaggaccacttccagacgccatgcggcaaaccctaccgctgctgctgctgacggtgctgcgccccagctgggcagaccctccccaggagaaggtcccgctcttccgggtcactcagcagggcccctgggggagcagtggcagcaacgccaccgactcgccctgcgaggggctgcccgccgcggatgcgacggccttgaccctggcgaaccgcaacctggagcgcctgcccggctgcctaccgcgcacactgcgcagcctcgacgccagccacaacctgctgcgcgccctgagcacttccgagctcggccacctggagcagctgcaggtgctgaccctgcgccacaaccgcatcgccgcgctgcgctggggcccgggtgggccggcggggctgcacaccctggacctcagctacaaccagctggccgctctgccgccgtgcaccgggcccgcgctgagcagcctccgcgccctggcgctcgccgggaatccgctgcgggcgctgcagccccgggccttcgcctgcttccccgcgctgcagctcctcaacctctcctgcaccgcgctgggtcgcggagcccagggggggcatcgccgaggcggcgttcgctggagaggatggcgcgcccctggtcacgctcgaagtcctggatctcagcggcacgtccttgaacgg

SEQ ID NO: 98700 - DNA, 1088 bp, Homo Sapiens
attcccgggatgtggatttgatgggcgtcctgctgttctctccccagacgccatgcggcaaaccctaccgctgctgctgctgacggtgctgcgccccagctgggcagaccctccccaggagaaggtcccgctcttccgggtcactcagcagggcccctgggggagcagtggcagcaacgccaccgactcgccctgcgaggggctgcccgccgcggatgcgacggccttgaccctggcgaaccgcaacctggagcgcctgcccggctgcctaccgcgcacactgcgcagcctcgacgccagccacaacctgctgcgcgccctgagcacttccgagctcggccacctggagcagctgcaggtgctgaccctgcgccacaaccgcatcgccgcgctgcgctggggcccgggtgggcctggcggggctgcacaccctggacctcagctacaaccagctggccgctctgccgccgtgcaccgggcccgcgctgagcagcctccgcgccctggcgctcgccgggaatccgctgcgggcgctgcagccccgggccttcgcctgcttccccgcgctgcagctcctcaacctctcctgcaccgcgctgggtcgcggagcccaggggggcatcgccgaggcggcgttcgctggagcaggatggcgcgcccctggtcacgctcgaagtcctggatctcagcggcacgttcctttgaacggggttgagtcagggtgggatcagagacctgccgaagctcacatccctctacctgagggagatgcctcggctgacgaccctggagggggaattttccagatgacccccaacctgcagcagctggactgtcaggactccccaccacttggcttctgtcgccacacacaatctttcaggatactcccacatctacaggttcctttctggtccagaaacgtgcaacttgaggttcccttcccctccttgggaaccggggaattccttcccaagggccctatcggaatcaaaccttctttggcgaacaccccccccaccttggaaggtggggggaatttggcccttggggctctcccccgggggggtggccaaaagaaaaaactg

SEQ ID NO: 98701 - DNA, 818 bp, Homo Sapiens
gccatggccgtccggcccggcctgtggccagcgctcctgggcatagtcctcgccgcttggctccgcggctcgggtgcccagcagagtgccaccgtggccaacccagtgcctggtgccaacccggacctgcttccccacttcctggtggagcccgaggatgtgtacatcgtcaagaacaagccagtgctgcttgtgtgcaaggccgtgcccgccacgcagatcttcttcaagtgcaacggggagtgggtgcgccaggtggaccacgtgatcgagcgcagcacagacgggagcagtgggctgcccaccatggaggtccgcattaatgtctcaaggcagcaggtcgagaaggtgttcgggctggaggaatactggtgccagtgcgtggcatggagctcctcgggcaccaccaagagtcagaaggcctacatccgcatagcctatttgcgcaagaacttcgagcaggagccgctggccaaggaggtgtccctggagcagggcatcgtgctgccctgccgtccaccggagggcatccctccagccgaggtggagtggctccggaacgaggacctggtggacccgtccctggaccccaatgtatacatcacgcgggagcacagcctggtggtgcgacaggcccgccttgctgacacggccaactacacctgcgtggccaagaacatcgtggcacgtcagccgcagggcctccgctgctgtcatcgtctacgtggacggcagctggagcccgttggagccagtggtcgggctgtgggctggactgcacccactggcggagccggaagtgctctgacccaaacccg

SEQ ID NO: 98702 - DNA, 842 bp, Homo Sapiens
agcagctccaggctggatctgcgccggacacaggagaaagcagcgggtaggctaagcaggggtgctgaggatggaggaaagttgggaggctgagcacagctgaagtcctgagctccctgtgcccttgacttctctgtgggctcgagcaaggaccatcccaactcaggatgaaccctccttcggggccaagagtcctgcccagcccaacccaagagcccagctgcatggccaccccagcaccacccagctggtgggacagctcccagatgcagcatctccagcctgggccggcttccatccatcagtcccacagcacctgggacttgtggctgctgcctgggtccccctccccacggttgatgttccagaccatgcccactataccctgggcacagtgatcttgctggtgggactcacggggatgctgggcaacctgacggtcatctataccttctgcagagctgtgcttcgtggagtcactgtgatgatgcagagcagaagcctccggacacctgccaacatgttcattatcaacctcgcggtcagcgacttcctcatgtccttcacccaggcccctgtcttcttcaccagtagcctctataagcagtggctctttggggagacaggctgcgagttctatgccttctgtggagctctcttttggcatttcctccatgatcaccctgacggccatcgccctggaccgctacctggtaatcacacgcccgctggccacctttggtgtggcgtccaagagggcgtgcggcatttgtcctgctgggcgattggctctatgccctggcctggattctgccacccttcttcggctggagcggcctacg

SEQ ID NO: 98703 - DNA, 746 bp, Homo Sapiens
  misc_feature (19)..(19): n is a, c, g, or t
gctggtaccggtccgtttntcccgggatgcctctgggactcaattcgcctctaaaaccctgccaggttctagataccagctccagaccacagccccagacagctctggtattcaactggactttgggaagcagagcagttctgaaagtcagcttagctttggaactcagcccagctctgggacccagataagctcaagaattcaagccagctctggaagtcagcttagttcgggaacccagctgatttccggagcccaacccagctccagaactcagactagttctggaaaccagctcagctccgggacccagaccactgcaagaattcagctcagccctggagctcatcttagctccagaacccagtccagtcctgagaccaggctcagctctgaggctcagtccagctctggaacccagttcagttctgggattcagtttggctctgaaacccagaccggctcaagaattcagcccgactctggagcccaacttagttccagaacccagtccagctctgagaccgggctcagctctgaaacccagaccggctcaagaattcagcccagccctggagcccaccttagttctggaacccagcctgtttctggaacccaatccagttccagaactcacaccagttcaagaatctggctgagccctggaaatggaatctgcccacagacccctggccttgaccctagaatccagcttgaggcccctgccccagccaacctcatgcacg

SEQ ID NO: 98704 - DNA, 740 bp, Homo Sapiens
ggatcaaatactcccagccgagaagctgccatcgatcctcccatggacccctgatcctggttgggaggaacttttcacagctctctctccctccctcaaaccctgtgcaatgagtttgcagaagagagtcttcccgagaaggcagaacgggactcatgaagtggcagctaagccctgtccagtggccacccgtcagccaagggccagagaccaggaaaggaagaaaggcagcttcacttcctctttgacggatggagtcgcacagccgcgctggaaagagcagaaaatctgcaaaatttcggtccatctccaggtccctgatgctctgtaatgctaagaccagtgatgatggctctagccctgatgagaaatatcctgatccctttgagatttccttgtgcccagggcaaggacgggaattttccactcatctgtgcagctggcagacacatcggaggctgggcccagcagtgttcctgatctagcactggcctcggaggctgctcaactccaagcagctgggaatgatcgaggcaagacctgtaggaggatattcttcatgaaggaatcttccacagcttcctctcgagaaaagcctggaaaatctagaagcacaaagtagtaacttcctgtttcctaaagcctgccaccaaagggcacgcagcaactcaaccagtgttaatccctattgcacaatgagacaattgattttccaatgacccaagaaatctgcagcgccc

SEQ ID NO: 98705 - DNA, 983 bp, Homo Sapiens
ctggctcacttgaacgcggcacaaggaggcagcaatctgtgcagaagggctcagggcggcatggacacgggttcactgctgtagcagggactaggctctcggagatggcgacatgggtgatgcagtctgggatctggtccatgctgagggcacagctgcggatggagtcccgaggcggggcagcgacgtactggtggggcagccatcgctgcgggttgaccctgtcagcagggagcccatcggtcatggtgacgcttgcgccgcttcatgtggctgcccttggggcctgaggggctgacggggctagcaggcttgctactcccctgtcccaggccatagctggcctcgaggtagcgcagtgggaaggtgcggttcaccgggcagtagatgatggcaccactctgctctgacacagccttgcggctgcccacatgatagcgcacgagggcgggcacgtggtcaaagctctcctgctcaaacaggtactggatgtgtgtgtagctctcgcctgccttcaccaccaccttgttgatcttgaagtgcaaggcctggttgcgccagcggcacgtgagcacatagtcgcccaggctggtgagtgagtcccggatgaggaagtcgccgttgcgttgtaccaaggtctccgagacctctcgggggatgcggccatggtaccaggcatggctgcggagatccgtgctgctgagtttgagctcctcctccaattccttgtggagtttctctggcgatgagtccaggatgtacttctccttggagaacttcacatagtcgctgccagcctctggctctccagcagcccctgcactcacttcctagggtagagtgacccagtcacggccactgcccagctgactgcggagccactgccggtgctagagggctacagaattgattctgcccccagggtggagagcctggagaggccagaggccagagacggctgtttttccttccttcctcctgag

SEQ ID NO: 98706 - DNA, 923 bp, Homo Sapiens
gccgctgggtttaggaggtccccgggttgccggcggcgacagcgggggaagcatgactgctgtgggccgaaggtgccccgcgctggggtcccgaggggctgctggagagccagaggctggcagcgactatgtgaagttctccaaggagaagtacatcctggactcatcgccagagaaactccacaaggaattggaggaggagctcaaactcagcagcacggatctccgcagccatgcctggtaccatggccgcatcccccgagaggtctcggagaccttggtacaacgcaacggcgacttcctcatccgggactcactcaccagcctgggcgactatgtgctcacgtgccgctggcgcaaccaggccttgcacttcaagatcaacaaggtggtggtgaaggcaggcgagagctacacacacatccagtacctgtttgagcaggagagctttgaccacgtgcccgccctcgtgcgctatcatgtgggcagccgcaaggctgtgtcagagcagagtggtgccatcatctactgcccggtgaaccgcaccttcccactgcgctacctcgaggccagctatggcctgggacaggggagtagcaagcctgctagccccgtcagcccctcaggccccaagggcagccacatgaagcggcgcagcgtcaccatgaccgatgggctcactgctgacaaggtcacccgcagcgatggctgccccaccagtacgtcgctgccccgccctcgggactccatccgcagctggtgcccctcagcatggaccagatcccagatcttgcactcaccatgtcggccatctccgagagcgctagctccctggctacagcactgtaaccgtgtccatgccgcctggagcccttctgccacagtttgctgcgtccctggttgcccgccgtccatgagcccag

SEQ ID NO: 98707 - DNA, 1149 bp, Homo Sapiens
  misc_feature (601)..(601): n is a, c, g, or t
cggtccggaattcccgggatggccgggcggacgggcgctggcagcagtagcagcgccgcgggcccttcagagtggccgcagtccgagctttgccctcgcatcctgttccaacgcgaggctggtgtgagtggcgggagccatctgtgggcgccatggcaaagagggaggacagccctggcccagaggtccagccaatggacaagcagttcctggtatgcagcatctgcctggatcggtaccagtgccccaaggttcttccttgcctgcacaccttctgtgagagatgtctccaaaactatatccctgcccagagcctgacgctatcctgtccagtatgccggcagacgtccatcctcccagagcagggcgtctcggcactgcagaacaacttcttcatcagcagcctcatggaggcaatgcagcaggcacctgatggggcccacgacccggaggacccccaccccctcagtgtagtggctggccgccctctctcctgccccaaccatgaaggcaagacgatggagttttactgtgaggcctgtgagacggccatgtgtggtgagtgccgcgccggggagcatcgtgagcatggcacagtgcntgctgaggatgtggtggagcagcacaaggcggccctgcagcgccagctcgaggctgtgcgtggccgattgccacagctgtccgcagcaattgccttagtcgggggcatcagccagcagctgcaggagcgcaaggcagaggccctggcccagatcagtgcagcgttcgaggacctggagcaagcactgcagcagcgcaagcaggctctgggtcagcgacctggaagaccattagtggggcccaaacagaaaagtggttgcaaaacccggctggaaaccctgcgccaggggtccagaaacacattcggcagtaacttgcagcttttcccaagcagggcacttgcgcctggggcttcggccccccgaaaggttttgccttggtgcccccagccaattgccaaaaaccggctgggctgccattgggggggaacaggggcctttcccgggagagggccaccattgaaaaaggcccccccctgggaaactgggttctttgaggggtgggacagggcttttccggcgaaatcggggggctccaattctggggcgg

SEQ ID NO: 98708 - DNA, 986 bp, Homo Sapiens
gtcgctggaaggctgcgtgctggtcgcgcccagctgcgtcaccccaggaactggggtctgtgggccagtgtggccgtccctacgaagactggcacgacccctaaagttaggtcggaagacctgtgggcagcttgagcgccgaggagtgccctgaacgctcaactcgccctggaaacgtttttccgtacagcaacatggcggcgcccatagactcttagaaaaggagaaagctttttctctgtggactgaaaggggcatttttcatgatcactatttagatgggtgctgttttcatgaggagagtctgggaaggcggcgtccgcttttctgacaagggaagaggctactttgtccttttaaggattcaatgacttcctgacttggaggatgtggacctagtggctagacccaaggaccaaagcaagaagtcgtggggggcccaggaagacaggaggatcacattgggattccagacataagatcaggttttaaccccctttggccaaattttggctgaaaatgttgaattatcaactctgaaattaacaaagaaagtttatattaaaacattgcaattttccttagaatttctgtatatattaacatcatgaatgataaattctcttcaatgtgcatgtcaggtttatgtacttgtatatcaaatctatctgtgtgtatgaagtgtatgtttattgaaataccaagatatttaagaaagctgatcttggaaaggtggattttcattctagttcctaattcgcagagggctttttaaaggaaggcgcaatgtctgtgggacacagttgcagctgggtggtaatggatcatctgtcttatcaccaagataaactattcacttcaccagcattctgaaccctgtgccgtaacaagggagtccctacttctggtcaccttgaagtctcttcccatgggatgctgggtcctcctctggattctggctggctatattgcccctgaatctttca

SEQ ID NO: 98709 - DNA, 610 bp, Homo Sapiens
gaaagattgactgagtatggttctgagatctctcaggtgattagttggcagaattaagttccttttcgattcttggtcttatttcttcacccatctactatagtgcattcttgccatgcagccctttttatggagcaagtcacaatacagcagcttgcttcattaggggcaagcaagcaagacaagctgcagcaaatgcaagtaacatggaagtctttataatctaatcatggaattgacatagttaaaaacaaatcattgaggtaggctccaaattgatcagaacatggttattggacaaaaccatgactgtcaggaggctgcatcatggggagccattttacaagcagcaccatgggtgttatgggggattttattacatttgttctgctcttaagagttgaaagtctttaaaaatgtgtaagtctgtcgtttgttcttgacttctgtcatgttttcaagaatgcattatgcaatgatgtagaatactgttctgtaaagtagttgtctagactctagtgaaaataattacagataatctcagttcatcaacgaatcggtatattaatgtcatatttaacagttataggaataaactaagcataataat

SEQ ID NO: 98710 - DNA, 589 bp, Homo Sapiens
cacatccagtccagtgatccttaaaagattaagagatgactggactaggtctaccttgatcttgaagattcccttggaatgttgagatttaggcttatttgagcactacctgcccaactgtcagtgccagtgcatagcccttcttttgtctcccttatgaagactgccctgcagggctgagatgtggcaggagctcccagggaaaaaggaagtgcatttgattggtgtgtattggccaagttttgcttgttgtgtgcttgacagacaacatatctctgaccaacttctgtattcgtggaccaaactgaagctatatttttcacagaagaagaagcagtgacggggacacaaattctgttgcctggtggaaagaaggcaaaggccttcagcaatctatattaccagcgctggatcctttgacagagagtggtccctaaacttaaatttcaagacggtataggcttgatctgtcttgcttattcgttgccccctgcgcctagcacaattctgacacacaattggaacttactaaaaattttttttactggttaaaacaaccaaacacacaaaccaaaactaaactaaacac

SEQ ID NO: 98711 - DNA, 896 bp, Homo Sapiens
agggtctgaagccaagagccctcaccgatggcacgacggccggctcaaagagacacgccctttcggaccgaacttgcgcagaaatgtaggccactgtagaggcctgggtgccatcgcctccctcagctggatcgcgtcttggcacagcaccaagcaggccggccccttcagctggcagcgggtgcggcctcagtcctctgcaccaccacgcgaaactcgcccacttcctgccaggaggagtagatggagttttcctccatggggaccaggcccctcttgggagactgggcatctgtggatcctgaggaggcctccactgtccccgggaaggccagctggcagatggggcccagccaggcctgacggtgctgagcagccaagtagatggcttcgctcggtgctggtgagcaggaaggcaccggtgtcccgggggcagctctcgccggtcagccggcagcaacggacacacagtcagccaaggcggatgacccgtcgctcccctcgccggccaggccctgccgacctgtcacccgctgctcccaggccaccatcccggacctcccagctctccagccgtgccacgcctgatgggcctcctgcatacagcagagcccacaccttccgccagcacttcttgccaaacttgacatgctgctggtagaggatgccatccttgataggggtctccagagggtccatggtcacggccaggagcagggccgccgcttcaagacctggggagactgatgacaggctggacgggaactcctcacacttccccttctggccacttcccgtccctccgtccagagacagctggagggagcccccggccaccctgaaggcagccttctcacgcacctggttcagctgggcacgcgcgtctgatcgcagtc

SEQ ID NO: 98712 - DNA, 776 bp, Homo Sapiens
cgaccaaggtctggacgacaactattgccggaatcctgacggctccgagcggccatggtgctacactacggatccgcagatcgagcgagagttctgtgacctcccccgctgcgggtccgaggcacagccccgccaagaggccacaactgtcagctgcttccgcgggaagggtgagggctaccggggcacagccaataccaccaccgcgggcgtacctttgccagcgttggggacgcgcaaatcccgcatcagcaccgatttacgccagaaaaatacgcgtgcaagtgaggtgggcgggggggcgggcgttgggacgtgctgctgcgggtgagacgggaggagggtagtcacgggcttagggctggaggctggcgggctagggctgagtggagcgcctgcttagagaccttcgggagaacttctgctggaacctcgacggctcagaggcgccctggtgcttcaccctgcggcccggcacgcgcgtgggcttttgctaccagatccggcgttgtacagacgacgtgcggcccaggtgaggcccaagcttgggggctacagagccggggctggaagcctggaaccggagggccggggcgaggtctcggcctgatggctgccgcaccggccgcagactgctaccacggcgcgggggagcagtaccgcggcacggtcagcaagacccgcaagggtgtccagtgccagcgctggtccgctgagacgccgcacaagctgcagtgagtcctggtgctcccggcccgccagggccctaaccctgg

SEQ ID NO: 98713 - DNA, 521 bp, Homo Sapiens
acatggaataataaagaagactttgatcttaaatctaaagaacttggctaattcgggagatagccatatgaaaactttaaaacagaagtatgggtagctgacttgaagtaactctatgtcaaatagtcgtaggttaagtatcttcaaagaacttcgatattatttcagaggatacaaaataaaaatacaaactggaaaataaagattacagagaaaaaaccaacaccttcctgtgcagtcctgttggaatttgtaagtactattatgggacttgccatgaggtgttgaagccttgtttcactgagttggagagactggacctaaatggcgcagcatgactttgctccagcctggcttaatttccctactccaccatcatcaacaaagtcgtcattgaattttgagaagcattctgaaaactttgcatggacagagaatcgttatgatgtgaaccgtcgacgacacaactcttcagatggctttgattctgctattgggcgtcctaatggaggaaaaattgg

SEQ ID NO: 98714 - DNA, 987 bp, Homo Sapiens
cggtccggaattcccgggatgaatgaatacctccgaagccgctttgttctccagatgtgaagtagctccactataccagcctcgtcttccttccgggggacaacgtgggtcagggcacagagagatatttaatgtcaccctcttggggctttcatgggactccctctgccacatttttggaggttgggaaagttgctagaggcttcagaactccagcctaatggatcccaaactcgggagaatggctgcgtccctgctggctgtgcttgcatgctgcatgcatgagcgcggcatgttctcctcaccctccccgcccccggcgctgttagagaaagtcttccagtacattgacctccatcaggatgaatttgtgcagacgctgaaggagtgggtggccatcgagagcgactctgtccagcctgtgcctcgcttcagacaagagctcttcagaatgatggccgtggctgcggacacgctgcagcgcctgggggcccgtgtggcctcggtggacatgggtcctcagcagctgcccgatggtcagagtcttccaatacctcccgtcatcctggccgaactggggagcgatcccacgaaaggcaccgtgtgcttctacggccacttggacgtgcagcctgctgaccggggcgatgggtggctcacggacccctatgtgctgacggaggtagacgggaaactttatggacgaggagcgaccgacaacaaaggccctgtcttggcttggatcaatgctgtgagcgccttcagagccctggagcaagatcttcctgtgaatatcaaattcatcattgaggggatggaagaggctggctctgtagccctggaggaacttgtggaaaaaagaaacaggaccgatactactctgggtgtggactacatagtaatttcagataaccctgtggatcacgcaaaggaaggcagcaatcacttatggaacccggggaaaaagtacgtcatggggacagtgaa

SEQ ID NO: 98715 - DNA, 1014 bp, Homo Sapiens
  misc_feature (940)..(954): n is a, c, g, or t
  misc_feature (959)..(960): n is a, c, g, or t
  misc_feature (964)..(964): n is a, c, g, or t
ggaccggtccggaatcccgggaaaactcccgagctctcctccgcgttcgcagccgccgtcatcccgcggaggagcgcgcagccccggggaggccggaggacgcgcccatagaatgcccaggggcgacaaactgtcctgagcccctctggtgcagccacctgcctgtcccatacgccccgcccaccatggagtccagagggaagtcagccagcagccccaagcccgacaccaaggtgccccaggtcaccaccgaggccaaggtacccccggcagccgatgggaaagcccccttgaccaagccctcgaagaaggaggccccggccgagaagcagcagccgccagcagcccccaccacggcacctgccaagaagacctcggccaaggccgaccctgcccttctcaacaaccacagcaacctgaagccagcccccacggtccccagcagtcccgatgcaaccccggagcccaagggtcctggggacggggcggaggaagatgaggctgccagtggggggcctgggggccgaggtccctggtcctgtgagaacttcaaccccctgctggtggctgggggtgtggccgtggcagccatagccctgattctcggtgtggccttcctggtccggaaaaaataatacctgggggccaggcggggggcacggagccacttcctgtacagacccgaggaagccagtgcatgcagagttcacccttacctattcgtacacacgcacattcattacacacctacatatgcccccaacacacgcgcacggtgaagaggacgcccgagcccacccctgctgacccaggacttccccaacctccagggcagaaagagcccaaggctccgggggtcaccagcacagggatgtggggggcgaagggcaccagcctgggggaacggccaagaaaaggaatggacccctggtgttgtggnnnnnnnnnnnnnnntgggnncggnctgggttggatccctgggggcccccaggggctgggcccttaatggcccaa

SEQ ID NO: 98716 - DNA, 923 bp, Homo Sapiens
tccgagctcacccgagcccaccggagccgacagtggcgcgctaagggagaagctcggcaacgtggagtcggtttatgtcatcgaccctgaagatgtggcccttctctttaagtccgagggccccaacccagaacgattcctcatcccgccctgggtcgcctatcaccagtattaccagagacccataggagtcctgttgaagaagtcggcagcctggaagaaagaccgggtggccctgaaccaggaggtgatggctccagaggccaccaagaactttttgcccctgttggatgcagtgtctcgggacttcgtcagtgtcctgcacaggcgcatcaagaaggcgggctccggaaattactcgggggacatcagtgatgacctgttccgctttgcctttgagtccatcactaacgtcatttttggggagcgccaggggatgctggcaggaagtagtgaaccccgaggcccagcgattcattgatgccatctaccagatgttccacacacagcgtccccatgctcaaccttcccccagacctgttccgtcctgttcaggaccaaagacctggaaggaccatgtggctgcatgggacgtgattttcagtaaagctgacatatacacccagaacttctactgggaactcgagacagacaagcacgtgttcaccactgattacccgtggcattccctctacacgacctcctggggagacagccaagatgtccttcgaggacatcaaggccaacgtcacagagatgctggccggaggggtgggacacgacgtccatgaccctgcaagtggcacttggtatgaagatggcacgcaacctgaaaggtgccaggatatgctgccgggcaggaggtcttgggtgcgcggcaccaggcccacggagacattgccaccattgttacagctggtccc

SEQ ID NO: 98717 - DNA, 291 bp, Homo Sapiens
ggtgaacaggatggcggcggagctggtggaggccaaaaacatggtgatgaggttttcgagtctccacaccttcagatgctcctgggtttcgtgggccggagtaagagtggactgaagcacgagctcgtcgaccagggccctccagctggtgcagtttgactgtagccctgagctgttcaagaagatcaaggagctgtacgagacccgctacgccaagaagaactcggagcctgccccacagccgcaccggcccctggaccccctgactcatgcacgtccacctacgaccgg

SEQ ID NO: 98718 - DNA, 1044 bp, Homo Sapiens
  misc_feature (899)..(899): n is a, c, g, or t
gcagtgccgggcgccatggcaccgtggggcaagcggctggctggcgtgcgcggggtgctgcttgacatctcgggcgtgctgtacgacagcggcgcgggcggcggcacggccatcgccggctcggtggaggcggtggccagactgaagcgttcccggctgaaggtgaggttctgcaccaacgagtcgcagaagtcccgggcagagctggtggggcagcttcagaggctgggatttgacatctctgagcaggaggtgacctgcccctggcaccagctgcctgccagatcctgaaggagcgaggcctgcgaccatacctgctcatccatgactggagtccgctcagaatttgatcagatcgacacatccaacccaaactgtgtggtaattgcagacgcaggagaaagcttttcttatcaaaacatgaataacgccttccaggtgctcatggagctggaaaaacctgtgctcatatcactgggaaaagggcgttactacaaggagacctctggcctgatgctggacgttggtccctacatgaaggcgcttgagtatgcctgtggcatcaaagccgaggtggtggggaagccttctcctgagtttttcaagtctgccctgcaagcgataggagtggaagcccaccaggccgtcatgattggggacgatatcgtgggcgacgtcggcggtgcccagcggtgtggaatgagagcgctgcaggtgcgcaccgggaagttcaggcccagtgacgagcaccatccggaagtgagggctgatgggtacgtggacaacctcgcagaggcagtggacctgctgctgcagcacgccgacaagtgtgcgccctcctggggagagccccggctttcttccacccctggcttttccttcaacccctggcttacccntccaacccctggcctttcctcaaaaccggcccagggagaaggcccaaccttcttccaaacccttgcccttttcctctcaccccctgggcctcccctttcaacttggcccccaggggccccaggacctaaacccaaggggcccctg

SEQ ID NO: 98719 - DNA, 795 bp, Homo Sapiens
atcacggagcgtgtcagaggccgacacgtgtactgtggagactgtcaaagtctcccggagcccaatttccggaagcggtgagttctgaaagaagttcctgcaccgtagtttcccaagtctgcgaatccccaatcatgagcgcctcgggcgtactgtcctttacccagcaaggatgggagcaggtgctggccaaagtgaaacgggctgtggtttacctggacgccgcctgcgccgagagcctgcactggggctgcggatccacccgtctcctggaggcggtggggggtcctgactgtcacctgcgagagttcgagcccgacgcaattggtggtggagccaagcagcccaaggcagtgtctgtgctgagctgcctgctgaaaggccggaccgtggagatcctacgggacatcatctgccgcagtcacttccagtatcgtgtggtggtcacaaccgtgagccacgctgtccacctcacagctaatcatgtcccagcggcggcagcggccgagatggaggggcagcagccggtgttcgagcagctggaggacgaacgctgctgtgaatggatgggcaacatgaactacacggccgacggtgttccatgtcccgttcatcgcttgccccatgttgctccccactttgccttgacctccagctttagcatccctttttcccactgctaccccaggatgtgcacctccttaatagcgcccgaccggacaagaggaagctgggaatgctggggtgattgtggactccactacgcttaaccccagagctgctgctgcagatcat

SEQ ID NO: 98720 - DNA, 974 bp, Homo Sapiens
  misc_feature (954)..(954): n is a, c, g, or t
cttattctggatcagatgtgttggcattgtgaataatgcaggctgaaagagaggttctcagaagaccacggagaacattagaggaacttgggtaaggctgtgaactgtgccaccatgtttctgcacagcaaatatcgtcttccccataaaggtgaccaagattcttgaattcctattcttaaaatggtttctctgttttttctgaggattggatccatcaaatccttcctcataaatgatgttctggataaactgaagcagctttgtgtagccaggggtcaaagaacagggttctactttgagagttgaagatattgttctctggaagaaaaaatccatgccaatttgaagcctcaattagttcttgtggcattctttttgatgcatcataatagtgaccaaatcttgaagatgatactggtccaatctccatcttgggtaataactggtaacgccaagctattgttcatcttaatattagattctggtgttttatgattgtatacatcttcatcaaattcctttttaccaattatcaattccaagtaaatggtgctgggaagttcctgtaaaatgttggcaggatcctctttagcagatgcaaccaacaaagtatgcccattgacaattccttctgccaggaaatacttgaagagcaaaggtgagtaaatattatatttatcctcctcaattagaagaactgttccaacggctaaacctccacctaagagctggtctagggctgggagcccggttgataccagcagctgtccattccgcaccgacggtcgcgtgcccgcaatggacaccagtcgagggccgctgtcgttggtcacgctggctctaggacccctcctctggaaactggtgacgttgctcctcgctggctgtcgccactgcagacccagtactcgcggcaacactaccgcaggttgccactgatccatactcctngggctgtaccaagcctgctt

SEQ ID NO: 98721 - DNA, 881 bp, Homo Sapiens
gcccctagtccccagacactgtctccgcccattagcagcacacatacacactcagtgcccagcgcagattcagccttctgccggccatctgcccccacgggcctggcccttactctccacttccctttctgcagtagctcagttccaaacagctggcggctccggtggcctgtccacggaagacacggcccttcctcttctatggttctcccgaacccctccaactggagtccgagttactctatttggcaccaagttcaaacaggacacccctggtttcaaattcgtctcggccacttactatctgtgtggccttaaggaagtcacttcacctctctgggcctcttattcctcatgtgtgaaatggacacaaatgctggccgacgcggtatacaataagagctcaataaatgttcgcgtccctgatgtccccaacacctgaagatcagcatgcgtctcgtctctctttgctgccgatttattttactgattcactagtgagcatttattgagcgccttctgtacgcgtgggccgatgcccagcgctcggatggtcgccgacctgctaagggacaggggcgggaaatcggggctgcgcttcccaggaaagagacctcaggaacatctccgtgctccgtttcccgtccggacggaggctgagaagtcgaactcggggcgcccgggtcctccggccgtgcggggaggcggctctttcttacctcgggccgggcctgggaccagcaaactccgaacctcgacctcgcagggcctcgcagccttccaggtccctggccgccggaccgaccttgcgccagcgaagccgccagtccgggtgccccgcctgctgcagcgtccatcccgggaattccggaccggtccac

SEQ ID NO: 98722 - DNA, 1054 bp, Homo Sapiens
  misc_feature (874)..(874): n is a, c, g, or t
  misc_feature (883)..(883): n is a, c, g, or t
  misc_feature (924)..(924): n is a, c, g, or t
  misc_feature (952)..(953): n is a, c, g, or t
cggtccggaattcccgggatcaagcaaccggtaaacgccgccgtttgaggagcaccgggtggattggacgcttccccagagacccagaagcagaaggagcggacccaggcagccggcaccatggagattgtgtacgtgtacgtcaagaagcgcagcgagttcgggaagcagtgcaatttctcggaccgccaggccgagctgaacatcgacatcatgcccaaccctgagctggccgagcagttcgtggagcggaacccagtggacacgggcatccagtgctcgatcagcatgtcggaacacgaggccaactcagagcggtttgagatggagacccggggagttaaccatgtcgaggggggctggcccaaggacgtgaaccccctggagctggagcagaccatccgtttccggaagaaagtggagaaagatgagaactacgttaacgccatcatgcagctcggctctatcatggagcactgcatcaagcagaacaatgccattgacatctatgaagagtatttcaatgacgaggaggccatggaagtgatggaggaggacccttcagctaaaaccatcaatgtgttcagggacccccaggaaatcaagagggctgccacacacctctcctggcaccccgatggcaacaggaagttggcagtggcatactcctgcttggattttcagcgggcacctgtgggcatgagcagcgattcatacatctgggacctggaaaacccaaaaagcctgaacttgctctgaagccatcgtctccactcgtgacgttggagttcaaccccaagagattcccacgtactccttgggtggctgcttacaatggacagatagcctgctgggacacccgaaagggcagccntggtggcgnagctatccaccatttgagtccagccaccgaggaccctgtgntatgggcaccaatctgggcttgcagtcnnaagaccgggcacccgagtggcttcttcaagctttccaccgaatggggcagggttcaatgttggttgggggaattcccggaaagaatgaaacggagagcccc

SEQ ID NO: 98723 - DNA, 985 bp, Homo Sapiens
  misc_feature (624)..(675): n is a, c, g, or t
gttgtgagctggctatccagtagggactccctgcgtttccgagagctcaggtcagtgtcttttaggaaccttggtgcaggtgcattggttgccccagcacggcactgttcgtaccgctcctgcaccttcacggacttggaatgctcgaccacactgttcagttctgggatgctttcagcagtgtccccatacccgtggtagtgtccatagtacaggttatccccaatgtcttccacccaggaaggcctactggctatgcagctacttggactcccgttcaggtgcagagaaccgcacaactcagggttagctctcagggtcttctctggctcctcagtcccactaatgcagagagaatcctggctactcggaaacggctgtcctggggctaatccactgctaattccgttagttcctgtcaagcactggccattcctgctttccatcccactgagcggggtcgtggaggggaagtccaaatgtccattgatgacacatccatttgtcaatgtattcgatacggagctactgtttttcatatctgcattaagaaatacacctgtcaccaaaattcagaaccaatgagggaggagaaactataaaatgcttcactgccattacaannnnnnnnnnnnnnnnnnnnnnnnnnnnnnnnnnnnnnnnnnnnnnnnnnnnaagtaaaatcaatgtgcataagtagacttactattaaaacgttaacagtagtatttgcctggtaagataggaaaatcatatgtgtgtcagtagcatcaggtagctcaactgaaaaatgtaagctgacaaatacactgcatgaaaaataccaacacagtcctgaaaagccatcaataaagtgctctcattttaagactactttcgagagcggtttttaaaaaaatcgcccctgaaaaggtccatcagaactgagtgtaaagtgttttacagagggttccaacagaacacaaacttttttagttttcaagcg

SEQ ID NO: 98724 - DNA, 1505 bp, Homo Sapiens
gtgtgatccttttgcgctcgttgccctgccggggccgtccgcatcgggcccccgctgttccgcttggccacagtggaccttcacttgtgctcgtgatgtgccacatctgctcccaccgggcatctgggtgtctcagctttattcgcgggtccgtggttcatgtgctcgggctccggcgccttgccgtcagaggctgccagcgcttccctccgcttcggtctgctgcgactctgctgccccccgcccggcaccagcggggccccgcgtgccccgtcagcctcagccgcctctcgctgggccctggcggctctggccacgtccaggggtcttccgcagcctgagcggcggggccgcctggggcgccgtggagtgcgactctggtacccctggagagcccgccctgctatgaggactgccctctagcttcccggtgctcattgtccacggatgacagcgcgctgccaggggtgatcgggcacggttgctctctgagacctccctcactggcccccagtagtggccccctccccaccattccaccatgggcttagatgcccgagtgattgttgtccaaaacaggcgggaaaacagaccagccacacacaaggggcagggtgagggtgggggtgggggtccttaaacagactaaaatgcagttacctgtggtcattttggaggaagtggaagcctaagaatcgcccccagcatggcttcatcccccaagatggccgatgatctggcctgaaggcctctcacaaagggcaggagaagaagcttccagaaaggctgggatggaggaggagtcctgcggccagctgttgcctgcagcagaggctgcctgtggacacttccctaccggggctgaggccatgctgggagccccccccagtgacgcagaagcacaaattggaggcttggggccatgcccagccaggttggcttccctggggctgaagagctggctgtggtggcaccatggccttggccctgctactcacccaacattcccatcctcccctgataggcccctcctccttgcctgccctctctcccgctgctcagggccagtcactccccccacatgcagctacccctacaacctggggttccttctcagggcctcacctggtccccacatcccctggcctctgctcctgcctcccaaagtccatgtctgcctccatcagccacacacacgcagggacgcccgttccttgccctcccggacttatttactcttcactttcctgatgatccatggggcccaggcctaaagggcatccgaggggctgggccttggccacagcctcttggatgatgtccttgctccaccacgcaggcccttgcttctcccatcaacgagttttggcccaggggacactgaccctcccccagggaggaaagaggagttccttccctttcaacgagggcttccacgccctttaaggggtggcggggaagggaggaggctgagaagatgcagattaaataaaggtatggaatgg

SEQ ID NO: 98725 - DNA, 1091 bp, Homo Sapiens
  misc_feature (744)..(755): n is a, c, g, or t
  misc_feature (758)..(760): n is a, c, g, or t
  misc_feature (762)..(763): n is a, c, g, or t
  misc_feature (765)..(766): n is a, c, g, or t
  misc_feature (768)..(768): n is a, c, g, or t
  misc_feature (770)..(771): n is a, c, g, or t
  misc_feature (773)..(773): n is a, c, g, or t
  misc_feature (785)..(787): n is a, c, g, or t
  misc_feature (796)..(796): n is a, c, g, or t
  misc_feature (802)..(802): n is a, c, g, or t
cgccccgcgcccgccaggagccaccgtccgagccttgcggagcgcggcagtgggcgccagctgcccgcagcccctgacccggccccggacggagcgccggccgcaccaccgccctctggccgttgcctcaccggctcggcaagatgtcggtgaaggagggcgcacagcgcaagtgggcagcgctgaaggagaagctggggccacaggattcggaccccacggaggccaacctggagagcgcggaccctgagctgtgcatccggctgctccagatgccctctgtggtcaactactccggcctgcgcaagcgcctggagggcagcgacggcggctggatggtgcagttcctggagcagagcggcctggacctgctgctggaggcgctggcgcggctgtcgggccgcggcgttgcacgtatctccgacgccctgctgcagctcacctgcgtcagctgcgtgcgcgccgtcatgaactcgcggcagggcatcgagtacatcctcagcaaccagggctacgtgcgccagctctcccaggccctggacacatccaacgtgatggcgaacaagcaggtgtttgagctaattggctgcgtctgtgcttcatactctccccgagggcctgactggtgcacccttagagcgccctggggccgacgatcttgaaggatgtagcaccgccgaggataacgaggatgaggaggttcagccatcgatcccgccaaagttgtagtgtggtctccaaccnnnnnnnnnnnnccnnntnncnncncnncncgcccccccacnnncatcacctntacacncgacttccaccccgacacaacactatcatatagcctgttctccacttcgtcgatccggccgctccctgttggcccagtatgagcttaccgtgaatatgagctcgcgcgcgcatcctgcagcatatgcatcctcagccacatattcggtggtacacacctgaatcgtcgggagtggtgcgagactcgccccgccttcgcccgcctccgcatgactcccagtctccccacgaggtccgaccccaggactactcaccattcccttactcatcacatccagagacgccgcgtg

SEQ ID NO: 98726 - DNA, 1096 bp, Homo Sapiens
  misc_feature (90)..(131): n is a, c, g, or t
  misc_feature (146)..(202): n is a, c, g, or t
  misc_feature (892)..(892): n is a, c, g, or t
gtggtaccggtccggaattcccgggatcagaacgagagacaacctctgcccccccagcagctggccagctttgcagccccagtcttgagnnnnnnnnnnnnnnnnnnnnnnnnnnnnnnnnnnnnnnnnnnattgaaggagcggannnnnnnnnnnnnnnnnnnnnnnnnnnnnnnnnnnnnnnnnnnnnnnnnnnnnnnnntagacggagatctctggagcagacctcaaggtgacttctatttctatctggttctcgtctgggggggccctggccgggcagccccccaacacttctcctgccctgaaacacggctctagccaacctgctccgctgcttcacctgcgaccgtctctgcgggggctgcacggcgccagcccctccagcccaccagggcattgtcctccagcccgtcatgcccagctgtgaccccggtccgggccctgcctgcctccccaccaagactttccgcagctatctgccccgctgtcaccgcacttacagctgtgtccactgccgtgcacacctggccaaacacgatgagcttatttccaaggtacgcgaagcggggacctgccattcccctcctctcgcgcaccaggctagcccgaacatcacccagggtccttccaagggagccatggccgagcctacctgtttaactccgtggtcaacgtgggttgcgggccagctgaacagcgcctcttgctcacggggctccactcggtagctgacatttttctgtgagagctgcaaaaccacactggggctggaaatatgagccaagcttttgagacgagccagaaagtacaaggaaggggaaatacatccattgaaaatgtcaccacatgggggaaggacaacggctggggactgaggggcttcaagcanggggggggcccttcccttcgcatggccccttcctccccaagggcccttgccaagccagtcttttacccgccatggagtaactggccccacccctgggggggaaacaccggggttccaaaccaaaccccctccccctgggccttccacaattattcccctaaccaggggaccccctttatcaaacagagggggttttgggggggt

SEQ ID NO: 98727 - DNA, 918 bp, Homo Sapiens
tggtacaccctctgctgcacatggacttggcatggcacacttgggtagccacggccactaggtattccctaatggaccgtcactgagtagctgctgggccctgaaactggatgtcaatccaccgttctaagggccaatgattccccccccgatggaccggcagacgaatgccctgcggatgtacctcgacgacttgagtaagatttcaggaccgcgagcaggaaatggcactttcgtccagaatgtttggcgctggtcagacatggagcccttcgtgtgttcttgcagtcctccttcgcttggaccgttgcagcgatgatcaaccgtggccgccatgagcagctacagcaggagcagcaggatgagcttgaagttgatgtttattgctgatgggttcaggactagtttgcatccaaaccaaattaaacacgtagtggtcacaagcaatacgtggaaacaaacaatatctgaaatgttgggtaatcacattggcgttcctcctggagacggtgaagctcacaactgccgaggggatgcaagagcctgcagcacagcgcaagtaatccatctcagccgggaacacgttccccaggtacagcgaaaaccccgaggtcaccaggaggcagctccccatcagcacagagaagacccacgtcttgtggctgaagcaggggggcagtcatcttcgacagctgcaggtcgctcggcttacgcgtctggggcatagtctgcgcggggtcttagccaggccccgctccagcgtgggcatccggtcataggccagctcctctctgaatggctcctgggtcatggcaccttggggacaccacatgctgtcgctgaatgtacagccacgtgtcaccagttctttatctcacccgctgctctgccgttgggagcactggtctctgggtgagg

SEQ ID NO: 98728 - DNA, 729 bp, Homo Sapiens
caggtgcaggggtgtgcgaccagctcggtccagggcatctacacgggcccctcctcgtagcagtgtggtgatgacaggaacgtggttggtgcaggccgccaggtgcagtggcgtgttccccagcccatctcgctcgtttaggatcagcaaccatggtcccaggagcagcctgcacaatctggtcattgcacattgcatgaggcaaagtgtagagctggtgcgggcccttgtcatcaaggctgcacagggatccgccgccatcttccagcagctgctgcacttgtttccacatcattggcattggccgaggtccctcagtctcttcagaggcgtgcacctccttggcccgtgggcccgagccgccggtggggcctggcagcgcgcctcagccggccagtcgggtatcttgcagcgcagcccgtcgcgcggctccgcatcatgctgccacaggacgtgcaagtagcgcagcggcgactgggccccgccggacgcccggcccgagaggcacagcgccgccgccgcccagcgcagacccgaagtcagcgaaggagaagaggccctcagcgtcagtcagcggctccggcgccaccgcgcactcgccctccgagctcgagtggcctgagcgcggctcgtcgtccgcgtccccgccggcggctgccatggcaaccggctcgcgcgcgggcactgccgcctgagcctcgttcccgaccgacacaacggacctacttc

SEQ ID NO: 98729 - DNA, 1431 bp, Homo Sapiens
  misc_feature (127)..(127): n is a, c, g, or t
  misc_feature (191)..(191): n is a, c, g, or t
  misc_feature (245)..(245): n is a, c, g, or t
  misc_feature (249)..(249): n is a, c, g, or t
  misc_feature (387)..(387): n is a, c, g, or t
aagggtccggccaaccggtcgggggggcccatggaagatcgggcaccctggggtggggaaagaagggccccaggtctggggggcagggctgcagaaggggccagtggccccaggggttcctgcaagnccagcagggagaaagagtagcaggaaggagcaggcctttccaggggcgtcttcggcacaggccnccgcagggctgcaccatagttcttgtgcaggctgcggcagtgtagcagtgccanccanctggtgaaatttcctttctgtcacattcagagtctcctccaaggacagcagaggcttctgcgctgaagggaactgaggcacagcttctcgctccaggcccagcagctggaagtggatgttggccagagctcgctggancagagtcagcctctgttggaaggggttggagacggcccggttgcagaggagataatagctcaggatgtctgagctgagccctgtctcctcctgggtcaggttcagaacataagggtctggattggagcagaagtcactgaggcccacggccgtggctgcctccaggcccatggagccccaagctcaggacgaaaaccaggagactcatgactgtcatcacgatcaccacccacttggctctgcttcaccaggcccaggagggtgaaagaggcagacccagcagctccaggagcagcaggaggacgtaggccagccacctgtactcctccacaaaggacacatgttcaggccacctgcaggggggctcaggggcactccctgccagaaggccagcccctgcagctgctgggccgcagcctccgcctgccgtcgagcccctcgggcggcagccaccagctccgtgcgcggctcgagcacctcctccagggtggtcagctctgtcctcaccgcctcgcccagcctctccaccgtctccaacaccaggtggtcaatggtgctgagtgtgtggttggcgtgcagcagcgcagagctgagctgggacaccccatcactggtctcactgttgccatagaaaccgatgccaatgccagtgcagccggcgagaagggcgacaatgcagctccaggtgacgcagcctcccccgggcgaggggatcttggacccggggggctcgggggccggcagcagcagaagcggatgaggtagacagcgatgaaaatgaggctcaggcccaagcccaggcccgccaaggccgccaccagcaacaaggcctgctggtattcctgctcttggggcgcgaaaacgctgggcaccgggcggagctggaagtcggcgcggggcagctggtggaggagatgcacccaagctgagggccggtagcccgggggcgcccccatggcccccgggggagggggcagcggggcgacgccggggctgcgggagcctccggagtcgagcggggcgcgggcggcgcggatcccgaga

SEQ ID NO: 98730 - DNA, 997 bp, Homo Sapiens
gctccaggagccggctgagcgcgccccgcggggggctccgcagcccttacaaggaatttggtggcgcttggggtggccccgcccgccaggctccaccggcccctcctccccgcggggtggcagcccgctggacgcggggccgagggcgcggacgccgacgggtccggggccgcgcgctccagggaagcctgcatcccgctcccctgggccccgacgggcgggcgcactgcgccggggcccaccggccgcagacctgcgtggccgtccagggcgtcgccatgtcctcggtgtttggaaaaccccgcgcgggcagcgggcctcagagcgcgcccctcgaggtcaacctggccatcctggggcgccgcggggctggcaagtctgccctgaccgtgaagtttctgaccaagaggtttatcagtgaatatgaccccaacttggaggacacctacagctccgaggagactgtggaccaccagcctgtccacctgagggtcatggacactgcagacctggacacccccaggaactgcgagcgctacctgaactgggcccatgccttcctggtggtgtacagcgtcgacagccgccagagctttgatagcagcagcagctacctggagctgcttgccttgcacgcgaaggagacacagcgcagcatccctgccctgctgctgggcaacaaagctggacatggctcagtaacaggcaagtcaccaaggcagagggtgtggctttggcaggcaggtttgggtgcctgtatatcgaggtctctgcctgtctggacttggaggcacgtgcagcatgtcttccacgaagcagtgcgaagaggcacgggcgggagcttgaaaaagagccccctgaacccggcccctctcatatccgaggagaggggccttgacccaccaatgcccgattcacattgcgctggatggggctgagcaagctgaacatccaaaacgctttcaacatcaactgaaggaatgccacttggggccaa

SEQ ID NO: 98731 - DNA, 842 bp, Homo Sapiens
agtcgccgtcaccccgggaagtttgtgccatccacgttctcctccaggatggtctccacgcgcctccgctgccggggagagaggctggggtccggcgtgtgcggaggcgggcagggcccctcccctttccccgcccctaccggggcttgtctgcacctcttggcggtccagggggtccgggatccgcgcgggcttcagctgcggcggcaggaacagctccagccggatggcggcgcgcgcggacttctgccgctggatgagcagcgcgatctcctcggcccgcatgcgggtgtagcgcagccgcagggcgcggactcgcccgcgggcctccgctgccttgaggacgccgaggagccggttctggcgctcggcgggcagctcgagcgactgcgtccacgggcgcgggtcgggcatgcggtaccccggttccaccgacccgcacgggaaggtggaggccgccgcgcccacgtcctccagcaggtcgccgaagagcagatggcggtggcgctgcgcagggagcatggccgccagtccctgcggcgtcagggcccagcccggcttggggggctctgtcgcgggcgcccccttggcacgctcctcaccctgcgccgtgcctggcgcgctcttcccgcttcgctcccgcgggcccttgcgcccgccctccttcgctggcggcggcatcctcccgccctgcggacgggaggaagggcgtcccgtcggtgccggggctggcaccgggccctgcccgccccctcggcagggccccaacgtgcgccccagctcccgcccgctgggctctccgcagtcggttatgagttccgcacatccgcgaattccggacg

SEQ ID NO: 98732 - DNA, 1008 bp, Homo Sapiens
tggttccttattcggtattccgggcggtctcggccgttgtctactggtcgcgtttgtgtgatcttcatggttgcgcactggagcccttgagcacccagtcccgcgtttacaaccgtccgtgaccctcggtcccaagcctggttagatctggtaagtaggtggccaggcgtccgtccctgctcttcgcaacgcctgcttcgcctcgtagtaattgaactggtaccggccccggctgggtttggtacggatacacaaacaccctccaagctccaaggtcagcgccacgctctcgtcctcgatgccgttgatgagctcgcagcggtaccggccctcgtcctccaggcgcacgcccgcgatgaccagggaggcgtctagtcgatgccccctccgcatcctggcgcgccctcccaggggcccatacccccgggcgtgcagtccgttggtgatgaggatcagcgtttcccggagctccccaggctccaccttgctccagcgcaccttgtagctgggaggcgtggtgcccaggacgcagggcagcgtggccgtggccccacgatgagagtgaatgacctcgtggatggggggcaggaggtagtgggggcccgggtgggatgctgggtctccttgggctttgtggaagatggtgaaggcccaaagaaggaagcggcagagtgtggggagggtgagccagcctggcatgatggggggtcagcccggcaccgtctgttagaagctggtctcttcacagagacggagggagcagtgcttagcagctttttgtcttgcttgaggaagaggttctggatgaaggtttgccaggctcctgggagttccaagcaccttaaaaccctggaacttgagcccctctgccctctggtgcctgagtgcgcattgcctttgcaaacagactttcaggtgggaactatccaggacttccagctgcttcaagaaaccggacctcttctgtacaacccccatcccgagaattccggaccggtaccagccttg

SEQ ID NO: 98733 - DNA, 788 bp, Homo Sapiens
tagccttcctgtgtcttcccacccttagtcccaggcatctgactaccgggaacctcaggcagagtccgggagccccccagcccgtccaggagccaacagagcccccgtcttgctggcgtgagaatacattgctctcctttggttgaatcagctgtccccatggctgtgccctggagccctgagcaccagctgcagaggctgcaggtgacccggaagctgctggagatggaggagcaggccgccttcctcgtgggaagcgccacccctcgctacctgtacctggccagcaaccacagcaacaagtggggtcacccccggggctaccgcatccagatgctcagctttgctggagagccgctgccccaaaacagctccatggcgagaggcttcagctgggagaggtaccagctggcttgtgaccccagcggaaggaggaggagcccagtagcagcagcgtttcaatcagaatgacccttgggcccccactgtggatttcagtgacttcatcaacaatgagaccattgctggcaaaggattcggtggcctgggtgacagcgggttttctgcatatcccacatgcagaggacattcctaacacagtgactgtggggaacagcgtgggcttcttcctccgaccctacaacttcttggacgaaagacccctccttctactctgccgactccatctacttccgaggggaccaggatgctggggcctgcgaggtcaaccccctagcttgccttgcccaggcttgctggctgtgccccggactcccggctttctccca

SEQ ID NO: 98734 - DNA, 1237 bp, Homo Sapiens
  misc_feature (1089)..(1089): n is a, c, g, or t
  misc_feature (1123)..(1123): n is a, c, g, or t
  misc_feature (1171)..(1171): n is a, c, g, or t
  misc_feature (1189)..(1189): n is a, c, g, or t
cgcaacaaccccaagtctgtttccaggtggaggctgtaacaggttgaaaacttgccccaggctaccggctgctaaagaaaagggcttggttcgtcccccacctgtggagtctgcacaccagatttgcgccctcccctgagttctgaccaggaggcgtctcgccccatccaaattgttaaaaagttcagctggacatttccctctccccatggagttctacccctgctcctctggtcaccctcctgatggatccccatggtgccaggcaggaatggcctgctaggagatgcagtgagcccccaggacctctccactgcctcctccacccctgtatttcacttggctctccaaattgactcaactccagaccataaagaagatggagaggcacatggtcaggggacaattgtataagcattttgatttggagaggaagaatgccaagcaggctgaagccagactggaccaaagactgcagagactaaaggttatttgcctctaccatgtgaaattgctgacctgggagcagaggcagctccaaaaagaactgcagaggttgcagcaagcagaaaccatgaagaaaaagttctcctcttatttggggaatggatttcagaagagaccagaagatgttctcgtgttctcaccacagggaaggcagaagcacagagccccacaggctaagaaaatgagagcattggcaacccgtatggcccaagacacatgcaaaagcaagtcccaggtgcctccttcacatgatgctggcctcaaagaccccatgaagagcaaaaagcagccactctctcaaaataacagaactgcctgcttcataaaagagcaaccacaagcccaagagaaagattctgtgaatccatctaaggacgtagaccccagcaagggcatctctgttccatgccaaaatcaagaggtttccaccaacaccatagaacaaggtcctagttccagcccagctagtgattggaatggcatgtgctgatgagaccagatcaaaagatgttgctctaaagccagatgggaacactggaaaacaaattcccccaaaacacatggaatgtgcaggaagcttcnaaggcgagttcacaaagccaacccttcttagagntgctttcaaaggccagaaatgcccattatctcccggcaccagggtccncccctggagtctgagaanggttgctttagcattgggagaagatatttggggcatgggggaaatccc

SEQ ID NO: 98735 - DNA, 710 bp, Homo Sapiens
ggtctcgtcttgtgtagatgaaagccagtcatcgatactgttcgacacagcagtttagaagatagacgtccgagacagttgacttgcttgtagtccataatttagcaattcaatgccactggcattacagtgctgtggagcgcaagtgtatctctatatttcagtcagatttgtctttcttctttcctgttaagggcactttgtttacaacagcagacccaacagctgtaacacctccagccacagcagagacaccccctttcaccagccctattcccatggaaggcacagttgtaacagctgttttggtcacttccagactctttccaccaatccaagccacaccaccaatggtggcaccaacagctccctttgtaacactgaagatacccccagtcacacgggacaacatgcctggctgctgctgtgggtgatctttcattgaaccttctggtggttcatcattaaggtatgatgggatttcttgttgatttttatctgtctgattcatgatctccgccggggtcgcggccagcgctagggctggggccgggcggagtgagcgggccggcgcagaggagagctgaggcggcctgggcggcagcggcggccggcacaaccccgggcagtcgcggctccagaggcgtcctctcaggatgtggagctggaagactgtggcggcggtggtggaggcggaggcctctggctgc

SEQ ID NO: 98736 - DNA, 945 bp, Homo Sapiens
cgcgagagcgcgtgcgcgagcggtggggctttctcctgagccgtcggagggagccggagcgcttctcccgagttggtgatagattggtggtcatccaacatgcagaaatgaatgagcagtgaaaagcagcagagccgatgggtcatgaggatgtaagtgcgtttgaaggcttccacaccctctactccaggacagaatcatgaataaactggaggataagcaggaccagatgataccatgaagagaagtttacaggccctctattgccaactgttaagtttcctgctgatcttggcactgaccgaagcgctggcatttgccatccaggaaccatctcccagggaatctcttcaggtcctcccttcaggcactcccccgggaaccatggtgacagcaccccacagctctaccagacatacttctgtggtgatgctgacccccaatcccgatggacccccctcacaggctgcagctcccatggcaacaccgacaccccgtgcagaggggcaccctcctacgcacaccatctccaccatcgctgcgacagtaaccgccccccattctgaaagctccctgtccacagggcccgctccagcagccatggcaaccacatcctccaagccagagggccgccctcgagggcaggctgcccccaccatcctgctgacaaagccaccggggccacaggaccgggccacaacaaaagaaggcagacacacgacggaacatagagtacaaaacacgtcaagaggagcaccacaaagggtacacccagaggcaccatcatagtagcaaatcgagagagagacacaagtcacaacacaaaagcacaaggaacgcgtgccgacggtacgggagggacagaagaccaggaccaacaccaacaggacagcgagacgaaaagagaaaaacgacgtagagaaacaatgcaggcagaccagaacc

SEQ ID NO: 98737 - DNA, 1114 bp, Homo Sapiens
gtcgccgcgtgccgagcgtcctggcgcggccgaggggaagcagcgtgggctgcccgggttacgctggccacccgcacctggtcctgtggcttcgaccactagtcagcaaggccccggagaggccagcgaagaggaggggctcgttggctttacggagacgcgcggagtaccctcaaggtgccacacgctcgcctgctccctgttcctacatcctgggcgtcttcccaggctgtcatataactcctgagaatagtggttcttaactctgatagaagtggaattactgggcaaagggcattcagatttgggagaagtagccccagaaataaaagcatcagagagacgaacagctgtggccattgcagatttggaatggagagaaatggaaggagatgattgcgagttccgttatggagatggtacaaatgaggctcaggacaatgattttccaacagtggagagaagcaggcttcaagaaatgctgtcacttttgggcctagagacgtaccaggtccagaaactcagcctccaggactctctgcagatcagttttgacagtatgaagaactgggcccctcaggttcccaaagacttgccctggaatttcctcaggaagttgcaggccctcaatgctgatgccaggaataccactatggtgctggacgtgctcccagacgccaggcctgtggagacaggagagccagatggaacgaggagatcatctactgggacccagctgatgaccttgctgccgacatttattccttttctgagctggccacccctgatacgccagtgaaccccttagaccttctctgtgccctgctgctctcctcagacagtttcctgcaacaagaaatagcgttgaaaatggccctctggcaggtttgcactcccactcgtgttgcctgactcggagaaccactaccatacatttctgctgtgggccatgcggggcattgtgaggacattggtggtccctagcccccaagggggcatggggacgcttccgggacgacagcgtggtcttgtccagggcgcccgcttccgccttcgtgcgcatggacgtcagtagcaactccaagttcccagttctcaacgccgtctcaggccg

SEQ ID NO: 98738 - DNA, 374 bp, Homo Sapiens
gcggccgcgggaggaagcgaaggaggcgggagcggagacctcgctgcgctcatggcgtcgcccgggcattcagatttgggagaagtagccccagaaataaaagcatcagagagacgaacagctgtggccattgcagatttggaatggagagaaatggaaggagatgattgcgagttccgttatggagatggtacaaatgaggctcaggacaatgattttccaacagatcaggatactgggcccagagcttccaaacaacctgccaagggccacacactgggcagaagtgttttctttgtctttttcccattgccttttactaccatgctacttaaaaaataaaaagttattccatgtctggacaagaaaaaaaa

SEQ ID NO: 98739 - DNA, 300 bp, Homo Sapiens
caaatttccaaacttcataatttgctagtagtgctaactaaaattttacaccaggtaaaatcaggtcaacttttttatgtattgacttcattgttggacttcatactctgatgggaaagaaaatggacattctgaaatgtgtcaggtgcataatatcctaatttatgcttgtcagagctggggtctctgtcttccttggcccatgttgcatttaactgaatgtcatgtttctcctctggaacttcttatgtatgcaagctcccatgttaacctatcataaaaatgttttttataatttgt

SEQ ID NO: 98740 - DNA, 695 bp, Homo Sapiens
ggtctggggctgggctgcaggaaacttggatgactcgatgatgagatcctcgatgaggtgcttggtctgaggctgcctcccacggactctctctgcttatagatgggaggcttcttgtagatgttggaatctgggcgggaggtctcagggtggtggaaatggggcaggctggtccggggggttccagtggttctgggggccgaggcctgagagatgattccaggcgaccggctgtccgcccacacctctggggatggtgggggggatgtggatttgggtgacagcgagcgctcgcggctgcgaggcagctccacgtgttccaggagggaataagtgaagtgaggctcgtagatcatgaggtcgggccgctcgatgtccaggatggccttgtccttggggatggcagccaggtccttgtagcccagcacctgattgtccatcttggccttctgcagccgttcccatgcagcacggagctcgcccgccgggtcactcgcagagccctgtgcgcgaggggagaggacagcgtgtcaggctcggcgcggctgatgggcactgcgcgcttggggccgcgaaagcagctggcgcgttcccccgggctggcgcgtcctcatccctcggcggtgactctccaggcttcaagggcccagggcgtggggcaggagcgcagcagcctcctcggtgacatacacctc

SEQ ID NO: 98741 - DNA, 734 bp, Homo Sapiens
  misc_feature (123)..(173): n is a, c, g, or t
ccaccctggaggttgctgacaccctgtgccctcggctgacttccagccggtggcacagacgcctccagggggcagcactcaagcgcatcttaggaatgacagagttgcgtccctctcggttgnnnnnnnnnnnnnnnnnnnnnnnnnnnnnnnnnnnnnnnnnnnnnnnnnnntgggttcaagtgaccctcctacctcagccccatgaggacctgggactacagtaacagcgggaacatgaagccgccactcttggtgtttattgtgtgtctgctgtggttgaaagacagtcactgcgcacccacttggaaggacaaaactgctatcagtgaaaacctgaagagtttttctgaggtgggggagatagatgcagatgaagaggtgaagaaggctttgactggtattaagcaaatgaaaatcatgatggaaagaaaagagaaggaacacaccaatctaatgagcaccctgaagaaatgcagagaagaaaagcaggaggccctgaaacttctgaatgaagttcaagaacatctggaggaagaagaaaggctatgccgggagtctttggcagattcctggggtgaatgcaggtcttgcctggaaaataactgcatgagaatttatacaacctgccaacctagctggtcctctgtgaaaaataagattgaacggtttttcaggaagatatatcaatttctatttcctttccatgaagataatgacaaagatctccccat

SEQ ID NO: 98742 - DNA, 1114 bp, Homo Sapiens
cggccgggaggtgagcgcagctgtcgttcagcttgtgggtagcactcgggccgagccatgcaggcggcgcgcgtggactacatcgctccctggtgggtcgtgtggctgcacagcgtcccgcacgtcggcctgcgcctgcagcccgtgaacagcaccttcagccccggcgacgagagttaccaggagtcgctgctgttcctggggctggtggccgccgtctgcctgggcctgaacctcatcttccttgtggcttacctggtctgtgcatgccactgccggcgggacgatgcggtgcagaccaagcagcaccactcctgctgcatcacctggacggccgtggtggccgggctcatctgctgtgctgcggtgggcgttggtttctatggaaacagcgagaccaacgatggggcgtaccagctgatgtactccttggacgatgccaaccacaccttctctgggatcgatgctctggtttccggaactacccagaagatgaaggtggacctagagcagcacctggcccggctcagtgagatctttgctgcccggggcgattacctgcaagaccctgaagttcatacagcagatggctgggcagcgttgtttgttcagctctcaggactgcccgtgtggagggaggtcaaccatggagctgaccaagctatccgaccagaactggctacgtggagtactaccaggtgggctctcctaactcctgcgtctttattcctggacctgggtcatctgccctcaattgcctgcccgggactggccaagcgctccaagtgtctcctggcctcgatgctgtgctgtggggcactgagcctgctccctcagttgggcatccctgggccgctgatggcctcttgcgcagtggccccccagtggacttctgtgtgggctcctgaaccctttcatcctgaaaagtcccgggaagggccaaattacgcaccgaagggggacttcccttactccctggtattggccccccccaagaggggaagaaaagccccctttcccgaagaaaccctggaccccccttttccgaggcgggccccttttccacccccttggcagtattccagggtctccgggagggttcttttttacacac

SEQ ID NO: 98743 - DNA, 1158 bp, Homo Sapiens
  misc_feature (215)..(215): n is a, c, g, or t
gtatatcttgtatcgtgataggggatatattctcctaacgagagcggcatttatggaggggtagtattgatgtatgtacggcgatggagagacggcgatctactaatattgaggtagaagggtggggggaataaactgcgtgatggccggaactgagggatagaaggattcgggatacaacttcctttttgtggaggttgtcgatggacagttantgggaaggcttcgggtcctcgtgagtagggggggtacgattatttcccgccatgtagcaggcgaccctatatccagggccttaatttttattgtgatccggccctttgtgtttccgagtggccactttggcgagggagccctttagaacatccatttttaatgtttttcccggggaccaagccccttttcatctgaaagggaccagccctagccctggctggcttagcttccaagtccaaggctgagggttcaacccttgttggagtggcaaccaggtcagctttgttggcccacgaccacccacaggcagccgggtgcccaggtgtagctgctgcacgtgctggtggaactggctgatgagttcatagctctggtagtcagtgatggagaaaacgatcaccacagcatctgcccagcgaatgcacctattcagctgttcactgcagctcaggctgttctcatggacctgaatacctggagtgtcttgaacctgaagagccagggtttcaccttctatctgaacttgtctagtatagagattacctgcatttctttcatagtcaccgatgaatcgtttggtgaggaaccggaccaccagtgcggtcttgcccacgccgctggcgcccaccacggcgatcttgaccaggcggcggccggcggcgcccacacagcagtcggaggccgcggcgttgcccggcgcggggtactcggcgatggtgcacatgttctgaatgaggcgcatcgcctcggctgcggcgcaccgcgcgggaagggactgagggactggagaatgctagcgctgcgcgggagcgggcgggaggacccgactgcggggctccgcggtaagaaataacaacaataaataagtgcaggtacgggcggggtggggccgagcgccgaggttccgcagggctcaggctccatcccgggaattccggaccc

SEQ ID NO: 98744 - DNA, 805 bp, Homo Sapiens
gtcaaacggaggagacagagcagtgattcacagcaggacgtggttacttgcagaactgaccgtcctctcaggactcactagggtctcttctctgacgagatgatacctggaattgggacactcacccaggacacactatggtgcttcagccaagtgaaaggcactatcgagattggaaccacagaaggctcggaccatggtgcagtcccactggctcccctgcccccctctcctgtgagactggctgcggggagggatcatggatacttgtctgccggcttctggttcccacgcaagtaagcctgctgtcaatggaggaggaaattgatacccgcaaaatcaacaaacagttttccctgcgcgaaccacagttatgcaaccgaagctgacattatctctacggtagaattcaaccacacgggagaattactagcgacaggggacaaggggggtcgggttgtaatatttcaacgagagcaggagagtaaaaatcaggttcatcgtaggggtgaatacaatgtttacagcacattccagagccatgaacccgagttcgattacctgaagagtttagaaatagaagaaaaaatcaataaaataagatggctcccccagcagaatgcagcttactttcttctgtctactaatgataaactgtgaagctgtggaaagtcagcgagcgtgataagaggccagaaggctacaatctgaaagatgaggaggggccggctccgggatcctgccaccatcacaaccctgcgggtgcctgtcctgagaccatggacctgatggtggaggccaccca

SEQ ID NO: 98745 - DNA, 1137 bp, Homo Sapiens
  misc_feature (890)..(900): n is a, c, g, or t
cggctggaccggtccggattcccgggatccagtttgcgcggaccccgtcccgagcccgccgcggcatggacgcgcccgcccggctgctggccccgctcctgctcctctgcgcgcagcagctccgcggcaccagagcgatgaatgacatcggcgactacgtgggctccaacctggagatctcctggctccccaacctggacgggctgatagccggctacgcccgcaacttccggcctggcatcggaggcccccccgtgaatgtggcccttgccctggaggtggccagcatcgaccacatctcagaggccaacatggagtacaccatgacggtgttcctgcaccagagctggcgggacagcaggctctcctacaaccacaccaacgagaccctgggtctggacagccgcttcgtggacaagctgtggctgcccgacaccttcatcgtgaacgccaagtcggcctggttccacgacgtgacggtggagaacaagctcatccggctgcagcccgacggcgtgatcctgtacagcatccgaatcacctccactgtggcctgcgacatggacctggccaaataccccatggacgagcaggagtgcatgctggacctggagagctacggttactcatcggaggacatcgtctactactggtcggagagccaggagcacatccacgggctggacaagctgcagctggcgcagttcaccatcaccagctaccgcttcaccacggagctgatgaacttcaagtccgctggccagttcccacggatcagcctgcacttccacctgcggagggaaacgcggcgtgtacattcatccaatcctacattgccctccgtcctgctggttcgcccatgtcctgggtctccttctggatcaacccannnnnnnnnnnccccgccagggggtttctaggcatcccccacgggtgcttgacaatgaaaacccctctgggtcaggggcccgcttcctcccgggcacggggatcagccatcaaggggacttggacgttctactttcggggaactggcaatgggcctccggggttggccccccccggggggaaaaccccctttggcccattttaaaagcgcggaattagggggaagaaaaccaaaggggccagggtcca

SEQ ID NO: 98746 - DNA, 1137 bp, Homo Sapiens
  misc_feature (565)..(565): n is a, c, g, or t
gctcctccgcgtgctgcctccggccggcctcaggatcccgggagagggaccggaacttggcggggctccccggtggaggagctgccttggcgggggtggcaacagcggggccgggaggggtccggttcaagttggagttgccggccatggcccgccgcagggggctctcgggcaggggctccacaagcagcggggtgctgcggcagctctccccagtgttgtaggcgctggtgctgtccttgtccgacttctcgggcagctcggagatgtcggacagctcgtgcttcttgggctcgctggccgccaggtcgtagaggctctcctcctccagcagccaggccttcatgcagcgctcacgcagctgctgcatcttctgcgcccgcagtatgttgcggcacttgaattccaggtgccttagctcctcctccagcatggccatctcgtggcccaggctctcgttgcggttgacgtccaggggcgctgttgcctccggaggcccggggaaagaggaggcccagctggttgccgttctccaggtggcacttgatctccaaggagctcacgngtagcgctcatactccttcatccgtgaggcccgggacagtcgcccccgtcccagccccgccccctcaggccagcagagagtccatgctgaaatggaagtcccggctctgcagggcgtccccttgcaggccaaacttgcgcaggcttcccggggtgttggtggagctcgggggttcgtcccccagcaggtcgtgctcagagctctcttcgttccgggtgctctcgtcagtccggcccaccccgctgtccagctcctggctgttgctcaggcctgggccggcatcgggagcccccttctcctcttcgtttccgggctgctgggcagggggtgatttcagtttacgagcacgcagctccccctcattctcagagccaaagtcatccaggaagtcatcccggtcgctgtccttccaccttttcgccagctgactctcaggtcgggccaccagcagggagatgttggtgttctcttcctggctcaggatggccaccgcctcttcccggttctggacgtctacaccgttaatctggatgatgcggtctcccatccagggaatccggaccggtccagcc

SEQ ID NO: 98747 - DNA, 1453 bp, Homo Sapiens
  misc_feature (1095)..(1095): n is a, c, g, or t
gcggcagcggcctcgggcggggccggccggacggacaggcggacatgaaggcgccagggcgcgcgtccgcccgggccgggcatggagggcgcctccttcggcgcgggccgcgcagggccgccctggaccccgtgagctttgcgcggtggccccagaccctgctccgggtcgcgtcctgggtgttctccatcgccgtcttcgggcccatcgtcaacgatgggctacgtgaacaccgacagcggccccgagctgcgctgcgtgttcaacgggaacgcgggcgcctgccgcttcggcgtcgcgctgggcctcggagccttcctcgcctgcgccgccttcctgctgctcgatgtgcgcttccagcaaatcagcagcgtccgcgaccgccggcgcgcggtgttgctggacctgggcttctcaggactctggtccttcctgtggttcgtgggcttctgcttcctcaccaatcagtggcagcgcacggcgccagggccggccacgacgcaggcgggggacgcggcgcgggccgccatcgccttcagcttcttctccatcctcagctgggtggcgctcaccgtgaaggccctgcagcggttccgcctgggcaccgacatgtcactcttcgccaccgaacagctgagcaccggggacgagccaggcctaccccgactatccggtgggccagcggcgtggaagggcaccgagacctaccaaaagcccgcccttcaccgagaccctggacaacaagccccaaaggcgtaccaggtggccccgcctactagcggctggcaggcacagaaccagggctacaaggccaccccaccaacgcaggccccagggtctccgggacctcccttgggtccttccagctcagtgccgcggacagagtaggtggccgctttgcgccatccggggccaagagggggtggacccgcgtgtctgggctgcccctgccaagttcccccagtccctcagcacctggccccaggactgaggtcctgagaaggggatagcactgcccaggacgtgtgtccctagcctggaatggactggcctggggaaggctttcccctcttgggccacacctgctcactctgngggttgggggtccagctgccctctacgatcaggtgcaggggctgcccaggacaaagcgggggcaggggaaagacaccaccctcgccccaagactggggatcctggccactgttcccatcccatgtccctgtgggtagtgactgtctcgtttctgtcatggtggtgcgtcccgtccggagccactctccactttctctcacaggctgctagaacagcccagccctgtcagtgttgtgatcatgggccagtctttcgggtttcacctcctagtactccacaagctgctccctcttctggggccccggcccctgcccaggtgtggggtggatctgggcccaggaaagcccaagggtatctg

SEQ ID NO: 98748 - DNA, 932 bp, Homo Sapiens
tcctggtggagtgaggaacccagcaacacgctcctgacttcccttcccaaggactcgacctgagaaccgccatgtactcggagatccagagggagcgggcagacattgggggcctgatggcccggccagaatacagagagtggaatccggagctcatcaagcccaagaagctgctgaaccccgtgaaggcctctcggagtcaccaggagctccaccgggagctgctcatgaaccacagaaggggccttggtgtggacagcaagccagagctgcagcgtgtcctagagcaccgccggcggaaccagctcatcaagaagaagaaggaggagctggaagccaagcggctgcagtgcccctttgagcaggagctgctgagacggcagcagaggctgaaccagctggaaaaaccaccagagaaggaagaggatcacgcccccgagtttattaaagtcagggaaaacctgcggagaattgccacactgaccagcgaagagagagagctgtagggccagctgccgggctcaggccactgcccaccctggcctggacagcctccttcagcccttctgtacctggcagccctgggccccaggccctgggacgtctgtgatgttcccacctgcttctgtagaaatgtgtcaccccagagggcctggctctccctgggaggctggggcccctaagctcctaggttttccttccaagcacccagccctcctgctccaagagggataacctgcacccctccctgcaaggggttcagagcccagcacaggagctttctctggcagaatttgaggaggaagaaggtggccctctgacttgacaagccttctgttctgcccagggccttcccaacaggaaatctccaaggctccccagggccccgcttctccggtaaacccaagtcctaagtctcaaagaattcccca

SEQ ID NO: 98749 - DNA, 814 bp, Homo Sapiens
ggcaactgggaagagttgatgaaggccatgatccagaaggcataggacactcgggtgcctggcccggtccatttgggagtcagccctgtgaacttcttggttggaccaaggcattggcatcttacgtggtgctggcacagcaacgctggagacagtggaacagggtggccgtcgggagatggattgttgccgtgcatattggcaggcaaagcagttgacctcagacaggaaagggtcagcaaataagggggctcatgcagagcaccaaagcccacgatagaaatggagcacctggaggaagacggccgagtccttccgggtacatccttaccagctgcatgttggccacggtgtcgatgcagcccatggccaagcccgccagcgccatgactgaggccagcaccttcacgtcgcggcagaaggggatgacggcaaacaccagggagatggccagagaggaggtgaacagggcccatagtgactgggccagggtccttttgaagacgcccccgagggcgctgcccagcaggaggcagagctcgctgcgagaagaagacccaggagatctgggcagcgagctgtgcgtctgacagcgcaggtccagcagcgtgggccccaggaaggcgatgcacaggccgaagctgaagaagacgctccagtaggtgagcgtgggctgcaggttgcggcggagcagccccgacacgcggccgtcgcagcccatggcgcaggctgacgggctcgcggatctggtcccggcgagcccggtgcccgagtgccgcccgcgggagggccggccgggctggggaggcccgcg

SEQ ID NO: 98750 - DNA, 919 bp, Homo Sapiens
gttcatatggccaaatccgggcccagtggaccattatggaggaaatgtataagagttaaaccagatagctctggggatccagaatttcgaagaaacgcttgcaagtgttttcacaaagggatccttcagggggcctgcccagggagtccaccggggtgccaaaggcgacgctggcaaccacatctgtggtgtaattgcagtagcacctctggatgtcaaatgcgtccccagattccgcatagcgttttaaatgagccaggagaaggtcgcaggcttggctgatgaggggaaccatctcgttcagcttttcaggactgaaagcagacatcagggcacctctgacctcttcccatcttttgtcacgtaaaaacagaacgctgtcggctaccgacttgaactccaaacccgacgccattctgttggtaaagttactgaagttctcaaccaacacctgcttgatcatgtctggctcagaaataacaataaacatccgacgaccaagatagtacccacacagaggtccatacagctttctgagctccatttggctttcccaaaaaccctggcggaaaaatgtcaagtttccaatgaaaggagaaggcttgggatgtctgaggcctaacttctccagtcttgagaatgctgatgtggagtaccatttcaggagggccaagagagccactgacagggccaccgtcaccatggggccattcacttccaattttagaaaccccaaggcttccatcattcctctgagaccccagagtggtggtcttccagatgagacaggaggctgatctcgccgcccttatgggaaccgtgctctgcaggtagaaaagggaacaggcaaccaagcaaacatcacatggagtgggcccccacaatgtgctctttctcagatcccgggaattccggaccc

SEQ ID NO: 98751 - DNA, 853 bp, Homo Sapiens
cggaccctactccctctgagttgcgctgggcttggctgctgcaccatgaccctggaggggatccgctactcgcggggctccctgcagatcctagaccagctgctgctgcccaagcagagccgctacgaggcggtgggctcggtgcaccagtgcctgggaggccatccgcgccatgaaggtgcggggcgccccggccatagccctggtgggctgtctcagcctcgccgtggagctgcaggcgggcgccgggggaccgggactcgccgcgctcgtggccttcgtgcgcgacaagctgagcttcctcgtcaccgcccggcccaccgctgtcaacatggcccgcgccgcccgcgacctggctgatgttgcagcccgggaggccgaacgggaagggcgctaccggaagaggcggtccgggagagagtgatctgctgcacccgaggacatgctggagaaagacctcagagaacaaccgaaagccattggggacctaagaagcccgccacctcctggaagcgggttgggcccccagcggtggcaaggtgacttgtgctgacaccactgtaacactggtgctctggccaccgatggctatggtacagccctagaacgtgaaacgggagctatgcgagcattgggaagagcataccaggcagagggaactgccactgcgagggcccctgggcgggactgtgctcgggagcccggctgacggcctttgagctggtctatgagcagatccccgcacccttatcaccgacagcatggtggctgctgccatggccataggggcgtgtcagctgtggtcgtgggagctgaccgcgtggttgccaacggcgacacagcaaacatgtgg

SEQ ID NO: 98752 - DNA, 869 bp, Homo Sapiens
ccgggatctgcttatagaccagcttcaaagccgtcagccggcttccctgttgtaggccggttctctgtcaagaaggcatgctccagcggcccaggctgtgcagtgagcgaatcacaccctgtcgggggccccacccaccaggagaagcccccggggaggggcaaacagacaggtggtccattggttaggggtgcaggctcctagtctgggcgtggattgccaaaggcttaccgagcacagtcccgcccaggggccctcgcagtggcagttccctctgcctggtatgctcttcccaatgctcgcatagctccgtttcacgtcttgccaccgctgggggccacccgctccaggaggtggcgggctcctaggtccccgatgcttcggttgtctctgaggtctttctccagcatgtcctcggtgcagcagatcactctctcccggaccgcctcttccgtagcgccctcccgttcggcctcccgggctgcaacatcagccaggtcgcgggcggcgcgggccatgttgacagcggtgggccgggcggtgacgaggaagctcagcttgtcgcgcacgaaggccacgagcgcggcgagtcccggtcccccggcgcccgcctgcagctccacggcgaggctgagacagcccaccagggctatggccggggcgccccgcaccttcatggcgcggatggcctcccaggcctggtgcaccgagcccaccgcctcgtagcggctctgcttgggcagcagcagctggtctaggatctgcagggagccccgcgagtagcggatcgcctccagggtcatggtgcagcagccaagcccagcgcaactcagagggagctaggatcccgggaattccggaccggtccc

SEQ ID NO: 98753 - DNA, 860 bp, Homo Sapiens
aaaagtaaaccacaccacacacactccttctacatacgtcaaggcaggatccgtttcaatttcatactgtagaacaacacttgtgccattgatgactggttctgtcttgtttttaacaatattgaaagcttcatgtgtttccaggcaaaaagttgtaattgaaaccaggatgaagaataaagaagcaaaagcaataaacctggcggctctggacgagtaggggtcttcgaagagggcccacatgcggggctgcagcctcctccagcggccagatttgccgtcggggcccccgagccccgccgcgtcctcgatgcccagcctcttggccgccaggtcctcgtcgtcgccggggtcgccgccaatgaggtcgggggtctcgaagatgtccagcgcctcctcggcgtcgcggtgctgccggtaggtcatccagcagcagggctccacgtcggtctcgtcgatgccccagaaggccagctcctcctcgaagagcggcccgcacacgtctgcggggcagtgcagcttgccggtgcggtagtaattgagcacataggcgaagacgcccgggtgccggtcgaagaagaactcgcagcccccgccgccgctgctgccgctgctacccacaccgccgccatcggtctcgggccggcccccgccgtcggggtcggccagccaggcgaggcgggttcccggtagggtgcgcagggtgctgcggtaggtctcatgtcgcgtgccgcccacgttgatgatgatcttctccgacgcctcgcccttggccatctcctccttcagacatgttttggacggaggcttgttccccgacttgcgcccgcggtaggaggagacacacaccgagctgatca

SEQ ID NO: 98754 - DNA, 778 bp, Homo Sapiens
tgctggctgcggacacaccttgtaaactggtgaattcacctttctcccttccacgactgccaacacggaagacgagctcatcctcaattgggttgtcctttcgtttgccgcctgtgctgtacatggagctgggcctacgcactgccttctggcgcacatggctgccggggccgccaggggacttgacacggcgcttcacatcgtccggggaaggtggcaggtcccccggacgcagggcacgcacgcggaaggggctgccgcgcactggctgtccgtagagcagcaccgagaggagcagctcgccttccgtgcgcgctgtgtacactagctcatatgtgccattcttgtggtccaccactggcaccggaaggcgcgtgccgtccgggccggtgatctctgcacgcagctcagcgctgcctgtgcgcaccaaccgcccgtccttgtctttggtagtgacagtgagcgaggcaggctggcccactagcgcctggcgcaggccctctcccgtggccaccgtttcgtgtgcagtggcgctcgtggtgagcagtgcgcccagattgagcaccgatcgccgcagaccgtccacctcaaggaccagttccagctgtgcattctcatgtggcgcgctccgggaaggcctgtgcccgccaatgcagccagccgcgtctcgcatgtgcttgcgcaccagcaacaactttccggccgaacccaaggcgcatgcctgctctgcaaagctgcagctattggtgcgagtgtctgacccctggcgccatgtgtc

SEQ ID NO: 98755 - DNA, 1151 bp, Homo Sapiens
  misc_feature (39)..(39): n is a, c, g, or t
acgtagtaagcgcgcggtgttcggtctcagaatggatgngcatcacacatgtcgagtccatggccctggcagtagagtttaggccccgtctttaggtagtgttttcgtaatttcacagtatattattgcgggatataacaaaggttgcgcctgggaccatcgttttcgaaaagaaaatccctcggttatacggggagtcacggcgtggtaagggccacagaagatcacttgaagatcccccggcggacccattgagcggtgccccccagcctggaatttccggtttttaaagtcttgcaccgttgggtgaatcccaaggcagaagttcccatataaaaaaatggggaggttaggttttccctttttttagaatcttgtccaaaaaaaccccgcccttcttttattttagcccaggtcccaaggtggatcaataggggggggactgcccacccaaaattcgtcctgttaaatggccaggggttcttatataacgaagtccaatttgttggcgggtcactaaaaataacctcaaagccaagtctatccttctccttccaaaaacaaaaatgcgttactttcttatcccagaattcatctggctttaccacacaaacaagggacacctcagctggaacaacattctgtagcattacgactactgttttcaccacattccactgtgattttctgccatccacaatcacggtaaatcctctagccttacacttctcacttggaatgctgagtaggtagtctaaggtgacactcagctcatccatatttgtctgttcgaggcataatggaattgtcaaaatgaggccactccgtctgtcctttcctcctgaaaggaaggctagttttttcttcagaatgggtaatattactgaggcctccattttactccagtgaacttccttaattccgacagggccggtcaccggtcacacaaaggacgccagtcgcgggcgctggacgcgggactcgccccgagagcagggagccacatctggttcctgcacgctggcaaaagagacccgctggaaaataaggactaacgcccaaacctgttgcacaattctgggtccctttcacccagaaatgaacaagggcgctcaggaacggaaaagcgcgcggcccggtctctccggacc

SEQ ID NO: 98756 - DNA, 1024 bp, Homo Sapiens
tgtttgtccgactctgggttcatggcctggagcagtccgctgtggcttcatcattttgctcattcagaccctatgtctgaacctgacccagcacgtatacaggctcagtgagacatcctgagcaattatgctccgtcttgcaaccggcctgtctccaaccccttccaacagaggctgactctgtcccagcgagctctggccaacattccacctgcccagctgctgggcctggagcgagaagctgttgcctcagttcccttcagcgcagatagcctttgctgtcctttggaggagactcctgaatgtgacagaaggaaatttccaccagttggtggcactgctacactgccgcagcctgcacaaggactatggtgcagccctagcggggcctgtgcgaagacgccctggaaggcctgctcttcctgctactctgtctccctgctgtctgcaggagcgctggccactgcctctctgcagcctgccccgtagcctgggccctcttcccacccagtgacgactacgatgacacagacgatgacgaccctttcaaccctcaggaatccaagcgctttgtgcagtggcagtcgtctatctgagcccctcctcccggctggactggagcctggctcccctcttcgttccttccctggctgccggaggagaccccactaacccagcctgcctgggctctgaccactaacactcttggccatggacagcctgcacaggaccgcctccctgctcttggccactgtgctcccatttctgtccttggccttgggagtagctgagggggcagactagggagtagggctggcaggggagggggcagacagcctcgcctcgcacccttcatccctggctgccggtcccatccttggagggactaagctgggggtgggggacatgagtccccctgctgcccctgccacatcccagtgggctctgaccccctgatctcaactcgtggcactaacttggaaaagggttgatttaaaataaaagggaagactattttacaaaa

SEQ ID NO: 98757 - DNA, 849 bp, Homo Sapiens
gaggaaggtatttgatggtatcacctattcctcagtgaccacatgaggaaacaattttaagaaatacggaatttcagatatctgtggctacaccttctatggcggagaccgatattttgcttgtgcagtaatatggtggtcaacagtcacagcctgaaccaagttcctctatgttctccgtggtctttctgagaacctctcttgttcagcctgcatctatcacatatgccaacacatcgtgatccagaataaagccacttacttgcccgtgtcacaaccttgtcagatgctagtagttggtctggaatcatttattggttctgagagagaaactaacccattgtataaggtattatcatggattgattcatatacggcagattcctcggcttaataacttgatctgtgatgaatcagatgtcaaagacttagcttttaaattaaaaaggaagctattcaccattgagcgactgcatttgcctccagacttgtcagacacagtgacccgctcaagcaaaatggatctggcagaatccgccaagcggctgggcccaggctgtggcatgatggccggaggcaagaagcacctggacttctagggattcctccttagtcgctgcatgcagaattctatgacactctaattatgattgctaatagcttatgtaaatatttttcttaacaatttgaccctccactccttgaaaaacacaggattataaaatggtgccgccatttctcattttttaactttttacagaactagcacagcagaaatacttttaaatttttccttcatgctctagagaaaataattttatttttaaataaacgccaaaaaatgtcaaa

SEQ ID NO: 98758 - DNA, 1100 bp, Homo Sapiens
ctggtccctggaatctatgatgaagtggttcctcttacagaagaggaaatacatacatacaaagccatccatctagacctagaagaataccggaatagcagccgggttgagcaattgctgttcgatactaaggaggagattctaatgcacctctggaggtacccatctctttctattcatgggatcgagggcgcgtttgatgagcctggaactaaaacagtcatacctcggccgagctataggaaaagtgtcaatccgtctagtccctcacatgaatgtgtactgcgctggaaaaacaggtgaaacgatcatcgttgaagatgtgtttctccaataagaaagagttccaacaagatggttgtttccatgactctaggacgtacacccgtggattgcaatatattcgatgacacccagtatctcgcaggcaaataagagcgatcagaacatgtgtttggaacagaaccagatatgatccgggatggatccaccattgccaattgccaaaatgttccaggagatcgtccacaagagcgttggtgctaattccgctgggagctgttgatgatggagaacaatcgcagcatatgagaaaaactcaacaggtggaactacatagagggaacctaaattatgttgctgcctgtttgcttagagatggcccagtctccattgaatcacaagaaccttctagtctgatctgatccaactgacagatgtcacctcccccacatccctagagcagggatggaaagtaaatatccagagaatttgggtctagtatagtacagttttccctgtccatttgaaaatgtcgttgggatatcatggatcagtaataaaatatgttcaaaggcacacgatgttggaaatggctattaaggtccctcctactgcacaccttcctcaagtcaggagctgctctgcagcaacttgatcttccccaagtcctgtgcaatagccccaggattggattccttccaaccttttagcatatctccaaccttgcaatattgattggcataatcacgtccggtttgctttataggtcactcaagtgctcgtgacacataataattccatggcaatgtcgcctttgt

SEQ ID NO: 98759 - DNA, 656 bp, Homo Sapiens
ggctgggcccggcctcgtggggacattaaagggcgcggtggctccactcgccccatttctgctctttgcgtacccaccgggggtctgcctgggcgaatgcagtgggacggacctggggtgggcactcacctcagcagagcctcaatgccacctccccacaccacccaagcctagctgggtgggaagacggaggccctgaagcctgcgtgtggagggggtgctgcccaagggtcgccttccccagcttgtgctccaggggagccccgacgccggcggggaggcagggatgtcgagggcccctcacagctgtgcccgccctgccccgctagactgcccctccagcttgcacccagcaccacctgagtctaaccagcgtataatgcaataacaggtagagtagaactgcttttggcggcgaccgtcacacactgtcctcagcccactgcacctggggaagcccctcgtgcagcccctccttagcacatccagtcccagcgtggcccttggcgcgcagcagcaggcgaactcccagaaggtggtggtgggcactgtgagaacgtggcctgccctcactggccaagtgggcccacagggagaccccggggccttgagtgggacggcctgacgtccgaaaataacactctggtcggtctgac

SEQ ID NO: 98760 - DNA, 520 bp, Homo Sapiens
gggatgccaggctagagtctgattatataataattcaaaatggtaactcccaaggtaatgctttcttccatttcatcaggttcttttatccccactgcaccccctccccttctcccttgcctatctggatggcttctcagaagctcggccctagtcctccctgccttggcggggccagagcccactactgctgaggcagcactgctctcgtcagctgtgttgcctttaccaagtgtcttcagagggttatgagttagagtagctggcctggggagagggtgcctccctgggtttgatctttagggtctgactttctgcagagaagatgttttacagatgtgtcaaagctgatgtaatgtggttgggggaggaaatccagacccaaagtgtttgtcagctgggtgtacaactgcctatgtgatcctctgtcttaaaatgatttctgtctgtgctgcgaaacaaagacaaggtgaggtgtttttcttttttgtaataatataaagctgtgtgtttctgcaaa

SEQ ID NO: 98761 - DNA, 1173 bp, Homo Sapiens
gttggctgtgcctccagattggaggcttcgttggttgtcccgcgccgttgctccccttcttttgcaccccttcgtttgcgcggctctaggggcacattccgtcttgtatctccggcgatttgcccttttttgaccgggttccccagtgttttgtgtggtcccggtgtttccatgtagccggtcatcgttgtctcggaattttatgttatcgattttgggatcttggaagttcaggcttagttgggacggcaatttctctggtccgggggactatctgtgtcttcataaggttttgggatcgtctaatctggggtaccgccctcatcgagacctgcccatggttcatgactacctccgcagcctagttggtgttcccctctatgtaaactgacctgcatatcttgatgtaacatttcgagtgctagttgtggaattggggtcatgacagtgtcatcatgacaggctccgtaccactatcttcttcaggatgttctgactaggaatcgaccaagtgtgtatgtgaccccttgaggcgtgtcgtagggagactacagcaaagccccgggctatcctctaaaccccgattaagtgtgtgctggggggcaagcggagttaaatagacgagatcagtgtcgacagtctggactttagcaacaagtatcttgcatactagttctggcatccttcagataaatagtgtatgagcagtggcggcgtactaaataaccgtatattatattccagggacaaggttaactaggtggacagagttattacttaataatctcacatactgaatactagtcaaacaagtttttaaatgtttcttttgggtcttcatttgatgcattgactttaatttccctatactaggaaatgattggaatagttattaaaaggagtcctaacattccctagctccaccaggttctaagaaacttttgtcaaacccaataggtattgggacacttctgtttagaattgaaagctgccagctaacagtaattcttccatagttgacttgaacttctgatgcttttattgcccagttccttctctggtgggtccagtgtctttgttcctaggtgtctgctgcgataaaatgaggttgtctggtagtatgtaaggagaaaagagataagttttttttaattaagcaattccatttgattg

SEQ ID NO: 98762 - DNA, 1067 bp, Homo Sapiens
aaagactcccacaggcggtaacctgttcaccggatggacgtcacccccacctcctcccacgctctgatcccgatcctgcagagcaaagacctatgaaaccaggatccgacttatctgaagccataaacaatccgcggctccctgtaagggcccagaccgccggcctggcgtcaggcctactcgcgctcagaacctctgctcacttacatcatgtgcaggtctcgggctgcctgcaacggagagccccagtgctggccttccgggtgaggctggggtcagagctcagggaggcctgaggcttcctcttgttttccgtggccgactgtcatcccacttcgaaacacgcagagggaaaggcagcccgagggctctttctcccaggaagttgctgggcagctgccgccgggcgccaggacaagcgagggtggcctgagtccttgtgctcacatggcgtatgccgcccagtagatgacattgacggccgcaaacgccgcagggaacacagcgcgggcgtaaatgtcaatggtgtctgcgtcgatgggcctgagccggggcacggatgcccccctggcctcctgagcgggctgccccctccttctttcgtctccctgtctccacccccaccgacctgtaggagcccatcaggttccccgggacgcggcgctgccggcgggagatggccagctcctgcgtgacgccggcagcagagagggagaagaggacaatggcgttcctcacgtccatctctgccctcggcctggagaccttgaccttggccttctgcttcttcctgtagtcggcgttgaaatgagcaaaggcgtactccaccagggcggcaaacacgaagacatagcagatccagaagtagacgtccagtgccttgatggctgatgcccgtggcagggaggagcgggcactgaccatgagcgtggtcatcgtcagcaccgtggtgatgcctagagacacctggcgggcaccgccgcctggctgatccagaaggagacccaggacatggcgaccagcaggacggagggcatgtaggattggatgatgacacgccgcgttcc

SEQ ID NO: 98763 - DNA, 978 bp, Homo Sapiens
aggcacagataaagataagttttactgtcatgctgcttttaacataacagagcaacatcacctaggaaaaaagtttgtaggaggatttttaatccatatatttgtcttatggctagataaagatttctccgaaaaaaagaagcatgtcaggaatctctgggtgcccctttttcctctggggacttctagcattgttgggcttggctttggttatatcactgatcttcaatatttcccactatgtggaaaagcaacgacaagataaaatgtacagctactccagtgaccacaccaggttgatgagtattatattgaagacacaccaatttatggtaacttagatgatatgatttcagaaccaatggatgaaaattgctatgaacaaatgaaagcccgaccagagaaatctgtaaataagatgcaggaagccaccccatctgcacaggcaaccaatgaaacacagatgtgctacgcctcacttgatcacagcgttaaggggaagcgtagaaagcccaggaaacagaatactcatttctcagacaaggatggagatgagcaactacatgcaatagatgccagcgtttctaagaccaccttagtagacagtttctccccagaaagccaggcagtagaggaaaacattcatgatgatcccatcagactgtttggattgatccgtgctaagagagaacctataaactagctggaccatgatctagttcaatgatttggtcctattgaagatggcttctaagacaacaagatgcacagaggacaccgaaggacttggcacgcagggtgatgacctgatcattgttgatggcgatggtgggttacctcttattcacagcttacacttatgcatggccaatgttaaggccatgaaaatccgtattccaatactttaaaaatgctttactactaaaatgtgtcaatctacgtggccacctctgggccatttctctatattttaaaacc

SEQ ID NO: 98764 - DNA, 1581 bp, Homo Sapiens
gagcaagagcaggtggtacgccgactgtagttggctggctgtgggcacgggtgtgggtggttcgcgttgctagcgcccatgagtagtgcaattgcagtgttcctcgaggtcaggtttacattctcgtggttgagcccgcaccgccgcgtgctgttttgtgggcgccgtcaaggtaggttgtgccggcgtacactctgtcaggtttggggttcacaccccccttgtctgtcggggcgagccggtgttgtgcgccgcctcgccatgggtcggcccgctcgggccctgttgccggggctcgttgttatcattgtgtctacttcgtggggcacacacaactggtgtacttcatttaccgtctttaaacaccgtgtgtccacatgttaaacccggggtctcggatatgtcccaggaagcaccggggaatttttgtccccacatattttccacggtttgaaaaatggtgattcccagaggtggtgcccaccaccaagggggccacgcgtggatgggctccccaaaagtggtgtctccaaagcgcccaaacaaggtgtttcccgcggagtgcacaggcccgagcaactcccaccccagtaccaggcccatgagggagaagatgccacaattcgcagtcccatgtgaatcatagttgggccttgagaaaaaagatattcttcgttttactagtgacagcaaacgaagggctcaccgatttctgctccatggtagtccataacattttgttctgatgtggtgtaataaaacctaagcgttcacatcatgccagaagtgctgtggtccccattcatcttgaggtggtcctagaaaaggattctgagaattaagaagtccaaagaaccaatgacagaattcttctcctaggcgacgaaaatcaactttttcagcttttttatcttctttcacctgctgttgaaataggtggatgtcctctgtctttgtaactggctctggcgtttccttcaatttcagttgtggttgcttttgccagtaatcttttgcatgctgaataagattgtgtttttcagtagctggaggtataacaatcccctgtgttgccaagtacttaaatataacttctcggtggacttttctacgcctcagaagttcttctgcactttgactgtatgctaatattgcatgaacagcatcttggcggtcctgaggctgcaccaggcggttggtgacggtgtcgcatagggccatgatctcgtcgttgtccagtaggccaagtaggttacggcagccctccatctctgaaaagctgagtcccgacatctccatccccgggactggggggggaaagacgacggcaacaatgtcgcccctacggcccactgggcccgcgcctggcaacagacaccggaagtgcctttcttgttgttctccgtcgaagggcctccagtattccaggcccctgggcggaagtaatcgccaaagaggtcaatcaggaaacgcagtgccctcacttgtggttccgggctggggacggagtgaagtcccacgtatctcgattaagggaagtgctgggtttatatggagaacatagactatccgcaagggagc

SEQ ID NO: 98765 - DNA, 927 bp, Homo Sapiens
cccagcttccccaggccctggggctctgcaggcattcagaagtggaagccagccacagcctgggactgaagaggttaatgtgcatctgcctccgaatgttaatgtgtctaggtgatgtcagtgggagccatgaagaagggagtggggagggcagttgggcttggaggcggcagcggctgccaggctacggaggaagacccccttcccgactgcggggcttgcgctccgggacaaggtggcaggcgctggaggctgccgcagcctgcgtgggtggaggggagctcagctcggttgtgggagcaggcgaccggcactggctggatggacctggaagcctcgctgctgcccactggtcccaatgccagcaacacctctgatggccccgataacctcacttcggcaggatcacctcctcgcacggggagcatctcctacatcaacatcatcatgccttcggtgttcggcaccatctgcctcctgggcatcatcgggaactccacggtcatcttcgcggtcgtgaagaagtccaagctgcactggtgcaacaacgtccccgacatcttcatcatcaacctctcggtagtagatctcctctttctcctgggcatgcccttcatgatccaccagctcatgggcaatggggtgtggcacttaggggagaccatgtgcaccctcatcacggccatggatgccaatagtcagttcaccagcacctacatcctgaccgccatggccattgaccgctacctggccactgtccaccccatctcttccacgaagttccggaagccctctgtggccaccctggtgatctgcctcctgtgggccctctccttcatcagcatcaccctgtgtggctgtatgccagactcatccccttcccaggaggtgcatgtgggctgcggcatacgcctgcccaagccagag

SEQ ID NO: 98766 - DNA, 843 bp, Homo Sapiens
ggcgccgcgcgccgcacttccgggtgtcattgcaggatgcagaaagcctcagtgttgctcttcctggcctgggtctgcttcctcttctacgctggcatggccctcttcaccagtggcttcctgctcacccgtttggagctcaccaagccatagcagctgccaagagcccccaggccctgggtccctgccatgggggagccaagggaaacctggggcctgtctggatggcttcccgagttttcgcagggtgtgtaggtgctgatagatgctctgcgatttgacttcgcccagtccccagcattcacacgtgcctagagagcctcctgtctccctacccttcctgggcaaactaagctccttgcagaggatcctggagattcagccccaccatgcccggctctaccgatctcaggttgaccctcctaccaacaccatgcagcgcctcaaggccctcaccactggctcactgcctacctttattgatgctggtagtaacttcgccagccacgccatagtggaagacaatctcattaagcagctcaccagtgcaggaaggcgtgtagtcttcatgggagatgatacctggaaagaccttttccctggtgctttctccaaagctttcttcttcccatccttcaatgtcagagaactagacacagtggacaatggcatcctggaacacctctacccaacatggacagtgtgtgaatgggacgtgctgattgctcacttcctgggtgtggacaatgtggcacacagcatgggcctcaccaacctgaaatggccaagaaacttagccagatggaccaggtgatccaagaaacttggtggagcgtctggaga

SEQ ID NO: 98767 - DNA, 1396 bp, Homo Sapiens
atgagggagtgcgcgtgctgccccgggctcctccctgtctgcctcctctcagtggatggttccatggcaccctgtctggggcaggagggcacaggcctgcacatcgaaggtggggtgggaccaggctgcccctcgccccagcatccaatgtcctcccttgggcgcccgtggccctgcagactctcagggctaaggtcctctgttgctttttggttccaccttagaagaggctccgcttgactaagagtagcttgaaggaggcaccatgcaggagctgcatctgctctggtgggcgcttctcctgggcctggctcaggcctgccctgagccctgcgactgtggggaaaagtatggcttccagatcgccgactgtgcctaccgcgacctagaatccgtgccgcctggcttcccggccaatgtgactacactgagcctgtcagccaaccggctgccaggcttgccggagggtgccttcagggaggtgcccctgctgcagtcgctgtggctggcacacaatgagatccgcacggtggccgccggagccctggcctctctgagccatctcaagagcctggacctcagccacaatctcatctctgactttgcctggagcgacctgcacaacctcagtgccctccaattgctcaagatggacagcaacgagctgaccttcatcccccgcgacgccttccgcagcctccgtgctctgcgctcgctgcaactcaaccacaaccgcttgcacacattggccgagggcaccttcaccccgctcaccgcgctgtcccacctgcagatcaacgagaaccccttcgactgcacctgcggcatcgtgtggctcaagacatgggccctgaccacggccgtgtccatcccggagcaggacaacatcgcctgcacctcaccccatgtgctcaagggttacaccgctgaagccgctgccgccactgccatagctcggagccctcagtgcagctcatgctaccaacccaagccagggatggtgccgagctgcggcctggttttgtgctggcactgcactgtgatgtggacgggcagccggcccctcagcttcactggcacatccagatacccagtggcattgtggagatcaccagccccaacgtgggcactgactgggcgtgccctgcctggcacccctgttgccagctcccagccgcgcttccaggcctttgccaatggcagcctgcttatccccgactttggcaagctggaggaaggcacctacagctgcctggccaccaaatgagctgggcagtgctgagagctcagtggacgtggccactggccacgcccgggtgagggtggtgaggacacactgcggcgcaaggttccatggccaacaccggttgagggaaaagggctgctatacggccga

SEQ ID NO: 98768 - DNA, 1017 bp, Homo Sapiens
  misc_feature (29)..(29): n is a, c, g, or t
  misc_feature (872)..(872): n is a, c, g, or t
gggtccggaattcccgggatgcagctgtnggggagatttcagtgcattgcctcccctgggtgctcttcatcttggatttgaaagttgagagcagcatgtttggcccactgaaactcatcctgctgccagtgttactggattattccttgggcctgaatgacttgaatgtttccccgcctgagctaacagtccatgtgggtgattcagctctgatgggatgtgttttccagagcacagaagacaaatgtatattcaagatagactggactctgtcaccaggagagcacgccaaggacgaatatgtgctatactattactccaatctcagtgtgcctattgggcgcttccagaaccgcgtacacttgatgggggacaacttatgcaatgatggctctctcctgctccaagatgtgcaagaggctgaccaggaacctatatctgtgaaatccgcctcaaaggggagagccaggtgttcaagaaggcggtggtactgcatgtgcttccagaggagcccaaagagctcatggtccatgtgggtggattgattcagatgggatgtgttttccagagcacagaagtgaaacacgtgaccaaggtagaatggatattttcaggacggcgcgcaaaggaggagattgtatttcgttactaccacaaactcaggatgtctgcggagtactcccagagctggggccacttccagaatcgtgtgaacctggtgggggacattttccgcaatgacggttccatcatgcttcaaggagtgagggaggtcagatggaggaaactacacctgcagtatccacctaggggaaccctggtgttcaagaaaaacatttgtgctgcatgtcagccccggaagagcctcgaancactgggtgaccccgggcagcccctgaggcctctgggtcttggggtgggaaatcaggtgggtggatcatttgtgggggatttggtctgtggccacaaatccctggctggctcccctgtttcctgaataatgggattccgtggaaa

SEQ ID NO: 98769 - DNA, 1285 bp, Homo Sapiens
tgatagtacatttacaagcttattagaaactggtctaaaagaacacgttgaaagagcattaaaaagcataaagaggaggccttctaacccccatagcaacattttgaggtttgacacagcaagagatttttcggttctgtcaaagaacattacttctttctttcaaaggacagccagctctcaagagtaatagataatagcaataggggagcaatctgactcacatacaagctccaaagttcattggaggcaagcattccatcctctccccttacctaaccttctctcacttgctcacatagacttaactaaatttcatctctcgtttttcccttgaccactcttctagcaaatggactaattaataagtggtcaaaaggctgaagaaagagaagtcagaggccacaataggcccaaacttgataacgtgtgcctggaatatggcaagctggccctgtaataacttccagatgaatcacggtttttttcagacaccagcaggtgaaccgaaatcattctatttgcctcccacttcttccatccagaattactgatctccgctgaggctggtaaaaacagctggttgaggtctctagtctctggcaattcttagggatggtcattttattcctaagtgtaaccccttctggtgtgacccatgtgttttctgccaactctccacaaagaaggccaggggaaactgtctgggtgggacttctgataggggacagcaggaccttggaatctgtcactgtggatgaagggggcaggtggtccataatggggaaaggaggactgaataagattaggctctgaggtcttcctggccttgacctgtggaaaggcttagaacccccagatggtcgctctagttttgaagaaagaaggttgtccccagatggctctgtctctgacatgcgctttctgcattgaactactgcatcctgggtggagagcaggttagacgagcctggttctggagaaagggtaggtccctcgcacatgcagggtgcagtggcatccactggtgaggacttaatggctccgggatcttgctttggtttttcttcctttgagctttccagggaggagggagaatcatctttggcaggtttctgagtggtcccactggttgagctgggtccctcctggctcctctccagaggctgaaccccattctcccctgagctctgagagggcaggggctgtgggatctgggtgtactgaatcttgggagggatgactgggaccgccctggcctggcacattttgaccattacgagaa

SEQ ID NO: 98770 - DNA, 995 bp, Homo Sapiens
gctgggtgggggcgcgcgacgcacctgcctgcttcctgcacgggtggtccccaagcactgcgtgggccccagcccaaagcggaccttgactaccgcccagccccgcgctcccaggacctccctgcccgcggagcccactcggattgctctccgcccgggtcggcggaggccccgtctcctgtacccggcgctgggactgctcctgcaccgcgcggctccctttcagctagctgcgggagcatgctggaggaggccctgccggccccgcgggtcatggaggagttccggcgctcctacagcctgcctgtgcagggcagagtggggccgagccccaggaggctgtcctgcagcagctgcaccagcttcccaggggccggctggacctggccacgcaaagcctgacggtggagacctgcagggccctgggcaaagctgctgccgagggagacgctgtgcacggagctggtcctgagtgactgcatgctcagcgaggaaggggccacactgctgctccgcaggcctgtgtgccaacaccgtgctgcgctttctggacttaaaagggcaacaaccttcgggctgcaggggccgaggctctgggaaaactcctccaacagaacaaggtccattcagagcctcacgctggagtggaacagccttgggcacgtgggaccgatgccttcgccaaccttctgcgggggcctgggcgggccaaacggcgccctgccagcggctggacctcccgcaaaaaaccagatcagtcacaaggcgcgcggaggagctggccctagccctgaagggcacaccaccctccagcagctggacctgcgctggaaataacgttggctcctggggggccgcgccctcatgaactggctccccagcgcacagaacccttgtggagactggaacctggctgggaccaccctccctggagaacgttcctccgagccgtggagccacgccatgggccaacccccagaccggctcccaccttc

SEQ ID NO: 98771 - DNA, 828 bp, Homo Sapiens
ttcagccgcagccgcccgggcggagcgcgtccgcagccggctggtcctgtctgctgcccctgcgctcgtcccagctcaccgctgccctggtgcgtgagctcgccgtggtggcactgacctggagcgcttctcgaatgcagagccagagcccctggagcctctccctgggcggccatgtgggtttcgacagcctccccgaccagctggtcagcaagtcggtcacttcagtggcttcagctttcaacatcctctgtgtgggggagaccggcattggcaaatccacactgatgaacacactcttcaacacgaacttcgagactgaggaatgccatgtcaccatgaggcatgcgtgctgcctgcgggccccagacctatgacctccatgtgagagcaactgtgcagctcaagctgaccatttgtggatgccgttgggctttgggggatcagatcaataaggatgagagttacaggcccatagtagactacatcgatgcgcagtttgaactcaattatctgcaggaggagctgaagatccgccgctcgctcttcgactaccatgacacaaggatccacggtttggcctctaattcatcaaggccaacaggggacactcccgtgagagtctctagactctaggtgaccagtgaaagaaactagacagcaaggtgaacattattcccatcatcgccaaggctgacaccatctccaagagcgagctccacaagttcaagatcaagatcatgggcgagttggtcagcaacggggtccagatctaccagttccccacggatgatgaggctgttgcagagattaacgcagtcatgaatg

SEQ ID NO: 98772 - DNA, 1278 bp, Homo Sapiens
  misc_feature (1165)..(1165): n is a, c, g, or t
  misc_feature (1222)..(1237): n is a, c, g, or t
ggaccggtccggaattcccgggatggcctcgatttaaagagacagaagctgtcggggtcctggaagacggtccccaataccctccccccaagtccttgggaccacttgggtccccagagctggggagatggtttgtggcggctttgcctgctccaagaatgcgctttgcgctctcaacgtggtctacatgctggtgagcttgttgctcattggagtggctgcttggggcaagggcctgggtctggtgtccagcatccacatcatcggcggagtcattgctgtgggagtcttccttctccttattgcagtggctggactggtgggtgctgtcaaccaccaccaagtcctgctgttcttttacatgatcatccttggtttggtcttcatcttccaatttgtaatctcttgctcatgtctggctattaaccgaagcaaacagacagatgtcatcaatgcttcttggtgggtcatgagcaacaagactcgggatgaactggaaagaagttttgattgttgtggcttattcaacctcacaaccctgtatcaacaagattatgatttctgcactgcaatctgcaagagccagagccccacatgccagatgtgtggagaaaagtttcttaagcattcagacgaagccctgaaaatcctagggggtgttggactcttctttagctttacagagatccttggtgtttggctagcaatgagatttcggaatcagaaggatcctagagccaaccccagtgcctttctatgagactttggatccttctgacttttcttctgctctctctaagctttctcttcctcccttagggaatatctagggtctgtaaccgttttggtttgagaaaaaggaaaggccccttgtcacatcctctaaaattgatggaatagcaagactttatgccttgacatattttagtgggagccagactataaggaataaaaggaaaaactttcttcctctctctccaagaggatatgggaagcttctgtgagtgcataggatgggggctggagtcattcttagctgtttcccttcctctgtccatatactggatcacctcaacataccctggtgtggctctaagggtaaatcagggatagggccaaggagaaaacaaccaagaactctttcctgtaataagcaggatccagntttgagaaagttttagcgataataaaagtaaaagccattttaaaaatctataattcnnnnnnnnnnnnnnnngaccacaaagatccttgctctggttggcccaaaggctgggc

SEQ ID NO: 98773 - DNA, 752 bp, Homo Sapiens
cgcccccgactgtggagaagtgtccggggatagccccgttacaggaatgtgtttctgatcatctgaatcttaatcatgtccaactgcctgcaaaatttcctgaaaattacaagcactcgtcttctatgttcaagattatgccaacagttaagaagtaaaaggaagtttttcggaactgtgccaatatccagattgcataggcgagttgtcattacaggcattggcttagtgactcctcttggtgttggaactcacctggtttgggatcgtcttatcggaggagagagtggaattgtttcactggttggtgaagagtataagagtatcccttgcagtgttgctgcttatgtgccaagaggtagtgatgaaggtcagttcaatgaacaaaactttgtgtccaaatcagatatcaagtccatgtcttctcccaccatcatggccattggggctgcagaattagccatgaaggattctggctggcatcctcagtcagaagctgatcaagtggctactggtgttgcaattggcattgggaatgattcctcttgaagttgtttctgaaactgcttcgaattttcagacaaaaggttacaataaagttagcccattttttgtccctaagattctggtcaatatggcagcaggccaggtcagccattcgatataaactcaagggcccaaatcatgcagtatccacagtctgtaccacaggagctcatgctgtgggagactcatttacgatttatagccca

SEQ ID NO: 98774 - DNA, 1133 bp, Homo Sapiens
  misc_feature (65)..(125): n is a, c, g, or t
  misc_feature (1051)..(1051): n is a, c, g, or t
tggaccggtccggaattcccgggatgtgcccagatcctggggagaaccccagccgagcccagccnnnnnnnnnnnnnnnnnnnnnnnnnnnnnnnnnnnnnnnnnnnnnnnnnnnnnnnnnnnnnagagccctccagccgctcaccccgcgtgccaccccagcgaccctcagccgctctctgcccttctctcggccccgcgcccgccctcgcggcccctctgcccaatgaaactggccgcgatgatcaagaagatgtgcccgagcgactcggagctgagtatcccggccaagaactgctatcgcatggtcatcctcggctcgtccaaggtgggcaagacggccatcgtgtcgcgcttcctcaccggccgcttcgaggacgcctacacgcctaccatcgaggacttccaccgcaagttctactccatccgcggcgaggtctaccagctcgacatcctcgacacgtccggcaaccacccgttccccgccatgcggcgcctctccatcctcacaggagacgttttcatcctggtgttcagtctggacaaccgcgactccttcgaggaggtgcagcggctcaggcagcagatcctcgacaccaagtcttgcctcaagaacaaaaccaaggagaacgtggacgtgcccctggtcatctgcggcaacaagggtgaccgcgacttctaccgcgaggtggaccagcgcgagatcgagcagctggtgggcgacgacccccagcgctgcgcctacttcgagatctcggccaagaagaacagcagccctggaccagatgttccgcgcgctcttcgccatggccaagctgcccagccgagatgagcccagacctgcaccgcaaaggtctcggtgcagtactgccgacctgctgcacaaaaaagggcttgcggaacaagaaagctgcttgcgggcccggcaaccgccggcgggcggcggccaaccggggcgaacccctttggcatcgtgggaccctttcccgcgccgggcccaagggtacacagggaaccttatggaaatccccccaaaaagccaacgcccggncagccaggccaaaggaaaaggaacggctgcggtaatcaacataggggacccccgccgcgcttgggaaaacaaacttcagggg

SEQ ID NO: 98775 - DNA, 843 bp, Homo Sapiens
ggtccggaattcccgggatcgcagacggcgctggtggtcgatcgtgtggcgccggaggacgttccccgcggccggagccatggagatgccgctgccccccgatgaccaggagcttcgaaatgtcatcgacaagctcgcccagttcgtggctcgcaatgggcccgagtttgagaagatgactatggagaagcagaaggacaaccccaaattctcgtttcttttcggaggcgaattctacagttactacaagtgcaagctggcgctggagcagcagcagctcatctgcaagcagcagaccccggagctggagccagccgccaccatgccaccccgtgccacagcccccgctggcccccgccgcgcccatcccgccggcccagggcgcgccatccatggacgagctcatccagcagagccagtggaacctccagcagcaggagcagcacttgctggcgctcagacaggagcaagtgacagcggccgtggcccacgcggtggagcagcagatgcagaagcttctggaggagacccagctagacatgaacgagtttgacaacctcctgcagcccatcatcgacacgtgcaccaaggacgccatctcggccgggaagaactggatgttcagcaatgccaagtccccgccgcactgtgagctgatggccggccacctccggaaccgcatcacggctgatggggcacacttcgagctgcggctgcacctcatctacctgatcaatgacgtgctgaccaattgggcccttgacgcccggaaagtctctccctcacagacagcgcaagccaggcccgggagctgctggcgcctgtcaaaagtcgtggtggcca

SEQ ID NO: 98776 - DNA, 938 bp, Homo Sapiens
cccatccaggcacctctcagcacagcagagctttccagaggaagcctcaccaagcctctgcaatgaggttcttctgtgcacgttgctgcagctgtgggcctgagatgccagcgtgtccagctgctgcttctggcctgcctggtgtgggatgtgggggccaggacagctcagctcaggaaggccaatgaccagagtggccgatgccagtataccttcagtgtggccagtcccaatgaatccagctgcccagagcagagccaggccatgtcagtcatccataacttacagagagacagcagcacccaacgcttagacctggaggccaccaaagctcgactcagctccctggagagcctcctccaccaaatgaccttggaccaggctgccaggccccaggagacccaggaggggctgcagagggagctgggcaccctgaggcgggagcgggaccagctggaaacccaaaccagagagttggagactgcctacagcaacctcctccgagacaagtcagttctggaggaacgagaagaagcgactaaggcaagaaaatgagaatctggccaggaggttggaaagcagcagccaggaggtagcaaggctgagaaggggccagtgtccccagacccgagacactgctcgggctgtgccaccaggctccagagaagtttctacgtggaatttggacactttggccttccaggaacttgaagtccgagctaactgaagttcctgcttcccgaattttgacaggagagcccatcgtggctatctcaggagtggacgaggggagaacaccggatgtggagaactagtagggcgaggagagcctctcacgctgagcaacaggcagaaacaatttctgggcacgtatggctggtggatgcggagaacccgaggcccagctacccttaacgcccaggagacacgtggacaca

SEQ ID NO: 98777 - DNA, 1389 bp, Homo Sapiens
gggtccggaattcccgggatccaggagctgggcttcaagctggggacgtcatcgaagtgatggatgccaccaacagagagtggtggtggggccgggtcgccgatggcgagggctggtttccagccagcttcgttcggctgagggtgaatcaggacgagcccgcggatgacgacgcccctctggccgggaacagcggagcggaggacggcggggcggaggcgcagagcagcaaggaccagatgcggaccaacgtcatcaacgagatcctcagcactgagcgggactacatcaagcacctgcgcgacatctgcgagggctacgtccggcagtgccgcaagcgcgcagacatgttcagcgaggagcagctgcgtaccatcttcgggaacatcgaggacatctaccgctgccagaaggccttcgtgaaggccctggagcagaggttcaaccgcgagcgcccacacctgagcgagctgggtgcctgcttcctggagcatcaagccgacttccagatctactcggagtactgcaataaccaccccaacgcctgcgtggagctctcccggctcaccaagctcagcaagtacgtgtacttcttcgaggcctgccggctgctgcagaagatgattgacatctccctggatggcttcctgctgactccggtgcagaagatctgcaagtaccctctgcagctggccgagctgctcaaatacacgcacccccagcacagggacttcaaggatgtttgaagccgccttgcatgccatgaagaacgtggcccagctcatcaacgagcggaagcggagacttgagaacatcgacaagattgctcagtggcacagctccataaaggactgggaaggaaaagatctcttggtcaggagctcagaactcatctactcgggggagctgactcgagttacacagcctcaagccaaaagccagcagcgaatgttctttctctttgaccaccagctcatctactgtaagaaggacctgctccgccgcgacgtgttgtactacaagggccggctggacatggacggcctggaggtggtggacctggaggacgggaaggacagagacctccatgtgagcatcaagaacgccttccggctgcaccgtggcgccacaggggacagccacctgctgtgcaccaggaagcccgagcagaagcagcgctggctcaaggcctatgccagggagagggagcaggtgcagctggaccaggagacaggcttctccatcactgaactgcagaggaagcaggccatgctgaatgccagcaagcagcagggtcacagggaagcccaaagctgtcggccggccctgctacctgacgcgccagaagcacccagccctggccagcaacctggcccagcagccaggtcc

SEQ ID NO: 98778 - DNA, 810 bp, Homo Sapiens
cttcaacaggtttgtctcagcgcaggaccctccgggcctgctttggaactctaagaaggagctgatgtggaggagcagctgagacagttcaagatgacgaccacagtagccacagactatgacaacattgagatccagcagcagtacagtgatgtcaacaacctgctgggatgtcgacgactgggacaatgagaacagctctgcgcggctttttgagcggtcccgcatcaaggctctggcagatgagcgtgaagcctgtgcagaagaagaccttcaccaagtgggtcaattcccaccttgcccgtgtgtcctgccggatcacagacctgtacactgaccttcgagatggacggatgctcatcaagctgctggaggtcctctctggagagaggctgcctaaacccaccaagggacgaatgcgcatccactgcttagagaatgtggacaaggcccttcagttcctgaaggagcagagagtccatcttgagaacatggggtcccatgacatcgtggatggaaaccaccggctgacccttggcctcatctggaccatcatcctgcgcttccagatccaggatatcagtgtggaaactgaagacaacaaagagaagaaatctgccaaggatgcattgctgttgtggtgccagatgaagacagctgggtaccccaatgtcaacattcacaatttcaccactagctggagggacggcatggccttcaatgcactgatacacaaacaccggcctgacctgatagattttgacaaactaaagaaatctaacgcacagtacaacctgcagaatgcattta

SEQ ID NO: 98779 - DNA, 1037 bp, Homo Sapiens
aattcccgggatgctggagtgggagctcaagcaggattcttcccgagtccctggcatcctcagaagcttcaactctggaggcaatgggtcgaaaggaagaagatgactgcagttcctggaagaaacagaccaccaacatccggaaaaccttcatttttatggaagtgctgggatcaggagctttctcagaagttttcctggtgaagcaaagactgactgggaagctctttgctctgaagtgcatcaagaagtcacctgccttccgggacagcagcctggagaatgagattgctgtgttgaaaaagatcaagcatgaaaacattgtgaccctggaggacatctatgagagcaccacccactactacctggtcatgcagcttgtttctggtggggagctctttgaccggatcctggagcggggtgtctacacagagaaggatgccagtctggtgatccagcaggtcttgtcggcagtgaaatacctacatgagaatggcatcgtccacagagacttaaagcccgaaaacctgctttaccttacccctgaagagaactctaagatcatgatcactgactttggtctgtccaagatggaacagaatggcatcatgtccactgcctgtgggaccccaggctacgtggctccagaagtgctggcccagaaaccctacagcaaggctgtggattgctggtccatcggcgtcatcacctacatattgctctgtggataccccccgttctatgaagaaacggaatctaacctttttcgagaagaatcaaggagggcctactatggagttctgagcccccccttttcggggatgtaattttcttcacctccgccccaagggcctttactttgcccaccttgcctttgaaaagagattcccgaaaccaaccgggtaaccccctgtggaaaaaaaggcgctttggaatccatcccccgggaatctggaccggaaaaacacgtgcccccttccacccgggggaacatttttcaccccttttacggttaggcccctttctgcaatttcccc

SEQ ID NO: 98780 - DNA, 1051 bp, Homo Sapiens
gcctgagccagaggaagggaggaaaacaagtagcaaaaaccaggacccttcggacttgccgctgaatggggattctctgtcgcgatgttgatgtttacctggaatgccccggtgttattttgggaaggcagacatcccacggaaacaatgaagtggaaaagaaaacagctaaagcaaaatctagagcccagtttttgccaaaccatgccccactgtgggctggtgcaggctctggaagcccaatgtcaggcctgatgaagagcggctgaggccgtggggatctggtttaccatggatgggcacatggatggatgcaagaaaaggaagagcctgtattcaatgtccccacttcatgtgatgatggcagaaatgaccctgcgcctgaccacgtgggaacatgcctgcaagtgagcggttgactgccgccatggccttgacgctacagtgctgggactccaccaatatcagtttggggcccttgaaggtgaaccattaagaattgaagaacgagcaactgagaccatagatgtataacaccttcggacacacaatacccaaaggaagaggccactcaaaccactggggaacagggcaacagagtacacgttatggggacaaaaaggggcaaagcgggcaccaccagaggggggtgacacgagacaaagagagcaggcagaaaaggggagagaagcgaccgattatggatggcacgcgagggttcggccaagttgtcgcctttggagcaacatggtccaatgaaatcagacgttatagggatagagatatcaatatagccaagggaatcgcgccaagaagtcgccccggaaagaaagggtgaccgcagccacccgcccaggagtggtggaggcaccagatacgcaggagttagagaaaaagagcacgacaacagcagggtatccgaaaagaccatatgggcgagcatgggagggagtagagcaggaacaccaaacaagagggaacagacaaacgcccaaaacaaaattaaggagggagcaccacaagggcgccgcagagaatacgagtgggacac

SEQ ID NO: 98781 - DNA, 462 bp, Homo Sapiens
gggcggggccagctccctcagagcctggcgggccttggggcaggccaggggcggcggggccggggccttggctccggggacgcctcggccttggctgggggcccacggcctgtgtcccggtagtcgcggcccggcgcccgtccgtcgcgcacctcgcggcagaagtagcgctggaagaggtcggtgaactgcagcgacaccagctcggcgcgcagcggcgcgtgctgcggatgctcccgggcgaacagccagtactggcgggccagctcccgggccgccgctacggcgtgcaactcacagaactcgctccagccccgcggggccgccgccggggaggctgagggcgcggaagagggcgaggagggctgcagggcaggcccgttcatggcggagacccaggtggtgcggccgggctgagagacaggagctctgggcccgaccggcccatggcgtcgcgcgccc

SEQ ID NO: 98782 - DNA, 927 bp, Homo Sapiens
aagtcataaggtgaaaaagcctatttcagagagcacttcctgaaagagacaaagcagcaattaaagtcagcccagcaccaactccgacgccaagcgttacactggaaactactttttaaagcaacaaaagagtctaaaacaaaatacaacatttcttaaatacactgtttccagaaagagctattttaacagaagcaactcaaagatatcccttcgacagaagtggaagtgctgaaaaatgctcatctctcacacagtactttggatggacaggagtttctaagtatcatgcctaccagacaagctgtagagaatgatcaccctggaacaatcaagatcaacctgtcgcctttgtaagcagctcgacatccagatgaatacaaaattgcagcccttgtctactatagctgtatcttcataatcggattaatagttaagcatcactgcattatgggttttcagttgtaccaccaagaagagaaccacggtaaccatctatatgatgaatgtggcatgtagctggacttgcatatttataatgactttaccctttcgaagtgtatcattatgcaaaagatgaatggccatatggagagtacttgctgccagattcttggagctctcacagtgttgtacccaagcagtggctttatggcttctggccttgtattagtgctgacagatacatggccattgtacagccgaagtacgccaatagaacttaaaaacacgtgcaaagccgtgctggcgtgttgtgggagtctgggataatgaccctgaacacgaacaccctctgtactgtctataaagacgcagataagactccactcccgccactggctcaagatttctgacatcatctatcttaaagctgtgaacgtgctgaactcactcgatgaccatttttcttgatcccttggttcatcc

SEQ ID NO: 98783 - DNA, 1345 bp, Homo Sapiens
  misc_feature (64)..(76): n is a, c, g, or t
  misc_feature (1269)..(1269): n is a, c, g, or t
ttgccaaccctgcctgtatagccagcaagaatttctaattatagcaaacagaaacacttgcagnnnnnnnnnnnnntgagaacgggaacatgataattttcaaagaaagagtcttctttcaaggaaagtcaggttcatggttacgaagctgctgacccccaggatcccagcccgtgggagagaagggggtctctgaagcccccacccctccccatgccagatccttatggggtctgagttcaggggtggggccccagtggaggttataaaacagctcaatcggggagtacaaccttcggttgctctccggggaaagctgctttcagcgcacacgggaagatatcagaaacatcctaggatcaggacaccccagatcttctcaactggaaccacgaaggctgtttcttccacacagtactttgatctccatttaagcaggcacctctgtcctgcgttccggagctgcgttcccgatggtcctcctttggctcacgctgctcctgatcgccctgccctgtctcctgcaaacgaaggaagatccaaacccaccaatcacgaacctaaggatgaaagcaaaggctcagcagttgacctgggaccttaacagaaatgtgaccgatatcgagtgtgttaaagacgccgactattctatgccggcagtgaacaatagctattgccagtttggagcaatttccttatgtgaagtgaccaactacaccgtccgagtggccaacccaccattctccacgtggatcctcttccctgagaacagtgggaagccttgggcaggtgcggagaatctgacctgctggattcatgacgtggatttcttgagctgcagctgggcggtaggcccgggggcccccgcggacgtccagtacgacctgtacttgaacgttgccaacaggcgtcaacagtacgagtgtcttcactacaaaacggatgctcagggaacacgtatcgggtgtcgtttcgatgacatctctcgactctccagcggttctcaaagttcccacatcctggtgcggggcaggagcgcagccttcggtatcccctgcacagataagtttgtcgtcttttcacagattgagatattaactccacccaacatgactgcaaagtgtaataagacacatcccctttatgcactgggaaaaatgagaagtcattttcaaatccgcaaatttcccctatggagccttcaagatacaaaaagagaatggcagccctggtaatcacagaaaccagggtccagaagaccagaaaccntcctttcccagctacttccaatccgtgggaaacggtacaccggtaacaaataaagaaaacccccgggaaaaaagaa

SEQ ID NO: 98784 - DNA, 808 bp, Homo Sapiens
ggaaaaacgaactccgtccactaacaaaagatggctacgagggtaacatgttcggaggcctcagcggggcaacagtcattgactccctcgataccctctacctcatggagttgaaggaggagttccaggaggccaaggcctgggtgggagagagcttccacctgaacgtgagcggagaagcatccttgtttgaggtgaacatccgctacatcgggggactcctctcagccttctacctgacaggagaagaggtgttccgaataaaggccatcaggctgggagagaagctcctgccggcgttcaacacccccacgggaatcccaaagggcgtggtgagcttcaaaagtgggaactggggctgggccacagccggcagcagcagcatcttggcggagtttggatccctgcacttggaattcttacacctcactgaactctctggcaaccaggtcttcgctgaaacggtcaggaacatccgcaaggtcctcaggaagatcgaaaagccctttggcctctagcccaacttcctcagcccagtgagtgggaactgggtgcaacaccatgtctcagttggaggactcggggacagttttgatgaatattgtgatcaaatcctggttgatgtcgggcaagacagatatggaggctaacaaatatgtactacgaagccttggaggcgataagagacctaattgctgaactgtctctcccggggggctgacctacattgccgagttggcgagggggggatactggaccacaaagatggggcacctggcctggtttctccgggagcatgattcgcctg

SEQ ID NO: 98785 - DNA, 827 bp, Homo Sapiens
  misc_feature (334)..(403): n is a, c, g, or t
ctgggctgactccgtgctcctcagggccacccctgctctgtcttggtacaggcccctgcgtgagtgggcccctctcctctgcccctggggtccatcccctcttgccaggtccccatcctgtaccaagcagactgggccctaagaaccctggcagaacccagcctctgctcacacccgccccagcttctgccacggttcagtcagggccagaggaacacgtgaaggagaaagagaaatgcaggagccgcggggctcccggttccttgggaagagggtgcccattggacctttggcactggatgagccaataaaccaaactctggcacctcatttnnnnnnnnnnnnnnnnnnnnnnnnnnnnnnnnnnnnnnnnnnnnnnnnnnnnnnnnnnnnnnnnnnnnnnccccaaaaattcccgtccagaggggcgcacacgatttttatactggttccccccccggttgtttttgtgtgagacgagagggtgtgccccccctaaagaggcgagcccgtctttattaagacgcgggcacacgcaggcgcgacgttataaaaaccagctccccgagtagcgtgggaaaacacaccgtctaccgtgaggggaacctcttggtgggaggaacggcaccccccagatctcggggcgggggcgcacctaatgtgggcgaccactattccatgaccgaatatttttaagcgcctctgcgggcgacaaattaaacaacacttgacgcgtgttatgaagggttgtgcaacacacggccctataatggctgcggaggaaattttgcgcagcgggatttttttggcacattttttacccggag

SEQ ID NO: 98786 - DNA, 1236 bp, Homo Sapiens
  misc_feature (170)..(222): n is a, c, g, or t
  misc_feature (1136)..(1136): n is a, c, g, or t
ggcgcagcaatcctggccctaggattgtgttggggggcttggcaggcggtgtcccgacccccctttctgggcatcctggggatgaccccagcgccgggcccggcgccggccgcctgatgccaggcgagctgagctggggatgctggaacgaagggcgttgctatggcaannnnnnnnnnnnnnnnnnnnnnnnnnnnnnnnnnnnnnnnnnnnnnnnnnnnncggcggtggctgtggtggggcgatggcggagcgcggcccggccttctgcggcctgtacgacacgtcctcgctgctgcgatactgcaacgatgacaatttgtcgggcacgagcggtatggaagtggacgaccgcgtgtcggcgctggagcagcggctgcagttacaggaagacgagctggcggtcctaaaggcggcgctggcggatgctctgcgtcgcctgcgggcatgcgaagaacagggagcggcgctacgcgcgcggggcacccccaagggccgggcgcctccgcgcttaggcaccactgcctcggtgtgtcagctcttgaaaggccttcccaccaggacgccccttaatggctcgggacccccgcggcgcgtgggtggctatgccacgtccccatcctctcccaagaaggaggcgacctccgggcgcagcagtgtccgccgctacttgtcaccagagcgcctcgcctcggtgcgccgtgaggacccccgcagccggaccacatcctccagcagcaactgtagcgccaaaaaggaaggcaaaacccacaagaagttatcttcaagtgtgggaggaatggcctccctggaaaaatgtttcctgaagggggccgccccctgtggccccatggatggatccccaggaacgaagctggcccccccacccttacgggcctggaaccacacggcctccgggagcctggccttttcttggcccgggcttcaaggcttggggggtggggttcttttgggccttaccgcggtggcccgcaaaaacttggcccgggggcccaaaccctttttatatttttgcccttggccccaaccccgggggggaaagaaagaagggggtgacacttttgtgttggggcccctctctcccttaaaacaccgggtggcccttattataacanacccggttggggaaagaggagaaccccaaaaaaaggggaaaggccgcaaaacactcttaaccccgtggggggggacaccacaacacacggggatgtgtat

SEQ ID NO: 98787 - DNA, 812 bp, Homo Sapiens
atatggtctgcggcaggcccgggagggatgctgctgctgcgggccgggctgcttgccctggctgctctctgcctgctccgggtgcccggggctcgggctgcagcctgtgagcccgtccgcatccccctgtgcaagtccctgccctggaacatgactaagatgcccaaccacctgcaccacagcactcaggccaacgccatcctggccatcgagcagttcgaaggtctgctgggcacccactgcagccccgatctgctcttcttcctctgtgccatgtacgcgcccatctgcaccattgacttccagcacgagcccatcaagccctgtaagtctgtgtgcgagcgggcccggcagggctgtgagcccatactcatcaagtaccgccactcgtggccggagaacctggcctgcgaggagctgccagtgtacgacaggggcgtgtgcatctctcccgaggccatcgttactgcggacggagctgattttcctatggattctagtaacggaaactgtagaggggcaagcagtgaacgctgtaaatgtaagcctattagagctacacagaagacctatttccggaacaattacaactatgtcattcgggctaaagttaacagagataaagactaagtgccatgatgtgactgcagtagtggaggtgaaggaaattctaaaagtcctctctggtaaacattccacgggacactgtcaacctctataccagctctggctgcctctgccctccagttcatgtcactgagcgaatatatcatcatgggctatgaagatcacgaacgtcccagattactctc

SEQ ID NO: 98788 - DNA, 837 bp, Homo Sapiens
tgctgggcatgaagttgtttgtgacaaatattcatatacatattcttgtgtggacatatgtgttcgctctctcttgggtatatatctaggagtaggattgctgggtcatatggtaagtctctatttaatggtttagactcagtactttgtgttctgcctttccacagctcagtttcataaagaggcaggagcctttggttcagggctccttggcagtaaggtaatttcttcttctgcagtgtatccagctgacccttgctcagtgctgttctttgggggaaagatggaatgctgggaagccagcacctcttattccttctagctaacacttttacagtgacggatataatgatatcttcaactagtattgttgaattatctccctgatgctgtccaattttgcttcatatattttggggctctgtaattaggtatgcatatatagtcattattgttatatctttgtggtggtgtggcctttttattattttagcacttttatatctttacctctaataacgtttttaaaaattgaacgttgatttctgtctgagtgttagtacaaccacttcagcttctttgtagttgctgtttgcatgacatatcgtttctccattcgttgtactttcaatctatttgcatctctgggtctaaaatgtgtagatagcacatagttgaatcttttaaaaaatacattttacaatctctgattttattggaatgtttaatccatccacatttaatgttacgattgatggaggctggacttatttctgcataaaatatctcatgaacattttaattcctgtattctattggtacttttttgctttagaa

SEQ ID NO: 98789 - DNA, 770 bp, Homo Sapiens
cacgcagccgcggtctggcggctccgcggcggcggcgggtgcgggcggcctggccggtgccggttaaagggacgagttgcaaacacttcaggaagtgacaagtcgatttcctcctccccgggagtcgctcgtacaaagcgctcggcgccggcaggcgagcgtgcgcgcggctggacgcgcggcgggcaccccggacgacttggccaagcgctggcggtgacggcgcggggtccgctgcccggagcgccccgccgcgcacaggagtggaccacatttggccatttcccagaagggccccaccccaagggtgagtggccaatggggagctgtatctgctgacatcaattccccaggaggttactcaccccaagtcttgcccaagtgaagatggctgatacccaccctggaatggagcccagcgcctgaggcccttatcatggtgatggtcctaagtgaaagcctcagcaaccggggagctgactccatttgccattgtgggaacttcagccgtgaactggcacacgccaaaagaagatgagtcaagggacctacacttttctcttgtggaattatggcaacaatgaccagatggcgagacctggacaggaaatgccctcttcagattgaccaaccgagcaccagcatctgggaatgcctgcctgaaatggacagctcactatggcaccgggaggcagtgaccgcctgcgctgtgaaccagtctgatcaaagacctcagcatcagggaccaaaacgggaaccctcaaggaccc

SEQ ID NO: 98790 - DNA, 268 bp, Homo Sapiens
caaccgaggctggcgccaaggtgggagccgcagccggggctagggccgcggggtggggcacgccgctggcggcgcccggccccgcgccctccgctacaccctgcgcctccatgctgctaagacctggccggggtccacgaccccgggcttttagcacctgcttggcctaacggcacttcgcgaaccaaagactcaggacacgctggggtaaaaggcgcctataccgggaaggcgccccgactgcgcctgcgcgaccgcagcctgcgcg

SEQ ID NO: 98791 - DNA, 914 bp, Homo Sapiens
  misc_feature (30)..(30): n is a, c, g, or t
cggaaaggcgcctgggctggtgacggtgtncaagtgtaggcaagaaatacggctgatcagagaagcgacttcacctccctcgcacaacactgagtccctttgcggcaggggccctccccgccgcgaaccctacttggaaccttgcgccatgcgatgtctctctcattctaggccacggaagccctgggtcaccctttcagcctggttctctccggtggtgctggcttgtttctcctgtctgttggggtcagctgcgtccagcctcggctcctgcaggattgcccgggcaacccagaggagatgggcgggcgtggaggtcctccctggatgacccttcccaccatttcaacatcattaggaatttaacaggcttttgcaagaaggcccagtctccctgcttcctggcctttctatttaaaagcacccatcttcaccttctcccaaaggctctggaagttttacagacagcatctttctagcctcgccctgcgtctctttctagtcatttgactgaggctgaacaaagcccagatgggagtttcattcccttcacctcccccaactcccagctgaaggaggctggccccagacacaggacacagcttcctgaccctgcgggcaggagcctggcttgtttggtgacgggcaggagcctggcttgttggtgagtgggcctcctcattgctgctggagttttccatcctcattccacaacaagccaagtcagcaagttgctgccaggaaccttcacaccttgtggcttgggatctgaggggaaacaccacacacccggaacagcctccctgaagccgggaatgaagccagcatcagacggagaagcaactactggagggacaatgatggagtaattccctgggcaccactcaagcgtggtgccatggtaccaggccctg

SEQ ID NO: 98792 - DNA, 883 bp, Homo Sapiens
gctgcccagacacaggtgcagccttcctcttcagaacatcttctgtatcctgaaagcctccaggtgggttcatccttcaatgttaatggacaggaaaactaagaccagtgaggaatcccaacgctcatcctgccaggatagaaaggaaagcccagaggcattgcaaagagtgctgaagagcagggattgtgctgtatggggacaagctcttgctttgtgtttcaggacagggaacccaggagtgcaaacctcagtcaggtgcagtccagagtcctgtcttgagcataatggctgctctgctctgctccccgaccctcaccacctccagcggggttcatcatcccagtttatggacagaaaaactaagactagagggggagggcttagctcctgctcggaggagaccttcaactccttcacctgcctggacttggcaccctcccaagagactgcaaccaaggttatgaacaatagcatctactcaccatccttcctcagcgacacccccaatcaatccacccctcaggtcccaccccctgtcgtcaaggagactgagccccgagaagcggcaagctcctgggagctcctcaatcgtcggcagctgccttccgtggtctatctgcaatgtgctcaagtccttttccctcctcctcatccaagagatccaagaccgtgtctcacctcacccctgctccaggaagccccccttcagtggtctggggtttcactccctgtcattgacgtccggcctcaccaggaaagcaccaagccttgcaaatgctctctagtagttaattgccgtggcacagagaaggggtgaggggaagcattcgtttcgtggctattccctgttcatctcgcaggctggccctgccttcccagg

SEQ ID NO: 98793 - DNA, 929 bp, Homo Sapiens
ccggcggtcgcagagccaggaggcggaggcgcgcgggccagcctgggccccagcccacaccttcaccagggcccaggagccaccatgtggcgatgtccactggggctactgctgttgctgccgctggctggccacttggctctgggtgcccagcagggtcgtgggcgccgggagctagcaccgggtctgcacctgcggggcatccgggacgcgggaggccggtactgccaggagcaggacctgtgctgccgcggccgtgccgacgactgtgccctgccctacctgggcgccatctgttactgtgacctcttctgcaaccgcacggtctccgactgctgccctgacttctgggacttctgcctcggcgtgccacccccttttcccccgatccaaggatgtatgcatggaggtcgtatctatccagtcttgggaacgtactgggacaactgtaaccgttgcacctgccaggagaacaggcagtggcagtgtgaccaagaaccatgcctggtggatccagacatgatcaaagccatcaaccagggcaactatggctggcaggctgggaaccacagcgccttctggggcatgaccctggatgagggcattcgctaccgcctgggcaccatccgcccatcttcctcggtcatgaacatgcatgaaatttatacagtgctgaacccaggggaggtgcttcccacagccttcgaggcctctgagaagtggcccaacctgattcatgagcctcttgaccaaggcaactgtgcaggctcctgggccttctccacagcagctgtggcatccgatcgtggtctcaatccattctctggggacacattgaccgcctgtcctgtagccccagaactgctgtcttgtgacaccaccagcagagggctgccgcgtgagcgtctcgatggtgccggtggtaccgc

SEQ ID NO: 98794 - DNA, 868 bp, Homo Sapiens
cctgcctagcaaggcccagcctggggcagaaatggctgcaagtggccgaggtctctgcaaggctgtggccgcctctcccttcccggcgtggagacgagataacacggaagccagggaggtctgaagcctgagtatgatgcggtggtgataggagcaggacacaacggactggtggctgcagcgtacctgcagagactgggggtgaacaccgccgtcttcgagaggcgccatgtgatcgggggtgcagctgtcactgaggagatcatcccagggtttaagttctcccgtgcgtcctacctgctcagcctgctgaggccgcagatttacactgatctggagctgaagaaacatgggctgaggcttcatcttcgaaacccctactccttcacccccatgctggaagagggtgcaggcagcaaggtgcccaggtgccttctgctgggcacagacatggcagaaaaccagaagcagatcgcccagttctcccagaaggatgcccaggtctttcccaaatatgaggagttcatgcatcgcttggcattagccattgaccctctgctggatgcggcccccgtggacatggcggccttccagcatggctccttgctgcaaaggatgaggtcgctctccaccctcaagcccctgctgaaggcaggccgcatcctgggagcccagcttccccgatattatgaggtcctcacagctcccattaccaaagtgctggatcagtggttcgagtctgagcctttaaaaaccactctagccacagatgcagtgattggagccatgaaaagtccccagactccggggatgggtatgtgctgctgcaccatgtgatggggggcctggagggaatgcacggggcctg

SEQ ID NO: 98795 - DNA, 810 bp, Homo Sapiens
cgcgcgcgagcgcagcggtgggaggcggcgaccagccggttgaggccccaggcttggcctcaccacaatgtggcacgaggctcggaagcatgagcggaagcttcgaggcatgatggtcgactacaagaagagggcggagcggagacgggagtattatgaaaagatcaagaaggacccagcccagttcctgcaggtacatggcctgagcttgcaatggtgcacctggattctgcagtcgccctggccgctgagagccctgttaatatgatgccctggcagggggacaccaacaacatgattgaccgattcgatgtccgtgcccacctggaccacatccccgactacaccccccctcgtgctcaccaccatctccccagaacaggagtcggacgaacgggaaggttgtaactacaagcgctaacagagggcctggtgcaagaacgactttgccggcatctcagaggagcagtgcctgtaccagatctacattgatgagttgtacggaggcctccagagacccagcgaagatgaggaagaagaagctggcagagaagaaggcttccatcggtttatacctacgaggacagcacggttggaccgaggtagagaaggcggcagaaaagccagaggaggaggagtcagcggccgaggaggagagcaactcggacgaagatgaggtcatccccgacatcgacgtggaggtggacgtggatgaattgaaccagggagcaggtgggcagatctcaacaaacaggcaccgacttatggcatggccgaccggtgacttcggtcaggatgctccggaaaaga

SEQ ID NO: 98796 - DNA, 1463 bp, Homo Sapiens
cgctgcgcgcaggccgggaacacgaggccaagagccgcagccccagccgccttggtgcagcgtacaccggcactagcccgcttgcagccccaggattagacagaagacgcgtcctcggcgcggtcgccgcccagccgtagtcacctggattacctacagcggcagctgcagcggagccagcgagaaggccaaaggggagcagcgtcccgagaggagcgcctcttttcagggaccccgccggctggcggacgcgcgggaaagcggcgtcgcgaacagagccagattgagggcccgcgggtggagagagcgacgcccgaggggatggcggcagcgtcccggagcgcctctggctgggcgctactgctgctggtggcactttggcagcagcgcgcgggccggctccgggcgtcttccagctgcagctgcaggaggtcatcaacgagcgcggcgtactggccagtgggcgggccttgcgagcccggctgcccgaactttcttccgcgtctgccctaagcacttccaggcggtcgtctcgcccggaccctgcaccttcgggaccgtctccacgccggtactgggcaccaactccttcgctgtccgggacgacagtagcggcggggggcgcaaccctctccaactgcccttcaatttcacctggccgggtaccttctcgctcatcatcgaagcttggcacgcgccaggagacgacctgcggccagaggccttgccaccagatgcactcatcagcaagatcgccatccagggctccctagctgtgggtcagaactggttattggatgagcaaaccagcaccctcacaaggctgcgctactcttaccgggtcatctgcagtgacaactactatggagacaactgctcccgcctgtgcaagaagcgcaatgaccacttcggccactatgtgtgccagccagatggcaacttgtcctgccttgcccggttggacgtgcggaatattgccaacagcctatctgtctttcgggctgtcatgaacagaatggctactgcagcaagccagcagagtgcctctgccgcccaggctggcagggccggctgtgtaacgaatgcatcccccacaatggctgtcgccacggcacctgcaggcactccctggcaatgtacttgtgactgagggctggggaggcctgttatgtgaccaagatctcaactactgcacccaacactccccatgcaagaatggggcaacgtgctccaacagtgggcagcgaagctacacctgcacctgtcgcccaggctacactggtgtggactgtgagctggagctcagcgagtgtgacagcaacccctgtcgcaatggaggcagctgtaaggaccaggaggatggctaccactgcctgtgtcctccgggctactatggcctgcattgtgaacacagcaccttgagctgcgccgactccccctgcttcaatgggggctcctgccgc

SEQ ID NO: 98797 - DNA, 1311 bp, Homo Sapiens
  misc_feature (324)..(372): n is a, c, g, or t
tggactcagagcacaattgcgtttcctgcgggttatttttggcgtgggaacgcggggagtacggcggtgagaaaggctgaagctgccagcgccgctgacgggccccttcctgtattttacacctttcgcgaattccgctcctttggaaagggaataatggctttgggatgttgttctgacacagaggaaaaggatatttcagcagcacaacaattctcactttgaaaaggaaaaaagaaaaccattacccacctctggaggcagaacccctgaatgggcaccaaaggtaccccctgctcccagggtcctctctagcctggggannnnnnnnnnnnnnnnnnnnnnnnnnnnnnnnnnnnnnnnnnnnnnnnncccctccctatctgcctccaagaccctgggatatcttaacagtccttctattgtcccctttttgaatactatcaggccccctgcacatgcacacacgtagggcagctacgtagcggggctttgggtccctctggcctgttcttgctggcaggcgggggtcatctggataactgggctgattggttggctgatcaccatcatcacagccaagaaggacatttggccagccgtcactggcacccttggggacttggcgacccttccctgacccgaccctctgccccctcagaggccttgccaccagatgcactcatcagcaagatcaccatccagggctccctagctgtgggtcagaactggttattggatgagcaaaccagcaccctcacaaggctgcgctactcttaccgggtcatctgcagtgacaactactatggagacaactgctcccgcctgtgcaagaagcgcaatgaccacttcggccactatgtgtgccagccagatggcaacttgtcctgcctgcccggttggactggggaatattgccaacagcctatctgtctttcgggctgtcatgaacagaatggctactgcagcaagccagcagagtgcctctgccgcccaggctggcagggccggctgtgtaacgaatgcatcccccacaatggctgtcgccacggcacctgcagcactccctggcaatgtacttgtgatgagggctggggaggcctgttttgtgaccaagatctcaactactgcacccaccactccccatgcaagaatggggcaacgtgctccaacagtgggcagcgaagctacacctgcacctgtcgcccaggctacactggtgtggactgtgagctggagctcagcgagtgtgacagcaacccctgtcgcaatggaggcagctgtaaggaccaggaggatggctaccactgc

SEQ ID NO: 98798 - DNA, 788 bp, Homo Sapiens
gccgcctggccgggcgtagacgcggtggctagagcccgcgcggcgctggaagcgagtggcggagcggcgggacctcggcggactcgccatggaggaggagggtgtgaaggaagccggtgagaagcctcgtgggagcacagatggtgtgacaaggctggctggatcaagaagagcagtgggggcctccgtgggtttctggcaaagaccgatatctgctcctctgccaggcccagctgctggtctatgagaatgaggatgatcagaagtgtgtggagactgtggcagctgggcagctatgagaagtgccaggaccttcgtgccctcctcaagcgaaaacaccgctttatcctgctgcgatccccagggcaacaaggtcagcgactatcaaattccaggcaccctaccggggaggagaaggaatcctggatcaaagccctcaatgcaagggattaaccgaaggccaaaaacaaggctttcgactgaggtaaaggtggacaaaagctgcgccctggagcatgtgacacgggaccgggtgcgagggggccagccgacgccggccaccaacgagagtccacctgaaggacgtggccacgtgcagcgttctgacgagtcttctgcgcctggatcttgcatgtcccggacagtgggccaccagctgtattgccccccaggagatcatgtcagtgaatggccaacttcgggagacacccctggcacctcattgcgtctagacaatgccttttcctaagcacctgagagcagcaggcctggtgacagggtggaaaaca

SEQ ID NO: 98799 - DNA, 1110 bp, Homo Sapiens
  misc_feature (735)..(1055): n is a, c, g, or t
ctcctccatctctgtcttccctgtagtgacagtctcagagcctacgttctttcaatggcggggctacaagatggtgacaggctgcccaacctggtttgcaacgccacctcagtaagctgagacgtggtaatcgccatggcaacggggctgcattaaaagcattgtgcgcacaaagtgaaaggctgctgcctggcagagttcagtctggtctcactgcacctgttccctaattaagatgcaccttttggttttgtcttttgaaaaaaacaaaatgctccctttatcgccacgaggcaaaagaaaaattaaggccaagatcctttcatgcccaatatgggcctgcccggtggttggagcatgggggatcatgggcagcaagtgagaaagtgcacagtgatttgctgctgttacatcctgagaaactggagggctgtcatcaaagtcctcgaatagctggagagtgggtgtgggatggttacgtttgaaaatgcagctctgatataaaagaaagcaaagactgcactgttttcccagcaagagcctagctggagactctaagcctaagatagaagcttctgccatcaacaggccacaaaacccatacttcctgctctatgaggcttctgaccttggttccctagaatcctccctccttatcaagtatctgtgtctaggcctaggggagaccagaccgaggtctgtccttgtctgcctacaaggacaaggcattctacnnnnnnnnnnnnnnnnnnnnnnnnnnnnnnnnnnnnnnnnnnnnnnnnnnnnnnnnnnnnnnnnnnnnnnnnnnnnnnnnnnnnnnnnnnnnnnnnnnnnnnnnnnnnnnnnnnnnnnnnnnnnnnnnnnnnnnnnnnnnnnnnnnnnnnnnnnnnnnnnnnnnnnnnnnnnnnnnnnnnnnnnnnnnnnnnnnnnnnnnnnnnnnnnnnnnnnnnnnnnnnnnnnnnnnnnnnnnnnnnnnnnnnnnnnnnnnnnnnnnnnnnnnnnnnnnnnnnnnnnnnnnnnnnnnnnnnnnnnnnnnnnnnnnnnnnnnnnnnnnnggccccccccgtccattgggaaatttgtttaccccccccagaacatggctgtaaa

SEQ ID NO: 98800 - DNA, 370 bp, Homo Sapiens
agtggtgtttggacctggctgcggggcctctggctggtctggtacccctgctaggacctggggagggccagtttcagcttcagaatggccaggcccttcgcctggaaccttgggactctcctcaacccccttcatctcagagatctcagagctgctggctgccatcttgagatgggagaggggagagagcccctatggggaggatggaatagcagagacagcggcaaaccctcgacgccggcctccggacagctcccgctgccgctgctggcttttgcagcagccgcagcccgggagggagcaagtcagctagggagggagggaggcggcggtctccctcttctccatcccgtacaccggggcgtaccag

SEQ ID NO: 98801 - DNA, 789 bp, Homo Sapiens
ctagacctttgaaatagggtctgtcgtgaggcagattgaaatgatcatgtaactcctttcctataggcctgcaggctgccatctggtattcctgaaggatatgaaacttgttacaagatcttttgtccctggtaataaaaagtgcagtggttcagggaccacaatagatgttcctgttcatatatttcaaaatacatttgttccatgtcagttagttgattatgaattgcatcaaccaggagtttacgaacttttccccatgtttcttctggagcaacagatataactgcatcgacaggtaaagtcatattaacataatggtgtcctccgctttccctgttcaatgatgggcgttacagctgccagggaggttgacatttccagcataagatctatatttactatttgatgcatgtctgataactttttgtccttctttctcatgaattttctttttatatcttcttctggctcaaattgaataaagcgcagtatgttcttacaagcagaagcatcagtcagttctccaggaatggtgtttatgtcactgctaggccatatatacactgaactgtggcaaattctgaacacaagggcgtttgaagacagcttagttgacaggtcactcaacacatgtttcagtgccttcttgagaaaaatttcattaggagtagctagctgaaaagccaaatcaaggcctcctcttattctgaagagtatatccatactttctgaaatcaccatgtccgcgacgtggcggtgacacgggcgctgacacctgcccaaaag

SEQ ID NO: 98802 - DNA, 1301 bp, Homo Sapiens
gtgtgctcgttctgctgtcctccttctctcgcgtgcgttcctcttgtgttcgctctctccgtttgcgctgctgctgagctgctgtcgtctctgccgtcgccctctgctcgtgttctcttccatctcctgcctttgtcgcgatcctggtcacccgttgcttgtccctcgcggctctctggtgcattgcgtgccactctggtctcccgtggtttcacggcgacccttcgacggttcgcctttgctttgcccggtggggggctttttgctgctgttcttgtttttctcccctttctttctctctctgcactgctcccggcgtctgtgttttgctgtcgcgtggtgcagttggctgctcgtgcccggtgggacggttcttgctccttcgcgcctatgtgtgtgtactcttgctcaaggccccgacgcgcgctttcgcttttctaccggttctgcctcccgctggcctcttccgcctggccatgtgcttaaatcttgctccagttgtcgtcatcttgtgtgtataacaaatttcgatggtaatattgtgttttatgcatgctttgcctccattcctgtcgaggatgtctggggccctcaacaccagacatgaggcaatctatattacatccacttgcacccatccaacactcttaggtcaccgctccgaacctccaaggtaaagtccacatgacctggtgtatcaattagattgactctataacctttccaatcaaatgtaacagcagtctgattgaatagtaatgcctctttctcgctcttgggccatgaaatctgtcactgtgtctccatcatcaacatctcccagtgatcttgtatatccggaatagtacaatattctttctgtggtggtagttttgcctgcatcaatatgagccataattccaatattacggattttagctatgggaggattgatgatggaatgaagggatttgatatcatttcctattaagcctggtagagaactgcaatttcttccaagcggcacatgtggctttaatctttttaaacttgctcttattttatagcagcatatattagttaatatacacactgggtattgtctgatgactcattgcagaatatcctcaagttggtcaacatcttgatcctccaaactgttactgtctggcattaggccgcgtgccgcaggccagctctcaccgctgggctcttgaagcaggaggcgcgagccgcgccaaagtctgcaacggcctcaagtctcgacgccagcctatggcaaaggcatgtatctattacgaaaagaaaataggctttctccg

SEQ ID NO: 98803 - DNA, 804 bp, Homo Sapiens
ctcatacagccagagctgtggacccacagctgcagtacctgagctcaaactccgcgaacaggacgtcgaatgtgcctcagcgcttccctcatcttctctgtcacaggccagctcgtgttcccggtccccgcaggaggttctcttacattcagagcaatcagtgagggctgataaccgatgtcccccaatgtgacccacggggttcctcacagtggccccacggagcacgggaggagcatgggcatgcgcaaggataagccacagtggatgaagttcaatgaagcttggagcttccatgttccacaattcatggtctgtgctcctcatgggatgaagcgaggcgggctgatccagggctcgcgaggtccccaagcactatcttagatggagccgacaagtacaccgacactagtctaaaagttgctcactagcctaggaggaatagcgcaaaacttccccggataggcaaaactcatcagtgtagagagtccctgggctcctgaggcgaggtaaggaggtgctcctccgcacaccacaaatccacccatgtctgccctgggttgctgcgacggcagctccccagccgtgcgctcagcagactgggaatttcaccaagctgccctctggcacaggggctgagtccaggccctggtagacctgttgtcacagggaggcttgtctagaggccggggcctcgccaggtttaggatagaaccaatccacctgctgtcccctcagtggatgatcaagtgatgcaggacaagaagccatttcccaggtgacagaatgagacggcgctgatcg

SEQ ID NO: 98804 - DNA, 836 bp, Homo Sapiens
ggcgcccgcgtgcctgataccgcggagcgcgcaggtgaggcggctggcgcgctgccccgccacttgcagctgtaccaaggagtctatcatctgcgtgggctcttcctgggtgcccaggatcgtgccgggcgacatcagctccctgagcctggtaaatgggacgttttcagaaatcaaggaccgaatgttttcccatctgccttctctgcagctgctattgctgaattctaactcattcacgatcatccgggatgatgcttttgctggactttttcatcttgaatacctgttcattgaagggaacaaaatagaaaccatttcaagaaatgcctttcgtggcctccgtgacctgactcacctttctttggccaataaccacataaaagcactaaccaagggatgtcttcagtgatttagactctctgattgaactagatttgaggggtaataaatttgaatgtgactgcaaagccaagtggctatacctgtggttgaagatgacaaattccaccgtttctgatgtgctgtgtattggtccaccagagtatcaggaaaagaagctaaatgacgtgaccagctttgactatgaatgcacaactacagataaacaagaagagatctgtgaaggaaaaattcaaaacctgaatgcacgagtggtgatgaattgctctcggccgtcatcaggcttcaggaagcacactggaaatggccagagttgcattttttcttcccatggagtgagagtctgtgtatataggaaagaatcagtgggatgcagagggttggggcaggagtgtcttgatggaaattttctgggctggggtatattgaaggga

SEQ ID NO: 98805 - DNA, 1147 bp, Homo Sapiens
tccacacttctcatcacaaccccagtgtctcccacaaggctggtaccgggtccgggattcccgggatccgggagcagagcgaaccgcaccggcccgagcggagcgccgcacgttcccaaccgcgaggccagacatctgactgttggtgtgagaccagtgctcctggtggtgtgccctgagccatggaggcgcctttgcagacagagatggtggagctggtgcccaatggcaaacactcagaggggctgctcccggtcatcacccccatggcaggcaaccagagggtcgaggaccctgcacggagctgtatggagggcaagagcttcctacagaaaagtcccagcaaggagccacacttcactgacttcgaggggaagacatcattcgggatgtcagtgttcaacctcagcaatgccatcatgggcagcggcatcctgggactcgcctatgccatggccaatacgggcattatccttttcctgttcctgttgacagctgtcgccttgctctccagctactccatccacctgctactcaagtcctcaagggtcgtgggcatccgtgcctatgagcaactgggctaccgtgcctttgggaccccaagaaaagctggcaacagcccctggccatcaccctccagaacatccgaaccatgttccagctacctgtacatcatccaagtctgagctgccactttgtcatacagaaccttcctgaacccgcaaggagaaaacctccggactgggtacttgaaccgggaactacccggggaatccttggcctctgttcaccattatttctgccccctgggcactgtatgcgcgcagacttggcttaacctggggactactcccaaaggctctcccctccttaacctggcttgggggtttctttcctaatttgcaagtccttctaccaaaaaagattcccaacaggtaccatgaaccaagttgagccccctccacctttctcacatacaccgaccaggggaaaccttttcagactcacgatggcgaccaacggtctcgaaggagaaaagggtgaaaccctgtccaggtttaaaacctttaaggcctcatcgcccttcttagtgaatccccaaattaattattcccatcctacttccccaaaactgccttttctcttt

SEQ ID NO: 98806 - DNA, 852 bp, Homo Sapiens
  misc_feature (151)..(185): n is a, c, g, or t
ggaatgtagtgcctgacagttcaggctttcaaaagctcgctggaccagggtgcacggtcagagataatgggcacagagaggttcaatccagactctgaatgtcagcagttgtgcacctagtttgcattgactctcatctgagatatgaccnnnnnnnnnnnnnnnnnnnnnnnnnnnnnnnnnnncactaatatgtatagtaaccctgttctcccttgcacacgagcctcctcacacgttgcgaatcatcttctgtttcgttcaatgtgtgtgttaggagcacgactcccgctgacctcgtcccgtctactgtgaaacagccaatgtaaggattcccactggcaaagcaaatctccaaggatgtgggcaggttggccagggaaaactgtgcagagaattcagcaataatgatacagaatccaacagcgtggggttcacaacgacaaaggagtccctaggagaggccagtcgagtccccaatacagcagagaccctttcgaccgaggaacacaacactgggagccgagctcctacggaaatgtccgaactcaacaacgcgtgactctccaaagaatgccccacttttcctgagctgccttttcctgtatgtccacatcttcgaagtcctacatggaaaccttcagtacaccaacagataaatcagtcttaaaggctaggtgtcaatgtgttcactccgacaacgtcgaacgcgcctatcttgcacagttctccgacatttctacttcccacgccatctccaatgtgaaacccgagcaaatctgccacacttcgaagtaggacactgaaatactcagataatacagtaagtacctatcgtttcaatatattttg

SEQ ID NO: 98807 - DNA, 840 bp, Homo Sapiens
ctcaacattggttataactgaatgcttgggaagggaggggcagcccttcaacaggaaaaggggactgcccaaatcttaaatgcacagtcaagattctcttggagctagcaatggttctcaggttagtgagcatttagcttgcctgctgcagaatttgacccagatgggggtgttttttaggtctctcacaaatgagacaagcgaaacaattgtctccttttattctctttggtgcattggtgctggggaaacatgaactagcggcagtgtaactgcagaacatagacccagttctaccaggccaggccagcgttgggaaccaccagacagggctgctttgggctttgcttacagtatttccatgtgtagcctggcgtgtgagaaagtattaggtgaaatgccagtttcatggttcaggtgaaagtctgtgatcattcccctcgtggctcgtccttcacatcacttttgcccttcaaggagttgccgcgtccccgctcagtgccgcctgagccctcagagctcccctgtgcttttctggatggggactggcggggtcacctagcctcaccgtggagccaccgtgcaatgcccatctctgagaggcccacgcggtattcctcgtgccctgtgttagtgctttctgtataagggacagacagaactgggtttttttcctctgtctggtttaagagtaaatgtaactaacttttattttccctttatgaaagatagaaattatttttatgtagtttccagactttatacaaaatttttgtaaaatgttctctggaaagttaactacaagaatgtaaatatgcttctaataaaataacaaggtta

SEQ ID NO: 98808 - DNA, 903 bp, Homo Sapiens
tcgcatcttgatggtcccgggagaggaaggggcctggcccggggcggagtgtggagagaggaggaagctcctgccggctgagcgggcctggaggaagtgagcagcggggctcctgcctcccggcctggtccccgaagaccccagaagaacccggaacttgcttccattcggaatccaggaccaccctttgcactcagtaggcctttgttttcctgcgtggaaagcggttgggcttgggaggcgatggagccggagttcttgtacgacctgctgcagctccccaagggggtggagcccccagcggaggaggagctctcaaaaggaggaaagaagaaatacctgccacccacttcccggaaggaccccaaatttgaagaactgcagaaggtgttgatggagtggatcaatgccactcttctccccgagcacattgtggtccgcagcctggaggaggacatgttcgacgggctcatcctacaccacctattccagaggctggcggcgctcaagctggaagcagaggacatcgccctgacagccacaagccagaagcacaagctcacagtggtgctggaggccgtgaaccggagtctgcagctggaggagtggcatggccaagtggagcgtggagagcatcttcaacaaggacctgttgtctaccctgcacctccttgtggccctggccaagcgcttccagcccgaactctccctcccaaccaacgtccaggttggaggtcatcactatcgagagcaccaaaagtggtctgaagtcagagaaggtcggtggaacatcctcactgaatacagcacagacaaggacgagcctccaaaggacgtcctttgatgaattatttaagctggctccggagaaagtgaacgcagtgaaagaggccatcgtgaact

SEQ ID NO: 98809 - DNA, 1202 bp, Homo Sapiens
tgactggggcgagcgtgctgtggcccttccctgcgctgcctcagggtgcctcccgctcggccgggactgtagttccgcgccggcgtggcctgctgggttccaagcgccaggagtcggcgcagccgctctcagctttggggacgggaccgagaagcggggtgtgggcctcacgggactgtcccccctgacctcgggcagcgctggggcgagagagggcaggcggaggctctgcggggaccaccagcatccccggaccctctcagccgtccctgttcacaggcgccgcccccaggagcctcggcaggggcctaggacgccccggcgtgcagaagagaagcgggatcagatggcgtcccatgtagagtgccgtcctctgggagtgtttgagtgtgaactctgtaccttgacagctccgtacagctatgtgggacagaagccccccaacacccagtcgatggtcctcctggaggaaagctatgtcatgaaggatcccttcacctccgacaaggacagattcctggtcctcggctcgtgctgcagtttgtgcagcaggctggtgtgtgtgggcccggaatgcagtttattctactccaagagattctgcctcccttgtgtccgggagaacatcaatgcttttcctcaggaaattcggcaagacttggagaaaaggaaagctccatcaaagaggacccccagccagcccggttctcggacgtgagtgcaactggggctaggtcatcgggcggcaccctgcacagagctcctgggccagcctgcgccagggatgctgctgagctggggagccgcaatgcctggccttgtttctggaccactgggagcagcactgcagcccaggggagctggagtccagcttggagcagccacaggcccaggagctgtagcaagagggtagtccaaaggcagatgccagacaagacacagcaggaacccggcaggtccccccaaatgcccctcaggtcccaggcctgagtgagtgctgctcagatgtgactgagagggatgacctccttcaagcagggcaagctcctaagaggctgcgtgcaggtgcgtgtggggggagatggcacactgtgtcggggccatggtgccctggtaggtgggctggcactggtctctctgtaaggaaaatcactggacagcagctccttctggaccagcctgggaaggtccagagggggaaa

SEQ ID NO: 98810 - DNA, 933 bp, Homo Sapiens
tggaccggtccggaattcccgggataggatctggtggaagaaaagtcaggcaaacacaagcacgcacacaccactgggagatcagatcttctagctggctctctgctgccacagctccgccgaagggagggggtggaagaggaggactaaactcagagctgagaggagaggcaggtgtgtgcaggtgcatcacctggatcatgaggtcacccctctgctggctcctcccacttctcatcttggcctcagtggcccaaggccagccaacaagacgaccaagacccgggactgggcccgggcgcagacccaggcccaggcccaggcccacacccagctttcctcagcctgatgaaccagcagagccaacagacctgcctcctcccctccctccaggccctccatctatcttccctgactgtccccgcgaatgctactgcccccctgatttcccatctgccctctactgtgatagccgcaacctgcgaaaggtccctgtcatcccgccccgcatccattacctctatctccagaacaacttcatcactgagctcccggtggagtccttccagaatgccacaggcctgcgatggattaacctggacaacaaccgaatccgcaagatagaccagagggtgctggagaaactgcccggcctggtgttcctctacatggagaagaaccagttggaagaggtcccctcggccctgccccggaacctggagcagctgaggctgagccagaaccacatctccagaatcccgcctggtgtcttcagcaagctggagaacctgctgctcctggatctccagcacaacaggctgagcgacggcgtcttcaagcccgacaccttccatgggcctcaagaaactcatgcagctcaacctggaccacaacatcctgagaacgatgccgccaggggtcccaccgccatca

SEQ ID NO: 98811 - DNA, 458 bp, Homo Sapiens
cgagtgggtttgctataggcctcgtctgactttgtcttgcgtcttttctctgtggactcttgaggacgccctgagccccagccctgcccctgaccagcctcccccttgggtccaggggtctttcggctcatattgcagggcctgccaatgccttcacgcaccccttccccaaaggtgcccggcaggaaggcagggcctcccccactcagcgcaggtcaggctaaggccagtcggctggtcactatgcaatgctgccctggggaggctccctgagggcacagtgggcgctggaccctggccccccaactctcttgcctgctgcctgcgaccctgaagaacagaattgattcttgcccctctccctgtgtgagcttggtcccgcctcttgccccgatggcccatgcatggcgggtctcaccaccacaaaccatcgctgtgaataaagcacttgcgcccac

SEQ ID NO: 98812 - DNA, 816 bp, Homo Sapiens
ggacggtgtcactggccccggcctttgccccaatcttgtgtgggcactgaagggggactacaggttcgagagttatgggtgctacatgtgtgctttcagagcatgtagtgtgaggaagcttggagtgggatggcaggacggcctcatccctatgatggtaagctccagtgatccagagaattgggatcggaaattgcatagtagacctcgtaaactttataaacattcaagtagcttcctcgcgtatcgctaaaggaggagttgaccacaccaaaatgacgtctacatggtgctagtgggggacatgacgagatcaagagatagcacgaaggtcaaggtgacagatcacgagacttcatctcatgaaagaacggagtctcagctcactccttgtattagaaatgtgacttctccaacacgacagcaccatgttgaagcgagaaaaagatcacagttcctctcgtccaagcagtccgcgtcctcaatcaaagcatccccaaatggttccattagcagtgctgggaacagcagcagaaacagtagtcagtcaagttcagatggtagctgtaagacagctgggcgagatggtgtctcgtatatgcaaacatgcaaaaagaaggagctcggaatataagaacgtcagaacgagtgacactaatagtggcataacactagatttgccgtagacccatccatttttactgtcacaggcaaatacaatgttgggcaggatgtccggatctggccgagaacataactttacacgacccaatgagaaacgagagtatgagggtggcagcacggacttgcgtccac

SEQ ID NO: 98813 - DNA, 1256 bp, Homo Sapiens
cacccctctacacgctgggcgtcaactacccggatgaaaacgtcaagtccagctgctcgcccgtctacacttgccatcttctacacagcggccatcctgggtcccaggctgaccgtgctagccttgattgtggaaggatgcccgtgcgtgtagaatatctaccacgagagacattgtgtgcaccgacggcgaccggtacgtcgtgactcatccgaacgagctccactgttggtgttcggtcgcctctggatgggatcgtgctatcctggcgctctgtgcgtccgcctgcgtatatcttacaccggcacgttcccgatccatgtgtggtgtacctctacggtcatgctcgccagtgtgtccacacgcgactagcgcccggtcaatagagagcggctggagaactgacgacgcagattgcaacgggagcaagcagcccagtgaggtgaagcgactgacgccaagcctcaagggatcttatggcgaacaatctcatcacgaagaccttgacctctactcctaatccttggtctccgtgctgataagtagactcaccaacagttacatccatgcttgctgacctagagccccagggagtccactcagatgggcccaacttacctcccatttcaaactctgtgcaacttgttccccaccccgttgtacaagacccacacaaataggcatgtgctttagagacagtacgcccaatgaattatcaaagtcccttagcacggtttgcacctcccacgtatacgacttgacacaaaccatgtgcttgtagaggtacctctgggtgcgtagccaaggaccggagaattggctgggcttgagctatgctcctgtcccatgggtgttccgcgcctctacctttgtggctggaccctctcatgcccttctagtgccctcccgcggcgggttcctcccgtgcagcgctccatttcgaaccggcaatcttgtccctctgtttcccttggacattgccgccttgtttacctgcccctttgaccgtggcgaggccgtttcccctctccgtttctgttcaccttccaagctttgccaccattggtctccccctcaccgtcgattcgtccccgccctttggccccgagggcccctggttccgtcggaacacttcccggacgcttgcacacgaggccccggggtaagggcccctttccccccttatggcctccccgcaataatgtggtcccgaccgtcgctgttgtgaacaaccgccttaacagctgggcgccttc

SEQ ID NO: 98814 - DNA, 964 bp, Homo Sapiens
  misc_feature (114)..(224): n is a, c, g, or t
  misc_feature (228)..(253): n is a, c, g, or t
aatgttaagaaatgatctttttatgaggcaattggaaatttgaacactgatcaactataggatgattggaattattaatttttaaaggtgtgataagatactgcacttggctgnnnnnnnnnnnnnnnnnnnnnnnnnnnnnnnnnnnnnnnnnnnnnnnnnnnnnnnnnnnnnnnnnnnnnnnnnnnnnnnnnnnnnnnnnnnnnnnnnnnnnnnnnnnnnnntttnnnnnnnnnnnnnnnnnnnnnnnnnngatattgcagttgtgttgtaagcgtccttatctttcagagctacatagtggaatgtttatggaatatttaggataaatgatataggcatttgggatttgctgcaaaatgacccagaggcaggggtcagggggagaggtagagatgagacaagaggtagaggggagaggtagaggtagccacgagctgataattacagacaagagatgcggagtatgtgggggctcattatcctgcatagtctatctttgtatatctttgaacttttcaagaataaaaaagcttaaaaagtatacatggcctggtcctaccagagactcacccaatgccagcctccagccagggagagccaagtttgcattttcacacgcatctcacactcctctgcactctcaacttggagagctccaaacagggaaaccccaagccttgctggcttctgccaaccccctgagcagaagcatgggtccccctgatcaccacctcaccaccctcatcctgatctcactgtacactccctttcctggtctgctaagtagcgggtgtcttccttgacactaacgctacagctagaccacggtgggcttggcaacaggtgtcttcccagatgctggcgttaccgctagaccaaggagccctctggtggccctgtccgggcattacagaaagctcgcactcttgtcttctggtcactcctcattgtcccctcagtc

SEQ ID NO: 98815 - DNA, 736 bp, Homo Sapiens
  misc_feature (152)..(205): n is a, c, g, or t
gatctcgggcgtgatggttcgatctggacgcccaccccatccgggtgcacccacgaacaagccaggcccttgcaccaagagtgggctccaagtcccggcccgagccgtgcgggcgtgcgagatacgaccagatggtgccgggcatgaagcgnnnnnnnnnnnnnnnnnnnnnnnnnnnnnnnnnnnnnnnnnnnnnnnnnnnnnncgcggagggcgcgagggggccggccggggagcgcgcgggcgagcccagcacgcgcgccgaagggctgcagacagcggccggccgggcgcccagctgcagccccaggggccggatggggctgacgaagccggtctgcactgcctggtcgcgacgacccaggccccgccggccctgcttaccctcctccagcgcttgctgcagttgcttctccaacagccggttccggcgctccagctcatgcaccttggccaggaagcagcggaaccggaggttcagggtcttgagcacgttgatgttggagcccaggtcattgcggagggccatggcggcaggcggggccgggcccggcccgggcggcgagtaggcagcagggccggccggcgagagaggcgccgggggcaagtctcctcccccggcgaagtggtcgcctcccagtgagtcccccagtggcccggccaggccctgctgctcctgctgcaggaggaagaggttggggccgaataacggattcatggctgcgatcccgggaat

SEQ ID NO: 98816 - DNA, 918 bp, Homo Sapiens
ggcccggcagtgcacacacacggcagggcgggcgacagatgcagtgcgtgcgccggaagcccaagcgcacaaacggaaagagcgggcgcggtgcgcaggggcgggcgcccagcgggcttggcatgcgcgcccccgcccgaggctataaaagcatcgccacctgctgccactagccaagccgcgcgtccagttgcttggagaagcccgttcaccgcctccagctgctgctctcctcgacatggaccctgagacctgcccctgcccttctggtggctcctgcacctgcgcggactcctgcaagtgcgagggatgcaaatgcacctcctgcaagaagagctgctgctcctgctgccctgcggagtgtgagaagtgtgccaaggactgtgtgtgcaaaggcggagaggcagctgaggcagaagcagagaagtgcagctgctgccagtgagaaggcacccctccgtgtggagcacgtggagatagtgccaggtggctcagtgccacctatgcctgtggtgaagtgtggctggtgtccccttcccctgctgaccttggaggaatgacaataaatccccatgaaacaggcaaaagacaaacacgataaacacaaaccacagactacatacccatgtcatacactacggaccaagaacaagaaaaagaggggggcggggcgagctcaaaaagaagaaatccccctgaggaagagggcagcaccatcgtttcagcaggacacccgcgattttttgtcggaaacaggggtggccccctaaaaggaagacggtttttaatcacacgaggaccatgcgggcgaccattttcaccacgacgttgatgtgtgagaaaaccgcgttcagcctgagtgacatctggggaagacaccgcttaatcttgaggggtcggaccatatgtggaacatcc

SEQ ID NO: 98817 - DNA, 1327 bp, Homo Sapiens
  misc_feature (779)..(1039): n is a, c, g, or t
  misc_feature (1052)..(1052): n is a, c, g, or t
  misc_feature (1066)..(1066): n is a, c, g, or t
  misc_feature (1071)..(1109): n is a, c, g, or t
  misc_feature (1141)..(1141): n is a, c, g, or t
  misc_feature (1146)..(1146): n is a, c, g, or t
  misc_feature (1221)..(1221): n is a, c, g, or t
  misc_feature (1225)..(1225): n is a, c, g, or t
tgcagcttgggcggccagcggatcgtgccgcggcggccgagcgcagctacaggagggtgtccagaagccacaagccatggctgtggggaacatcaacgagctgcccgagaacatcctgctggagctgttcacgcacgtgcccgcccgccagctgctgctgaactgccgcctggtctgcagcctctggcgggacctcatcgacctcgtgaccctctggaaacgcaagtgcctgcgagagggcttcatcactgaggactgggaccagcccgtggccgactggaagatcttctacttcttacggagcctgcacaggaacctcctgcacaacccgtgcgctgaagaggggttcgagttctggagcctggatgtgaatggaggcgatgagtggaaggtggaggatctctctcgagaccagaggaaggaattccccaatgaccaggttcgcagccaggccagattgcgggtccaagtaccagctgtgcgttcagctcctgtcgtccgcgcacgcgcctctggggaccttccagccagacccggcgaccatccagcagaagagcgatgccaagtggagggaggtctcccacacattctccaactacccgcccggcgtccgctacatctggtttcagcacggcggcgtggacactcattactgggccggctggtacggcccgagggtcaccaacagcagcatcaccatcgggcccccgctgccctgacaccccctgagcccccatctgctgaaccctgactgctttacggacattggatgaagccgnnnnnnnnnnnnnnnnnnnnnnnnnnnnnnnnnnnnnnnnnnnnnnnnnnnnnnnnnnnnnnnnnnnnnnnnnnnnnnnnnnnnnnnnnnnnnnnnnnnnnnnnnnnnnnnnnnnnnnnnnnnnnnnnnnnnnnnnnnnnnnnnnnnnnnnnnnnnnnnnnnnnnnnnnnnnnnnnnnnnnnnnnnnnnnnnnnnnnnnnnnnnnnnnnnnnnnnnnnnnnnnnnnnnnnnnnnnnnnnnnnnnnnnnnnnnnnnnnnnnncaccttccaccanccatgattggtaangttcnnnnnnnnnnnnnnnnnnnnnnnnnnnnnnnnnnnnnnngagatggggagtctcgctctgtcgccccaggnctggnaagtgcagtgggcgcaatctcaggctcactgcaaagctctgtgcctcccagggttcgcgccatttcacctgcctncagnccttccggggaagtagcttggagaactaacaggcggccccaaccaccatgcccccgggggataaaatttttgggggttgggattttttttaaggtaagaaaa

SEQ ID NO: 98818 - DNA, 1213 bp, Homo Sapiens
tggaccggtccggaattcccgggataggcggtgcagcttgggcggcccagcggatcgtgccgcggcggccgagcgcaggcaggagatcatgtcctctgagatcttgagaaggtggctggagccctttggacctccgcgggaggcagtgataattagcctcctcctcccatcatgttctgaggatgggagagaggatggtgacggcaccggaggcctggggtgctctgcccggctgcgcattatatccccattaaagactggcctactgaaaaaggctggccctggaatcaaagaagatccgggcttcttccccctctgcccttatttttgaccttgggcagtgccttccacctctattgtgagaggccagagaaaaaaatcagagctcaccttttattaaagtacctgatgtgtcccaagctccttggaccgccccagtgacccctggagctacaggagggtgtccagaagccacaagccatggctgtggggaacatcaacgagctgcccgagaacatcctgctggagctgttcacgcacgtgcccgcccgccagctgctgctgaactgccgcctggtctgcagcctctggcgggacctcatcgacctcgtgaccctctggaaacgcaagtgcctgcgagagggcttcatcactgaggactgggaccagcccgtggccgactggaagatcttctacttcttacggagcctgcacaggaacctcctgcacaacccgtgcgctgaagaggggttcgagttctggagcctggatgtgaatggaggcgatgagtggaaggtggaggatctctctcgagaccagaggacggaattccccaattgaccaggttcgcagccaggccagattgcgggtccaagtaccagctgtgcgttcagctcctgtcgtccgcgcacgcgcctctggggaccttccagccagacccggcgaccatccagcagaagagcgattgccaagtggagggaggtctcccacacattctccaactacccgccgggcgtccgctacatcttggtttcagcacggcggctgtgggaccactcattactggggccggctggtacggggccgagggtcaccaacagcaagcatcaccatcgggcccccgcttggcctgacaccccctgagcccccaatcagctggaaccctgaactggtaaaccaactgctgtcagaaaagggctggggttgggacggg

SEQ ID NO: 98819 - DNA, 771 bp, Homo Sapiens
cgcaggtccaggcggtgcagcttgtggcggcccagcggatcgtgccgcggcggccgagcgcagctacaggagggtgtccatgaagccacaatgccatggctgtggggaacatcaacgagctgcccgagaacatcctgctggagctgttcacgcacgtgcccgcccgccagctgctgctgaactgccgcctggtctgcagcctctggcgggacctcatcgacctcgtgaccctctggaaacgcaagtgcctgcgagagggcttcatcactgaggactgggaccagcccgtggccgactggaagatcttctacttcttacggagcctgcacaggaacctcctgcacaacccgtgcgctgaagaggggttcgagttctggagcctggatgtgaatggaggcgatgagtggaaggtggaggatctctctcgagaccagaggaaggaattccccaatgaccaggtcaagaaatacttcgttacttcatattagtaagatccggggacttggggtaggggaaagcccaaatcaatttaccctggggtctctcccaccctggaaggggcagtcctagcccctcactgccctagtggtgagcccaggcgcataggacccatctgcctgaccccaagacaccatgctcaagctcccaggtgcgtggaccgtcaagggccgcacgagacagtaagggagcgacgctgatgcgagtaccaccacggccggacatcgagggtcaagcactggacacgccagcagcgccagagtcgaaggtccc

SEQ ID NO: 98820 - DNA, 413 bp, Homo Sapiens
catgccccttatggctcaacccagatgtaccggacgccgggcgggtagttggagaatgtgtgggagacctccctccacttggcataactcttctgctggatggtcgccgggtctggctgaaaggtccccaaaggcgcgtgcgcggacaacaggacctgaacgcacagctggtacttggacccgcaatctggcctggctgcgaaccactccttgacctaaatgtccggccgtgtggtatccatcagctcctcccaatacccttcggccttgaggtccacacacctgggacttgaggcaggtgtaatatgaagtaacgaagtatttcttgacctgaccattggggaattccttcctctggtctcgagagagatcctccaccttccactcttaggctccttttcatccaggctcca

SEQ ID NO: 98821 - DNA, 977 bp, Homo Sapiens
cgagagcagcggatctcggcaaaccctctttctcgaccacccacctaccattcttggaaccatggcggcagtggcggcggcctcggctgaactgctcatcatcggctggtacatcttccgcgtgctgctgcaggtgttcctggaatgctgcatttactgggtaggattcgcttttcgaaatcctccagggacacagcccattgcgagaagtgaggtgttcaggtactccctgcagaagctggcatacacggtgtcgcggaccgggcggcaggtgttgggggagcgcaggcagcgagcccccaactgaggccccagctcccagccctgggcggccgtatcatcaggtgctcctgtgcatctcggccagcacgggagccagtgccgcgcaggaatgtggggtcccctgtgttccctcgccagaggagcacttggcaaggtcagtgaggggccagtagacccccggagaagcagtaccgacaatgacgaagataccagatcccttcccaacccctttgcaccggtcccactaaggggcagggtcgagagaggaggggggatagggggagcagacccctgagatctgggcataggcaccgcattctgatctggacaaagtcgggacagcaccatcccagccccgaagccagggccatgccagcaggccccaccatggaaatcaaaacaccgcaccagccagcagaatggacattctgacatcgccagccgacgccctgaatcttggtgcagcaccaaccgcgtgcctgtgtggcgggactggagggcacagttgaggaaggacgggtggtttacgaaatacagtggggcctctcgctgtccttgcccagggcacttgcattcagctcgctggcattgctctctcggattccctttcctcctcactgctccaagccaccctactccaaataatgtgtcacttgaattgggactattcaagcagtaaaagtaatgaatccacc

SEQ ID NO: 98822 - DNA, 908 bp, Homo Sapiens
ggggtgtgttcggcccctcgtccagttcacttggagccctcgatggcttccacgaggagttatgtccacaatcaccggggggtactgaacgtccatgctggcgtagccctcgaactgcaggctgtcttggggaaggaaggcctggcagcccagcctgtggcccgttggcctccctcgtgggcaacgaagtgcagcagtgacacctgcacccaggtgccctcgtcctcccgcagccggcccagcacagcgggctcccccagcccctcgtggcccagccagctcagctcagggcgcagctctgggcagttgtccggcaccatgcagctgacctccacctccgtgcctgccaccacctctgggggcaccacgatgttgggggtgttgacgatatccaggacactgtgctctgagaaggtgtactggttgtagccgcccaggtccccacggaagtagtacttcccgcccagctcggggctgacgttgctgagcaggagggtgcagtttcgcaggcccaggtcccccaggaggcggctgcggccctggaagctctcgtggactacttgggtgcgcgacttgaagaccaccggggggtagttcttggggtaggggctattgaagtaccagacaccatgcaccacagcgggccgcagctcatccgggaagtcaaagcggcaggggatggagacgcacgtgccttcgaaggccgagatggacgagggcatccaggcaccccagtgaccccctcgggaggctgaaatcataatccagaacagaggcagtgccgtgaggaatatcattctgtacagcgagtgagtgatcgctgaatctccctgagttggggacgtcttctgggtccacctgaagccgccagacaacttggactcagttgcttctgcacctctgctccg

SEQ ID NO: 98823 - DNA, 756 bp, Homo Sapiens
ccgcggagggagcgcaggctcgaagagctcctggacgcagaggccctgcccttgccagacggcgcagacatgtcagaacaaagtaaggatctgagcgaccctaactttgcagccgaggcccccaactccgaggttgcacatgcagtcccatggggatttcaggagcgggcgttcctccgtccgcgaccctggcagagccgcagagccctcctctaggcccgacggccgctccgcaggccgcgccgcctccccaggccccgaacgacgagggcgacccgaaggccctgcagcacgctgcggaggagggccgcgcccaccaggccccgagcgcggcccagccgggcccggcaccgccagccccggcgcagctggtgcagaaggcgcacgagctcatgtggtacgtgctggtcaaggaccagaagaagatgatcatctggtttccagacatggtgaaagatgtcatcggcagctacaagaagtggtgcaggagcatcctccggcgcaccagcctcatcctcgcccgggtgtacgggctgcacctgaggctaaccagcctgcacaccatggagtatgcgctgggtcaaagcgctggagcccgaggagctggacagggtggcgctgagcaaccgattgcccatgacaggcctcctgctcatgatcctgagcctcatctacgtgaagggccgcggcgccagagagagcgccgtctggaacgtgctgcgcatcctggggcttgggcctggaaaacgcactcca

SEQ ID NO: 98824 - DNA, 927 bp, Homo Sapiens
ctgtctggtgctcggggcttctggcctcatcggtggcccctgccccatgcacggcgcgaccgattaagtttggaggcctgtcgaacagggatggatagctgaggctcctggttcggaggaccttacggagcccagggctttccagcgtccaggaaacgggagtagcaggagagcccgtgcacaggaaggagttgagtccgcggcaaggcacaaagaactggtgcaggtggccgtgcagccaggaggccggcatggagtaggcggcataggggaaggcgcagccccagactggtagaggcttgagcgcgccgtagtcgaggaagtagcagatgtggcgcatgcggggcgacatggagctgaaggtgtgcgcgcagcacgacgcgaaggggtagaggcaggcgggcagcaggaagaccagcagcggccagtggtacggctccgcacggaagccggggccgcccgccagcgccaggagccgccacaggaagtacctgcggcgggcgcgtgctcaggccgccgcggacccccgcgactgccgctgcagcccgtgggcctggacggtccctgcccgcctgggtaccccctctgagctcaaggccgcggcctggggcagagcctcccctcaccaggtgggcaggaagtgagtccagatgttgaccgtctcgttggtcatctggaaggagctgaggacacagtccaaagccgagctggtggggcggcggtagccagacatgatgccatcttcccagaacacccgggggacctggtggacttgaagaagttggggcagcttgagactgagcatggtggcctggtacctccacgttgacccagagcttggtgggtgctcctaagctggtgggtcaacaggcccagggctccacgggcggagtccaaggctgctgccagccaggctgatggaggaag

SEQ ID NO: 98825 - DNA, 878 bp, Homo Sapiens
cctggctggcagcagcctggactccgcccgtggagccctgggcctgttgacccaccagcttaggagcacccaccaagctctgggtgttctgggaagatggcatcatgtctggctaccgccgccccaccagctcggctttggactgtgtcctcagctccttccagatgaccaagcgagacggtcaacatctggactcacttcctgcccacctggtacttcctgtggcggctcctggcgctggcgggcggccccggcttccgtgcggagccgtaccactggccgctgctggtcttcctgctgcccgcctgcctctaccccttcgcgtcgtgctgcgcgcacaccttcagctccatgtcgccccgcatgcgccacatctgctacttcctcgactacggcgcgctcagcctctacagtctgggctgcgccttcccctatgccgcctactccatgccggcctcctggctgcacggccacctgcaccagttctttgtgcctgccgccgcactcaactccttcctgtgcaccggcctctcctgctactcccgtttcctggagctggaaagccctgggctcagtaaggtcctccgcacaggagccttcgcctatccattcctgttcgacaacctcccacctcttttatcggctcgggctgtgctggggcaggggccacggctgtgggcaggaggccctgagcaaccagccatggctaccatctcttctgcgcgctgctcactggcttcctcttcgactcccaaactgactgaaagggtggcaccaggacgctttgattacatcggccacagccagcaattataccacatctgggcagtgctgggacacccaacttccagctggaggccagtgctgactgataatgg

SEQ ID NO: 98826 - DNA, 660 bp, Homo Sapiens
cgacggcgcggaggccccgggctgcggcgcaggctccaaagaagaagaaaccaacgcccagagagggaggcccaggtgcagggagcaggcgagggaaggatccgtacaggggcccaacactactccaccaaccgaagcccccaaaaggagcccggtgatgctgcgaaggctgtgaacaggggaggcggcactgtgggggctgccggcagccggggctggggagagacatgtggacacgtggcctctatggctcccgcctgccagatcctccgctgggccctcgccctggggctgggcctcatgttcgaggtcacgcacgccttccggtctcaagatgagttcctgtccagtctggagagctatgagatcgccttccccacccgcgtggaccacaacggggcactgctggacttctcgacaccatcctccccggaggcatgcgcccgcggcacgggggccacgagacgagtcccgcctcttctacaaagtggcctcgcccagcagccaattccttgctgaacctgaccctgcagctcccgtctactggcagggcacgtctccgtggaggactggacacgggatgggcctggcctggcagagcggcggccaggcccactgcctctacgctggtcacctgcagggacaggccagcagctccat

SEQ ID NO: 98827 - DNA, 756 bp, Homo Sapiens
  misc_feature (386)..(386): n is a, c, g, or t
tgatcttgttacgagtgtcctcactcaggaacggtttgatgaggttataggccacaggaaacagtttgggggctgtaacggcgataagacgcttcagtgtttcgggataatgtgtcctcaaacattgcagagaactctccataggcctccacagcaggcttccagagatgcttgaggccaagcccctcgcagtcataaattatggtgatggtctccacctgtcctgccccaactttgtggtctggtgggcacactcttgcagaagcagctcacactcccgcatcttggtcctcagcaggtcctgtttggaggctgagaacagcagacccttggcatccagaggtccaattatgtcgtatccagactggggcaggccagtcccaagngtcatacgccacacataccccctgacagatactgttggatcacctctggaggctgccagctaatgatgttgtcaatgtccttttgctttcggaactccacatgcttccggagcatggcctccgacttctgcaggtcgaagcttctggctcggagccaacgcacggagaataatagtcatcatggattcggcagggccggcagcacatccatggacattctcccgaaacttggccaatgcctccttctgcctggggctcagatcacacgactcatcgccgcatcactcgtggactcaaccgacggggatggggtttgggggcgggaggcggcgggtgcggcagctgatggagcacagactcgtcctcgccg

SEQ ID NO: 98828 - DNA, 1563 bp, Homo Sapiens
  misc_feature (1481)..(1481): n is a, c, g, or t
gggtcccaaagtaagaatggggatggaaagtcagagatgacacctggaggtcagatccgaattgtccacggagcttcagggccctctggtctggagaaatacgttcgctagttatataagaggctttgagaatggtctccagttctgtactctctgccctgcccaagagaaatctacccctgttggccaaagggcagcggggagggagcaaaggctggaggccagaagtggttttggcccttgggggaagattccagaggggagcgaggtggcggcagactttggtttcttgggtcccctttcttgcagttgcagaggctgaggaggcccccacctccctgccccttgaggggggggctccgtgtgggaagttggcatctgtcacgggcttgtgggtgcccgggccctgggccctcagaacaggacgctcagggggtagagggccagcgcgagcagcagggggcctgcagcaaggctgcctgccgagctggcaggagcacagtggccgaggttggccccgatgcaggctgcatacgccatcacgtgggggacgtagttctgctcgtggacgccgtgcagcaggtgcgccatggggcccttggagaagacggccacgtcctccccgccgtgggtctcgtggcgcaggggcacagcagactgcgcctggtagttgttgtgagcatagtccaccatggagacattctctcgttcaccgcccaccaccttgtagccagccccattgccatacaggatggcagtgaagggcttcttgtctgtgtcactcagcatgggggccagaccaaagatagagtgcccacggggggtgtatccaccaaatgtgaagacgtgggaatggcccgcagtgaccacggtcagagtgtcttccgaggaggtcaagctgcctgcctgcccgatggcccggtccatctccaccgcctcatgcagggcctgcttggcttttccttcatggtgcccgtggtcaattctgcctccttgggacaccaaggcaaaggcctcggtgagggaggaggggaggaagatctgctccccagccccacaacactgctgctggattaacctttgttagctagggaaggacaggaaccttcgccgggcaccactctgagctagcaccacagcctaggcattttacgcagccattcaacctgacggaggccagagagggacagccccggtgccaaaggcacatgcatgggggctgcaaagtccagatgtgtaatcaaattcaccaggccgggaagctgtactcctcccaccgcccctcccagcactgtctctagctgcttgaaggaggcactgaagcctttgggaggtagggaagggggcacgctggaatccctacaatgtgccaggcacgacacacccatgtctcttttcccctgaacagcaatgctgggcagagaggaatatgatcagtcctgtttagatggagcaactgaggcctagtgtggggaagcccnacggtgggatttgccaggatgtgaattcaggtgtgactcgtcctaaccccgtttttcatctctacctcaaatcatcccctct

SEQ ID NO: 98829 - DNA, 149 bp, Homo Sapiens
cagtcgggtgggaagccgtgtctcgcagtcgtggactcgtgcagctggggcgtctgcagccgctcgtcacccgcgtgatgctgtttctggcgttgggcagcccgtgggcggtcgaactgcctctctgcggaaggaggactgcattgtgt

SEQ ID NO: 98830 - DNA, 1469 bp, Homo Sapiens
  misc_feature (1404)..(1404): n is a, c, g, or t
  misc_feature (1433)..(1433): n is a, c, g, or t
aaattttactacttttctttctcatatacgaccccattctcaaatagataaagggtacaaggaaaggaattttccggatcggcgtgcgcggagcggggcagccagcagcggaggcgcggcgcgcagcacacccggggaccatgggctccatgttccggagcgaggaggtggccctggtccagctctttctgcccacagcggctgcctacacctgcgtgagtcggctgggcgagctgggcctcgtggagttcagagacctcaacgcctcggtgagcgccttccagagacgctttgtggttgatgttcggcgctgtgaggagctggagaagaccttcaccttcctgcaggaggaggtgcggcgggctgggctggtcctgcccccgccaaaggggaggctgccggcacccccaccccgggacctgctgcgcatccaggaggagacggagcgcctggcccaggagctgcgggatgtgcggggcaaccagcaggccctgcgggcccagctgcaccagctgcagctccacgccgccgtgctacgccagggccatgaacctcagctggccagcccgcccaacaccgatgggtgcctccatagaggacgccccttgctccgagccccccggggggggcgcaacccatgacctgaagggccaacctttggtgggcatgtggccgaggaaacccccctccaaggggcccctacccctaaaagccccccgactcccgaagaaggccatgcgcctaggaaattcctgcatttagcaagccttaaaaggtaacttgaaacccacgccggttggaaactcccacccctgacagggggcgcacccccaccctatgtgggcaagacaacattaacccgatgtccactataatgtggggggcgcacaccaactctgcggacccaacaaagcccccccggaggaaccggcgggagcggcgtagtgactccttggctctagaatatatgtgcgggtttctgccggtagaccaacgcaccgacgaaatccgcaacgcctgacagtggttcttatgtagaatagagcgggttgacatatacaatgattattataccactgagcactcctctcgcgatgaggcgggcttactcttcagagacgaagacatcctaatagatcagccacgttcatattatcgttcgcgcggaataacggaccattgacacgcgtgacccgtcgagcaccccctaagcgctctaatgaggcgcgtcacccaggtgttcgtctaaacaagggagcggatctttacgcgccgcatgacaggatacaacgaaagaacacacccgaggtgggccaccccaaagttacccagtggtcccacatttcccacctaatttatcgtacctccgaagttgactcgactgacccgccacgccgttcaccnggcggtgaaccctcataggaagccactantgaccaggttcttctgattactcaaaatcacgattc

SEQ ID NO: 98831 - DNA, 1109 bp, Homo Sapiens
cgagcagcgcaggtctgcaaggaccatgggttccgccgctggggacaggcacgcggcgtggctccctggccgggccgggcctgcggcgccctcccgcgctggacacccaccgcgcccgcccaaggctgccactccaagcctggcccggcgcgccctgtgcccctgaagaagcgcggatacgatgtcaccaggaaccctcatctcaacaaggggatggcctttacccttgaagaaaggctgcagcttggaatccacggcctaatcccgccctgctttctgagccaggacgtccagctcctccgaatcatgagatattacgagcggcagcagagtgacctggacaagtacatcattctcatgacactccaagaccggaacgagaagctcttctaccgagtgctgacttcggacgtggagcaagttcatgccaatcgtgtacacgcctaccgtggggctagcctgtcagcactatggcctgactttccgcaggccccgtggactgttcatcaccattcatgacaaaggtcatcttgcaacaatgctgaattcttggccagaagacaactataaagaccgtggtggtgactgatggggagcgcatcctgggcctggcagacctgggctgctatggcatgggcatccctgtgggcaagctggccctgtacacggcatgcggaggggtgaacccgcagcagtgcctccctgtgctgctggacgtcggcaccaacaatgaggagctgctcagagaccctctgtacatcggcctgaaacaccagcgcgtgcacgggaaggcatacgatgacttgctggatgagttcatgcaggctgtgacagacaagtttggaataaattgcctcatccaatttgaagacttcgccaatgccaatgccttccgcctgctcaacaaataccgtaacaagtactgcatgttcaatgatgacatccaaggtaggtttccaccccacctgatgaagctacaggggactaacttatattctcaacctcactgggatgccaaaggggtgaggaaaggctgtcagcccatagttggtttgctgccagcagctgttgaaaaaagaatattaaacttagattcaactcctaaaaaa

SEQ ID NO: 98832 - DNA, 978 bp, Homo Sapiens
  misc_feature (87)..(102): n is a, c, g, or t
  misc_feature (137)..(167): n is a, c, g, or t
gccgggtgtcagcgaacccctttcccaaaccttcggggagaagggaggtgggaggaggcaaagaaactacaggcagtgagctggaannnnnnnnnnnnnnnncaggagacaagaaatcaagacaccaggcagcaggnnnnnnnnnnnnnnnnnnnnnnnnnnnnnnntagagaccaacaggatagacagctacctaaagcctgaaagactgacagcaacacagaaaaaaagaaacaggcagaaagagagacaaagacagaaatagaaacagactaacacacagagtcaaaaatacagagacagaaagacagggagaaagagaaacagaaaattagacaccaaagacatacgaacagggcaggaaggccgactgaaagaaagacggagaagaggagagagaagccagggccgagcgtgccagcaggcggatggagggcggcctggtggacggaggcagcacgtagtggcctgggctgagctgggtgggccgggagaacgcgggtgcctcagagtgggggtgggaggcatgggaggggcaggcattctgctgctgctgctggctggggcgggggtggtggtggcctggagacccccaaagggaaagtgtcccctgcgctgctcctgctctaaagacagcgccctgtgtgagggctccccggacctgcccgtcagcttctctccgaccctgctgtcactctcactcgtcaggacgggagtcacccagctgaaggccggcagcttcctgagaattccgtctctgcacctgctcctcttcaacctccaactccttctccgtgattgaggacgatgcatttgcgggcctgtccagctgcagtactcttcatcgaggacaatgagattggtccatctctaagaatgccctcagaggacttcgctcgcttacacacctaggcctggcaataaccatctggagaccctccacagattcctgatcccgaggctgtaaaacccttactc

SEQ ID NO: 98833 - DNA, 1041 bp, Homo Sapiens
  misc_feature (888)..(908): n is a, c, g, or t
  misc_feature (973)..(973): n is a, c, g, or t
gggtccggaattcccgggatcggaagcgggctagtcctccggctccgacagctgggtgtccaggccatggggcagccctgggcggctgggagcacggacggggcgcccgcgcagctgcctctcgtgctcaccgcgctgtgggccgcggccgtgggcctggagctggcttacgtgctggtgctcggtcccgggccgccgccgctgggacccctggcccgggccttgcagctggcgctggccgccttccagctgctcaacctgctgggcaacgtggggctcttcctgcgctcggatcccagcatccgtggcgtgatgctggccggccgcggtctgggccagggctgggcttactgctaccaatgccaaagccaggtgccgccacgcagcggacactgctctgcctgccgcgtctgcatcctgcgtcgggaccaccactgccgcctgctgggccgctgcgtgggcttcggcaactaccggcccttcctgtgcctgctgcttcatgccgccggcgtcctgctccacgtctctgtgctgctgggccctgcactgtcggccctgctgcgagcccacacgcccctccacatggctgccctcctcctgcttccctggctcatgttgctcacaggcagagtgtctctggcacagtttgccttggccttcgtgacggacacgtgcgtggcgggtgcgctgctgtgcggggctgggctgctcttccatgggatgctgctgctgcggggccagaccacatgggagtgggctcgggcgccagcactcctacgacctgcgtccctgcccccacctcgcagtagcctctggggcccccgctgggcccctcccaccggcgcctggacccttccccggactccccaatggcctgccgctcgggannnnnnnnnnnnnnnnnnnnnatatatccgaacaccaacgcttcccgccccctcacccaaccacccccttatctttccattatatncaccggtggcgccccaagcgagcaccctcctctcgcctataccaccccctccccgataataccaccca

SEQ ID NO: 98834 - DNA, 904 bp, Homo Sapiens
gaggcggacagcgaggccaagatttcagctgcgggacggtcagggagacctccaggcgcaggaaggacgtgaggaggggaagcgggctggggcggcagccgggcggaggggcagctgcgcaggcggaatgaggaacgcctttgctctaaggcgaccaccctggcagctcttcactgaggggcctcggtttccacatctgtcgctctccggtcccaagaccaccaggaccgacggggctctccgggagggtcagcccctccggtggccccagtcatgcatcaggggacggatcagaagggctaggaagaggggtcgtggggaaggccccagaaaaaagaggaaggagggaagattttgcctgaagcgggaaagccaagggctgggcggcgcgagacccccattcctagcgactggggctggctggtggcccgcggcagcccccgcgccgggaggattaggcctcccgccgctcccacccgtccggaccctcccacgtgtttaggtcctcccaaaagtattcggcctccggcccctgccccttcccccggctggcctggacctcggggacgtggggggaaccccgtgggagcagggggattctggacggggagggagtagcggttggggagaaggctgagcggggaaacggagagaggggctccggggacggcagggaggagagtgggtcgtgccggagacaccagggagagacacaatgggcaagattaggggtgtagggtgggagtgcgaactgacctgattcctagcgttgggcaggaaacctttgctaaaactgcaggccccaggaaacaacgcgggcagggctgggaagggaacggagacggccacgcggaccctaaggtcaatttggagaaaggccattccaggctccttcactgtgccc

SEQ ID NO: 98835 - DNA, 799 bp, Homo Sapiens
atcctgctcaactgggtcaggtccctcttagaccagctcttgtccatcatttgctgaagtggaccaactagttccccagtagggggtctcccctggcaattcttgatcggcgtttggacatctcagatcgcttccaatgaagatggccttgccttggggtcctgcttgtttcataatcatctaactatgggacaaggttgtgccggcagctctgggggaaggagcacggggctgatcaagccatccaggaaacactggaggacttgtccagccttgaaagaactctagtggtttctgaatctagcccacttggcggtaagcatgatgcaacttctgcaacttctgctggggcttattggggccaggtggctacttatttcttttaggggattgtcaggaggtgaccactctcacggtgaaataccaagtgtcagagcgaagtgccatctggtacagtgatcgggaagctgtcccaggaactgggccgggaggagaggcggaggcaagctggggccgccttccaggtgttgcagctgcctcaggcgctccccattcacggtggactctgaggcaaggcttgctcaagcacaggcaggcggctggatcgagagcagctatgccgacagtgggatccctgcctggtttcctttgatgtgcttgccaccaggggaatattggcttctgtatccatgtggaggatccaagtgctggacatcaaatgaccaccagcacggtttcccaaaggcgaacaggagctggaaatctctgagaaccgcctctctgcgaacccggataccca

SEQ ID NO: 98836 - DNA, 1249 bp, Homo Sapiens
ccgccacggggacatttgggaagtctctgaacgcggtgcctgtgagggtccccgggaccacgggggcgccgctcgcagcgctccgggcatctcccaggcgccgtgccccagtcagagcgcccccgcaggtgctcccggagggctggactcagaccccgctggatcccatgcaggccggcaaggcagcagtggagaccgtcaaggcgggactccagcgccgtgaatgtagactcaggacccctgggatggatgggttcgaaccccctgaagctgacttcaggaccctcagaggctggactccaccgctcgcaaggcagcatgtcggggacgcctcacgggctggactcgaggcccacggcagacatgaagacccctgggaggcgtccgggacccccaggactgaatttgaggcccccaggcagacgtgggggcccctgggcggtggtcaggacgcctggggctggaccctacccccaaggcagacgaggagaacccccgggcggcatccgggccccccagggctggactcaagcccccaaggctagacgtggggacccacctgggcggcgaccgggaccccccagagcaggtctcaagccccaaaggcagacgtgggggctcctcggcgacgtccgggacccccagggctggactcaagcccccaaggctagacacggtgactccggggtggcgtccgagactcccacgggggaactccagtctccaaggtagacgtgaggacccccggccggcatcggggacccccagggcgggactcgagcccccaaggcagacgcggggatgccgaggcggcgtccaggacccccagggcgggactcgggcccccaaggcaagacgcggggacgccaaggcggcgtccaggacccccatggctggactcgagcccccaaagcagacatggggaccccctgggtggcgtccgggaccctgagagctggactcgagcccccagggcagacgtggggactcctgggcggcttccggggcccccacggcggctctccaggttccaggacagacgtggagaccctgggcgacgtcacggacgcccagggcgggactcgagcccccaaggcagacgtagggaccctgggcgccgttctcgatccccggggccggagtccagcccccgaggcggcgttccggactctcgccatcagacttggactccacccagcgcggcacggggtaggacgggagcgcggacgaggtgagtgaaggcagcgct

SEQ ID NO: 98837 - DNA, 852 bp, Homo Sapiens
tgacaatccaagatggcggtgcccggcgaggcggaggaggaggcgacagtttacctggtagtgagcggtatcccctccgtgttgcgctcggcccatttacggagctattttagccagttccgagaagagcgcggcggtggcttcctctgtttccactaccggcatcggcctgagcgggcccctccgcaggccgctcctaactctgccctaattcctaccgacccagccgctgagggccagcttctctctcagacttcggccaccgatgtccggcctctctccactcgagactctactccaatccagacccgcacctgctgctgcgtcatctcggtaagggggttggctcaagctcagaggcttattcgcatgtactcgggccgccggtggctggattctcacgggacttggctaccgggtcgctgtctcatccgcagacttcggctacctacggaggcatcaggtctgggctcctttcccttcaagacccggaaggaactgcagagttggaaggcagagaatgaagccttcaccctggctgacctgaagcaactgccggagctgaacccaccagtgctgatgcccagagggaatgtggggactcccctgcgggtctttctggagttgatccgggcctgccgcctaccccctcggatcatcacccagctgcagctccaagttccccaagacaggttcctcccggcgctacgggcaatgtgcctttcgaggtatgacgactcaagagactgtggagcaggaaagagcttgtgtatacagcaagagggtgacgaaataccccaaggaaactaactggcagatataccagccagcccgtggagagcctgaggagaa

SEQ ID NO: 98838 - DNA, 1073 bp, Homo Sapiens
  misc_feature (125)..(125): n is a, c, g, or t
  misc_feature (421)..(459): n is a, c, g, or t
aaatctgctctccactgggcctgttggcagccagctcagctggggaagggacagcatgactcgctttgtcgatgaaaagcacgaagttgtcagcacagaacctggccagtccttgagaaactccnctccttggtggtcagaggtcaagcagcccatgtggcccacggtcctgaagaactgggctatgtccctgaggctcctctctaccgtctgactgtggggtctggggaacaggcatttaaaccaggctgctgccctggggagtgcccactggacgccagggtgccccatagggacagggtcacaaagccccggggcttcccctgccagtcctggtgaggacagtgtggtcactatctcagagagacgaaaaatgaatattctgtcatttcagactaaactactcacccagctcacactnnnnnnnnnnnnnnnnnnnnnnnnnnnnnnnnnnnnnnngggggggcccctaaaaatttccccggggggcccaatttgtttccccctttttttgaaaagggggcccctaatgagagactacgatatatataaagcaagaggcaaggggcgcgcgttttaacagagttgctgcgttggggaaacacagtgtgacctgtgggggatatctggtggtgaggagggaccccttaatttcgtggggggtgttgaaccattagttgcggaccaacattaacttaacagaaaattaaagagcttcagaggggaacattattaaaacatctttgcagggtgttctatatgctggtctcaccagaggactaattagtgactagcaggacatagaaaaagtttgggggataaccggggagtttttgattttatgaaacaatttttttcccgggggtagcttaggtgtatataaaatgggtcatgcatataacagatacaataccacaacaaattcagaataagagagaaaaatacgatcgagagaaatataataaaagtagaatagtatatgaagaacaataaagagaaactagtatatgataatagatgtgacgaataagataaaagaaacaacaaaagaaaacaatagggagaaaaatcaa

SEQ ID NO: 98839 - DNA, 850 bp, Homo Sapiens
gctggaggccggtaccggcgggcaggaggcgcccgaggatgtgctgctggccgctgctcctgctgtgggggctgctccccgggacggcggcggggggctcgggccgaacctatccgcaccggaccctcctggactcggagggcaagtactggctgggctggagccagcggggcagccagatcgccttccgcctccaggtgcgcactgcaggctacgtgggcttcggcttctcgcccaccggggccatggcgtccgccgacatcgtcgtgggcggggtggcccacgggcggccctacctccaggattattttacaaatgcaaatagagagttgaaaaaagatgctcagcaagattaccatctagaatatgccatggaaaatagcacacacacaataattgaatttaccagagagctgcatacatgtgacataaatgacaagagtataacggatagcactgtgagagtgatctgggcctaccaccatgaagatgcaggagaagctggtcccaagtaccatgactccaataggggcaccaagagtttgcggttactgaatcctgagaaaactagtgtgctatctacagccttaccatactttgatctggtaaatcaggacgtccccatcccaaacaaagatacaacatattggtgccaaatgtttaagattcctgtgttccaagaaaaagcatcatgtaatacaggtagatgccagatgatacagagaggccatgagagtctggtgcaccacgatctgcgactatcagtgcaggaagcaactttaacgacagcgtctggagtccggcacagaatgctatcacccaactagccgatgaatcctcacctgtgaac

SEQ ID NO: 98840 - DNA, 1141 bp, Homo Sapiens
  misc_feature (958)..(958): n is a, c, g, or t
  misc_feature (1029)..(1029): n is a, c, g, or t
cgcgtcccagaagggggcggggagagacgagggttggcgggctcaggggctgggggcgcagggcagcgtggggcggggcggtgtcccgggaccacccccgtgcctcctcccaccgcggtccattcaggtccctgtcaccgcactccgctcggaccccatggccgccggtgctgtcgctactcaagtgagtcccgcggtgcccctcccgccgcgccgcccgtcgggcatggactcgggccgggacttcctgaccctgcacggcctacaggatgatgaggatctacaggcgctgctgaagggcagccagctcctgaaggtgaagtccagctcatggaggagagagcgcttctacaagttgcaggaggactgcaagaccatctggcaggagtcccgcaaggtcatgcggaccccggagtcccagctgttctccatcgaggacattcaggaggtgcgaatggggcaccgcacggagggtctggagaagttcgcccgtgatgtgcccgaggaccgctgcttctccattgtcttcaaggaccagcgcaatacactagacctcatcgccccatcgccagctgatgcccagcactgggtgctggggctgcacaagatcatccaccactcaggctccatggaccagcgtcagaagctacagcactggattcactcctgcttgcgaaaagctgacaaaaaacaaggacaacaagatgagcttcaaggagctgccagaacttcctgaaggagctcaacatccaggtggacgacagctatgcccgggaagatcttcagggagtgttgaccactcccagacagactccctggaagacgagggagattggaggccttctacaaagatgctgacccagcgggatggagatcgaacgcaccttcgccgaggccgcgggcatcaggggagactctgtcgggggcatcagttagtgacgttcctgcagcacagcancgggaaggaggcggcagggcctgcgctggccctctccctcattgagcgctacgagcccagcgagactgccnaggcgcagcggcagatggaccaaaggacgggcttcctcatgaaccttaacttggccggctgacggccaaacgcccttcagccttgggaacaccggcccggggtctaacaagg

SEQ ID NO: 98841 - DNA, 975 bp, Homo Sapiens
ccggaccagagcagagggtgttgtgagcataaaacactggaggcggcactgccccggacccggctccgcgcaggcaggggcactgtggagggccatgcagtgcctggggatccggagccggagccgctccagggagctctacctgcaggagcggagccttaaggtggcggcgctcaatggacggaggctgggcctacaggatgatgaggatctacaggcgctgctgaagggcagccagctcctgaaggtgaagtccagctcatggaggagagagcgcttctacaagttgcaggaggactgcaagaccatctggcaggagtcccgcaaggtcatgcggaccccggagtcccagctgttctccatcgaggacattcaggaggtgcgaatggggcaccgcacggagggtctggagaagttcgcccgtgatgtgcccgaggaccgctgcttctccattgtcttcaaggaccagcgcaatacactagacctcatcgccccatcgccagctgatgcccagcactgggtgctggggctgcacaagatcatccaccactcaggctccatggaccagcgtcagaagctacagcactggattcactcctgcttgcgaaaagctgacaaaaacaaggacaacaagatgagcttcaaggagctgcagaacttcctgaaggagctcaacatccaggtggacgacagctatgcccggaagatcttcagggagttgtgaccactcccagacagactccctggaggacgaggacgattgaggccttctacaaagatgctgacccagcggggtggagatcgaccgcaccttcgccgaggccgcggggctcaagggagactctgtcggtggatcagttagtgacgttcctgcagcaccagcagcgggaggaggcgggctgggcctgggctggccctttccctctttgggcgctagaagcccgtgggagatgccaacgccagcgggttgccacg

SEQ ID NO: 98842 - DNA, 1007 bp, Homo Sapiens
ctgtggctgcagagcagctcctcaggagaaactaagcgtcgagtcagacggcaccataactcgcctttaaaagtgcctccgccctgccggccgcgtatcccccggctacctgggccgccccgcggcggtgcgcgcgtgagagggagcgcgcgggcagccgagcgccggtgtgagccatgcgctgtctgccagtgtgagcggcggtgtgagcgcggtgggtgctggaggggcgtgtgtgccggcgcgcgcgccgtgaggtgcaaaccccgagcgtctacgctgccatgaggggcgcgaacgcctgggcgccactctgcctgcgtgctggctgccgacagcccagctctcgcggcagcagtccccagagagacctgttttcacatgtggtggcattcttactggagagtctggatttattggcagtgaaggtttacctggagtgtaccctccaaatagcaaatgtacttggaagaatcacagttcccgaagggaaaagtagtcgttctcaagtttccgattcatagacctcgagagtgacaacctgtgccgctatgactttgtggatgtgtacaatggccatgccaatggccagcgcattggccgcttctgtggcactttccggcctggagcccttgggtccagtggcaacaagatgatggtgcagatgatttctgatgccaacacagctggcaatggcttcatggccatgttctccgctgctgaaccaaacgaaagaggggatcagtattgtggaggactccttgacagaccttccggctcttttaaaacccccaactggccagaccgggattaccctgcaggagtcacttgtgtgtggcacattgtagccccaaagaatcagcttatagaattaaagtttgagaagtttgatgtggagcgagataactactgccgatatgattatgtggctgtgtataatggcggggaagtcaacgatgctagaaagaattggaacagtataggggtgatagtccacctgcggccag

SEQ ID NO: 98843 - DNA, 1082 bp, Homo Sapiens
gccttgcttcctgaactagctcacagtagcccggcggcccagggcaatccgaccacatttcactctcaccgctgtaggaatccagatgcaggccaagtacagcagcacgagggacatgctggatgatgatggggacaccaccatgagcctgcattctcaaggctctgccacaactcggcatccagagccccggcgcacagagcacagggctccctcttcaacgtggcgaccagtggccctgaccctgctgactttgtgcttggtgctgctgatagggctggcagccctggggcttttgttttttcagtactaccagctctccaatactggtcaagacaccatttctcaaatggaagaaagattaggaaatacgtcccaagagttgcaatctcttcaagtccagaatataaagcttgcaggaagtctgcagcatgtggctgaaaaactctgtcgtgagctgtataacaaagctggagcacacaggtgcagcccttgtacagaacaatggaaatggcatggagacaattgctaccagttctataaaagacagcaaaagttgggaggactgtaaatatttctgccttagtgaaaactctaccatgctgaacgataaacaaacaagaagacctggaatttgccgcgtctcagagctactctgagttctcctactcttattggacagggcttctcgcgccctgacagtggcaagggcctggctgtggatggatggaacccctttcacttcctgaactgttccctattaaaatagatggcaccagcccaaaagccagagactgtgggggccatccttaatgggatgaaccttcccaaggactgcaaagaaattaaagcctggcggtctgtgaaaaaaaggcagggaatggtgaagcccaagaggcctccctgttcccccctgaaaatttaggggaagggcgatgaattcccctcctggcatacaaatagccaggggagccagcgggggcccaaatcagggctaaatggaaaaatcggggaaagggaacataacccgggaaggaatattcctcccggataaataaagagagggttttccagggtttctc

SEQ ID NO: 98844 - DNA, 1256 bp, Homo Sapiens
atgccggcgggaaggggcagcgtgctcgcggaaggccagctcggcccaaggccggatggtgaatgtggaagagcctccaagggaggcgtccaaggatactcgtgtactgggccccgttgccctcgtcctcctggtccggccatgggctgcgctggactctgtggcattggggcctgtaggagcttcgggggcgccaagcctcctggctcaggctcaccagggctgacagcgaagccgaaaaggaagagctaagtagatcagaaggaagcgcagcaggtcccgcaggatgaccttctggatcatgacactgtagatgcctgtgtgctggaagccacgtgtatagtaaagcaggttcagccagcccagcaccagcgcagacacaagcaggggcaggtaccactcgatggccaggaaacacagcacctgggacaccactgtgagcagggcctggaacaggaagaggatttcaaagtagctgtctatgaacgagatccagatgaacacgtggcgccgccagaagtaccacagctggcccacgaggaggtagatcccccctagcaggataaggatgtggcccgtcagcagcatggagtttccaacctccgctttcaggtgaggggcggcctgcttcttcagggtaggctgatggtaggcaacagcggtgaagatgaacatgtagatcagattacacaggaagtttaagaagaacttggggatgagcagatcccatttcgcctgcagcagtttgttcaggggctccaaaacgaccattcggtgtcggtgcgggctcttgcaatgaaaggcaatgatctccagcactgagttctcctcacagctgtccacagaagccaggtcatacagcgacacccggacaggcccatagcaccactcggtgaactttcgggaaaggtggctcagtcctgaaaactcccgctgcaggatgtgcctgaaaatctcgatcttgccctccttggcggccagcttcagaggcgtgagatcctgcaggttgcggatgtcctcaagctgcacggtagggcagaggcgggccccagcttggaggagcccatcatacatgctggtcaccagtgcaatgttctcagctgagttgtccgagatcatcactagggcatgcaggactgtgttgccctgggagtcagtggcctgcaggctggcgggctggtgtgggttctccaggaggtagcttaccacatcccactgcttggtgcaagcggccaaagagaggggtagctcaccga

SEQ ID NO: 98845 - DNA, 1043 bp, Homo Sapiens
  misc_feature (991)..(991): n is a, c, g, or t
  misc_feature (1004)..(1004): n is a, c, g, or t
  misc_feature (1007)..(1007): n is a, c, g, or t
gggtccggaattcccgggataggcgggcagcaccccagttctccccgcacgccggcactcgcggctgctggagccccggctggctcaccccggggccgggcagaattgggctccaggtctctgacccctcccaaggatcatgccgcagccccactgacccaggagtaggggcctaagggcagggaacctggaatgggctgtgtgttctgcaagaaattggagccggtggccacggccaaggaggatgctggcctggaaggggacttcagaagctacggggcagcagaccactatgggcctgaccccactaaggcccggcctgcatcctcatttgcccacatccccaactacagcaacttctcctctcaggccatcaaccctggcttccttgatagtggcaccatcaggggtgtgtcagggattggggtgaccctgttcattgccctgtatgactatgaggctcgaactgaggatgacctcaccttcaccaagggcgagaagttccacatcctgaacaatactgaaggtgactggtgggaggctcggtctctcagctccggaaaaactggctgcattcccagcaactacgtggcccctgttgactcaatccaagctgaagagtggtactttggaaagattgggagaaaggatgcagagaggcagctgctttcaccaggcaacccccagggggcctttctcattcgggaaagcgagaccaccaaaggtgcctactccctgtccatccgggactgggatcagaccagaggcgatcatgtgaagcattacaagatccgcaaactggacatgggcggctactacatcaccacacgggttcagttcaactcggtgcaggagctggtgcagcactacatggaggtgaatgacgggctgtgcaacctgctcatcgcgccctgcaacatcatgaaacccgcaaacgctggggcctgggccaaggaacgcctgggaagatcagcccgcagcctccatcacnccttggaagcgcnggnctggggcacccggcctggccttccggggaatgtgtg

SEQ ID NO: 98846 - DNA, 1931 bp, Homo Sapiens
  misc_feature (1658)..(1658): n is a, c, g, or t
  misc_feature (1764)..(1764): n is a, c, g, or t
tccgctcccaagccgggaacttcccagagaattggctcggcctccgggcgcgggggacagcatcgggaggagtgggactccgggcgccgcgcacgggccgaggacagccgggcttgggaggccctgcccgccgccccgcgtcctcccggccactgccaccccgcgcatccggagccgcagcagactcggcggggcccggagccccacgcccccggcccgcccctggccgccacttgtttactccccggcgcagcctagtccgaccctggggcccgcccccgcccaccgcctattggccgaggaggcgcgaagagccgtaacgattggcccggggaggcgcggggcgagcggggtaggctgcgcgagaggccgagagggggcagcaggcgatggcggcggcggtagctgcggcgggtcggttaggctggttgttcgccgcgctctgcctgggcaacgccgcgggggaggccgcgccgggcccgcgagtgctgggcttctgcctggaggaggatggagcggcgggcgcgggttgggtacgcggaggggcggcgcgggacacgccggacgccaccttcctcctgcgcctcttcggcccgggcttcgcctacagctcttggtcctgggtggccccggagggggcgggctgccgggaggatgcggcctcccccgcgtacaagtggcgcgcgctgctgcccttgcgcctgcggggcgaggcccgtgcgccctcactcggcgctgtatgtggtgcgcgtgcgaactctccgccctgtcccgcctccacgacgttcgacacatacctgggtctcttcgtctcccgctctttgtcccgcgactgactgtcgttcgaggtcgtggttaccgtctgggctctgcggtaatatacttacaagagctccttcctcaacctcccgtcgcccacctcgtggttcgccgtcttctacttcctcctatttggtactagtgtgctcattctgaccatcaattatgccaacttatgcttcctgtctatattcttaacgctcatctaaatacatttcatggacactctatgcttagctcttatatcttctgtcctttattctatctctgaccttcacttgactacttaagtatttttccttcacctgccgctaccctgttatacctggtttgtcgtggctcaagtagatacggctatccttcttttcgcaaccgctttcttcatctcctcgtccttgactcgtgttctgacaactccgcctggcttgcgactcgcttattgcgtgtcaaccacacaaccaccctatctagtacgcctgtccagtcaatgcatgcacatgcgccagttactgttgatacggaccacagacacagcgtgtcatatgacactacacattcacgctactcgtaaccttgaacactacgcgcgtggtgacacctccgctccaccatattggcgtggcgcactcctgcggcggcggtgcgctgcgtcgtctgcgctcggcccgggtcaccggccgcggcaccatatgcacgcgtgtccacacttcctctattggtgtatctcctgtggaacatcgctgtctgttagtatgttaccactcatacctgctattgactcatcctatgtcatcattctgaccgcgtgtctcacctgctacttacgcggtcacaagtantgcgaatgaccggtcgcgaccggtcttactcacaagctcgactctacacgtcaattatagaacatagacctaggagttgcttctgctccactccactaggtaccgnactgcctggtttggacgtgctgtgagctgatgacgatacatagcggtcctattctgtcgtcgtcgacggtttatcccgccctagtcacccttcttcacatcatcgtccttcataatgcttatgaacccgtctcttcccaaacgttcatgtcctctggagggtctctt

SEQ ID NO: 98847 - DNA, 724 bp, Homo Sapiens
caacaacgcgctggagcgcgtgcccagtggcctgcctcgccgcgtgcgcaccctcatgatcctgcacaaccagatcacaggcattggccgcgaagactttgccaccacctacttcctggaggagctcaacctcagctacaaccgcatcaccagcccgcaggtgcaccgcgacgccttccgcaagctgcgcctgctgcgctcgctggacctgtcgggcaaccggctgcacacgctgccacctgggctgcctcgaaatgtccatgtgctgaaggtcaagcgcaatgagctggctgccttggcacgaggggcgctggtgggcatggctcagctgcgtgagctgtacctcaccagcaaccgactgcgcagccgagccctgggcccccgtgcctgggtggacctcgcccatctgcaggtgggagtccctgactcccttggtcacccctgcagctgctggacatcgccgggaatcagctcacagagatccccgaggggctccccgagtcacttgagtaccggtacctgcacaacaacaagattagtgcggtgcccgccaatgccttcgactccacgcccaacctcaaggggatcttactcaggattaacaagctggctgtgggctacgtggggagacagtgccttccggaggctgaagcacctgcaggtcttggacattgaaggcaacttagagtttggtgacattaccaaggaccgtgctcgcttgttg

SEQ ID NO: 98848 - DNA, 874 bp, Homo Sapiens
cacggggcgaatgctgcgcgggtctctgcctctcttgtgtgggtgatggggcgcgcggatcggagagggtggctccggtagcgtgcggtgaccactcagtccacctgtgagccttcggcagctgcgggcggctggcggcgtacccggcccgagacgggtaggagacgctctgtgcggccccctgccctgcctggccctgcctgtggctgcactacactctgcaccctgctgcactgcaccgccagcagtgcagcggccacctgccgctgatgctctgccctgcgggttggggaagtttcccgcctgtgcctcgtgcctgcgtgtgcaccctgttgcttccgcagtgtagtatgctgccgcctctgcgctggctgctgtggctggcctggcgcctccagcatgaccggccagagcctgtgggacgtgtcggaggctaacgtcgaggacggggagacccgctatcaatgtgggcggcttcaagaggaggctgcgctcgcacacgctgctgcgcttccccgagacgcgccttgggccgcttgctgctcttgccactcgcgcgaggccattctggagctctgcgatgactacgacgacgtccagcgggagtactacttcgaccgcaaccctgagctcttcccctacgtgctgcatttctatcacaccggcaagcttcacgtcatggctgagctatgtgtcttctccttcagccaggagatcgagtactggggcatcaacgaggttcttcatttgacttcctgctgcagctacaagctaccatgggccgcaaagtagagcccgagcaggagaagtgggacgagcagagtgaccaggagagcaaccagtctaccttccgatgaggatcttgccttctaca

SEQ ID NO: 98849 - DNA, 908 bp, Homo Sapiens
gccccaagcggttcccgagcccaggcccgcgccgagcccaggtcctagagcagctccagcaggatggcggctccagcgtctctaaggcctgcagggtggtccagccccatggtggggcgccctaggcctccgacagctccccatctgtgctcctgcctgccggccatcctcaggccactcgccatgggcggctgcttctccaaacccaaaccagtggagctcaagatcgaggtggtgctgcctgagaaggagcgaggcaaggaggagctgtcggccagtgggaagggcagcccccgggcctaccagggcaatggcacggcccgccacttccacacggaggagcgcctgtccacccctcacccctaccccagccctcaggattgcgtggaggctgctgtctgccacgtcaaggacctcgagacatggccagcgttctgtcccgtggtcgggtgcgctgcccctggcacggcgcctgcttcaacatcagcactggggacctggcaggacttccctggcctggacaggtctacacaagttccaggtgaagcattgacaaggcacgacggtgtacgtcccgggccagccaagcaggccctacaggcttgcaggcgcaagggaccaaaggtgcatggccaagctgtatctctccaacgtgctgggtacacgcacgtagcaccaatgtgctcattcgtggcgtgcaggttgcaagctgccctggctgtgtgcagagaccctgcggcaacgagggcttctccgaaccggactcgtcctgtgtcccgcctttgacccggcaccttccctactgacggcccccacgtctcagcacgtcccctggccccaccggcctcgagctgctgcgcctgcggccccacggcgcttctcccgagcctttgccttcgcggtggcta

SEQ ID NO: 98850 - DNA, 996 bp, Homo Sapiens
ccgcggtccccacccgcctcgccgtcacctatacatcttttgaagcctggcaagggtccggaattccttggatctcccggagatgccccgcggcagccgcgctcggggctctaagagaaaaaggagttggaatacagaatgcccatcctttccaggagaaagaccactgcaggtcagaagagcaggtctcaggacagcaggggcagctgcctctctctctgaagcatggctcaggtgtggagaagggtttcagaacacttctgggaatccgtcattaacagctgaagagaagacgattacagaaaagcaccttgaattatgccctagacccaagcaagaaaccaccacatctaaaagcaccagtgggcttacagacataacatggagctccagtggaagtgatttgtcggatgaagataagacactttctcagttacagagagatgaattacagtttatcgactgggagattgacagtgacagggcagaggctagtgactgtgatgaatttgaagatgacgagggtgctgtggaaatctcagactgtgcttcttgtgcaagtaatcagtctttgacaagtgatgagaagctgtcggagcttcccaagccaagttctatagaaattttagagtatccatcagatagtgaaaaagaagatgatttggaaaatgtcctactcattgattcagaatccccctcacaaataccacctgcagtttgcatcggatgcaagacagaattatggagagacggatagatccaaggacaaaaatcaacaggagacatttttgcataccccctccgaaaacccccagcttaaagtttccccaggaattccagaaattccagcaaagaaagaagctttttaaagaggtgggcctagccgaaaagaacctaatggccccggcagaatcgaagagaagaaccggccaatttcctttgggggggagacatcccacgggatttcccttacccgaaagaaccctttttgcgggg

SEQ ID NO: 98851 - DNA, 860 bp, Homo Sapiens
gtctgcatatgagtcagcacagcccggaagcacctgaacaggtccagctcgtggacgcctagcaagaaccacctggggctggcagcaggttctcttggtcaaactgcttcggaggactggactcggacttgtccaccctggatgggatgcgcacctggacaacaacgcccatgacaggtaagttcagggtctgccccaggcgcaggcaccggccactgcttcgatctcactgcacactgcttccaggcagggcgccagcttgtcaaagtactcgggggcgatgaggcttagcagcgcttggaacagccgggacaaagggcaagcgggacaccagcaccaaagactggagctggccacagggtagcacagtcccaccaacttcacaggacagctgccccaggaacgccttctggaagtagcccctcttcacagagctgtccgtcacctgcctgaagtacacagtaggccagaagtatgtgtagcactggcatcccttctgacaagtgaccatcatggggtccctcgctgtattgtaagtgcctcgtcgtcggcatgccaggggctcctcatgcccatccacactggcgcatgcggaagctgaacctgagctgtctccaaggcagcctgagtcgcgatgtcgggaaaagacaggtagcagatgctgcttttcatccttgtctgtgagccggaagtcgcttcggatacaccagctccagcgcctggcccagctaccaggtcgaaggtgaccacgcacacacactccagccaggcggagaagcgcgcccagggcgccgtccggggtccgccgccgcgcgacctgaagacgtgggtccagccgcgcccagcaagccgcgagcccg

SEQ ID NO: 98852 - DNA, 808 bp, Homo Sapiens
gcatatgagtcagcacaggccggagcacctgaacagtccagctcgttgacgctagcaagaccactggggctggcagcaggatctcgtggtcaaactgctttcggaggactggactcggacttgtccaccctggatgggatgtgcacctggacaacaacgcccatgacaggtaggttcaggctctgcccaggcgcaggcgccggccactggtcgatctcactgcacactgcttccaggcagggcgccagcttgtcaaagtactcgggggcgatgaggcttagcagcgcttggaacagccggacaaagggcaagcgggacaccagcaccaaagacttctggaagtagcccctcttcacagagctgtccttcacctgcctgaagtacacgtagccgaagtagtgtgccggctccctctgcagtgccacaggggccctgctgttgtagtgcctgtcgtcggcatgccaggggctcctctgccctccacactggcgcatgcggaagctgaactgagtgtctccaaggcagcctgagtgcgagtcgggaaaagacaggtagcagatgctgcttttctccttgtctgtgagccggaagtcgttcggatacaccagctccagcgcctggcccagctccaggtcgaaggtgaccacgcacacacactccagccaggcggagaagcgcgcccagggcgccgccggggtccgcgccgcgcgacctgaagacgtgggtccagccgcgcccaggcagccgcgagcccggcgaggacctgtgcccaacagcgcgtccatcccgggaattccggaccggtcca

SEQ ID NO: 98853 - DNA, 907 bp, Homo Sapiens
tgagtacaaagggacgaagtcgcagcagacctgaagggctgcaggcagctgtccaaggccagccaccatcttccgaggacacgtcgggcgagggtcccaggaactatccaggggctcccccgaggagcatgagctcccacagtgtctgcaatatgagtcagcacaggccggaagcacctgaacaggtccagctcgtggacgctagcaagaaccactgggcctggcagcaggttctcgttggtcaaactggcttcggaggactggactcggacttgtccaaccctggatgggatgcgcacctggacaacaacgcccatgacaggtaggtttcagggtctgcccaggtgcaggcgccggccactggtcgatctcactgcacactgcttccaggcagggcgccagcttgtcaaagtactcgggggcgatgaggcttagcagcgcttggaacagccggacaaagggcaagcgggacaccagcaccaaagacttctggaagtagcccctcttcacagagctgtccttcacctgcctgaagtacacgtagccgaagtagtgtgccggctccctctgcagtgccacaggggccctgctgttgtagtgcctgtcgtcggcatgccaggggctcctctgccctccacactggcgcatgcggaagctgaactgagtgtctccaaggcagcctccttgtctgtgagccggaagtcgttcggatacaccagctccagcgcctggcccagctccaggtcgaaggtgaccacgcacacacactccagccaggcggagaagcgcgcccagggccccgccggggtccgcgccgcccgacctgaagacgtgggtccagccgcgcccaggcagccgcgagcccggcgaggccctgtgatcccatactcccgggccagtaccagcc

SEQ ID NO: 98854 - DNA, 1045 bp, Homo Sapiens
tggtaccggtccggaattcccgggatgaagagagaggcaaggcaggagtgaaggagagagctgaagcctggggctccgagatggtcagaggatgggagacggggcagtgaaacaaggcttcttgtatcttcagcagcagcagacgtttggaaagaaatggcgccgcttcggcgcctcactgtatggagggtcggactgcgccttggcccggctggagctgcaggagggcccggagaagcctcgtcggtgtgaggctgcccggaaggtcatccgcctcagtgactgcctgcgggtggccgaggccggcggagaggccagcagcccccgggacaccagtgccttcttcctggagaccaaggagcgcctgtacctcctggcggcccctgcagcggagcgcggcgactgggtgcaggccatctgcctcctggccttccccgggcagaggaaggagctctcggggccagagggaaagcagagccggccctgcatggaggaaaatgaattgtacagcagcgcagtcacagtcgggcccccacaaggaatttgctgtgaccatgagacctacagaagccagtgagaggtgccacctgcgggggtcctataccctccgggctggggagagtgccctggagctgtggggtgggcccgagccagggacccagctgtacgactggccctacaggtttctgcggcgctttgggcgggacaaggtaacctttttcctttgaggcaggccgtcgctgcgtctctggagagggcaactttgagttcgaaacccggcaaggcaatgagatcttcttggccctgggaagaggccatctctgcccaaaagaatgctgcacccgctacaccccaaccgcagccagccacaaattcccgcctcgctgcccccggcctgataagcccctactctcgggcggcatggactcactgccgccggctttacccacccaaaaccggtgccctgctccaacggcccctgggggcccaaaaagggggaataatggccggggcccttttcaaggcgggggccccgttttccctt

SEQ ID NO: 98855 - DNA, 910 bp, Homo Sapiens
ccctgggcattcaagagggcctacccggattccaccttggggctgacctccacatccgtgaggccctgctggacattcagcagcagcgtctgcacctcctgcaggtacttccaggatgggtggccctcgagcagcacgtcctgcaccgactcagtggcactgaggctcaccaagacccacagataccgcagctcccgctcgctcacctgggccctctgcagcctggtgacgttggcgattctgaacaccccctcgtaaggcacactgatcttgtagttgatggggaagtagtgtttcatgtactgaagtcggctcctgtactgcagcttgtcccgcagaaaacccgtgacagtgcactcctcattctgcgtcaagggccacatctccaaaggctcattccccaaggccacgccaaggaagatcccaagatagcgcagccaggtgaagccccggggcatcgtggtgttcctcgtccccctgagagctcaggcgccgtccccagcagtgtgtccacagaggcctaagcacggcctacatggcctcggggcagcagaggtggtcactgagtcagggaagggctggccctggaggagtggctgggctgcgggagtgagcaggtgccccaagggcagcagctgcccttatctgcccggcagcgtggaggacagccggggggcggtggccgcaagtcccatggcagcccagaagcaggtctgagccggtggcttgggggtctttcggggtcttcctttccaaggagcaggaggagagagtccctggcaggcccctcggaatctggggctgggtgacgctttctctgatttctccgactgcagctgctcagtgtgaaatctggctctgcctccgctaatggggagctccccaatccacaaagcagcctctgttcctc

SEQ ID NO: 98856 - DNA, 765 bp, Homo Sapiens
ccttaaggaatgaataagaaagtctcaggcaacctgtcgcacctcaagctcttcggatagaggatctcttgtgctcagtgtcctcttcaggaaaatcagaactgcagtaatgacgtttccatcatgcatgcttactgcctcttctaggacttgtagtttgtcctgtaaggagcggaatctctctagtgagcaaaccttgcccttccggagacgtcgcactgtatcactggggctccagtcattgctgtaatccctatactcccctttgggtctccccagctctggagcatagcttttggcaggtgtgtctgacagagcatcagaaagggactggaaacttccaggtctagttctacctctaaaaaagctgctcagggagtaggtagaagtaggcttgggtagttgtgcataggaggagaagctgtttcggctctttagctgttcacgcccctcgtgggttgagccgctattaccagcagtctctctgatggaccatgagatacttcccacaggttccccactccagctgactcgctccaggtcatcatcgtcatcatcatccacgaagtctcggaggctgttcaccgcccgcttggactcctttaactgtgaaagctcatcgtcttcatcgtcaaaggtaaaagccttgaacttggagctgttccaatactcctcctcatcaccctttgtccgattcatctcttccgcacagagccctccctctcaggacagcgccagcctccgccgccgccggaccagcccttc

SEQ ID NO: 98857 - DNA, 795 bp, Homo Sapiens
caggacggcgggcacagcgcagcactccccgctcgttggcccgggtatcccagcgcggacccacgcgatacgctgacgccccgacgccgatccggccgagccaagtaagggggacggcccgagacggagaagggagagagtgggagtttcccagcccgcagaactttcgaagttgagaaaagaacccctggaacgtgcgctcagcactgggattttctggactcaacgatgactctgaataatgtcaccatgcgccagggcactgtgggcatgcagccacagcagcagcgctggagcatcccagctgatggcaggcatctgatggtccagaaagagccccaccagtacagccaccgcaaccgccattctgctacccctgaggaccactgccgccgaagctggtcctctgactccacagactcagtcatctcctctgagtcagggaacacctactaccgagtggtgctcataggggagcagggggtgggcaagtccactctggccaacatctttgcaggtgtgcatgacagcatggacagcgactgcgaggtgctgggagaagataccatatgaacgaaccctgatggttgatggggacagtgcaacgattatactcctggatatgtgggacacatacagggggaacaattgacatggctccatgacccactgcactgcgaggtcgagggacgcataccctgattgtctactccatcacagagccgagcgagcttcgagaaggcatctgagctgcgaatccagctccgaggggccggcagacagcggcacatcccg

SEQ ID NO: 98858 - DNA, 985 bp, Homo Sapiens
gtaacctagcaacgcaggaccgcggcggtaactgtggctagggaaacctggagcggtcagagcaggatggccagagacaataaaagcacgagacccaagtagtctaccgaagtctccatctctgtggacctacagaggcacagagggctgctcacaagatggctttagacattctcgccatggcccctttgtatcaggcccctgccatcaacagaatagggccaaagacagacccatctaaaaggccagctgatccactaaaacccttggttctctctaggaccaaactcaccaccattgaggccaaaaggatcatgtccatcctggatgaggcgatctacaaggtggagctggtgaccttgctgtcgtatgtggcatccaacagagaggatatggaggggatgctgggggaggacgtcatgagggcagtgagagagcatgaggatctctgccaggtcctccttgaaaacgtcaggtgcctgaaagagaaagaaaggcaattgcaggagcagaaagaggctgaggaggaagggtggctcagagaccgcctcctttccatagagctgcagaaatccagcctctcaccacttatgcagcagatcaaagactccaccaagaacgtccttagactcttgctcagcaacccccaggctgctaggctcctgcagatgcagacacagggtagaaggtgcagaagcccagaattttattgacagcctgatagagctccggggtttcctgtttgaaaaactactcactagtcccatggaacgcgagggataaggcccagttcttaccaggatatcagtagacagaatagtaataaccaacaaatcattggatactcttgaaaaggaatcggcggagagaatgagaacaaggatgcagaggtgggacaggagactttgggcatcaagactggaaaacacctgaccagggggcaagtcccaagaacagctgtcggcagcagaggtggaacaaaagg

SEQ ID NO: 98859 - DNA, 867 bp, Homo Sapiens
gcggcgtcggggcgggaggctcgaggccagcccgggaccggggctgggagcaagcatggcggcggcgccggcggcagatggcggcagcgaagcgccgcgcttcccacgcccctaggcggcggggccgatgagcgggatggatggctccgagcgctgaccccggcatgtccaggatgttaccgttcctgctgtctgctcatggtttctgcccatcactgaggggtcccagcgggctgaacccatgttcactgcagtcaccaactcagttctgcctcctgactatgacagtaatcccacccagctcaactatggtgtggcagttactgatgtggaccatgatggggactttgagatcgtcgtggcggggtacaatggacccaacctggttctgaagtatgaccgggcccagaagcggctggtgaacatcgcggtcgatgagcgcagctcaccctactacgcgctgcgggaccggcaggggaacgccatcggggtcacagcctgcgacatcgacggggacggccgggaggagatctacttcctcaacaccaataatgccttctcgggggtggccacgtacaccgacaagttgttcaagttccgcaataaccggtgggaagacatcctgagcgatgagggtcaacgtggcccggggtgttggccagcctctttgccggacgctctggtggcctgtgtggaacagaaagggttctggacgctactctatctacattgccaattacgccctacggtaatggtgggccctgatgccctcattgaaatggaccctgagggccagtgacctctccggggcattctgggcgctcagagatgtggcttggctgagctgggtcaggcaatatacgggcg

SEQ ID NO: 98860 - DNA, 971 bp, Homo Sapiens
cgaccgccaaccggccccttcacccgtctggccacagttctccggccatcctgcggcacagcgcagccagggacagtaccagccaacaggcagccaaggcaccagaagccgatgacagtgagagccatgccatagggcatatagtgggtgcccaggcaggcggcttgaggtcatagctagacagtgcggttacgtctggatgcctgtggcacgcgaagatggctgtggccaggcactgggttgtcacggcccagccacacggctacacacactagccaggcagcccgcaggcccccacgtttgtgccagggggccagcgggtggcagatgcccaggtagcgctggaagctgatgcaggtgaggaagaggatgctgccgtgcaggttggcatagaagaggaagcggaccaggcggcaggcgaagtcgccaaagggccagtgatcaccttgggcatagttgtagatgagcaggggcagggagcaggcatatagcaggtcagccagagcaaggtttagggtgtacacggccgtgcgggtcagggcccggcgggacgtgcagatctgggtaatgacacagatgttcagcggcaggccagccgccagcaccgccgaatacacaggtggcagcagcagttgcttgaagttctcgcggtagacacaggtggtgggtggcaagcccagagcctggcctgtgccattgtcccattccatggctgcccaggtgggtttcctatgttcagggaggcaggggctcactgaggaccgcacccatctcctcagcctgaactccgccttccaaagccatggttcttctggcagaggtcttgttatccaagagttagcaagtgcctcgcttgcagtccgtgaagtgctggagcaaattcccactcgtggagcagcccctgctgccagtcagttctgtgcctgaaactgtcgcgtgcatgttctggcagaagtctggagaggcagcag

SEQ ID NO: 98861 - DNA, 1070 bp, Homo Sapiens
  misc_feature (445)..(458): n is a, c, g, or t
  misc_feature (831)..(846): n is a, c, g, or t
ggtccggaatttccgggatgctggctgctggggagaggggcgctgcaccaggatgtgggtgtgaggtgtgaggagctcctgggccatgcgcttccctacgctctgctctgtctgttgacacatgagtctcaggctgtaggtaatttgcggacggggctggaatgccatgtgtgtatttttctaggggcttgcttgtgtgactgctggtctctgtgtgtgtttggggcacacatacatggaatagtccctcagcaacgggaccgcccagggaggagctgctgtgtatgcatggtgggcaggggtgtgcacccatgtggggagtagtgacccagctgcccgtaagggccctgggcctggaggtgcgtgtgtggggtctctgcctccacctgctgtccctggggctgcgggctttcctgcttttcttccttgtgcttcttcgagagcnnnnnnnnnnnnnncacgacgcaggcagggctgtgctcatggcggctcgctctgtggccctcacggcccacgtctgtagtgtctatgtcttccttcacggggttgcctgctctgcccagctgggggggagctgggtgatgctgcacatagtggctataccgtgccttgctgcagacccccagacgcgttcctttactcccgcagggtgataccggagcctggcgcctggagatggcaggcctcccagaagctacagctgtcaggtcacgccttggagggaagcaccccggtagaaaactgtggccccctacagaatggtcataaggttttcaaccctcaccccccaccacggggagactacaactgcaggatcccaggggaggggannnnnnnnnnnnnnnnagggcctcaaggccctttctcccctgcccttaataaaccccctaataaataatcctcatgggcccacccgaccaaacacaacttggctataaccagggccgcccccgccataaagacctccccccaagggggccccgccgttaccgccaccgccgcctttccctggcacaacaaggcgccccacaaacggacccgctctatttacacgcccgcgcaggggtccg

SEQ ID NO: 98862 - DNA, 677 bp, Homo Sapiens
caccagacaagcttcagtggccggcccttcacatccagacttgcctgagaggacccacctctgagtgtccagtggtcagttgccccaggatggggaccacagccagagcagccttggtcttgacctatttggctgttgcttctgctgcctctgagggaggcttcacggctacaggacagaggcagctgaggccagagcactttcaagaagttggctacgcagctcccccctcccgaaccctatcccgaagcctccccatggatcaccctgactcctctcagcatggcctccctttgagggacagagtcaagtgcagccccctccctctcaggaggccacccactctccaaacaggaaaagctagcgtacctgtaccaaatctcctgctgaaaaggaagtgggtccccctctccctcaggaagctgtccccctccaaaaagagctgccctctctccagcaccccaatgaacagaaggaaggaacgccagctccatttggggaccagagccatccagaacctgagtcctggaatgcagccaagcactgccaacaggaccggtcccaagggggctggggccaccggctgcgatggattccacccctgggcggccttctcccagacaatctgaaccaaatctgcctttcctaaccgtcagcaatgtggtatatggtccctg

SEQ ID NO: 98863 - DNA, 1144 bp, Homo Sapiens
tgcggtgctccactatctggtctctcctctccacagtcgcctgtgcccgggcaccccggagctgcgaactgcagagcccagggcaatccgctgggctgtgctgccccgccggtgccggtaggagccgcgctccccgcagcggttgcgctctaccctggaggcgctgggcggttgcgggctgcaggcaagcggtcgggtggggagggagggcgcaggcggcgggtgcgcgaggagaaagccccagccctggcagccccactggcccccctcagctgggatgttccccaatggcaccgcctcctctccttcctcctctcctagccccagcccgggcagctgcggcgaaggcggcggcagcaggggccccggggccggcgctgcggacggcatggaggagccagtgcgaaatgcgtcccagaacgggaccttgagctgagggccagggcagcgccatcctgatctctttcatctactccgtggtgtgcctggtggggctgtgtgggaactctatggtcatctacgtgactccatgcgctatgccaagatgaagacggacaccaacatctacatcctaaatctggccattgctgatgagctgctcatgctcagcgtgcccttcctagtcacctccacgttgttgcgccactggcccttcggtgcgctgctctgccgcctcgtgctcagcgtggcacgcgggtcaacatgttcaccagcatctactgtctgactggtgctcagcgtggaccgcttacgtggccgtggtgcatcccatcaaggcggcccgctaccgccggcccaccgtggccaaggtagtaaacctgggcgtgtgggtgctatcgctgctcgtcatcctgcccatcgtggtcttctctcgcaccgcggcaacagcgacggcacggtggcttgcaacatgctcatgccagagcccgctcaacgctggctggtgggcttcgtgttgtacacatttctcatgggcttcctgctgcccgtgggggctatctgcctgtgctacgtgctcatcattgctaagatgcgcattggtggccctcaaggccggctggcagcagcgcaaacgctcgggagcgcaagatcaccttaatggtgatgactcctggtagatggtgtccgccactcttgctgacac

SEQ ID NO: 98864 - DNA, 871 bp, Homo Sapiens
gctggaccggtccggaattcccgggatcggggcggggcggggcggggcgcgcagcaggagcgagtggggccgcccgccgggccgcggacactgtcgcccggcgcccaggttcccaacaaggctacgcagaagaacccccttgactgaagcaatggaggggggtccagctgtctgctgccaggatcctcgggcagagctggtagaacgggtggcagccatcgatgtgactcacttggaggaggcagatggtggcccagagcctactagaaacggtgtggaccccccaccacgggccagagctgcctctgtgatccctggcagtacttcaagactgctcccagcccggcctagcctctcagccaggaagctttccctacaggagcggccagcaggaagctatctggaggcgcaggctgggccttatgccacggggccatgccagacacatctccccccgggcctggcggaggcccaagcatcagagtcccacacagcgtgcccaatcttcagatgcaggaggactgcagatgcagctgaaccagtacaaggctgcaagagtgagaattggcaagggtgcctacggtgtggtgacggctggcctacaacgaaaagtgaagacagacagctatgcaatgaaagtcctttccaaaaagaagttactgaagcagtatggctttccacgtcgccctcccccgagagggtcccaggctgccagggaggaccagccaagcagctgctgcctctggagcgggtgtaccaggagattgcatcctgaagaagctggaccacgtgaatgtggtcaaactgatcgagggtctggattgaccagttggggacaacctctattgggcctgcagaaccaggccagaat

SEQ ID NO: 98865 - DNA, 817 bp, Homo Sapiens
gttaatttctgaagtgggcggctccaaaaacttaacaaggaaagctcaggtaacggaggccttggaaggagactctgcgtcaggtcacccagcagagatcagcaatccttggctcactgaggaggtttggatttgcctcaaagggcactgcaaaaattgaacagaggaatcccaaggaagctgcctgaatttgcctgtatactctcgttctgcgacttataaaggaccagacaaatcaaattagtggttttggtttccgccagctgtggatgcctttgacattatgaccgcagaggattccaccgcagccatgagcagtgactcggccgccgggtcctccgccaaggtgcccgagggcgtggcgggcgcgcccaacgaggcagcactgctggcgctgatggagcgcacgggctacagcatggtgcaagagaacgggcagcgcaagtacggcggcccaccgcccggctgggagggcccgcacccgcagcgtggctgcgaggtcttcgtgggcaagatcccgcgcgacgtgtacgaggacgagctggtgcccgtgttcgaggccgtgggccgcatctacgagctgcgcctcatgatggactttgacggcaagaaccgcggctacgccttcgtcatgtactgccacaagcacgaggccaagcgcgcagtgcgtgagctcaacaactacagagatccgcccgggccgcctgctcggcgtgtgctgcagcgtggacaactgccgcctcttcatcggcgggatccccaagatgaacgaagcgccgaggaaatcctggaggaagatgcaacgtcaccgagggcg

SEQ ID NO: 98866 - DNA, 1085 bp, Homo Sapiens
ggtccggaattcccgggatatcgcgctgagcgggcgccgcagcgggagcgggagccggagctgcgaggcgcggcgcagagctggggctgcgcggggccgggcgagcgggaccaggcgggagccatggaccgctagggcccggcctagccccgcgatgccgccggcgagtggccccagcgtcctcgcgcggctgttgccgctgctggggctgctgctcggcagcgcctcccgggctcccggcaagtcgccgccggagccccccagcccgcaggagatcctgatcaaggtgcaggtgtatgtgagcggggagctggtgcccctggcccgggcctcagtggatgtgtttgggaaccggactctgctggcagctggcaccacagactcagagggtgtggccaccctgcccctcagttatcgcttgggcacctgggtgctggtcactgctgcccgccctggcttcctcaccaactctgtgccctggcgtgttgacaagctgcccttgtatgcgtctgtcagcctctacctgctccctgagcggccggccacgctcatcctctatgaggacctggtgcacattctcctaggctctcccggtgcccgctcccagcccttggtgcagttccagcgccgggctgcccgcctgcctgtcagctccacctacagccagctctgggcgtcacttacgcctgccagcacccagcaggaaatgcgggctttccctgccttcctgggcactgaggcctccagctcaggcaatggctcctggctggagctgatgcccctgactgctgtgagcgtgcacctgctgacaggtaatgggacagaagtgccgctctcaggccccattcacctgtccctgcccgtgccctccgaaaatccggccctcaccttgggcacccgcatttccagcctggagaatttgacccccaaaaagcgcctggggaagcgcaacggaaccgtgtgaaatcccaaaagaaaacccggctattcttacaggaacctttcttctcccccccatgtgggtatattggcagcaccccttgatcctcccacccgctaggggtatcacaaccatcacctcagga

SEQ ID NO: 98867 - DNA, 270 bp, Homo Sapiens
gggcacctcgggaaaccggttccgggacaggtcagcctgggtgatgtctgacaggtcgtagctacgggccgcgccccgggggaagtgcttcaagcgccggttagacaggttcagggtcccggtggccacggcctcctctagggcccgctctgcactgcgtctccccggcagacctggagacccgggcacggaggtcgtggctgccgcctcctcacccccggcggcgagtggagccgctacgaccgccgccatccgctcccggcggctccc

SEQ ID NO: 98868 - DNA, 805 bp, Homo Sapiens
cgaccttccccccatttaggcgtgcatcaggcctctgaggcatgggactggcaccgaacatcctgccagctctgagcctgaccctgcaggacccgagggaaggtggaggtgcatgtcggcagccatggtactggtacactcgccaggtcttaccgaagtctgaggagcgctcaatcagcatgccggcgggcatgggcccctggaactccatcatgacttcttgaagctggaatctcctgtccaggtccagctgcagagagacagggttcacatcattctgggactgccaccagcgcatggggccggaggatgaagccacattctctactcggtgactgtagtagttgtgaggctgcctggagtcacacttgcagcatttcatctgccactcgccatactgggtgcagtaggtctcaggcttggtcagtccacaggtagatgaagctcggagaaaccgggtcctcccaacaagcaggtccccaacaggtggatagcaggccccacgggagcaggcttgttgggcatgcaggaggccaggcagggccaaacacaagaggaagaatggtctcatcttcagccaatggggtgatccccagaaaggacctttccttgctgtgtgttctgccgttctttctccagatcgcctgaaagctcctcttgaatgtgggggtctcccctcccggctccaggtttttaaacaccagcctcacctctggagactccctggctgggtgtagccccaccgcagggcgggtctcaggaatctggcagccgtcacacccatctgtcgtcactgcacccccac

SEQ ID NO: 98869 - DNA, 903 bp, Homo Sapiens
ccctgagaaaagccagccctctctcttggggcaggaactaggtcttggccctttctacagcttttctcctgcaaagggtccagccttttcctgctccccacgttgtccttacggctgtgtggggtagggcagggtccacactccttcccatccattttagaggaggaagctggagtctgggaagggatgggattttcccagggcaccctgtgagtcacatgccacttgagacaagggtctagagctccagcattttccaagctacaaatgtatctgctgctccaagtgtcctagatcaggaccctaggaaaggtcctttctggggatcaccccattggctgaagatgagaccattcttcctcttgtgttttgccctgcctggcctcctgcatgcccaacaagcctgctcccgtggggcctgctatccacctgttggggacctgcttgttgggaggacccggtttctccgagcttcatctacctgtggactgaccaagcctgagacctactgcacccagtatggcgagtggcagatgaaatgctgcaagtgtgactccaggcagcctcacaactactacagtcaccgagtagagaatgtggcttcatcctccggccccatgcgctggtggcagtcacagaatgatgtgaaccctgtctctctgcagctggacctggacaggagattccagcttcaagaagtcatgatggagttccaggggcccatgcccgccggcatgctgattgagcgctcctcagacttcggtaagacctggcgagtgtaccagtacctggctgccgactgcacctccaccctccctcgggtcccgccaaggtcggcctcaaacctggcaaggatggttcggtgccagtccctgcctcagaagcctaatgccgcctaaaaat

SEQ ID NO: 98870 - DNA, 836 bp, Homo Sapiens
  misc_feature (744)..(784): n is a, c, g, or t
cctttgcttgttcctcgctctcctgggctcgctttccgggcaacagagttccgggctgcttggccaggaaggtgtgccggctgaaggggaagggcgaggacgagggcacgaagaaggggaacatgaggcccgggtggactttgggtagtaggggtagggcgtgggcaggaatggagtgggcgttggctggggccacacggcgctgggcttaatgggttcctgcttgacgggcttgcccccaaagtgttccaggctgcggtagaattggaagcccacgttgcacaggtcgatcatctgagagtcatacttggggcgcgggggctgcgggaacagcaaagggaggttgggaaggccgtggtttttgttctcctctgagtggagggcgagggtgacttcttctgcagggtggttatagggcatctttgtgggcatgctcttccgtttcctagaccctgctccttcgaagaccccggggaacccatctaggtctcctgggggaggttcataccgaaactgggaaaatggccctcggagagcttccgggaaggggtgtctttggggagcctttccccgagaagccactggctgcaggcagtggggaaaggagggggtcttctctacagccaagtcgaaatgcacatcctcgtctttgatcatcttcatttccttctgcatccttggcaattttccagctcctgaggtctgaatggctgcagcagccccactcctttacctgatccctgnnnnnnnnnnnnnnnnnnnnnnnnnnnnnnnnnnnnnnnnngtgtacagattgcagggaacttaaagaactcgaagcggacacagtctcgaat

SEQ ID NO: 98871 - DNA, 1581 bp, Homo Sapiens
  misc_feature (1278)..(1312): n is a, c, g, or t
cggccgcgatggcgctgttggccggcgggctctccagagggctgggctcccacccggccgccgcaggccgggacgcggtcgtcttcgtgtggcttctgcttagcacctggtgcacagctcctgccagggccatccaggtgaccgtgtccaacccctaccacgtggtgatcctcttccagcctgtgaccctgccctgtacctaccagatgacctcgacccccacgcaacccatcgtcatctggaagtacaagtctttctgccgggaccgcatcgccgatgccttctccccggccagcgtcgacaaccagctcaatgcccagctggcagccgggaacccaggctacaacccctacgttgagtgccaggacagcgtgcgcaccgtcagggtcgtggccaccaagcagggcaacgctgtgaccctgggagattactaccagggccggaggattaccatcaccggaaatgctgacctgacctttgaccagacggcgtggggggacacgtggtgtgtattactgctccgtggtctcagcccaggacctccaggggaacaatgaggcctacgcagagctcatcgtccttgactggctcttcgtggttgtggtatgcctggctgccttcctcatcttcctcctcctgggcatctgctggtgccagtgctgcccgcacacttgctgctgctacgtcaggtgcccctgctgcccagacaagtgctgctgccccgaggccctgtatgccgccggcaaagcagccacctcaggtgttcccagcatttatgcccccagcacctatgcccacctgtctcccgccaagaccccacccccaccagctatgattcccatgggccctgcctacaacgggtaccctggaggataccctggagacgttgacaggagtagctcagctggtggccaaggctcctatgtacccctgcttcgggacacggacagcagtgtggcctctgtccgcagtggctacaggattcaggccagccagcaggacgactccatgcgggtcctgtactacatggagaaggagctggccaacttcgacccttctcgacctggcccccccagtggccgtgtggagcgggccatgagtgaagtcacctccctccacgaggacgactggcgatctcggccttcccggggccctgccctcaccccgatccgggatgaggagtggggtggccactccccccggagtccccaggggatgggaccagggagccccgcccagggaagcaggcagggcggggggctgggagggaccacgaannnnnnnnnnnnnnnnnnnnnnnnnnnnnnnnnnnttggagagaaactttacccccgtcccaaaaaccccgttcccaaataccagggcacaccaggacccctccccacgcaaataaaccgcgcgcgcacgagaaaaaaattatcgcggccccccaaagagtccctctcacccgacatgctgtcgcccgccttgcggcggataacaactcctcttgtggcgcgccccgatacgccacctcccgccccgccgaaatttttccccccacgtcctcgtgcgcgaaaacctccccccccgcaaaaccgg

SEQ ID NO: 98872 - DNA, 1107 bp, Homo Sapiens
  misc_feature (26)..(26): n is a, c, g, or t
ctgggacttcccgggggggaagtggnccacccccaattctttcattccggattcgggggtaagggcagggcccccgggagggcccgagatccccagtcgtcctcggtgaggggaggtgacttcattcatggcccgctcccacacggccactgggggggccaggtcgagaagggtcgaagttggccagctcctttctccatgtagtacaggacccgcatggagtcgtcctgctgggctggccgtgaatcctgtagccactgcggacttcaagaggccacacctgctgtccgtgtcccgaagcaggggtacataggagccttggccaccagctgagctactcctgtcaacgtctccagggtatcctccagggtacccgttgtaggcagggcccatgggaatcatagctgttgggttgggctcttggcgggagacaacgtgggcataggtgctgggggcataaatgctgggaacacctgaggtggctgctttgccggcggcatacacaaggacgatgagctctgcgtaggcctcattgttcccctggaggtcctgggctgagaccacggagcagtaatacacaccactgtccccccacgccgtctggtcaaaggtcaggtcagcatttccggtgatggtaatcctccggccctggtagtaatctcccagggtcacagcgttgccctgcttggtggccacgaccctgacggtgcgcacgctgtcctggcactcgacgtaggggttgtagcctgggttcccggctgccagctgggcattgagctggttgtcgacgctggccggggagaaggcatcggcgatgcggtcccggcagaaagacttgtacttccagatgacgatgggttgcgtgggggtcgaggtcatctggtaggtacagggcagggtcacaggctggaagaggatcaccacgtggtaggggttggacacggtcacctggatggccctggcaggagctgtgcaccaggtgctaagcagaagccacacgaagacgaccgcgtcccggcctgcggcggccgggtgggagcccagccctctggagagcccgccggccaacagcgccatcgcggcggtaagggcgcgtctggcccgcgc

SEQ ID NO: 98873 - DNA, 1122 bp, Homo Sapiens
gttggccccaagagattccccctcgtggaaggtgtcgccagactccttttggcaagaattttggcatctctgaggcagggacggtgcctgggcctggcctggggaatcccgcggacaacctctggggagattccctggttggttgttaaagccccaggtctccagcactgcctggaactcgtcttcgcatcagcctgagcattgaggcggccatccctggaaagctacctggccagcgaagtggaagactcgcctcagagaaccagaagtacagcaatgcgggagtccccccagcagtgtgggcgagaagtgggggagggggaggtcctctgagacattctggtagatgaaatgacccttgtgatgggactccaggtaggaggctgtgatgacgggatcacctgtcagggaaatgtccacccccaatgtctccatctgaaaggatgctggcagcccttgtctggacaaaatcggccatgatgttagagatgacgttgatctctttgcagatctgtcccttcaggaccagcttcagggtgaaggagatgaaatttgtgaacagctgcttgatccacccaggctctcgctccccttggagatgcaggagcagcttatggaaagacaggtagcagtcaggggcatcggtccgcactctaccagagtcacaggtcagctgtgtgttgatctggaggtcaatggcagagtcgatctcgaagtcaatggactgatcaatacccagccaccaggcagtggtgtagccatacttcagggtccccttgaagaccacagacacgttctgaatggagacatcaatggacttggcttccaccagctccacctggctgctggcgatggacaagtggctgatctggatgttgtgcaacccatacttgacttggccaaggagcatcatggccttctcgcccgtgatatctgggtagctggctcgctggaaggcggtctggatcaccttggcagtctcgtggttcaacaccaggagggcaggcttggtgatgcggcacacgatgcctgcctcgtgcgaggtgcctttggagcaggcatgggcattgcccagcagggccagggtcaggactgtggcagccagcatggttatcaggcagt

SEQ ID NO: 98874 - DNA, 1178 bp, Homo Sapiens
tgtggtgagtagtttgcgcaatttctgcgtccctaggagttgtttcggtggtgaatcgtggatggcaattcggtccacatatccccccgttcatcgggacacaaattctgaacgattatgggtccccacaggactagattctggatttcttgaaaatgtactaaaggaattttatcaatgtaaggatatggcctacttttcccaactgatgtcgtcatcaactgttaaaagaggttaatgtggcatagaaaagtacatgttcgttttagaaggtagatttctgataggtactacaaatagttctttgattataagataacagatgtgaggagtcagttggactatttggaataatgacacttcatttgtgttatacttgatacttggtgaagacctgaaagatacttagtattaaagaagcttttacattgtaatataaataatattcacctcaaaagagtaaaaataatgctttatatatgaagtgaacttgttggcagtgcagttttaaaactaaactcttcatcttcagaaaagatttgggatagaaatttgtgagccatgttgaggaaatcaacagttgcattttatacacttattttgaagttaatttttgaaaataaagcccttttcatgtttacaagatccaacagatgaatacatatggtaacaataagttttagtcttaatcttgaccttttcacaaagaaactcttctactcaggaagtggtctgttatacaatattgttttcctgtctgcatgggatgacagattttaagctgatgtggcaagctgcagatctagaggttgtagcagaacttcagagaagcatcacgatgatacagatcagcaagagacatattaagatgagacagaaattgataaatagattctgtagcttttgacgtgcttgttgaggcatttcaatggttgaggctcttcttatagctgagcgagtgaggtattggactttctccatgataccagcaggacaggaagtctgaagttttaagtggtcgagagaaagataaaaagctggcagccaaatatgagataactgtcttcttttaggtagccttggcagctgtgatcatcacagtatagagtattgtgttgtatgaagtcttacgggtgtttagctggggagttttctgacatcccgggaattccggaccc

SEQ ID NO: 98875 - DNA, 1143 bp, Homo Sapiens
  misc_feature (858)..(867): n is a, c, g, or t
gctggaccggtccggaattcccgggatagccagtgagaaaggagcttaccaaaggcagtgtacgaagaaggttcctgggagactgtcagaaatgagtttttcactgaacttcaccctgccggcgaacacaacgtcctctcctgtcacaggtgggaaagaaacggactgtgggccctctcttggattagcggcgggcataccattgctggtggccacagccctgctggtggctttactatttactttgattcaccgaagaagaagcagcattgaggccatggaggaaagtgacagaccatgtgaaatttcagaaattgatgacaatcccaagatatctgagaatcctaggagatcacccacacatgagaagaatacgatgggagcacaagaggcccacatatatgtgaagactgtagcaggaagcgaggaacctgtgcatgaccgttaccgtcctactatagaaatggaaagaaggaggggattgtggtggcttgtgcccagactgagcctggaatgatgcagctcagtcaaggagcagcagacctggcactggaacagggttgaaaacccagggttttgtacttggagaggaaacgatgccaagctgcttcttaatcaaatccaaatttcatttacagctctggaacactttggggctgatttgtctctttaggggacatccccaacatggtttaattccaactctcagatcttgtgccttttacttagtacatgtgactcaccagatgggggcccttagatcctattcctgctcccagtgggaaatttgcctttttctttgtccttttggggaaagggggcttgggttcctgaattgtccttgcccttcctcatccnnnnnnnnnncacatcccttttttctccaaaaaaccccatcagaatctggacttttcatgggaaaatgtttgcctgaacgtccagccttggttggcaaagctggggaataaccaaatggaaaacttaatgtcaagggaatgtgcggaaaaagggaaccccactctacaattgggttttccggaataatccccaggggcaaagggaaaccccatgtgggggaagcccaacaactttttccctcggaacccacaaggggaaacaccaccccctgggtcctcaaaatca

SEQ ID NO: 98876 - DNA, 975 bp, Homo Sapiens
gcggacacctggaccgccgcgccgaggctcccggcgctcgctgctcccgcggccgcgccatgccctcctacacggtcaccgtggccactggcagccagtggttcgccggcactgacgactacatctacctcagcctcgtgggctcggcgggctgcagcgagaagcacctgctggacaagcccttctacaacgacttcgagcgtggcgcggtggattcatacgacgtgactgtggacgaggaactgggcgagatccagctggtcagaatcgagaagcgcaagtactggctgaatgacgactggtacctgaagtacatcacgctgaagacgccccacggggactacatcgagttcccctgctaccgctggatcaccggcgatgtcgaggttgtcctgagggatggacgcgcaaagttggcccgagatgaccaaattcacattctcaagcaacaccgacgtaaagaactggaaacacggcaaaaacaatatcgatggatggagtggaaccctggcttccccttgagcatcgatgccaaatgccacaaggatttaccccgtgatatccagtttgatagtgaaaaaggagtggactttgttctgaattactccaaagcgatggagaacctgttcatcaaccgcttcatgcacatgttccagtcttcttggaatgacttcgccgactttgagaaaatctttgtcaagatcagcaacactatttctgagcgggtcatgaatcactggcaggaagacctgatgtttggctaccagttcctgaatggctgcaaccctgtgttgatccggcgctgcacagaagctgcccgagaagctcccggtgaccaacgagatggtagacgtggagcctggagcggcggtcagctttgagcaggaggtccagcaggggaccatttcatcgggacttgacctgtggatggcatcgaggccagaaaggaacccggaaaccccagccgggcgcgca

SEQ ID NO: 98877 - DNA, 775 bp, Homo Sapiens
  misc_feature (518)..(643): n is a, c, g, or t
gcttaaaatattcaatatgtcaaagtgctgtattttgtgtagggtgtcctgaaccccgtcactaacctctaactgaaagttaggattttcttcaattctgaacatagttcataaaccacggtaatattagcaatacttcatcatcaaaagaaaaacccagatattttcatatcacattagttttttgcatctattttcattatgcttatcactatttcaaatttaggatagctattaactcttatttaatgcatttataaagaagcatgcatattaatatataacaaacttatcttttaacattttaataactgtatttcgatataattagattcctttgtaatcctatatattttatgcatttaaaaacatgattttaagaaggcattcataggctttaacagatagctaaagactaagaacccatgtttttattctactttcaatacttgaaaagttgtggataaaacaaaaattatgcttaaaaactgaaaagtaggctgggctcagtggctcannnnnnnnnnnnnnnnnnnnnnnnnnnnnnnnnnnnnnnnnnnnnnnnnnnnnnnnnnnnnnnnnnnnnnnnnnnnnnnnnnnnnnnnnnnnnnnnnnnnnnnnnnnnnnnnnnnnnnnnnnnnnngttttgaatcctcttctgtacaaagatacaatctgagtccttaggacatttatagcctaatattttcttccatcaaagttgctaaaccccatcaccagaataccacaattaatattctcaggatagattatt

SEQ ID NO: 98878 - DNA, 887 bp, Homo Sapiens
ttccggtggcggcggcagcagcggctgtggtggttccgggtgtctttgtccccccggtgtcgctgccctggcccgctagccttatccccacgactctgaaagaggacagcgttcccaatgtcccagtttaaagcgccagcggatcaacccgcttccaggggtgactgcaacttactcaggcacagcttcaacatctcttctgggccctcctcctggtttgctcactcctcctgtggccacagaactgtcccagaatgccaggcaccttcagggtggggagaaacagcgggtcttcactggtattgttaccagcttgcatgactactttggggttgtggatgaagaggtcttttttcagctaagtgtggtgaagggccgtctgccccagctgggtgagaaggtgctggtgaaggctgcatacaacccaggccaggcagtgccctggaatgctgtcaaggtgcaaacgctctccaaccagcccctactgaagtccccagcacctcctcttctgcatgtagcagccctgggccagaagcaagggatcctgggagctcagcctcagctgatcttccagcctcaccggattcccccactctttcctcagaagcctctgagtctcttccaaacatcccacacacttcacctgagccacctgaacagatttcctgcccggggccctcatggacggttggatcagggccgaagtgatgactatgactccaagaaacgcacaccagctgggctggtggagagccctggaggtgctaagaagcccaaggcatgaactgcctccttaccgaggtccaactcactccttaacactgtgggacagccaccatctgtgacttcctagaaactccagggccgttaccgaagctcctggtcac

SEQ ID NO: 98879 - DNA, 1060 bp, Homo Sapiens
attcccgggatctcggcctctccccggcacgttctcagctgctcctggttcagacccagcgagggagccgcgagcgaggctcaccgtccccggcgtgcaggatccggggctgctgagcgctcgctcccgcgtgtccggcgcttggagtccccgcggcaggagaggagtcgggacactagagctccagggcgcctgtgggctccagggcctccggcttccccagtccccttcagctaaagccccagagacgtgctcagccccaggacctctgcggaacaagatccggattgagaagccactgcaactaccgaaatgggcagcaaaaccttgccggcgccggtgcctatccacccttccctgcagctcaccaactactccttccttcaggcagtgaacggcctgcccacagtgccttcggaccatctgcccaacctgtatggtttcagcgcgttgcacgctgtgcacctgcatcagtggacgctgggctacccggccatgcacttgccgcgctcttctttctccaaagtgccgggcacggtgtccagcttggtggatgcgcgcttccagctgcccgcctttccctggttccctcatgtcattcaacccaagcccgagatcaccgctggaggcagcgttccagcgctcaagaccaagccgcgctttgattttgccaacctggccttggcagcaacgcaagaagatccggccaagctcggtcgcggggagggcccaggctcccctgcaggtgggctgggtgccctcctcgacgtgaccaagctgtctccagaaacagaagcccacaagggggacgtctgccttccaagaccaacaacggaattcgtctgcaagttctgtggccgcaattcaccaagtcctacaacctacgattccatgagcggacgcaacaccgacgagaggccctacacctttgacatttgccacaaagccttccggaggcagaccacttggagaccccagatatatcactccaatagtaaccctcagtgtcacagtggggaacggatagccaccaggactgatgcaacaaagctacctcacg

SEQ ID NO: 98880 - DNA, 1089 bp, Homo Sapiens
aaggtacccgcgagagacagccagcagttctgtggagcagcggtggccggctaggatgggctgtctctggggtctggctctgccccttttcttcttctgctgggaggttggggtctctgggagctctgcaggccccagcacccgcagagcagacactgcgatgacaacggacgacacagaagtgcccgctatgactctagcaccgggccacgccgctctggaaactcaaacgctgagcgctgagacctcttctagggcctcaaccccagccggccccattccagaagcagagaccaggggagccaagagaatttcccctgcaagagagaccaggagtttcacaaaaacatctcccaacttcatggtgctgatcgccacctccgtggagacatcagccgccagtggcagccccgagggagctggaatgaccacagttcagaccatcacaggcagtgatcccgaggaagccatctttgacaccctttgcaccgatgacagctctgaagaggcaaagacactcacaatggacatattgacattggctcacacctccacagaagctaagggcctgtcctcagagagcagtgcctcttccgacggcccccatccagtcatcaccccgtcacgggcctcagagagcagcgcctcttccgacggcccccatccagtcatcaccccgtcacgggcctcagagagcagcgcctcttccgacggccccaatccagtcatcaccccgtcatggtccccgggatctgatgtcactctcctcgctgaagccctggtgactgtcacaaacatcgaggttattaattgcaagcatcacagaaatagaaacaacaacttccagcaatccctggggcctcagacatagatctcatcccccacggaaggggttgaagggcctcgtcccaccctccgatccacccagctctgcctgaaactcacctggaaagcaaacccacaccatcacctgaaggtcacaggcctctggccgagaacccctgtccaacaggccggggacccacaggagtcaggctgcaaccttcagggccacggtttggggaaccccaattcccccaattaaacggg

SEQ ID NO: 98881 - DNA, 819 bp, Homo Sapiens
ggcggggaggggcgtcttgggcctggagattaggaagaaacagcaagaagtagtgggttttttggaagcgaataaaatcgactttaaggaattagatattgctggagatgaagacaacaggaggtggatgagagagaatgttcctggagagaaaaaacctcaaaatgggattcctttgcctccccagatcttcaatgaggagcagtactgtggggattttgactctttcttctctgcaaaagaagagaatattatttattccttccttggtttggctcctcctccagactcaaagggatcagagaaggctgaagaaggtggagaaactgaggcacaaaaagagggcagtgaagatgcgggcaacctccctgaagcccaggagaagaatgaagaacgaaggagagacagccacagaagagacggaagaaatagccatggagggtgcggaacggggaagccgaggagcgaggaagaaactgcagaaggagaagaagagcctggagaagacgaagattcctaggccttttcatgcttcatttcttccacttctccagaaaatggaagctatgaagcaacatttcaaatgtctctccacaaaacaaactcaacagaatactttggcttgaagccggcacacccagggttactgaggacttatgctgcctgacctggttagatgtacatggaggtatctcccgaatcatacaaaatttaaatgtgaagaccgtttatgcataccttcatgtgcctgacagtcttggcttttgaagattttttacttttttgctctgcatagctagaccatcttattaataatac

SEQ ID NO: 98882 - DNA, 875 bp, Homo Sapiens
atagggcagagaggagagcaggatgcccccctctcgcagcctgctggtctgagcctccaactatgcactggggccactctgcacagctgccagcacctccagtcagctccaacgtgtagcctggagctcagcaactgggttcacgttggaaggtaaactggctgggagcctggctctgtgggaggctccaggggcaagaagctgtggcttctcgtaggctccaggcaactgccagctggagctgcctagacccgtactcttcccgtgggcttgtcccatctccccggagcgtgccctggattctcagacaggggtgagccaccagaaccccgttgctgatgacttcagatgcaggcacctggctcttctccagaacaaaggtccacctgcagctcttgtgaatcctggtggttgagtgggaaggtgtgtttgtgaggttggccacacttgaggcttctcaggtcaaacaggagcagagagagctggtcgctgcccaggatgtccttgtcatagagggtgagctccaggacgttcttcacagcaccatggatctggtagtggaaggtctcattccactcggggtcactgcagttggccactatcctagtctgggcagggcttggggacgccgtgggcagccacagttgcacatagcagtcggctttggacagggtctgtgccccggatgtttgtggccctcagcaccttcacctggaggtcatagtatgggtaggtttcccgccgccagtgcctccacagagggcccctcttctctctcttctgaagcagcactgcccccaggaggggcagcatcttgtctgccagccaccttggccagagtgcccaagtcatgactgggcagcccgggccccagc

SEQ ID NO: 98883 - DNA, 543 bp, Homo Sapiens
ctgagggtataggggactccgttaatggtgaaggtgacatccggcatgacgttaaggttggcacactccacagcatattatccagtgcaatctgccagtaagcttgcttggtgactgggacccaattcaggctcccagagaaatgggagtggtcgtagcctccaaaaatcagctcgctccccgcaccaccttctgggttactgctcatgtagacagaaaacatcggcaagtccaccaggttctgagccatcatgttgtcaaatactggagtcactcctcccacagccaaggaggggtatcccaggcccagaattccatcaaactctgcatccacaaaggtctggcctggctctgtgacactttctccaaactgctggccaaccacggttagtccttccacagagacttggtcggctccaatgatcccggacaagctcccggttccatactgaatggagaaagattgacctggctggctgtatgtgctggactgggaaggctggaacctgctgtgcgtctttgctgtggagggtaccgagctca

SEQ ID NO: 98884 - DNA, 961 bp, Homo Sapiens
tgctgaggcaagagtccaagggtgcccatgtgggcaaggctctgggccatgccacaagcagagcttcaggcacaagccagcggtcatggagcccacccagatgacaccaccttgccaggatggattggcaccgctcgatgggcctcacctttgggcagggtgctggtgccacgtggaacgggtcaatgcccagggcacagaggctgaaaggtcgtgactcccagagaggagacctcccatgtaagggcacggtcacgacaagtaaacgtcacccagtagcctctgcttggtgatctcgttgaagatgactatagggaggctagaataaagaggaccagaaaatcccagaggtccaggctggcaaggatggagttccaggcactcttcaggtagtagctgtgccacacgatgcacatgaccgacaggttgcccacaatgcccaccgcaaacaccaccagcgccagaagcatgatggcataggcactgtaggagctctcggtcaccggatacagggggttctggatctgtagcctctgccctggtgctcctgtcagattgcccctcagttcctgcccactgtctggggtgcccccatccctgccggggttagggctggtggccaccaagggcttggttggctgcaggccagcagggtgaatgggccgggggtactccgcccactcctcaggcacatactgctgcacgcccttggcctcctcatcctcggtgcccctcttggatcggctctgctgctcctgggtctcggctctgtgcctgcccaggtgcaggggggcacccccagagaccctgcttagccccacagccaaaatcacagcaagagagacagccaggggccacagccaccgcatggctggatgagcaggagacagccagcccaggaagagcaggtgagtgcagggggccacaagagctatcccaacgattccgggccagtaccagc

SEQ ID NO: 98885 - DNA, 831 bp, Homo Sapiens
  misc_feature (39)..(39): n is a, c, g, or t
  misc_feature (721)..(777): n is a, c, g, or t
ccgaaaaacacgttctaggcgccgggattccagataccntgggaaatagagtgcacgcaggcgttgagaggcctcgcgcttggcttctcctatcactgaggcgcagaggtgctgtggacagcccagacccacacggcgcccgaggtgaaacagaaccctcagtctccctatgaggccactggcactctcggctgtccccagagctctccgacttagagctgaatgcaaagtaagcgctcgaaatgcagaagtagccggggccgcccacggcacctgcctcgctcggggcgagagaagacgccaggctgaggtcccagcgacctcaggcaccagctccgaaggagggcggggagaccgcaaaggggaagtgcccggagggccaacggcccccgcgcaccctgcgcccctctgaagcgcgccgcctccccgcgccagggactgggacctgcctctggggaatccgcctagaagacggcggcggattggggtcgggcactctccagggctgtcaggccctccccagccctgcacctgccgcgccgccccacctcgccaggaagtctcagagacccccggggatgtggtggggagcgcccttctcatcgcgggcttcaaaaagaaggaaggacgccccccagggggtcctagaagggaggactagcttccaagcccacaacttttctttcgggacccaaaggaaggccgggtggggggttccccnnnnnnnnnnnnnnnnnnnnnnnnnnnnnnnnnnnnnnnnnnnnnnnnnnnnnnnnntggtctcgggggagggaaacgagggagaaccagaagacggggcggaggatttta

SEQ ID NO: 98886 - DNA, 897 bp, Homo Sapiens
cggcgccccaccggctcccgcgcgcctcccctcgcgcccgagcttcgagccaagcagcgtcctggggagcgcgtcatggccttaccagtgaccgccttgctcctgccgctggccttgctgctccacgccgccaggccgagccagttccgggtgtcgccgctggatcggacctggaacctgggcgagacagtggagctgaagtgccaggtgctgctgtccaacccgacgtcgggctgctcgtggctcttccagccgcgcggcgccgccgccagtcccaccttcctcctatacctctcccaaaacaagcccaaggcggccgaggggctggacacccagcggttctcgggcaagaggttgggggacaccttcgtcctcaccctgagcgacttccgccgagagaacgagggctactatttctgctcggccctgagcaactccatcatgtacttcagccacttcgtgccggtcttcctgccagcgaagcccaccacgacgccagcgccgcgaccaccaacaccggcgcccaccatcgcgtcgcagcccctgtccctgcgcccagaggcgtgccggccagcggcggggggcgcagtgcacacgagggggctggacttcgcctgtgatatctacatctgggcgcccttggccgggacttgtggggtccttctcctgtcactggttatcaccctttactgcaaccacaggaaccgaagacgtgtttgcaaatgtccccggcctgtggtcaaatcgggagacaagcccagcctttcggcgagatacgtctaacccctgtgcaatcagccactacaattacttcaaaactgagatccttcctatagagggagcaagtccttccctttcaatatttacaggcttcctccctgtgtattcatcatcata

SEQ ID NO: 98887 - DNA, 1028 bp, Homo Sapiens
  misc_feature (206)..(290): n is a, c, g, or t
  misc_feature (944)..(954): n is a, c, g, or t
ggaattcccgggatcacgggcagttgcagccgcggccgagcagccagccgctaagaaagagctcgccgctgccgctcccggagccgccgaggccagcttcgcggcgctgccccgcggcgggagaggaggctgcagaagagcggaggcggccagcgggagcggcggggctcagcgcgcacactcagcggccggggagcctcccgagnnnnnnnnnnnnnnnnnnnnnnnnnnnnnnnnnnnnnnnnnnnnnnnnnnnnnnnnnnnnnnnnnnnnnnnnnnnnnnnnnnnnngggccgcggcggcccaaggagcagcatgaatctgcggctctgcgtgcaggcgctcctgctgctctggctctccttgaccgcggtgtgtggagggtccctgatgccgcttcccgatgggaatgggctggaagacggcaatgtccgccacctggtgcagcccagagggtcaaggaatgggccagggccctggcagggaggtcggaggaaattccgccgccagcggccccgcctctcccataagggacccatgcctttctgaagcaggactgaaggggcccccaagtgcccacaccctgcggttatgtctcctccaatagatgggtctgcttctctggaggcctcacagtccattcagctctcacctcgcacctgcttgtagccaccagtgggccccagctcttctacaccttgcctgcttcccccagtggcgtgctcctgggctgtaggtgggatgattcccgatctctcacaaagaatccgtccagtccatcttcctggcccatccctgggacggactatggagaactagccccagaaagcctcccttcgttctccaggtcccctccggccctagtcccctggctggctcatctaacgccccaaacccttcattttggggcctttcccttccccatgtctggcccctgaaacccnnnnnnnnnnnaaaatgctcccccttccggggggggctccccagcagaaacccccttggggtattccccggctcaacattgggac

SEQ ID NO: 98888 - DNA, 878 bp, Homo Sapiens
cttgggtttgtgatattcgttcgtgttctcctgtgtttactccaaggttttcgtatcccctgttcttccgctctgtgtctaccatagtgcttggttttgtttttcacttgttctcctctactgcgttttattgtgagtccaagggcctttgttggttattctttaattatctccctatctctttcctatccttgccctcgttaactctgggaatctactttagccagtttaaatccagaatttcgcttggattacttatttccctttttcccttccacgtttgtttgggttgtcgtgttgtgggcatttttgcctaatcgcaagtccctttcccagccctgcttgtcctcttcgggctggcgggcactgagctggggccatcacgcctttctagagcgcctgcggaggtggcgaagggcttggagagcatacgaggcggaatccggatcgagctgagttccttgagccgcttgcgtgggacagcagggagagggcgaataacagccctcaggcgcatgaatgcaggggcaaggagccagcgagggtggctggagcaggcccttgccagctgttaccaagtctctccacacggcattgggggcttggggcctcctggaaagatccctccgccgcgctgaccagtacggggctcgctcccgcactttgaaggctgccgcggtctttcgtcatttataatcaagcccaagatcaaggttgcaagctgaggtcggggtactgacaacgggaatgaagccataggggaagaggataactgggacgggctggacccatacttgatacccgggaaactcctagagcgtgtggtgctcctgccagcggcagttactggtggagctgaggccaccgctactgtcgtc

SEQ ID NO: 98889 - DNA, 1087 bp, Homo Sapiens
ggcaggcaaccctacccagatctcctcccccaggcctggtctcctcacaggacgccccctccccgctcttcctgccgggtttcctcttgccttttcctgtcccccacccagtgctgggagccgtggcagaggcaagagcagtggaactgacccaggccagtggagccagggcctccgggtgtgccggacccgaagcaggggccatgctgtctggtgaacggaaggagggcggaagcccccgcttcgggaagcttcatctccccgtgggcctgtggatcaattcccccaggaagcagctggcgaagctggggcggcgctggcccagcgcagcctctgtcaagtcttcttcgtcggacacggggagccgcagcagcgagccgctacctccgcccccgccgcacgtggagctgcggcgagtgggcgctgtcaaggcggccgggggagcctccggtagccgcgccaagcgcatctcccagctcttccggggctcggggaccgggaccacggggtccagcggcgcaggaggccctgggaccccggggggcgcgcagcgctgggccagcgagaagaagctgccggagctggcggcgggcgtggcccccgagcccccgctggctacccgcgccacggcgcctccgggggtcctcaaagatcttcggcgccggactggcatcgggcgccaactacaagagcgtgctggccacggtgcgctccacggcgcgcgagctcgtggccgaggcgctagagcgctacggcctaacaggcagccccggcgggggcccccgctgagagcagctgcctggacgcctttcgctttgggcgaacgctctgggccggtcccgcggtggcgggccttgcgaaaccccctagtggccgggccggatcacccgcaccccgctgggtagaatccccaatgccccgctgatgggtgcaaccaccttgtggcgccactcccacctggtttggggcgccgccgtcctccaagtcccaacaggaaccttctacaaggctttccctcccagagggcccccaccctctacaccccccagccacgtttgccccggaccacaaagctccacccaccaat

SEQ ID NO: 98890 - DNA, 966 bp, Homo Sapiens
gtcctccacttcctggggaggtagctgcagaataaaaccagcagagactccttttctcctaaccgtcccggccaccgctgcctcagcctctgcctcccagcctctttctgagggaaaggacaagatgaagtggaaggcgcttttcaccgcggccatcctgcaggcacagttgccgattacagaggcacagagctttggcctgctggatcccaaactctgctacctgctggatggaatcctcttcatctatggtgtcattctcactgccttgttcctgagagtgaagttcagcaggagcgcagacgcccccgcgtaccagcagggccagaaccagctctataacgagctcaatctaggacgaagagaggagtacgatgttttggacaagagacgtggccgggaccctgagatggggggaaagccgagaaggaagaaccctcaggaaggcctgtacaatgaactgcagaaagataagatggcggaggcctacagtgagattgggatgaaaggcgagcgccggaggggcaaggggcacgatggcctttaccagggtctcagtacagccaccaaggacacctacgacgcccttcacatgcaggcctgccccctcgctaacagccaggggatttcaccactcaaaggccagacctgcagacgcccagattatgagacacaggatgaaagcatttacaacccggttcactctttctcagccactgaagtattcccctttatgtaccaggatgctttggtgatatttagctccaaaacttcacaacacagactgtggtcccctgcactctttaaggggagtgtactcccaggggcttacggccctggccttgggccctctggtttgccggtggtgcaggtagactgtcctcctggcggttcctcgttctccctgggaggggggggcactgcctctccaggttgaatttgtgaagcctggtttttaaaaacccc

SEQ ID NO: 98891 - DNA, 939 bp, Homo Sapiens
aagcggtcttctgcagtcccgctccagctcccggcggaaggacttgcggagaggtcggccctccaggaccctcaacggttggcagtctgccccacctcctccacacccagcggcagcgacttcccgggcttcagcttcggcttcttcctcgtggcgtcagggctcccgaggcgcgaggacccaggttccccgcaagagggcgtccctcggcttcggctagcaggcaactcgcggtacagcggggacttgacgaagcgcgcatagctgtcgaacttcatcaagttgaagatctgaagctgctgtgcccgaaacatgtccggccggggctcggccagcacctcctcgccaagccaggcctgacggtcgatgttcactgggctcagcgcctggctggacaggaactcctggtagatgttgcgggcctcctgagctagctgctgggtatcgctggccgggatctgctggaagcgctcgcaggccttccagaaagtcacgttttccgcgctgaactccttcttcaggaactcagtgaagtaagccaggcccagcgggtcctgcaacagccgctcgaaggacagggcccagctggccacaggctgctcctcggttgggaaggggctgctgggaccactggggaggctgtggatgctgagagagctgccgcggccctcgccctggccctggggccccgtcgtgctgctcagctctccatctgacacagccagaaccatgcgcccgttggggacgcccaggtgcttgggcttccctggcatgccgctgccgatcaggggtccccgccgcgggggctgcccaccatggggactgtgggcagcgccggccagagcttgcacggtggcgggcaggcagtggagagagcctgaactcggctcactgcgggccctcacatcctgaaacaccgcatcccgggaattccggacc

SEQ ID NO: 98892 - DNA, 820 bp, Homo Sapiens
ggaagccccataggcaggaggcccccgggcagcacatcctgtctgcttgtgtctgctgcagagttctgtccttgcattggtgcgcctcaggccaggctgcactgctgggacctgggccatgtctccccaccccaccgccctcctgggcctagtgctctgcctggcccagaccatccacacgcaggaggaagatctgcccagaccctccatctcggctgagccaggcaccgtgatccccctggggagccatgtgactttcgtgtgccggggcccggttggggttcaaacattccgcctggagagggagagtagatccacatacaatgatactgaagatgtgtctcaagctagtccatctgagtcagaggccagattccgcattgactcagtaagtgaaggaaatgccgggccttatcgctgcatctattataagccccctaaatggtctgagcagagtgactacctggagctgctggtgaaagaaacctctggaggcccggactccccggacacagagcccggctcctcagctggacccacgcagaggccgtcggacaacagtcacaatgagcatgcacctgcttcccaaggcctgaaagctgagcatctgtatattctcatcggggtctcagtggtcttcctcttctgtctcctcctcctggtcctcttcttgcctccatcgccagaatcacgataaagcaggggacccccagaagcaaggacgacgagcagaagccacagcagaggcctgacctggctgttgatgttctagagaggacagcaggacaagggcaccagtcaatggacttcctgagacggc

SEQ ID NO: 98893 - DNA, 1382 bp, Homo Sapiens
  misc_feature (54)..(54): n is a, c, g, or t
  misc_feature (315)..(315): n is a, c, g, or t
aagaaccacacgttatgttcttttctggagaagagttagtttcgatcgcaactntgttcgtcgggtgaggggctttagttaatgaggagggagcggactttttatcttttagcatttagtatacgcccccctgtctgaagagttgtttgtggtgacatatgtagccagcaatttcgctgtctgtgggactgcattttaaggagtgcccacccccgtaattggaggatcttctcccggtagtggacgtcgtttaggggagtgtggtatacgaacggacattgtgatcccacccaggtgtgacggtggttcgctatnttgatcttggggtcgctacccacgcgggtggatggataaggtatccgcggggggtttcctggaaatgcccgggaacagagacggcaaaggtccgcagggggggtgttgtttaccagaaatccaaagacccggtagggattagcccaggttccgctagcgcgtgtgaggtgagcccaggttctgtgcaagcattttagtggagaggtggattccggaacggccagacaggatagctgcggtggccccaggggattctttgcgggattgtgccaaggactcgttgccgggcgggctgggaccaggtgggtggggccgtgtcacccagggtccgcgccccggtgcaggttcccacgtttactttcggggcccgggctaccccgctggtcccccaggcctgcaggaggggcgctggtcggccggtggctctcggttagaacacaaggctgttacccggttaacaccacccaagacgggccccagttcttcctgagcttgcgccccccttgggcaatcttggtcatgttgagcagacccgacttttccacctcatgggggtcgtccaggagctgcggcagaggtcgaggggcctgcaaggctggagggtcaagctgcgaggtgcgttggctgaggctgagtgaaccctgtgggtcaagcggttctggggtccctgtgtcagatctgaagccctttgcctgaggttgcaggacatcattgttcctcttcagggtctgtgtcccctccatggagccagggttcgtctcgctgcgactgcggcgcgggggcttccaggacttgcagccagtcagtgaatttatgtagaagcagcgtccagagttggggtccaggtgctgctcccaggcatccagcctctgcagcagggggcatgcagggcctgggggtggggaccgaggacagcggcgaaggtccaccaggttacagtacacagggggctctgacatgaggggctgggggcctgccgccagctctgggctgaggtgacccagggtactgggggagaaacctcaggccccagctgctttttaaaaattctctctctcacagttttc

SEQ ID NO: 98894 - DNA, 1167 bp, Homo Sapiens
ggaccggtccggaattcccgggatctgaggactcatccatctgcacagctggggcccctgggaggatgaagccatgatccccaccttcacggctctgctctgcctcgggctgagtctgggccccaggacccacatgcaggcagggcccctccccaaacccaccctctgggctgagccaggctctgtgatcagctgggggaactctgtgaccatctggtgtcaggggaccctggaggctcgggagtaccgtctggataaagaggaaagcccagcaccctgggacagacagaacccactggagcccaagaacaaggccagattctccatcccatccatgacagaggactatgcagggagataccgctgttactatcgcagccctgtaggctggtcacagcccagtgaccccctggagctggtgatgacaggagcctacagtaaacccaccctttcagccctgccgagtcctcttgtgacctcaggaaagagcgtgaccctgctgtgtcagtcacggagcccaatggacactttccttctgatcaaggagcgggcagcccatcccctactgcatctgagatcagagcacggagctcagcagcaccaggctgaattccccatgagtcctgtgacctcagtgcacggggggacctacaggtgcttcagctcacacggcttctcccactacctgctgtcacaccccagtgaccccctggagctcatagtctcaggatcctttggagggtcccagggccctcacccacaaggtccgtctcaacagctgcaagccctgaggaccagcccctcatgcctacagggtcagtcccccacagtggtctgagaaggcactgggaagtactgatcggggtcttggttggtctccatcctgcttctctccctcctcctcttcctcctcctcaacactggcgtcaggaaaacaccaggacattggcccagagacaggtgatttccaacgtcctccagggctgccgagccagaagccaagacggggggcctacagagggaggtccagcccaggtgctgacgtccaggagaaaacttcgtgctgcgtgaagggcacacagccgagaacggggtggacatgggccctccggaaacccacgatgaagagcccaggagggacagatccaagcggaaactccgaccatg

SEQ ID NO: 98895 - DNA, 1521 bp, Homo Sapiens
  misc_feature (645)..(645): n is a, c, g, or t
  misc_feature (803)..(803): n is a, c, g, or t
  misc_feature (1281)..(1281): n is a, c, g, or t
cggtccggaattccctgcggatcaccggaaggagacgccatgacgcccgccctccagccctgctctgccttgggctgagtctgggccccaggacccgcgtgcaggcagggcccttccccaaacccaccctctgggctgagccaggctctgtgatcagctgggggagccccgtgaccatctggtgtcaggggagcctggaggcccaggagtaccaactggataaagagggaagcccagagcccttggacagaaataacccactggaacccaagaacaaggccagattctccatcccatccatgacacagcaccatgcagggagataccgctgccactattacagctctgcaggctggtcagagcccagcgaccccctggagctggtgatgacaggattctacaacaaacccaccctctcagccctgcccagccctgtggtggcctcaggggggaatatgaccctccgatgtggctcacagaagggatatcaccattttgttctgatgaaggaaggagaacaccagctcccccggaccctggactcacagcagctccacagtggggggttccaggccctgttccctgtgggccccgtgacccccagccacaggcgtgtctaggaagccctccctcctgaccctgcanggccctgtcatggcccctgggcaaagcctgaccctccagtgtggctctgatgtcggctacgacagatttgttctgtacaagggagggggaacgtgacctccgccagcgccctggccagcagccccaggctgggctctcccaggccaacttcaccctgnggccctgtgagccgctcctacgggggccagtacagatgctacggtgcacacaacctctcctctgagtgctcggcccccagcgaccccctggacatcctgatcacaggacagatccgtggcacacccttcatctcagtgcagccaggccccacagtggcctcaggagagaacgtgaccctgctgtgtcagtcatggcggcagttccacactttccttctgaccaaggcgggagcagctgatgccccactccgtctaagatcaatacacgaatatcctaagtaccaggctgaattccccatgagtcctgtgacctcagcccacgcggggacctacaggtgctacggctcacgcaactccaacccctacctgctgtctcaccccagtgagcccctggagctcgtggtctcaggaccctccatgggtttcagccccccacccaccggtcccatctccacacctgcaggccctgaggaccagncccctcacccccactgggtcggatccccaaagtgggtctgggaaggcacctggggggttgtgatcggggatccttggtgggccgtccgtcctaatgggttcctcctcctccttcctccctctttctcatcctccgaacatcgaagttaagggcaaaacactgggacatcgcaccccagaaaaaaggcttggatttcccaccatccctgcaaaggggcttgtgggggcccaaaacccccaa

SEQ ID NO: 98896 - DNA, 829 bp, Homo Sapiens
  misc_feature (57)..(57): n is a, c, g, or t
  misc_feature (204)..(204): n is a, c, g, or t
  misc_feature (225)..(225): n is a, c, g, or t
gtgagtactggcccaggatctaggtaaaacctgaggacataatttcaaaccattganagcgagttcctggtcaaggctcatctaaagatgactgcaaggaagaggaacaattggagcaggccatcaaagagcatttgaatcaaggcagctctcaggagactgcaaagctgggccccggtgagcaaaaggttccctgtggggccnccgaagaatgatgatacccanaataggcagtactgggatgaagatctgttaatgaaagtgctggaatacctcaaccaagaaaaggcagaaaagggaagggagcatattgctaagagagcaatggaaaatatgtaagctgctttcattaattaccctactttcattcctcccaccccaagcaaatcccaacatttctcttcagtgtgttgacttctatcctgttaacactgtaatatctttaaatgatgtacaggcagatgaaaccaggtcactggggagtctgcttcatttcctctgagctgttatcttgtgtatggatatgtgtaaatgttatgactccttgataaaaaatttattatgtccattattcaagaaagatatctatgactgtgtttaatagtatatctaatggctgtggcattgttgatgctcacatatgataaaaaagtgtcctataattctattgaaagtttttaatatttattgaattattttgttactgtctgtagtgttttgtggagtactggaccaaaaaaataaagcattataaatatatagttttatttataaggccttttctattgtgtgttttactgttgattaataaatgttatttctggacaaa

SEQ ID NO: 98897 - DNA, 627 bp, Homo Sapiens
caagatggcgccgagcgccgggtgagcagcgtctcggctgccgctagagttttcctgctccccgcgctcgggtggcgggggcgggtctgagtggtaccccggaggagaccctttgaaggtcccttgtggggactggaaagaggacgggtctccgtctctccaccgggggcttcatccttccacggaggagaagagggactccagaatggctgaggagaagaagctgaagcttagccaacactgtgctgccctcggcagctccatgaaggtggtggctgaatccatgggcatcgcccagattcaggaggagcacctgccagactgctaacggatgaggtcagctaccgcatcaaagagatcgcacaggatgccttgaagttcatgcacatggggaagcggcagaagctcaccaccagtgacattgactacgccttgaagctaaagaatgtcgagccactctatggcttccacgcccaggagttcattcctttccgcttcgcctctggtgggggccgggagctttacttctatgaggagaaggaggttgatctgagcgacatcatcaatacccctctgcccccgggggccccctggaaacttttggccccaaaagcttttttggggggg

SEQ ID NO: 98898 - DNA, 1185 bp, Homo Sapiens
  misc_feature (859)..(1035): n is a, c, g, or t
ggctataggaatgtcacatatgaaaggagctttgaacaaagcagcatttaagaaggggaatggtatgaacttgctccaggctttcacgacttgaggccaatatctggggaacagtggaccagatgccacaaggaattcagcaccaaggagctttcctggttcagcagtcatttgatgacgggaaagaagatccaggagcaactgaaaggaagcaaagatggtcccaaagggcgagtcttctacaggctggatcagaagaaagcgcgtattgccgcgcaccagtgatgcaacaccactctggaccccacacgggggaagtggtggatgggatgggtgtgtcactgactgagggtgttagaagagcctcacagtagccatcatagggctacagagaaataaatggccgctaggtcacagagagctccttccagcctggatgggaaggcacagtctcacagaggaggtccattgacgcctggatggtagaaggcacagaggtcctcatatcgacagtggccctttttggcaaaatgtcggcagacagggcggtcggatttgtcttccataacctgggggtcatccttgggcgggcaggtattcttgataagagaccagcttttgagccttcgagggtttctctgttccttgtgaaagcttcccctggtgggacccccatggcctggccccggaaaaggaggttctgcattgactccccaccaaccacgaccatatgggctagacctggggccaagccctctccgaattgggcctctaccccaaggaggaggtgggagactcagcagtggtggaatcagtggtccccttgatcctggaggacctctgtgaagagagtctgcannnnnnnnnnnnnnnnnnnnnnnnnnnnnnnnnnnnnnnnnnnnnnnnnnnnnnnnnnnnnnnnnnnnnnnnnnnnnnnnnnnnnnnnnnnnnnnnnnnnnnnnnnnnnnnnnnnnnnnnnnnnnnnnnnnnnnnnnnnnnnnnnnnnnnnnnnnnnnnnnnnnnnnnnnnnnnnnngggactcccatcctcctcatctccagtctcttcccgctcgggcagcgggggctgctgctgtgtcggtggctggtgatgattctgcttctttcgtttcggcatcgtgtctgcggcaatggctgcagcgggatcccgggaattccggaccgg

SEQ ID NO: 98899 - DNA, 738 bp, Homo Sapiens
tgcaaagcatgcatcagccacatccatgctatctcctaaagcagtcattctgaaacccaatctggggacagtgcagactaaataaaatttcattttgagtttggcctcccgctgcgaatgggactgctttgtctcagccgacagaaccagcaagccagaaagggaatgaagacatttggagaagaagcgtttactgaaaggagattcctgggctggaggaaaaccatgatctacagttcatgttgacagatattgtattttcggtcctagatctgacttttgaaatgacttatcacaaattcaaatttagcaatcatgagtgaagtacccacgatgtgctaagcatctacctctgcagatagaagaacacttactgttcctgagcatgggagggaatagaagttcctgggtcctggcctcacctcatcaggcactgccaaatttgacacctccttcctgttcacggcagtcctttgcgatagggtattagatgccaccaagtagctgcataactcacccatttggtcagagcctgggtctaagccaggtctgacagactccaaagcaagccctgtttacagcatgactggggatccagtggacgagggaactgagctgtcaaaactaagtgacttgattgaggccatgcaagctggcgaggggaggaccaggatctgaacccaaatgggtctcccaagcctgggccacctgaaccatttcacctcttggaaaaactta

SEQ ID NO: 98900 - DNA, 1076 bp, Homo Sapiens
  misc_feature (935)..(953): n is a, c, g, or t
agggtagcgtcaaagggtgggcggcgcaggtaagggcaatggggtcatctggagccctgtgtgggatcagggtcaagggcggaactgagggctgccaggccggttacacaggtgggcatcttcagccacagcattcacagcaccggagaggaagagccaccaagccaggatccagcggaggtcagacccgggctccgggacaaatgcaactgaggaagtcaatgtcctgtggctcttcagactccacccttggccttgctgctggtcttgactcggatcttggccttcctcaccttgtccaaggggccctacagggtccacgtgcacctccaaggcttcaggctgggagcctcgccaggtcacctccacgcgctgcagacggcccccctggaagccgaggctctccacttatgggctgagtctgaaacaccaccactttcccattgtcagtctgcaagtagtatgtccaggtggaggagacaaatccctgggctgagttgacgaggtcattgcagagggtggaaaacaagtccaagagggagagggccccacttggagcctccaggacctttctcttctgctccggctcaggctccgcgggctggctccagcagccgtggctacaggcctgctgctctgcctccttcacataggcttccacgcaggctgcttcacactcagtttgggtggcattgggcttggagcttctggccacaaatcggcagatggagaagaggcggcagccacgctcgcaagcgctgatcagaacggctctgtcatagggagactcggaggcgccctccagccccgcctgcgagggctgcgggccgaggtcgcggtcgcggcaccgcagctggcagttctgcgtgtccccgagctggggggcgaagggatcgcgggcggacggcgcggaggcggcgggcggcgacgccaannnnnnnnnnnnnnnnnnnggcggtggcatcagcgccaccgcagccatggccgggcggaacgcggggggcgcgggggactccagctcaggccgggcacggagatgcagcgatccaaaaactccggaccgtacagccttgcct

SEQ ID NO: 98901 - DNA, 790 bp, Homo Sapiens
tctgcggggacaacaatggcggggttctgggtcgggacagcaccgctggtcgctgccggacggcgtgggcggtggcgcgcagcagctgatgctgagcgcggcgctgcggaccctgaagcatgttctgtactattcaagacagtgcttaatggtgtcccgtaatcttggttcagtgggatatgatcctaatgaaaaaacttttgataaaattcttgttgctaatagaggagaaattgcatgtcgggttattagaacttgcaagaagatgggcattaagacagttgccatccacagtgatgttgatgctagttctgttcatgtgaaaatggcggatgaggctgtctgtgttggcccagctcccaccagtaaaagctacctcaacatggatgccatcatggaagccattaagaaaaccagggcccaagctgtacatccaggttatggattcctttcagaaaacaaagaatttgccagatgtttggcagcagaagatgtcgttttcattggacctgacacacatgctattcaagccatgggcgacaagattgaaagcaaattattagctaagaaagcagaggttaaatacaatccctggctttgatggagtagtcaaggatgcagaagaagctgtcagaattgcaagggaaattggatacctgtcatgatcaaggctcagcaggtggtggtgggaaaggcatgcgacattgcttgggatgatgaagagaccaggatggttataaattgtcatctcaaggaagctgattcatagttaggcgatgatagactacta

SEQ ID NO: 98902 - DNA, 758 bp, Homo Sapiens
  misc_feature (419)..(419): n is a, c, g, or t
cgcccggaggaccagtcctgaaggacttgtacctcagctggggaaccgtcctagaaagagatggccactatgctgtagctgccaaatgctatttaggggccacttgtgcttatgatgcagccaaagtttggccaaaaagggggatgcggcatcacttagaacggctgcagagttggctgccatcgtaggagaggatgagttgtctgcttccctggctctcagatgtgcccaagagctgcttctggccaacaactgggtgggagcccaggaagccctgcagctgcatgaaagtctacagggtcagagattggtgttttgccttctggagctactgtccaggcatctggaggaaaagcagctttcagagggcaaaagctcctcctcttaccacacttggaacacgggcaccgaagggcctnttcgtggagagggtgactgcagtgtggaagagcatcttcagccttgacacccctgagcagtatcaggaagcctttcagaagctgcagaacatcaagtacccatctgctacaaataacacacctgccaaacagctcctgcttcacatttgccatgacttgaccctggcagtgctgagccaacagatggccccctgggacgaggctgtgcaaggcgctccttcgggcggtggtccggagctatgactcagggagcttcaccatcatgcaggaaagtgtactcagcctttctccctgatggctgtgaccacctaagagacaagttgggggacatcaaatccc

SEQ ID NO: 98903 - DNA, 684 bp, Homo Sapiens
ggggactacagttgccggtggcttctgagtgacatcggtggctggcggattgtggctgctgttacgaagttgctgttggtgagcgtggcaactgggcgaggcaaggttttggttgacatctgcagctgggctgtggacctcagctggatgttgggcacggtgaggactgctgggcctctcgggttttgggacaggtgcagcccattgtctgtcagcagtgctgcattgctcctgttagagtaagccaccagtggtacctcgttcctcgcgtgcactagccaccttgctccaggtgcgcgcagcaagctagcctcctctgagtacccctccatgctgtggccagggacccctctgtcggggctctggggactggggtgccgtggagggcctggctccggcagcgaggtggaactcaggctgagccccggtgcatggcctgggaggcttgaagggagcactctgagggactcctggctgggcttctgtcccctctggccgtggctctccaaggtgaactcgttcaccctctgccggcgcctgttgaagagctggacgccacgggaattggagctgggaggggtggtcagctgggctgcaatctgctggctccgcgccttggcttctttcagatccttctccgtgaggctagtgctccggcccaacgcgccaaccgcatcacccgtt

SEQ ID NO: 98904 - DNA, 790 bp, Homo Sapiens
gtgaagagggtgctctcttgcctggagttccctctgctacggctgccccctcccagccctggcccactaagccagacccagctgtcgccattcccacttctggtcctgccacctcctgagctgccttcccgcctggtctgggtagagtcatggcctcgagcacaggtgaccggagccaggcggtgaggaatggactgagggcgaaggtgctgacgctggacggcatgaacccgcgtgtgcggagagtggagtacgcagtgcgtggccccatagtgcagcgagccttggagctggagcaggagctgcgccagggtgtgaagaagcctttcaccgaggtcatccgtgccaacatcggggacgcacaggctatggggcagaggcccatcaccttcctgcgccaggtcttggccctctgtgttaaccctgatcttctgagcagccccaacttccctgacgatgccaagaaaagggcggagcgcatcttgcaggcgtgtgggggccacagtctgggggcctacagcgtcagctccggcatccagctgatccgggaggacgtggcgcggtacattgagaggcgtgacggaggcatccctgcggaccccaacaacgtcttcctgtccacaggggccagcgatgccatcgtgacggtgctgaagctgctggtggccggcgagggccacacacgcacgggtgtgctcatccccatcccccagtagccactctactcggccacgctggcagagctgggcgcagtgcaggtggattactacctggacgaggagcgtgcctg

SEQ ID NO: 98905 - DNA, 1186 bp, Homo Sapiens
  misc_feature (64)..(99): n is a, c, g, or t
  misc_feature (894)..(952): n is a, c, g, or t
tctaaaaggaggacaggagggaacagacctcggctgtgtggggagggtgggcgtgacttcagannnnnnnnnnnnnnnnnnnnnnnnnnnnnnnnnnnnggccttggttcctccagcaatgcctgcctgaacaaaggccgttagggaaatccaactccagggttaaagaaaggcagagattgggggggcttggggtagagaggacagtttaggacccaaggtggtcttggagaggaggtgtggagtggaggggtcagcaggggggttgggttccagacagagtggatctggagtctgaaggagaggagtgcgctagagcattctggggtggggcttggaagggcgctgagggcagggttctagaaggggcgaggctttaagcgaggcagaatggtgggctccagagtaggtgggtcttggattggtaccagagcctatggaaagggtgtggcttggaacatttgggagactgagcttgattctaaaggggacagatcttgagcaaggcaagaagtgggattcaggaatgggccaagccaggcttccagacagggtggggcttagaatggggcttccatgtgtggtttcagaaagggcagcccctccccatggtgcagtgaagaaaatgtattacaatggctgggtttgggcagtggagaggtgggacttggataggatggcttccagatgggttacgttaggggtggggggagaatggctctggctacgacttgggacggaagtggcctgagaagagtcgagtgatatggcttgtagggtgaggcgctgggatccagagagaagcaccccaccacacacactccttccccacttccctgtgatgaaacagctaggttaataggaggacagaaccaacgggtctgtgggactggnnnnnnnnnnnnnnnnnnnnnnnnnnnnnnnnnnnnnnnnnnnnnnnnnnnnnnnnnnngggtggttggaggcctggtctggagcccctatcctgcaccctctgctatgtctgtgatgtcagtagtgcctgtgatcgtgtgttgccattttgtctggctgtggcccctccttctcccctccagacccctaccctttcccaaaaccttcggtattgttcaaagaacccccctccccaaggaagaacaaatatgattctcctctcccaaataaactccttaaccacctagtcaaa

SEQ ID NO: 98906 - DNA, 728 bp, Homo Sapiens
tgaagatggcggcgggaacctggtcgacgtctgcgcgccgtcgctgcggatgcgaaccagtggtgtccgtggtgtgcgctgtgtccagtgtccggggcgcggtgccattgagcgcgcctgtcctcgagtccccgagccgcggagcccgcccgcgcccctcggtgcctgccccgcgtccctcgtccagtggcgcggctctgcggactacttcgtgctggtggcgttcgggccgcacccgcgcgggagtggggaaggccaggccagattctgcagcgcttcccagagaaggactgggaggacaacccattcccccagggcatcgagctgttttgccagcccagcgggtggcagctgtgtcccgagaggaatccaccgaccttctttgttgctgtcctcaccgacatcaactccgagcgccactactgcgcctgcttgaccttctgggagccagcggagccttcacagcaggaaacgacgcgcgtggaggatgccacagagagggaggaagagggggcatgagggaggccagacccacctgtctcccacagcacctgccccatctgcccagctgttttgcaccgaaagacgctggtactggttgtcgcgacgtcgaccacacggaggtgtacaggaacagccttggcctcatctatgccatccacgtggagggcctgaatgtgtgcctggagaacgtgattgggaacctgctgacgtgcactgtgcccctg

SEQ ID NO: 98907 - DNA, 685 bp, Homo Sapiens
ggagatcacagatggggaagaggaagggggagacaagatgaccaagacaggaagccaccccaaacttgaccgagaagatctttgacccttgcctttgagcccccaggaggggaagggatcatggagagccctctaaagcctgcactctccctgctccacagctttcagggtgtgtttatgagtgactccacccaagcttgtagctgttctctcccatctaacctcaggcaagatcctggtgaaacagcatgacatggcttctggggtggagggtgggggtggaggtcctgctcctagagatgaactctatccagccccttaattggcaggtgtatgtgctgacagtactgaaagctttcctctttaactgatcccacccccacccaaaagtcagcagtggcactggagctgtgggctttggggaagtcacttagctccttaaggtctgtttttagacccttccaaggaagaggccagaacggacattctctgcgatctatatacattgcctgtatccaggaggctacacaccatgcaaaccgtgaaggagaatgggacactgggtcatggcctggagttgctgataatttaggtgggatagatacttggtctacttaagctcaatgtaacccagagcccaccatatagttttataggtgctcaattttctatatcgctattaaac

SEQ ID NO: 98908 - DNA, 791 bp, Homo Sapiens
tggagtcatagtcatacaccaggaacttgagagctcggtgaacatcacagctgcatagggaatgcagggacaggcggaacggctccccagctggggttcaggttgttcttcaccacctcagttctccagacgagctgatcactttggtcctcgttggtcttatagatttccatgaaagggtcagacttgctgaacagatccttgttgtccagcttgtaggctctgaaggtgagttgcacatagtcgtttgtgcctgatacctcctcggccacgatcgtgatggtggacttgcccgcagtcttcccattcttcagcaataatggcttagtgaccttggtttgtgacacaatctggcccaaggtgcactccgtagagccgaggaaggtatcatttcgggggctggtggctccgtcctcggcatcgaacacgtggaactgcaggggctgcttctcctcaaaaaaatactcaagggccagcacccgggagaagacagggctggaacaggagcgaagcacctctgtgcgctctacctccacccactgctcatcagagtagagcttgagcagcacgcaggggtggggtttggtgagtgtgtcccggtccaggaggccatggcaggacacccgcagctccacccgagaggcccccagcgtcatggttgggggctcaggcacccatcccatctcagggtccgacatgtcactgggctctcggtcgggggctcctctctccggctctctggacctggacctgactcccttgctgctccagccgctggcgccggctccagc

SEQ ID NO: 98909 - DNA, 894 bp, Homo Sapiens
cccttggattagtcaagactcatgatcacccagggtaccgtagaggacacgatggaagagccaatggcataggcttggtttcgtgaagaagtcacagccaggtcttcaattggcattagcacgttgatggcttcctggtgggtggcccggtacccagtgcatctgaatgggcaagaaggaggtaaggcctgacacaatccacaccatcagaatgatcacccgggccttattcttggtcagctaggctctggtacttgaaaggtgaagtaatggcaaagtagcgatccactgcgatcacgcacagggtctcaatgctggccgtgacgcacagcacatcaatggaagtccaaaactcgcaccagaagttgccaaaagtccacattggtcaataagaatatgggcggccccaaagggcaccactgccaggcccatgaccagatcagcacaggccagtgaagtgatgaagtagttggtgaccgtctgcagacgctcgaactctggcaaatcggctcgtgatgaccagcacattgccaaacacgatggccaggacgatgagagacatgacgatgcccatgcccaccacccacacctcgtgccctttgctgcgtgacagtcgtggtccggcgcatggcttcacattgggtgccagcaagaaggcgctgccgttcccagggttgccccatggcagcgcagtccgtggcaggtaagcagcactggactgggggcagccaatcagcaggcggacccacggcggggctctgcgggccagtcgagcggacgcctggaagccatcattcaccggcatgtggtgtgggtgtggtaggggacatcagtcctgcacactcagcattgtcggctgctaggggctcacggtgcctgccagttccagcccgt

SEQ ID NO: 98910 - DNA, 981 bp, Homo Sapiens
ggggaaaaaggcctttgaacgcatcaacagcctcacattcaaaaaatttctggatatgaaggcgcggctagaggaagccattctgggtaccatcggagctcgacaagaaatggttcggcgaagtcgtgagaggagcccgttgggaatccggagaatgtgcgctggcggaagagcgtcacacactggaagcaaacctcagaccgcgtggacaagaccaaggatgaaatggaacacgaggccttggtggaagggaacctggcaaccgaggcaagcctagtggttctggacacactggagatcatcgtgcagacggtgatgctttcagaagcccgggagagcgtcttggggccagtgctgaaggttgtgctgtacagcctgggcagtgccaagagtgccctcttcttgcagcatggcctggccacccagaggacccttgtgtccaagttcccggagctgctgttcgaggaggacacgaagctgtgtgccgacctgtgcatgaggctcctacgacactgtggcagccgcatcagcaccatccgcacgcacgccagcgcctcgctgtacctgctcatgcgacagaacttcgagatcggccacaactttgcccgtgtgaagatgcaggtcaccaatgtctctctcgtccctggtgggggacgacgcagaacttcagtgaagagcacctgcgacgttcactcaaaaccatcctcacctatgctgaggaggacatggggctgcgggacagcaccttcgcagagcaggtccaggacctgatgttcaacctgcacatgatcctgacggacacggtgaagatgaaggaacaccaggaggaccctgagatgctcatcgacctcatgtacagaattgcccggggctaccagggctcaccggaccttcggctgacctggttgcagaacatggccggcaagcacgcgcagctgggcaaccacgccgaggccgcccagtgcatggtgctcgcggccg

SEQ ID NO: 98911 - DNA, 1228 bp, Homo Sapiens
cacatactgatacacaactctaccaggggcgggccccggcccggaattctcgggatggttgagggaaggggccgtgcccggtgccagcccaggtgctcgcggcctggctccatggccctggtcacagtgagccgttcgcccccgggcagcggcgcctccacgccctgtggggccctgggaccaggcggtccagcgaaggcagtcgactccagcgaaggcagagctttgctggtgctccgtggggctgtccatgggactgcaggatggaggggacaatgatgatgcagcagaggccagttctgagccaacagagaaggccccgagtgaggaggatgctccacggggaccagacagacttcgggcaaggatcccagagtcccctagaagcaggaggagcagaggcagcacctgctacctcatggtacagtctgctgaggccgtcaggatgacatccgcctggcagcccagctggaggtcaccccggcctccccggctccgctacctgctggtagtttctacacgagaaggagaaggtctgagccaggatgagacggtcctcctgggcgtggatttccctgacagcagctcccccagcgtgcaccctgggcctgggcttgcccctctggagtgacacccaggggtacttacattggagacgggggccttcaccttgaacctctggggggcaaaagcccggatctctaaggccatccccctctaaaaaattgcggtccaatacttccacgatttgccttcagtcatttcagggtcgttctacgcagccctctttgctcccgtgctgctattgaccgtctcaccaaagctggacctgccgcgtttagcggcaagtatcggccgggccgtttcagtctgcccaagtgcgggctcgccggatgtccgggaagttagaagcacacgactcaggagcgtcccctaccccatcatactagttcactaagcgtacataagacgatcgaatgagatccaacacgaatccaactattcagaccactaccgaatcactaggttagtactgttcaaagatctactcgtcttgtctcacgacgccttacactctagccaaagcacgtcacccgtcccacccactgttatgacaatggttctaacgtgctccattcctgaccgacgatcgcaataaagacccataggcagcatggttgctcgctctcttggcggcgtcgtcgtcgctctacaaatcacccatatg

SEQ ID NO: 98912 - DNA, 921 bp, Homo Sapiens
aactgactcggagcgaggagacccgagcgagcagacgcggcctggcgcccgccctgcgcactcaccatggcgatgcatttcatcttctcagatacagcggtgcttctgtttgatttctggagtgtccacagtcctgctggcatggccctttcggtgttggtgctcctgcttctggctgtactgtatgaaggcatcaaggttggcaaagccaagctgctcaaccaggtactggtgaacctgccaacctccatcagccagcagaccatcgcagagacagacggggactctgcaggctcagattcattccctgttggcagaacccaccacaggtggtatttgtgtcactttggccagtctctaatccatgtcatccaggtggtcatcggctacttcatcatgctggctgtaatgtcctacaacacctggattttccttggtgtggtcttgggctctgctgtgggctactacctagcttacccacttctcagcacagcttagctggtgaggaacgtgcaggcactgaggctggagggacatggagccccctcttccagacactatacttccaactgccctttcttctgatggctattcctccaccttattcccagcccctggaaactttgagctgaagccagcacttgctccctggagttcggaagccattgcagcaaccttccttctcagccagcctacatagggcccaggcatggtcttgtgtcttaagacagctgctgtgaccaaagggagaatggagataacaggggtggcagcgttcactggagcccatgacaatgcttctctgtgactcaaccaggaattccaaagattcaagccaggagaaggttcttggtgatgcaggcatgtgactggacaacctacagtctctgcttgtcctatcctcaggagcatcgccattgc

SEQ ID NO: 98913 - DNA, 967 bp, Homo Sapiens
aaagtcaggctggtacggcccggatttaggatacagaggctgcagccacccagccccgaagcagggcccagcgagacaggtcccagccccaagcgtgacccagctgcagagaagctgagacggtgattcggactgactggactctggcctccaggtgtctgcacctcacactggacccacctggagactccacgggctcccggcagctccggctgcttgggtggatccgggtgcccgcaggggctgtgggagggccccggggcctgcactgctcccccgatggcctgctcttcctcacggccggggctgcaccctgtgtccacgtgctagatctggagggacgccccatctgcctcctgccctgccgcactccggggagcggggccttcgttccagaggacgtggctgtgacagcgtcagggcttgtggtggtcagcgatcccatccatggggctgtccatgcactccagcacacagcccgggaccccgggggccactgggtgacagtgggcaccttcctgtctccccgagggctggctgtggatgccctcaaccgcctcctggtgacggactacttgcctggggctgtgcacagcttctcgttgggtcctgcttgggagcccctggccccagcctccatgctgggtctggagggcccctgctgggtgggcccagggcctgatgggggccttgctgtgagtgaggagtttggggatgtgaggctgtttggcagtgcccgccaacccctgggctccctggggggctggacggggcacactttcggctgcccagcgggcatctgctccaactcagagggcaatgtcatcgtggcagacgagcagaggcgccaggtgacctgtttccccgggctgggccaccatctgcctggtgtcagaggggcttgcgcaagccctgggaagtgggctgtgcacccagggccagatccaggtggatgatgccacgaaaa

SEQ ID NO: 98914 - DNA, 744 bp, Homo Sapiens
gttctgcctgggcgctctccgccggtgcctcactggttatagtgctatacaggaaacctggcagcgccgtgagccgcagcggtcgaggagggagcgcgggacgccgagcccacgcgcgcctgccgggacaagtggagacgaggccggcgagcggacgccccgaggttggcgaaggagctgtggccgggtccccttcttatccagcccgagacactgcgctccgtgtgggcgtccctgcgctgggaatccctctcggagtttttccagtgcccggcctgggttgctccgggaaaggccctgtttgggggatggtgggcccggagctggcaggtctacaatccggttggaatgggctcgcagttgggtgattcagggtgccaagtgaccatccccgcgaactgggaacgcccgcactagacaaccagccccagaccggcattcccagagcctgcaggcgggagggacagcagggactccgggacagcaaatccccgggggagaagggaagggggaaggcgggaccaggggaggcccaccctccttgggactccggtagcgaccagaccagagccccttcagacgcaggccttcctggctccggaccccggcttactgctccggtcctcgtccaatgccccccaaggtcccaagaagaggcattcaggtacctacctcgccccgcccagacgcaagctacattgggtattgggtgacagcactccttgagcgtcatttgtacctatt

SEQ ID NO: 98915 - DNA, 1100 bp, Homo Sapiens
aattctcgggatgcgggacgccgagcccacgcgcgcctgccgggacaagtggagacgaggccggcgagcggacgccccgaggtgcccgggcaggcagtgggccgccgagcgggagttgaggttggcgaaggagctgtggccgggtccccttcttatccagccctgagacactgcgctccggtgggcgtccctgcgctgggaatccctctcggagtttttccaggcccggccgggttgctccgggaaaggccctgttgggggaggtgggcccggagctggcaggtctacaatccggttggaagggctcgcagtgggtgattcagggtgccaatgacctccccgcgaacgggaacgcccgcactagacaaccagccccagaccggcattcccagagccgcaggcgggagggacgcagggactccgggacagcaaatccccgggggagaagggaagggggaaggcgggacaggggaggcccaccctccttgggctccgctagcgaccagccagcgccccttcagacgcagccttcctggctccggaccccggctttctgctccggtcctcgtcccaatgccccccaaggtccccagcagaggcattcaggttcctcctcgccccgcccagacgcagcttctttgggtatgggtgacagcactcctgagcgtcgctgtccctattcgctgccgttgccagctccgattccgcgaaacctctccggcaccacctcggaagccccgccccaggcgatggtccgggcctaacctgccggccccgcccacccgggccttggggctcctgaggcccgcccagcagacgtgagtgcgctgcgggggcccggggggaaaggggcgccggggcactgtccacccttggggggtggtgggctctgggcagcttcgagacccccccctccggggcccaagggggcttacgggcctccagcggaatcccccttttccgcggacaggggcaactttgaagaaaacggggcgaaagggccccccaccgagacgagagcggggagttggcaccgccgcccacctgctgggacaccctcaacagttcgcctgcggccccgccgccagtctcgacggcct

SEQ ID NO: 98916 - DNA, 918 bp, Homo Sapiens
  misc_feature (783)..(791): n is a, c, g, or t
ggcagcgcgactgcgggtggcgcacgaccagggcgcagaccttggcgcgcgcggcccatggtagtcggggctgctgcggccggcgccggtgagcgaggtcatcgtcctgcattacaactacaccggcaagctccgcggtgcgcgctaccagccgggtgccggcctgcgcgccgacgccgtggtgtgcctggcggtgtgcgccttcatcgtgctagagaatctagccgtgttgttggtgctcggacgccacccgcgcttccacgctcccatgttcctgctcctgggcagcctcacgttgtcggatctgctggcaggcgccgcctacgccgccaacatcctactgtcggggccgctcacgctgaaactgtcccccgcgctctggttcgcacgggagggaggcgtcttcgtggcactcactgcgtccgtgctgagcctcctggccatcgcgctggagcgcagcctcaccatggcgcgcagggggcccgcgcccgtctccagtcgggggcgcacgctggcgatggcagccgcgggcctggggcgttgtcttgctcctcgggttcctgcccttccttgggctgcgatctcctggcttccctggagcctttgcttcactggtcttgcccctcttccacaaggcctaacgggcttcttatgcacggccccacccttgcgccacaccctggccaccgctcgttgcttacccctacatccggcctatccccctccactactaaatacctatgtttcgcgttcgtcgctcatccatcccttcgctattttttnnnnnnnnntttcttcctgcctttaaggtccccccccgccgcattccttgctccctatcagccccctccctcccctatcgatcccacgccactttttggtttccttcccccacttttagatccaaccctacgcgtc

SEQ ID NO: 98917 - DNA, 504 bp, Homo Sapiens
gcacgggggcgctggtgaggtcccctggaccatccaggtgctagggggcagtgaggggacaccccctccccgcctttacctcacttccaatgctgccttgatctctgtctgggaggggggagtgaaggggccctagccccctgcactccgccgcctcagagccatgcggttaattcctgacttagtttatttttgcaaaacgtcgatctcctcctcccccgccccgcatccgcgaaggcttttaatgggaggggcgtcaaagctcaaaactgttttcctctctcctcccccctccagttgtaaatgccacttcatgaggggaggggcgaggggaagcccacccctgcatgcttctggctggagcacctccctggggagtcgggggattgggttgtgggcagtccccatggccgcctggagaagccgctggggcccgggggtgtggggcggtgtggcgggcgcacactgtatgtacctataataaaccctttggctttgacggtc

SEQ ID NO: 98918 - DNA, 714 bp, Homo Sapiens
ggcagactggtttctgacagtgggcaccctgggcagggaagctgggcagggctgctgaagtctggtgggagccctggatcttgtgaactctcacttctaggagggactgtgacccccacttctaggaggggctatcctctttctgctaaccttcagcctgctgtgcattcctgttagaagtcatagctactgtcatttgtgctggtggaactaggaaagcagtgttcctctcaagatattatggggtcccagggagatgcagtgtccagggaagcagaggcagcagcacagctgcatggaagaagtcagggtggaatccacacagagcgcattcccaggtgagcatgtaggcccaggggcgtgggctgtaattccttatgtattaaaataaagtagattctgtttcatagtcaccagctactgaagtcagcaatatatacaaaaatatacattagcaaagcacaacttcttcttctgtctcaaatgtcttgttgctcctaccaattacttgccctgcttaatagatactcttcacaatggttaactcagtatactgtaggtcatacattagtagaaacatgctcttataatgagcgtgatcatggtagggtgcccaggccattacactccaagcccagatgtctagggaagatatatagcggtcgggtggccaattggcagggaatttggaacctgagggccagtgttcctcct

SEQ ID NO: 98919 - DNA, 794 bp, Homo Sapiens
cgcggctggtgcgcttgagaagcgatggcggcggcctgaactcacctaacaccgcagcagcaaccgggcccggccaggttcggcgtaccgtgagtgaacgatttagaaatctggactggccagtgacctctgggcttgccattccagcctggtataacctctggctccatgggcagctactggctcctacagaccggatgaagcagactggagacacaagtggagaaaacctccagctggcaaatcctcagagtgtaggcctctggctgccagtcctgcccagcctgcctcatggagaggatgaattggctgagcagactggcctcccggggccctgggcaccgtatacctcaaggggccaatctccaaaccccagtcatggctgatcccgagacctgcctcatggtcttcaagaatcactggtcccaggtggtgcgaatcctggagcggcaaggccctcgggcagctcctgggggtgcagacgatctcagtgctgtgcgcaaccacacttaccagatgttgacactgctggcagaggaccgtgcagttccctcggaccccacaggccctgggcccctgctggagtttgctctgcacgaggatctgctgacccgtgtgttgacatggcagctgcaatgggatgagcttggggatggggtcgaggaacggcgggctgagcaactgaaactatttgaaatgctagtgagcgaagctcgccagccactgttgcggcatggtccagttcgtgagggctctgctcaccctgctggatgcctgtggcccgcctgtgccaa

SEQ ID NO: 98920 - DNA, 854 bp, Homo Sapiens
ctcttgacgagaagagagaccaaggatggccaagccaggggctgggccagaggtgccaacatggggaaactgacggctcggctcgtgaaaggtgaagtaacttgtccaagatcacaagagctggtgaacatcaagtttggtagctatggcgaaggctgggaaactgcagcctgacttgggctgccctgatcatcctgctgctccccggaagtctggaggagtgcgggcacatcagtgtctcagcccccatcgtccacctgggggatcccatcacagcctcctgcatcatcaagcagaactgcagccatctggacccggagccacagattctgtggagactgggagcagagcttcagcccgggggcaggcagcagcgtctgtctgatgggacccaggaatctatcatcacacctgccccacctcaaccacactcaggcctttctctcctgctgcctgaactggggcaacagcctgcagatcctggaccaggttgagctgcgcgcaggctaccctccagccataccccacaacctctcctgcctcatgaacctcacaaccagcagcctcatctgccagtgggagccaggacctgagacccacctacccaccagcttcactctgaagagtttcaagagccggggcaactgtcagacccaaggggactccatcctggactgcgtgcccaaggacgggcagagccactagctgcatcccacgcaaacacctgctgttgtaccagaatatgggcatctgggttgcagacagagaatagcgcatggggaccagcatgtcccccaaactgtgtcttgaatccatggattgtgtgaaactggagcccccccatgctgcgggac

SEQ ID NO: 98921 - DNA, 856 bp, Homo Sapiens
cacggctgtcgcgagagcccggggcgagtgggcctctgctcgtgggtggttctcgtggaggtcagctcccgcgtgtctccgctcgacagggtgcttgggcagagcccatcgggtaggcgcgggccatggcgcagtacaagggcaccatgcgcgaggcaggccgtgccatgcacctcctcaagaagcgcgaaaggcagcgggagcagatggaggtgctgaagcagcgcatcgccgaggagaccatcctcaagtcgcaggtggacaagaggttctcggcgcattacgacgccgtggaggccgagctgaagtccagcacggtgggcctggtgaccctgaacgacatgaaggcccggcaggaggccctggtcagggagcgcgagcggcagctggccaagcgccagcacctggaggagcagcggctgcagcaggagcggcagcgggagcaggagcagcggcgcgagcgcaagcgtaagatctcctgcctgtcctttgcactagacgacctcgatgaccaggccgacgcggccgaggccaggcgcgccggaaacctgggcaagaaccccgacgtggacaccagcttcctgccagaccgcgaccgcgaggaggaggagaaccggctccgagaggagctgcgccaagagtgggaggcgcagcgcgagaaagtgaaggacgaggagatggaggtcaccttcagctactgggacggctcgggccaccggcgcacggatgcaggattgcgcaaagtggcatcaacggtgcagcaagtccctggaaggaagggcgctgcaaggggcttggcaatgaacattcctggagcttgctctccgcacgagcgtggagcagctcatgttcatca

SEQ ID NO: 98922 - DNA, 960 bp, Homo Sapiens
gctgtcaccactcaccgctcataacctcaagggggtggggaccccagggctggacacaccccaccgtggccccagagctcagccggtcgcacggacggacagttggaagccggaccccagagcctgaggtgggcagtgtgccaggtcccttgcggcctcctcaagccctgtccaggctatgggcatcaagacagcattgccggcggctgagctgggcctctactctctggtgctgagtggggccctggcctatgctggccggggcctccttgaggcttcacaagatggggcccacaggaaggccttccgggagtctgtgcgacctggctgggagtacattggccggaagatggatgtggctgacttcgagtgggtgatgtggttcacctcctttcgcaacgtcatcatctttgccctctccggacatgtgctgtttgctaaactctgcacgatggttgccccaaagctccgctcctggatgtatgctgtgtacggggccttggctgtgatgggcacaatgggcccttggtacctgctgctgctgcttggtcactgtgtgggcctctatgtggcctcgcttttgggccagccctggctctgtcttggccttggcttggccagcctggcctccttcaagatggacccccctaatctcttggcagagcgggtttgtaacaggcacttttgatcttcaagaggtgctgtttcatgggggcagcagcttcacagtgctgcgttgcaccagctttgcactggagagctgtgcccaccctgaccgacactactccttagctgacctgctcaagtacaacttctacctgacctacttcttacttcgggcccatcatgaccttagatcgcttccatgctcagggtgagccagggtggaagccagtgagacgcgaagggtgagctgtggcacatccgaacccaggcaagcctaaagcgtggtggccataa

SEQ ID NO: 98923 - DNA, 951 bp, Homo Sapiens
gaacattgaggatggcgcgtgcccgcggctccccgtgccccccgctgccgcccggtaggatgtcctggccccacggggcattgctcttcctctggctcttctccccacccctgggggccggtggaggtggagtggccgtgacgtctgccgccggagggggctccccgccggccacctcctgccccgtggcctgctcctgcagcaaccaggccagccgggtgatctgcacacggagagacctggccgaggtcccagccagcatcccggtcaacacgcggtacctgaacctgcaagagaacggcatccaggtgatccggacggacacgttcaagcacctgcggcacctggagattctgcagctgagcaagaacctggtgcgcaagatcgaggtgggcgccttcaacgggctgcccagcctcaacacgctggagctttttgacaaccggctgaccacggtgcccacgcaggccttcgagtacctgtccaagctgcgggagctctggctgcggaacaaccccatcgagagcatcccctcctacgccttcaaccgcgtgccctcgctgcggcgcctggacctgggcgagctcaagcggctggaatacatctcggaggcggccttcgaggggctggtcaacctgcgctacctcaacctgggcatgtgcaacctcaaggacatccccaacctgacggccctggtgcgcctggaggagctggagctgtcgggcaaccggctggacctgatccgcccgggctccttccagggtctcaccagcctgcgcaagctgtggctcatgcacgcccaggtagccaccatcgagcgcaacgccttcgacgacctcaagtcgctggaggagctcaacctgtcccacaacaacctgatgtcgctgccccacgacctcttcacgcccctgcaccgcctcgagcgcgtgcacctcaaccgcatcacccgtt

SEQ ID NO: 98924 - DNA, 935 bp, Homo Sapiens
cgacttagcaggccagtggcagcagcagccatggggaagccgggcgtggaggcagcaccgggctcggagctggccaggttccctagcctatggagcacgcagccaccacaggccccaggcctggacctccctctcggcgggtggagaatgttgtgctacgagccaaggactggctgccaggagctcctgggggcaccgcagtgtgggccaccagcttggaagcagaggtcccaccagatctagcgctcaataaggagcagcagctgcagatctccaaggagctggtcgacattcagatcacaacccaccacctacatgagcagcatgaggctgaaatcttccagctgaagagtgagatccttcggctggagagccgggtactggagctggagctgcgaggagatggcaccagccagggctgtgcagtcccagtggagtctgaccccaggcatccccgggcagcagcccaagagctcagacacaaagcccaggtgcctggacactctgatgaccacagattccaggtgcagcccaagaacaccatgaaccccgagaatgagcagcacaggctggggagcggcctgcagggggaagtgaagtgggcgctggagcatcaggaggcccggcagcaggcactggtgacgcgtgtgtgagtggccatctcacctggggccccatcctggagcagagagaacccctgatcgtgggcctgctgagcctcacccccgtgtcttcagggcaaccctgggccggcagctgcagggagcccgagagggaggccagggcagccgggcagcgactggccacacaggctgtggtgctgtgcagcttgccaagggcaactccgtcaggcaagaggctgaaaatggcccggtgcagctgcagtcaagaaactgaaggatgagtacggtctacgggtgcaaactgcgccccgg

SEQ ID NO: 98925 - DNA, 1311 bp, Homo Sapiens
gggcgatgagagcgggtactgcgaactgccgggcgatgctgtcgctgccgccgtgatacggagagcaacagttccccagcaacaccccttccccgacacaggcacacaccccccgtacaggcacgcacagcccgaccccacagtgcccggctcggctgcgccatcctcgtattggcccaggaagcccatccagacccctgaccacgcagtagcccagataggaaagaagagcctcatgcctgagctcgaggaggcaggcaccatggatctgacaaataactgggcattgatccagcatgcatgaagccctagccagatgccacggggacatacctgtgcaaaggcccaaccagacttgcggctgcggccagggcactattgaagcgactgctggtcattccatgtgtggatcaaggaccagagaaggtttccaagcgagacccaactggtgaccggtagcctatgggccattgaaaggcgaagcaagaaatcgtttgaggaattccctacataccacacccgacaaacgtagattccaagcaaacttagtaagcgtatattgagaccatatcacgtcatcggccaacaatgacacctttaagcaggacaaggacgtttacgatgccacagcttacttgcagtacttatcccatgcacaaccgcctttgtaaaagaggcacaaacacgtcaggcacgagacccgtgcgacattgaacccattgccctgggttattgtcggtggatcaccggaatgaaatccacgtgggcacaggaaatccgcgcggcgatagcgcatgggcgacgcgcaacaaccaagtgccagttgcacaccgcaactgacgttggagacggaaacctacatacaccgagtggggccacttcagagagaatcggatcgacgaattggaagccgacgtgagaagggcccgaacgcagatgggacgacgggaaatatgccgccggacgggacgccgcataggaaaacgcgacaagtaacggggagacgccagggaaacccggcggactgtccacgggagctacactcatttccagcagcggaaaacaatgaagtcattccacaatccattccgcagataaggagaccaagcgtattcactaagcgcgcctaacaggcgaaagcaacgtgagaggacggcacattacgcacaacagtatgcattaggacggactgagggagcaagcgggaaagcgcgattcacccatttcgggtccgccgcaatatcggtgttatgagcacgcaaggatactgacgcgtatgcacagtaagacccgagcacattgcaggctgag

SEQ ID NO: 98926 - DNA, 1088 bp, Homo Sapiens
  misc_feature (821)..(821): n is a, c, g, or t
  misc_feature (972)..(972): n is a, c, g, or t
cggtccggaattcccgggatggcccccgcgcggcaggccctggacccgcgcggctcccggggatggtgagcaaggcgctgctgcgcctcgtgtctgccgtcaaccgcaggaggatgaagctgctgctgggcatcgccttgctggcctacgtcgcctctgtttggggcaacttcgttaatatgagctttctactcaacaggtctatccaggaaaatggtgaactaaaaattgaaagcaagattgaagagatggttgaaccactaagagagaaaatcagagatttagaaaaaagctttacccagaaatacccaccagtaaagtttttatcagaaaaggatcggaaaagaattttgataacaggaggcgcagggttcgtgggctcccatctaactgacaaactcatgatggacggccacgaggtgaccgtggtggacaatttcttcacgggcaggaagagaaacgtggagcactggatcggacatgagaacttcgagttgattaaccacgacgtggtggagcccctctacatcgaggttgaccagatataccatctggcatctccagcctcccctccaaactacatgtataatcctatcaagacattaaagaccaatacgattgggacattaaacatgttggggctggcaaaacgagtcggtgcccgtctgctcctggcctccacatcggaggtgtatggagatcctgaagtccaccctcaaagtgaggattactggggccacgtgaatccaataggacctcgggcctgctacgatgaaggcaaacgtgttgcagagaccatgtgctatgcctacatgaagcangaaggcgtggaaatgcgagtggccagaatctttcacaccttttgggccacgcatgcacatgaaacgatgggcgaagtagtcagccactttcatcctgcaggggcttccaggggggagccactcccggaaataccgaattccgggtcttcanaacaagggcgggttcaggaacgtccagcgcaaacctagggaaatgggcctccgtggggctccccttgaaacaggcaacggttcagcaaggcccggggacaaaccggggggggaaac

SEQ ID NO: 98927 - DNA, 725 bp, Homo Sapiens
tgtgaggaagaagaggaggatgaagaggacgacattgatgaccagcagcgcagccaccagatgaagcctcggatggagaggtgctcccagtagatgttctgagggtcaggggcataggacacggtccagttggagatgtgcagggactcgctgcaggatgaggggcgcggctccccacggcaggtgcagccctggcatttacacacgttgaagtccttcaggatgatggcggtgatagtctcattgtggaaggtgacaaaggccatgccaagaggcttctcattcaccttctccttctcccgcttgtagtcttccttcagcttctgctccagctttgtgtagtactcaatggcctccacctgctcacagcctcgcaccacacagcagcagaggtggccacagggcttggggttgatcatggtaggcacgttctccttgctctggaggtttgtgaagtacagctttccccgctcggccttcttcctctctgcatcgaggaacattaggcgagccacgttgtaacacgggcgggcttcgagaactgtgcagttggggtaggcttcctcaaaatgcttcttgatcttttctgactctgcatatttggagattccattgatgaagagggtccgcttcaccagatcatcctccttgtagcgcatcttggaggtgtgtctacgcatgctgtagacggtgagcagcagatacaggaaggcgaaggaggtgtg

SEQ ID NO: 98928 - DNA, 1506 bp, Homo Sapiens
ctggtatggccttggggtccagagtcctcagaggtgggaacggagcctccttgattcgtgccccttagctgcctctggccagtctctcctacagaacaggccagtgcatcctcaacctctctccttccatccgtctcagagcagatgctctcctctccttaagcttggtcctgggctgcaccaccaacatctaagacaagcagactcccctgcctcaccgcagaagcccaagcaccttctcccagcccaggtggctcctctgcagtctcagcctccccaggacctgcccagccctgaagcgctggactgctcatgggatggtcaggcaggtgggggctcagaacactgttgcctctagacacctggtccctccgtaggacccttgccctcccaggcctcctgcagggcccagaggtgtagggtagttaactcctagtggagggaccacactctgtgggtatctcttcagagcctcccccatgcccccagccaacagcccagctggggcaggctcagggagaccctgggacagcgggcatgtgaggactggactgagaccccactggatgtgggctggtgggagcggaaggcggggtctagtcatcaggcctctcttctgggagatcctcgtcaatgggaggtgcaggctggcagcggaaatggtcattccaaatcttaaggaaggtgacgcggaacttctggatgcggaaggcatagacaatggggttcatggccgagttgccgtgcgtgaggaagatggcaatgtaggtaaggatgctgggcttgtggcaggacgggcagaagagggtgatgcagttgaggatgtgcaaaggcagccagctgagggcaaagaggaagaggatgagggccagcgacttggcgatcttcagctccttcccatagtacttctgcgggtcgccggaggaggccgacaccttcttgttgagctgcttgcggattaggtagaagacctccaggtagatgaggaccatgaggagaagcgggggcagcacccacacaaagaagttgaagtagaccatgtactccatgctgatgaccttctcgaactcgcacttgatcacgggctcccccatgctgccgttggctgcccaggcccgctccaccgcactcagattgttccagccaaacataggggtcagtcccaccacgaaggagaggatccagcagccggctatggccaccgccgccctccggggggtcaccaccatcttgtacctgggggagaggagggcagagtgtgaggatctgcctcccagctgcctcgaaaggcccctctgaggcacgcctggcctccaggggcctctaagaggagcaccctcctcttccagggcccggtgagtggggaggtgcatgtcttttgctcgagggctgagtcttcaggatctaagatttagtgcttgccatgcattggcttattctcctggtgaatgagagagccaaagcgtgcctttgggaagcctgccgtggtctggctggagaagcagc

SEQ ID NO: 98929 - DNA, 857 bp, Homo Sapiens
  misc_feature (601)..(601): n is a, c, g, or t
agctgtacggtccgaagtcgttggatcacagacctaatagacacggcctttcctctctgcctctggctttatgtctctttcatcctcctctgcctttcccctgcccttgatcccttctgcaggtcttggctggtttcaggaaacgggtcccatcccatggactcccactctggggagcctgcgctcctgccctgtgggacctgtgacatggttttccgctcctcagctctgttagccacccatactcagcgcttctgcattggccacccgacccaagagatgacatttggagcacaggcatcagttgccactgaaccccagcgggccgcggttgtgccacaagaacaccagggcgtgccacaagaaccccagggcctcccagaccagcaggccagtagatctgctctaaagaggttaacagaggaggtacagctacctaccttcccccagggctcaaaacgttgagcgtcttccccaaacctgtagatcatacttgggacagattctgcccacgcagagatcgcggatcgctgttacctccaggtgcagtggctgcggctatccctacaggaaatgcggcctggataacagaggtccccanggtgttcgcggggccctggacacgttccgaggcgcggctcagagtcccatgtccgaggcggtgggaagccccagcgagcggtgcgggcgctgttcaggactcgcgcgagcgcgtggcggagatggaagcgcagagccggggcctgaagtacgcggggaggtgaaaggggatgggggccggggaccaggactcctctggccccccgggggtaactgccgggccggtgaacgggccccgtccccaaagagcggggccc

SEQ ID NO: 98930 - DNA, 646 bp, Homo Sapiens
  misc_feature (120)..(135): n is a, c, g, or t
  misc_feature (633)..(633): n is a, c, g, or t
ctgcggagcttccttccaggatctgtccttctcagcttccccagccgagccgccaggggtcctgaggaccaccatggcccctgaacactcctggagctttggtgtcagccctgccacccnnnnnnnnnnnnnnnncatggtgagtaactgaggcacagacaggttcaggcacagtcctggtcacaagtggccaccatgcaactctgggccccaggtctctcccagcacctgctctgccctaagcgtgtggggccgggcgctgcactgttgactttatgtcccctgtccccagccttggtgttacttactgcacttgagcctgtctcctggagggaaatgaaggtgagagggacactgtttcatctaagaggggaagctcgggaatgggtttgaggacttaaggggccaggagtcaaggtaaggaaagtgaatggcacagcgaggcgaagctgtgcagccctggtgggtcactgccaccgtccacgtccccaggtggcgtctgacacaaagtgggccaaagtggccctctccagcctgtctgcctcccatagcctccgtggggaaagcactgaggcaggatcagatggaacccagagaagcccatcccccacctcctgcccactcattccttanagacatcagtctc

SEQ ID NO: 98931 - DNA, 790 bp, Homo Sapiens
ctcctttttctccggagggcgctaagtccgtgagcggtggcagtcgcgaccgcgggtgcatccagtttctgcgccctagattttatgtgatctaatccaaagtatcttatcaacttctggctggaattaagattcttcagcttgtctctaaccgaggaagcattgattgggagctactcattcagcaaaacttcagaacgaaagaagccagaaaatattatcaaccctttgagaacacgacacaacgaactttatattttaccacttccttgacatagcttgcaggagaaataacaaggcattgaagaatggcagactgacacggaacagatgaagcaaaggcacctcactggacctcagcaccgctaacagaggcatctgcacactcacatccacctgagattaacgatcaaggcggagcaggggcaaggacttgctcccgaagcgccaatggattcccatacagggaaggatgcaacgagcggctgccttcggagagcatgggctccacagggcaccctattcaacataccacaaccacaatgggatcaccggacagctgaccctcaccttgacaggacaaacacgccagaaggagcgtgtctcgccacggctagcttcagagtaagtcactgctgaggcttgtcagcaagcacctggaacatgtcgaacaacgcagaacagaagctccacattaacggacaagtaatgcagctcttgcctttcagccagcttggaggatcacagtacaatctgctctctttctaccaccaccaatcaccttgcctca

SEQ ID NO: 98932 - DNA, 886 bp, Homo Sapiens
ggaggaagtagaagtgctgagtaagccgagacagagggggaagacggtggggcctccccacctgccccgcagaagatgcagttctttggccgcctggtcaataccttcagtggcgtcaccaacttgttctctaacccattccgggtgaaggaggtggctgtagccgactacacctcgagtgaccgagttcgggaggaagggcagctgattctgttccagaacactcccaaccgcacctgggactgcgtcctggtcaaccccaggaactcacagagtggattccgactcttccagctggagttggaggctgacgccctagtgaatttccatcagtattcttcccagctgctacccttctatgagagctcccctcaggtcctgcacactgaggtcctgcagcacctgaccgacctcatccgtaaccaccccagctggtcagtggcccacctggctgtggagctagggatccgcgagtgcttccatcacagccgtatcatcagctgtgccaattgcgcggagaacgaggagggctgcacacccctgcacctggcctgccgcaagggtgatggggagatcctggtggagctggtgcagtactgccacactcagatggatgtcaccgactacaagggagagaccgtcttccattatgctgtccagggtgacaattctcaggttgctgcagactccttggaaaggaacgcagtggattggccttgaaccaggtgaataaccaagggctgaccccggctgcaccgtggcctgacaggctggggaacgccggacaatggtcccgagtgctggctgcatggcgcacaatgctacgggcaacatcaaatggagccgaaaggctagcccaatcaatcggccatgaaggtctctcaga

SEQ ID NO: 98933 - DNA, 937 bp, Homo Sapiens
gaattcccgggatcgctcaggcggcgccccggcggcgacccacctcctcggcgtcctggcccagagggatgcccaggttcctgagcccctcctgcagctcgccgatgtccaccactccgtccccattgcggtccagtgcctggaagagggtctcgtagcgcgtcgcctgctccgcgtcctggcagcccgcggtgggcagcacgaagtcccgcagccagcgcaacatggtcccagaggcgcaggcggcctggccgaggaagtcacgggagatcgagggctgcggggcgagaccgggaccagcgcgaggccgggctgggcggggcgcgcggcgcaacagcgtttggggcgccgtcggggttgcggctgcggcgcgcagggcgcagggcgcaggagcggagaccccacccgagcccgcgctgagcgcagggtgtggccgtcccgccgctgctggggaggagctcgccgcgctggcctcggcggcactggccgggcccgcctccagagagccggaagtgagggagctgcgagctgggtctcgggaggtgctgtgcggacccggggtcgacctctgcccagttgccagtcccgctgtcagcatgcgggtccgaggaagaggcccccagcaggtccagggctgcagcgtcagcgcgtcggtggcttgggagcggggtcttgaagactggttactccacttaaagaccctctcgggccggagccttggcggtcagcccagagctgcttctctctgcctggaaactgggccatggagggcattgtctctcacggatgtctaattttttcgtggttgcacacctgggatggcgattctgctttaaaaagcagagagttaaatcctaaagcatctattggagcaattataaaacaaaaaggagaaactcctggatttgttgcagaaaagatcaacagccatctgcgt

SEQ ID NO: 98934 - DNA, 1154 bp, Homo Sapiens
ctgctctcagtccctgtctgcgcccgcgcgccccgggagcctacccagcacgcgctccgcgcccactggttccctccagccgccgccgtccagccgagtccccactccggagtcgccgctgccgcggggacatggtcctctgcgttcagggacctcgtcctttgctggctgtggagcggactgggcagcggcccctgtgggccccgtccctggaactgcccaagccagtcatgcagcccttgcctgctggggccttcctcgaggaggtggcagagggtaccccagcccagacagagagtgagccaaaggtgctggacccagaggaggatctgctgtgcatagccaagaccttctcctaccttcgggaatctggctggtattggggttccattacggccagcgaggcccgacaacacctgcagaagatgccagaaggcacgttcttagtacgtgacagcacgcaccccagctacctgttcacgctgtcagtgaaaaccactcgtggccccaccaatgtacgcattgagtatgccgactccagcttccgtctggactccaactgcttgtccaggccacgcatcctggcctttccggatgtggtcagccttgtgcagcactatgtggcctcctgcactgctgatacccgaagcgacagccccgatcctgctcccaccccggccctgcctatgcctaaggaggatgcgcctagtgacccagcactgcctgctcctccaccagccactgctgtacacctaaaactggttgcagccctttgtacgcagaagcagtgcccgcagcctgcaacacctgtgccgccttgtcatcaacccgtctgggggccgacctggactgccctgcactgcccccggcgcatggcccaactactccgacagtacccctttccgcttccgaactgaaccggggccaatctggcccacccttaccccattggcacccctggaaggggaaatttaccccccagtttggaattggggcccccaccctgtccctcctttccgagctttccggggggccgtgcacacccccgtggaaagattggccccctaaagaagcccgtccttaaacccgcgcattcgcaacaacggagaggcgtttcatccacaccttgagagaccataacgcgcccccacgga

SEQ ID NO: 98935 - DNA, 774 bp, Homo Sapiens
cgccccgggagcctacccagcacgcgctccgcgcccactggttccctccagccgccgccggtccagccgagtccccactccgtgagtcgccgctgccgcggggacatggtcctctgcgttcagggacctcgtcctttgctcggctgtggagctggactggtgcagctgtgcccctgtgggccccgtccctggaactgcccaagccagtcatgcagcccttgcctgctggggccttcctcgaggaggtgggcagagggtaccccagcccagacatgagagtgagccaaaggtgctggacccagatggaggatctgctgtgcatagccaagaccttctcctaccttcgggaatctgccactgctgtacacctaaaactggtgcagccctttgtacgcagaagcagcgcccgcagcctgcaacacctgtgccgccttgtcatcaaccgtctggtagccgacgtggactgcctgccactgccccggcgcatggccgactaacctccgacagtaccccttccagctctgactgtacggggcaatctgccaaacctcacccagtcgcaccctggaggggacatcagccccagctggacttgggacccccactgtccctcctccaggcatcctggtgcctgcagtacctctggcagctggcccaggaagagccagcaagagcaaggcatgggagaggggaggtgtcacaacaaacttggaggtaaatgcccccaggccgcatgtggcttcattatactgagccatgtgtcagaggatggga

SEQ ID NO: 98936 - DNA, 819 bp, Homo Sapiens
cgttgttctgggtactacagcagaagggtatgcggaagcgagcaccccagtctgagatggctcctgccggtgtgagcctgagggccaccatcctctgcctcctggcctgggctggcctggctgcaggtgaccgggtgtacatacaccccttccacctcgtcatccacaatgagagtacctgtgagcagctggcaaaggccaatgccgggaagcccaaagaccccaccttcatacctgctccaattcaggccaagacatcccctgtggatgaaaaggccctacaggaccagctggtgctagtcgctgcaaaacttgacaccgaagacaagttgagggccgcaatggtcgggatgctggccaacttcttgggcttccgtatatatggcatgcacagtgagctatggggcgtggtccatggggccaccgtcctctccccaacggctgtctttggcaccctggcctctctctatctgggagccttggaccacacagctgacaggctacaggcaatcctgggtgttccttggaaggacaagaactgcacctcccggctggatgcgcacaaggtcctgtctgccctgcaggctgtacagggcctgctagtggcccagggcagggctgatagccaggcccagctgctgctgtccacggtggtgggcgtgttcacagccccaggcctgcacctgaagcagccgtttgtgcagggcctggctctctatacccctgtggtcctcccaagctctctggaacttcacagaactggatgttgctgctgagaagattgacaggttcatgcaggctgtgaccaggatggaagac

SEQ ID NO: 98937 - DNA, 507 bp, Homo Sapiens
tgtcgcggcagtggtggcttcccatccccaaaaggcgccctccgactccttgcgccgcactgctcgccgggccagtccggaaacgggtcgtggagctccgcaccactcccgctggttcccgaaggcagatcccttctcccgagagttgcgagaaactttcccttgtccccgacgctgcagcggctcgggtaccgtggcagccgcaggtttctgaaccccgggccacgctccccgcgcctcggcttcgcgctcgtgtagatcgttccctctctggttgcacgctggggatcccggacctcgattctgcgggcgagatgcccctgggacacatcatgaggctggacctggagaaaattgccctggagtacatcgtgccctgtctgcacgaggtgggcttctgctacctggacaacttcctgggcgaggtggtgggcgactgcgtcctggagcgcgtcaagcagctgcactgcaccggggccctgcgggacggccagctagcggggccgc

SEQ ID NO: 98938 - DNA, 1082 bp, Homo Sapiens
tagcagggcccagggccgacaggacatccacatcctgcagaaccttctgggcatccagcaggtcccccagaagcgcctgcagcctccgtggggatggcgcctgtggcgaggagtccgagccgttgggggcatccaaggcccagctgtctgggagacctttggccacggtccagctggttccggagctcagcagacagcccagagaagcgcctggcacgcgcagcagcactgcccactgcagacagcatcccggtagcccatgcagggctcccttcgtgactctcaggcacagtgagaatccggcaccagcgtccacccgagcccggcgtgcaggtgagctgctccaggaggcaaggagccaagcagcagctcctccatccggaacaggggattgccccctaggcggctccagggctcctgacccttgtggaggccagactgtgaatccagggcagatgagggaccaaaagagcaggtggtagacctcgggcgggtccacacgggcggccaagagtgcttgggccgtgctattgggcagcgacaagttttgcgtcaggaaacgccagagctcctgcgggtttctggccaccgagtccagagagaaggaagacactgtggatctgtccaggtggctccccgaggtgcccgggcccgcactgagggcctccagatgctggcgtagggcctcgagctctgagcccaggctgggccgcgctgggtcaaacaggttgccttcctccaccacgcggtccaggcgctcaagcagctgcgtgaccgtggagttggcgtactgcaggaagccgaactcgtctcgctggccgtccgggcacagcgattgcatgacaggcaggatgccggcagacgtcaggggcgccgctgtgtagaaggagacttccttcacggagatggtgggcttcttctgtcgcagccccagcaggataaagaacagcaccagggggatgaagatctcgaaggccaggacccacgggctccggcgtttgagcgtcacgttcttccagagcagcagctgcagctggtgcaggaagcccatggcggggccacgctccgccgcctcagcgccg

SEQ ID NO: 98939 - DNA, 1102 bp, Homo Sapiens
  misc_feature (895)..(895): n is a, c, g, or t
ggcagatgctgtggcacgggagggtgggacgggccggaattcccgggatccgaatatggggagaaaaacgagccgcgtgcagcaggggccgcctcggtcccctgcctgctccgcccacggcgagcgttcctggggcctcgagtttccccccttccgctggctgctcggaatcgcgggacggacccacctggccgccctgcctcccttccagtgggtcctggccttcgagatcttcatccccctggtgctgttctttatcctgctggggctgcgacagaagaagcccaccatctccgtgaaggaagtctccttctacacagcggcgcccctgacgtctgccggcatcctgcctgtcatgcaatcgctgtgcccggacggccagcgagacgagttcggcttcctgcagtacgccaactccacggtcacgcagctgcttgagcgcctggaccgcgtggtggaggaaggcaacctgtttgacccagcgcggcccagcctgggctcagagctcgaggccctacgccagcatctggaggccctcagtgcgggcccgggcacctcggggagccacctggacagatccacagtgtcttccttctctctggactcggtggccagaaacccgcacgagctctggcgtttccatgacgcaaaacttgtcgctgcccaatagcacggcccaagcactcttggacgcccgtgtggacccgcccgaggtctaccacctgctctttggtccctcatctgccctggattcacagtctggcctccacaagggtcaggagccctggagccgcctagggggcaatcccctgttccggattggaggtgagggcatcatgtgtgtgggatggggcctgggagtgctgcttggcctctgggggtgcttctgctccgngggggtgaaggaaagggccccctttgggtgacttggagctcctcctggggaaaaaggggggaggggcccccagggggtctatgggcaaggcattgagggggaaataaggcatgttccctggggaacccagggcaggcccccaaaaaccaggccaatgggggtggggggcccaggggtggagggcccttgaagggccctaatatggga

SEQ ID NO: 98940 - DNA, 1145 bp, Homo Sapiens
  misc_feature (797)..(797): n is a, c, g, or t
  misc_feature (879)..(879): n is a, c, g, or t
gctggtaccggtccggaattccctggatggcggcggtcgccaggtctcagggccgggggtacccgagtctcgtttcctctcagtccatccacccttcatggggccagagccctctctccagaatctgagcagcaatgccgtttgctgaagacaagacctataagtatatctgccgcaatttcagcaatttttgcaatgtggatgttgtagagattctgccttacctgccctgcctcacagcaagagaccaggatcgactgcgggccacctgcacactctcagggaaccgggacaccctctggcatctcttcaatacccttcagcggcggcccggctgggtggagtacttcattgcggcactgaggggctgtgagctagttgatctcgcggacgaagtggcctctgtctacgagagctaccagcctcggacctcggaccgtcccccagacccactggagccaccgtcacttcctgctgagaggccagggccccccacacctgctgcggcccacagcatcccctacaacagctgcagagagaaggagccaagttaccccatgcctgtccaggagacccaggcgccagagtccccaggagagaattcagagcaagccctgcagacgctcagccccagagccatcccaaggaatccagatggtggccccctggagtcctcctctgacctggcagccctcagccctctgacctccagcgggcatcaggagaaggacacagaactgggcagtacccacacagcaggtgcgacctccagcctcacaccatccccgtggggctgntgtctccatctgtctccttccagcccccctggcccgttcccccccaggggcaagccgctttgcttgaccccaaagggtcagntggaatctactgggcacctctttctcctctcaatcccctggttgggcctctgccgggggcttcaaaagggaaaaaggggtggcaaaaaagtgaccaggccgagcctatcatctggttcccaaaggggggccaaaaggaaccttccaaattctttggccctccaaagggccttaacaaccttgaatgccctgggaaacacagtgggccctggaaaatgggcctgccccaccccaagaatttggttaggcaaagtgccccttccaaag

SEQ ID NO: 98941 - DNA, 707 bp, Homo Sapiens
ctgtcacacttcatggctcttactccacctctcttgctcctctctgcagggaccatgaccttgggctcccccaggaaaggccttctgatgctgctgatggccttggtgacccaggagaccctgtgaagccgtctcggggcccgctggtgacctgcacgtgtgagagcccacattgcaaggggcctacctgccggggggcctggtgcacagtagtgctggtgcgggaggaggggaggcacccccaggaacatcggggctgcgggaacttgcacagggagctctgcagggggcgccccaccgagttcgtcaaccactactgctgcgacagccacctctgcaaccacaacgtgtccctggtgctggaggccacccaacctccttcggagcagccgggaacagatggccagctggccctgatcctgggccccgtgctggccttgctggccctggtggccctgggtgtcctgggcctgtggcatgtccgacggaggcaggagaagcagcgtggcctgcacagcgagctgggagagtccagtctcatcctgaaagcatctgagcagggcgacagcatgttgggggacctcctggacagtgactgcaccacagggagtggctcagggctccccttcctggtgcagaggacagtggcacggcaggttgccttggtggagtgtgtgggaaaaggccgtatggcgaagtgtgggggg

SEQ ID NO: 98942 - DNA, 866 bp, Homo Sapiens
tcggtaagtcagcaggagaggagcgcctgagtgggacaggaatgacctgtagtggaagttgatggtcgtgagaatgtctcgtcagaagtctacacgccattcccctcgattcttagagtgccggtctcagagtggccgtgtaacttgctgccacctcttcgtaccacgtcgtgctggagaggctccaggcactggactggtagtgtccgataggcaggatgaggacatgctcatcagataagcctcctgttggccagggcaacggtagcaatgtgtgccgatgttgaccaccaaatgtttttccacttcagggctagcaaggcaaaaccagacagggtcctggaggctgaggaggtttgcgaggctgcttaggatgaggagaagatttgctatctctacctgtggatgaacgcttcctgtccctgctgtgtcattgtaaagtgcaaaaggaaaaagctgactaggctgattcttccacaggggcaagaatttgctttcctatggatgcttcctgcccagattttctgtaagggttttcagtgacatccggaggctgttttaccagttctgctgcatccattagcttcatgggaacaagtactgaacgcgtaaagatactttacaaaggagtctccgaaactgctgagaccttgcagtcagggagaagagaagatctgaatgctaaacgatatggaagcctctcataataggtcttttccaaagcagcaaaatggtatcttggtttcaagcccgtggcaagactggaaaccaaagcagaaccacattttttggtatccacttctccaggcgcagcggtttctgtgccatctgtccgaatagtatgggttgcgactgccacctaaaat

SEQ ID NO: 98943 - DNA, 989 bp, Homo Sapiens
ggtccggaattcttgcgatcttcggcggcgactatggaaggagccggctacaggatggtgtttgagaagggcggagtgtacctgcacaccagcgctaagaagtatcaggaccgagactctctcatcgctggtgtcatccgtgtcgtggaaaaggacaatgacgtcctcctgcactgggctcctgtagaggaggctggagattccacccaaatcctcttctccaagaaggactccagtgggggtgactcatgtgcttctgaggaggaaccaacctttgaccccggctatgaacctgactgggctgtcatcagcactgtgcggccacagctctgccactcagagcccacgagaggtgcagagcccagctgcccccagggctcctgggccttctcagtgagtctgggggagctaaagtccatccgccgctccaagccaggcctcagctgggcctacctggttctggtgacccaggctggaggttccctgcccgcactgcacttccaccgcgggggcacccgcgccctgctccgcgtcctcagccgctacctgctgttggccagctccccgcaggactcccgcctctaccttgtcttcccccacgactcctctgctctctccaactccttccaccacctgcagctctttgaccaggacagctccaatgtggtgtcacgcttcctccaggatccctactccaccaccttcagcagcttctcccgagtgaccaacttcttccggggtgccctgcagccacagccctgagggagccgcctccgaccttcccccgccacccgacgaagagcccgagcctggattcgaagtcatttcctgggtggaacttggggcctcgggcaacccttggagcgggggccccccacttacctaaggaggaattgggccaccccacttgggcccctgaaaggcccccggacgccagttccctgaagttttaagaaccggatctcttccccgggggggttctgaacccc

SEQ ID NO: 98944 - DNA, 885 bp, Homo Sapiens
agccgactgtgagccaggaagtgctcttggggagcccaggccaagccatccattcttgggtcctttggagggtagatatggattcccagtttctccagcggccagtgctccccctagtccacacagtgagaccgtgaaagcagatgctccggggcactcctgggcagcttttgctcagtggatgatgggtgactacagactccctgaccacccccagcccatggaaattctcaacctgtacttgggagacagcctggagccccacccaggagagtgcccaagggaaacgtgcagccatgaggatccaccggagcctttcgaggagcaaacctgggccactgaccctcctgaacctaccagacaaaatgttcctccctggggctccggtgtggagctcacacacctggggagctgggtccatcaggacgggctggagccttgccaggagcaaacccgggccactgaccctcctgaatctaccagacaagatgctcctccctggggctccggtgtggagctcacacacctggggagcccctctgcccagagggagcacaggcagaacacagcatcaccagggtcaccagtgaacagccatctaccggggagcccaaagcagaaccggagcacgtccacacaggtagtgttctgggcaggcatcctgcaggcccagatgtgtgtcctagacctggaggaggagctggagaagacggcacggctcaaggcctgggctgaaatgcctgtctccccacgacccctgtggacctccccggggacacgggcctgacctccaggccacctgacaatgacgactcaggggaagaacgcagtgagccttcacgaagagggccaggcatggctgacagaggaacgcagaatcttccc

SEQ ID NO: 98945 - DNA, 1058 bp, Homo Sapiens
gctataagcctccgagaatttaccgcaccgtgccggaaggttaaagagaggcctttttgaaccccaatgtttgcttttgccacaccctcaaaaggggatccaggtaaaacccaaattggaagaattccaaacccagggattgttgattttccaataaggcccatttattttggttaaaataaccttagtttggttcccaaaggtgtttctgtcccaaaatgtgttaggtgccaacagggaggaactttcattagttaaaaatggtgatttctggaaaattcctgaaatgattgatttggcaccatgaggagtgaagaacagactgagtaggataataacactgggttgaactccatgttctataagaacctttacagcttcaattacagtatttccagtgctgagaatttggatacatcagaaggacttttctccggtaaatgtctggggggaatttggcataatatactttggctctttgtgtctcctcatcactctgaatcaggatctttccaattcgtatggatcgacagcagtctcgtaaaccttgttccattgcctcaccgcttctcattatgctgaccccacaatttcccttctcaaatttcactccttcatacttgtaccctgttggagtggtcaccatgcattctttatatggcagctgattcaatccctcttccacaacaagtctgatcaaacgatccgcagaaaacatgaagtcacctctactggctgtccttggccctggaggctctgtttccccctgcgtggtccaggatcagatcgccaggtcgcagctgctcgggacttggggttgaggcagagtttacttgctggttgtgacagggcatggagtccggacactgtaactccgtggccatacaccgggccccgggctatccccgctgctactgaacactaaagataaagaggaacgggtagaaaggacagatgctcacgtgctctctcggttgctcccgcctcctcagaacatctaaccctggctgtcctttcacccctaggccgctatcccgggaattccggaccggtaccac

SEQ ID NO: 98946 - DNA, 818 bp, Homo Sapiens
cggccgcgtgggccccgcctgctgcgcgcgcgggctacgcccacttcctgaacgtgcaggccggacgctctatgacgtcatcttgtacgggctccaggaacactcggaggtgtctggcttccttctggagtgtgacagctcggtgcagggcgcgctgcagaagcacctcgcgctatacaggatccggcggaaggtcacggtggagccgcacccggagctgcgagtgtgggcggtgttgcccagttcccctgaggcctgcggggctgcatcgctgcaggagagggcaggggctgccgccatcctcatccgcgacccgcgaacagcacgcatggggtggcggctcctcacccaggatgaaggcccagccctggtgcccgggggccggctcggggacttgtgggattatcaccagcaccgatacctgcaaggcgttcctgagggggtccgagacttgcctcctggggtggccctgcccctggagtccaacctggccttcatgaacggcgtgagcttcaccaaaggctgctacattggccaggagctgacggcccgcacccaccacatgggcgtcatccgcaagcgcctcttccctgtccggttcttggacccccttcccaccagtggcatcacccctggtgccacggtgctgactgcctcaggacagactgtgggcaagttcagggctggccagggcaacgtggggctggcccctgctgtggtcagagaagatcaagggtcctctgcacatcagagcctctgagcggtgcccaagtggcctaagccgcatctgtgccagactggatggcctacagtctcca

SEQ ID NO: 98947 - DNA, 819 bp, Homo Sapiens
cagaacccatcaggaagtgcacaggcgtccggcgtgctcctccctccctgcagccccgggcagcatctcccagaggctccgcggcccaggctcctggtgtgtctgcagtgcaggtggctcctggaagaccctcagcctgcctgctgaggccatgtcggactacgagaacgatgacgagtgctggagcgtcctggagggcttccgggtgacgctcacctcggtcatcgacccctcacgcatcacaccttacctgcggcagtgcaaggtcctgaaccccgatgatgaggagcaggtgctcagcgaccccaacctggtcatccgcaaacggaaagtgggtgtgctcctggacatcctgcagcggaccggccacaagggctacgtggccttcctcgagagcctggagctctactacccgcagctgtacaagaaggtcacaggcaaggagccggcccgcgtcttctccatgatcatcgacgcgtccggggagtcaggcctgactcagctgctgatgactgaggtcatgaagctgcagaagaaggtgcaggacctgaccgcgctgctgagctccaaagatgacttcatcaaggagctgcgggtgaaggacagcctgctgcgcaagcaccaggagcgtgtgcagaggctcaaggaggagtgcgaggccggcagccgcgagctcaagcgctgcaaggaggagaactacgacctggccatgcgcctggcgcaccagagtgaggagaagggcgcccggctcatgcggaaccgtgacctgcagctggagattgaccagctcaagcacaagctcatgaagggcgaggacga

SEQ ID NO: 98948 - DNA, 818 bp, Homo Sapiens
gatttgattaaagcaccagaagtgcaatggccctcagagcagggctggtcctggggttccacaccctgatgaccctcctgagcccgcaggaggcaggcgccaccaaggctgaccacatgggctcctacggacccgccttctaccagtcttacggcgcctcgggccagttcacccatgaatttgatgaggaacagctgttctctgtggacctgaagaaaagcgaggccgtgtggcgtctgcctgagtttggtgactttgcccgctttgacccgcagggcgggctggccggcatcgccgcaatcaaagcccatctggacatcctggtggatgcgctccaaccgcagcagagccatcaacgtgcctccacgggtgaccgtgctccccaagtctcgggtggagctgggccagcccaacatcctcatctgcatcgtggacaacatcttcccccctgtgatcaatatcacctggctgcgcaacggccaaactgtcactgagggagtggcccagaccagcttctattcccagcctgaccatttgttccgcaagttccactacctgcccttcgtgccctcagccgaggacgtctatgactgccaggtggagcactggggcctggatgcgccactcctcaggcattgggagctccaggtgcctattccaccaccagatgccatggagaccctggtctgtgccctgggcctggccatcggcctggtgggcttcctcgtgggcaccgtcctcatcatcatgggcacatatgtgtccagtgtccccaggtaactgatccttctgagcacaactgactgctgggagacacc

SEQ ID NO: 98949 - DNA, 929 bp, Homo Sapiens
gtggtttttctctagctttttgccagaacaaaggagggtacattacttaaacccaggcatcaggatgtgcttgggctatggtggccataaaccctgagcccagagagcttgggtcactgtcacctgagtgcagctgggctgcctcaggcagcttggagtgccagccattcctgcaagcaccgtttcagctcttggggccaaccccaggacctttggctctgtccatcaccagcaaccaatccaccaacagaatgtggtttctgccatcctgggcagaagctgaaggccagcttcacatttctgctgagagaaggtgacttaacgccttttccggccctagctccaggcgttttgaggcgtctggtgcctgatggtaggtatggtgtgtttgttctgtcccccaggggctggagtcacctggtgcccctgaaggacagatttttggctgttaaaggatggcattttcctgctgtcttctgtgcgtttagttttcttgctgagcgggagctcagtatgacttgccacccacctgatacctcagggcaaggccctttttccctccagccaggtgagtgttttcttcaggcagctgagggtcctgggggagctgaggctctgtgctgcacccccagcccacagctggggcatctcactggagctgttccaggccccactggagagcagaggacctgatcccccactagagaggtccggtgtgcacagccggcctcccagtgtgccaaaatgaactgctctcagctgatggctgtattctgactttgaagcctgttaagaggtagcaagggggctagaggagggagattccacctcccctcccaagtgaccctcctgcctctggtatccttccttttgaaacgaagctcagcttcgaagatgtgaacaagaataaaaggaaaaaattctaatgt

SEQ ID NO: 98950 - DNA, 1114 bp, Homo Sapiens
  misc_feature (1100)..(1100): n is a, c, g, or t
ggtgaaaggtggtttccctcccaaaggtccccttgttggggaacccccctgggaactccccaagaaaaaaatttttggcccccccctttaaaggcaaattttaagctttgctgttacccgttttgccagggcatcccatccatgggttttcattccccgggaactttcaatggggggttacggggcactgcaaaccctgggaggaatgtgtaccagtggctgtcccaccagcaagcctggggccactggggaaccgcacacgttgggcggccactgtgggcctcaggggccagggtgcaggcgcagggtggtgggctgtgatgaggccccagcgtccccttgggagcccccgaagagcccccgtgaggttgtagcccggctgcactcttcctacgtccccagggacacacaaggtgagtaccaggctgtgtgatgagggatttctggccagaagccgaagcggaaatgccggcctcggcccgccgtgtgcagcagccgcccgtcgggcagcaccacctccaggttgagcacgttgtcccgcatggtgccgtagcggaccgcgttggtccccgacgccccggtggccgccatgccacagagagaggcgtccgcgcctgggtccacgggaaaccagaggccgctgtcccgcaggtgggcgttgagggctttgcgggtgacacctggctccaccaccacagagaagtcctcctggttcagctccaggattcggtccatatgcgtcaggttaacgcagacgccgccctgcacagcacagacgccaccctcaagcccggtgccggtgccgaatgggatgatgggcacaccttggcgatagcacagggctgccagccggctgacctgctccacgttctggggccacaccacagcatcaggaggttcgcacctgtgcaccgactcatcgcgcccgtgctgctctcggaccaccgcggcagtggacacgtgggagccgcccaccacggccttcagagcctctacgaagtccctgcagagctctccctttgccttctgggagcagtagcccctccaggggaacagctcccaggttgcagacctgagcagtcgatcccgggaattccggngacccggtaccagc

SEQ ID NO: 98951 - DNA, 1160 bp, Homo Sapiens
cggtccggaattcccgggatgacagacagacagctggcaagaggcagcctgggggccacagctgcttcagcagacctcatggctgagtgagcctcccctgggcccagcaccccacctcagcatggtccaagcccaaggggggcgctccagagcacagccgttgaccttgtctttgggggcagccatgacccagcctctgcctgaaaaaacgccagccaagaagcatgtgcgactgcaggagaggcggggctccaatgtggctctgatgctggacgttcggtccctgggggccgtagaacccatctgctctgtgaacacaccccgggaggtcaccctacactttctgcgcactgctggacacccccttacccgctgggcccttcagcgccagccacccagccccaagcaactggaagaagaattcttgaagatcccttcaaactttgtcagccccgaagacctggacatccctggccacgcctccaaggaccgatacaagaccatcttgccaaatccccagagccgtgtctgtctaggccgggcacagagccaggaggacggagattacatcaatgccaactacatccgaggctatgacgggaaggagaaggtctacattgccacccagggccccatgcccaacactgtgtcggacttctgggagatggtgtggcaagaggaagtgtccctcattgtcatgctcactcagctccgagagggcaaggagaaatgtgtccactactggcccacagaagaggaaacctatgggacccttccagatccgcatccaggacatgaaagagtgcccagaatacactgtggcggcagctcaccatccagtaccagggaagagcgccgggcagtaaagcacatcctctttttcggcctggccagaccatcagacaccaaaatcagctggggcccctgctgcgcctagtggcagaggtggaggagagcccggagacagccgcccaccccgggcctatcgtagtccactgcagtgcaggcattggccggacgggctgcttcatcgccacgcgaattggctgtcaacagctgaaagcccgaggagaagtggacattctgggtattgtgtgccaactgcggctagacagaggggggatgatccagacggcagagcagtaccagttcctgcactc

SEQ ID NO: 98952 - DNA, 1175 bp, Homo Sapiens
  misc_feature (23)..(23): n is a, c, g, or t
tcccggcgcacaaatttcccccngggggcaagttcttggacgaccagaaggcctgcgctcagctgctctggcaccccgctgcaggatggcctcctgggctaagggcaggagctacctggcgcctggtttgctgcagggccaagtggccatcgtcaccggcggggccacgggcatcggaaaagccatcgtgaaggagctcctggagctggggagtaatgtggtcattgcatcccgtaagttggagagattgaagtctgcggcagatgaactgcaggccaacctacctcccacaaagcaggcacgagtcattcccatacaatgcaacatccggaatgaggaggaggtgaataatttggtcaaatctaccttagatacttttggtaagatcaatttcttggtgaacaatggaggaggccagtttctttcccctgctgaacacatcagttctaagggatggcacgctgtgcttgagaccaacctgacgggtaccttctacatgtgcaaagcagtttacagctcctggatgaaagagcatggaggatctatcgtcaatatcattgtccctactaaagctggatttccattagctgtgcattctggagctgcaagagcaggtgtttacaacctcaccaaatctttagctttggaatgggcctgcagtggaatacggatcaattgtgttgcccctggagttatttattcccagactgctgtggagaactatggttcctggggacaaagcttctttgaagggtcttttcagaaaatccccgctaaacgaattggtgttcctgaggaggtctcctctgtggtctgcttcctactgtctcctgcagcttccttcatcactggacagtcggtggatgtggatgggggccggagtctctatactcactcgtatgaggtaccagatcatgacaactggcccaagggagcaggggacctttctgttgtcaaaaagatgaaggagacctttaaggagaaagctaagctctgagctgaggaaacaaggtgtcctccatcccccagtgccttcacatcttgaggatatgcttctgtactttttaaaagcttatagttggtatggaaaacatttttcttatttttaagtgttattaattatatctatggaaaaactattcctgaaatatatacagtcttatgtcccaaaaaaa

SEQ ID NO: 98953 - DNA, 854 bp, Homo Sapiens
ggcagcacaccacccagcagccagagcaccagcccagccatggtccttgaggtgagtgaccaccaagtgctaaatgacgccgaggttgccgccctcctggagaacttcaggctcttcctatgactatggagaaaacgagagtgactcgtgctgtacctccccgccctgcccacaggacttcagcctgaacttcgaccgggccttcctgccagccctctacagcctcctctttctgctggggctgctgggcaacggcgcggtggcagccgtgctgctgagccggcggacagccctgagcagcaccgacaccttcctgctccacctagctgtagcagacacgctgctggtgctgacactgccgctctgggcagtggacgctgccgtccagtgggtctttggctctggcctctgcaaagtggcaggtgccctcttcaacatcaacttctacgcaggagccctcctgctggcctgcatcagctttgaccgctacctgaacatagttcatgccacccagctctaccgccgggggcccccggcccgcgtgaccctcacctgcctggctgtctgggggctctgcctgcttttcgccctcccagacttcatcttcctgtcggcccaccagcgacgagcgcctcaacgccacccactgccaatacaacttcccacaggtgggccgcacggctctgcggggtgctgcagctggtggcttggctttcttgctgcccctgctggtcatggcctacttgtatgcccacatcctggcctgtgctgctggtttccaggggccagcggcgcctgcgggcatgcggctgtggtggtaggcagtggtggctttgccctctggtggaccccct

SEQ ID NO: 98954 - DNA, 981 bp, Homo Sapiens
  misc_feature (873)..(887): n is a, c, g, or t
gccctgcagacaagcgtgccgtgcgtgcttgtggccaagggaaggaagagctggttgatccacagatagctccttcctccccgccccttcctttttgtttgcaggtcccaggatctgtgttcacagacatctgggggaagaaaaggagcaggaaactaccccgcacagagttaagcaggaaacaacaacaacatcatgcaaaaaccctgcaaagaaaacgaaggaaagccaaagtgcagcgtgccaaagagggaggaaaaacgcccgtatggagaatttgaacgccagcaaacagaagggaattttagacagaggctgcttcagtctctcgaagaatttaaagaggacatagactataggcattttaaagatgaagaaatgacaagggagggagatgagatggaaaggtgtttggaagagataaggggtctgagaaagaaatttagggctctgcattctaaccataggcattctcgggaccgtccttatcccatttaattaatttctctgacaattcaattattttctgttattaatgttgccactgctttctgtttgtctgcactttcttgataaatatttgctatcgttttactccagtcattcgatgttgctgagatttacatatgactcttgtcaacatctcatcttttgacccaatcttattcatttaataagaggtctcattcatttgcatggaaaaatgctcattgtatattgcaaagtgaaaataacgagttgcaaaacagtgtatacatatatgtgtgtatatatggacactttatttggacatttctatgtgacataatgccaaaggaaagtgtctgattttattataccccaaggttaacagtgaatctctgggggacctcnnnnnnnnnnnnnnnggctatctgcatcttctcacttgcccaaaaaagaatataaggttaatgggggggaaattaacttgggggcccaaaaaaccctaaaggtggacgg

SEQ ID NO: 98955 - DNA, 1145 bp, Homo Sapiens
  misc_feature (786)..(786): n is a, c, g, or t
cgcgctcctcccaccacccgttctccccgcagtccttcccctccactcccttccccttctctgctcatgcaggtagcccagtgaatgcctccgcctcagagatgctaccgcgtgctgctgcccctgctgtgggcaggggccctggctcaggagcggagattccagctggaggggccagagtcactgacggtgcaggagggtctgtgcgtcctcgtaccctgcagatagcccactacccttccagcctcgtactatggttatggctactggttcctggaagggggctgatgttccagtggccacaaacgacccagacgaagaagtgcaggaggagacccggggccgattccacctcctctgggatcccagaaggaagaactgctccctgagcatcagagatgcccggaggagggacaatgctgcatacttcttatcggttgaagtccaaatggatgaaatacggttatacatcttccaagctctctgtgcgtgtgatggccctgacccacaggcccaacatctccatcccagggaccctggagtctggccatcccagcaatctgacctgctctgtgccctgggtctgtgagcagggaacaccccccatcttctcctggatgtcagctgcccccacctccctgggccccaggaccacccactcctcagtgctcacaatcaccccacggccccaggaccacagcaccaacctcacctgtcaggtgacgttccccggagccggtgtgaccacggagagaaccatccagctcaatgtctccctggaatcangaaccgtggaagaggtggttgttttggccgtgggggtagtggctgttgagatccttgcttctctgcctttgccctcatcatcctcaggtaagcactgcctgaagaaccaggacaggcattggggagggcaaaggaacatgatgctgaatccccagaatctcaatccttggggggtaagcaaacccagtttacctgggtcctggggggcccagccttgaaggccttaaatttggtggggggaaaatttacacattgggcccactttggggggggccccttttttgggctttttcccccacggggaggggcccaaatgtgctcacgataatggggggaccccttcccctgtggtggggcac

SEQ ID NO: 98956 - DNA, 894 bp, Homo Sapiens
ttgctcccacaaaaatggcttagctttgtctttttgggtgcctgacaggagacattaaagtatcactctctcgtttttacccctcctcacaataggatggatgagtgtggagaaaaacaaaggtattgtgggaccaggatggagtcaacttgacaatggactcttcaaggacaccttccagctcccattctactagtagctctatttgattttgtgggatgttgtgttcctccaacatatccgacttctgcttataaaacagaaattaggagtaagagattcgcaccgctagttcagtggataatcatcagttctgaagcattaaaatcctttgccaacaagaacgtttcttctaaggaaggaagcatcctaatcatgaagccagggtctccagccctcccctgtctccctcctcccctccagggctgtgctcactcacatccatggacatctccctctgcataagtttcttggtctccttttcacagaagttgagcatggcctcccggttgtacacacccgtggactgtttctccgtctggtttctctgccgcagccccacgggaacactcccgtctgggtccaccacgtccagctccttctccagctcctccatctcctcgggagacagggtctccagcaggctgtcgatgtcggggtcttcactcacctgccggcgatatttggctactctagacatcttggcaaaatgggctgtggctgccaggggctatcagagtcctggtgggcagggaagggagaaggggtgagctgatctggatgcagcgagtgggctgaggagcaaacctcctgctggtcgaggactgcagctccccgccccttctgtgctacaggtgctgaagtgttcactggacgcagcagcctcactgcagc

SEQ ID NO: 98957 - DNA, 902 bp, Homo Sapiens
  misc_feature (230)..(249): n is a, c, g, or t
  misc_feature (499)..(499): n is a, c, g, or t
gcacgaagtcgctggaggtgcacacctcgacgacacgctcacagatgggagttcagacacacacttcctggcttgcgtgcgaagcgggatcgcagggcaataatccctccatcttccccgggaggttctgtgcctgcaagatacacggcacccactcgatgccaccgtgccgccactgtctgggcctgggatcttgacccacttgccttctgtacttcagggtttagagnnnnnnnnnnnnnnnnnnnncgtcttggataacttttgatggattcaggaggcctggagacctcttgtgtgcaggcacctggacataattttcattcagtcctgcccaatgttccgacctggactgcggtgccgacgaggaaaccgaggcttagcgggatccctaatccaaggccacgacgagtgagcctgctgggttcaagccaggagcctgtccccagggggcattttgtcacagcccttaccctcttccgggaggcgcaacgcttanccctcgtggaccaacaatcgaattaacatgctgatacacacatggggtgagtgacgccctcaaatgcttgcaaacacaagacacacactcgggaatttcagaaagcctgctccttgctgtgtgtcctgtccgctttggaagggcaacaggccccaagcagcacccatacaagatgagggtctccgaatttaagggtgccgaaggcggggctccccaagaacaggaggggcttccttcaatcctgctgaagccacggtgccaggcgacccggagtggcggcgcacacgcctgttcactggaagccgggccgggccagaccaccaaagaaccaaagcgaaccaacccaggaactggaccagcctcaggacatgtggccagataccagggaccgccgaatggatac

SEQ ID NO: 98958 - DNA, 702 bp, Homo Sapiens
  misc_feature (105)..(139): n is a, c, g, or t
ggaaagctatgcctcatcttctaacgagccaagccaaaaagactgcaatggtattcctatgtgtttctttggcctgtgtatcagtctgaatgaaatggaatgggnnnnnnnnnnnnnnnnnnnnnnnnnnnnnnnnnnncttgtcctatatattatctgcaagacgtgggaaatgggggctcaagccctgatgctatggactccatactgttggatatattgtctcttgtgtcttctgctgactgcagattaaagggtgtcaaccaaggaaggaaacaaaaaagtagggcctggacttcatttgcagaatgaggtcacagtcgttgagtcccacagtcatatatgggagacctcaagttgctgtcaccttgataactcttgtatcctgggttaaagccctctgtatttagtttgaacttctctctaagccccgtggtccaaagtcatcacgggagagaccaagatgggcttaccttgccctgctctggatttaaccattgttcattgtcaggctatattttagtacaatcattcaaataacccagatgacataggtcatattgccacttttcagaggagaaaactgaggctcaggagggggagttgaaatgcccaagctcccttgagctcagatcagcttgactcaatgtccaacattcccttgagtagacttaatctccggggtcctgtgctaataagaac

SEQ ID NO: 98959 - DNA, 1043 bp, Homo Sapiens
  misc_feature (897)..(958): n is a, c, g, or t
  misc_feature (1006)..(1006): n is a, c, g, or t
ggaccggtccggaattcccgggatcccgcggccgaggtggacggagcctcccggctcgctgctcccgccggcggagcgaggctgccctttcttcgcagcgtgatttattttcttctcctttttttctgaactcttcttccagggagaggctagtggtaacaggccgagctggatggatgggtatggggagaggggcaggacgttcagccctgggattctggccgaccctcgccttccttctctgcagcttccccgcagctcaccatcatcttcaagaacttccaggagtgtgtggaccagaaggtgtaccaggctgagatggacgagctcccggccgccttcgtggatggctctaagaacggtggggacaagcacggggccaacagcctgaagatcactgagaaggtgtcaggccagcacgtggagatccaggccaagtacatcggcaccaccatcgtggtgcgccaggtgggccgctacctgacctttgccgtccgcatgccagaggaagtggtcaatgctgtggaggactgggacagccagggtctctacctctgcctgcggggctgccccctcaaccagcagatcgacttccaggccttccacaccaatgctgagggcaccggtgcccgcaggctggcagccgccagccctgcacccacagcccccgagaccttcccatacgagacagccgtggccaagtgcaaggagaagctgccggtggaggacctgtactaccaggcctgcgtcttcgacctcctcaccacgggcgacgtggaacttcacactggccgcctactacgcgttggaggatgtcaagatgctcccactccacaaagaccaaactgcacctgtatgagaggactcggggacctgccaggcagggccggctgcggnnnnnnnnnnnnnnnnnnnnnnnnnnnnnnnnnnnnnnnnnnnnnnnnnnnnnnnnnnnnnngctccctgtgggtctgctaaaacgcggtaaaattggggaagggaaggncccggcctccccttcctctcggtttttccccatgggg

SEQ ID NO: 98960 - DNA, 880 bp, Homo Sapiens
atcgcgggccgtaagtggctgtggagctggggtcactgcgcggtgggaccatggcctcggagaagccgctggcggcagtcacttgtacagcgccggtcaacatcgcggtcatcaagtactggggcaagcgcgatgaagagctggttctgcccatcaactcctccctgagcgtcactctgcaccaggaccagttaaaaaccaccacaacagccgtcatcagcaaggacttcaccgaggaccggatttggctgaatggccgggaggaggatgtggggcagccgaggctgcaggcctgcctgcgggagatccgctgcctggcccggaagcggaggaactcacgggatggggacccgctgccctccagcctcagctgcaaggtgcacgtggcatcggtgaacaacttccccacggctgcgggcctggcctcctcagcggcgggctatgcctgcctagcctacaccctggcccgtgtctacggcgtggagagtgacctctcagaagtggctcgccggggctcaggcagcgcctgccggagcctgtatgggggctttgtggagtggcagatgggagagcaggccgacgggaaggacagcatcgctcggcaagtggcccccgagtcacactggcctgaactccgcgtgctcatccttgtggtgagcgctgagaagaagctgacaggcagtaccgtgggcatgcggggccagtggtggagaaccagccccctggcttcgggttccggggcccaagtccgtggtgcccgcgcgcatgggcggagatggccccgctgcatccggggagcgaaaatttccccagctttcgcccagctgaaccatgaaggacagcaacccaggttccacgccaactgcctcgacaccttccc

SEQ ID NO: 98961 - DNA, 1215 bp, Homo Sapiens
gcatcggtcctgttgagcagtcagcagctgcttcggcagccgtcaggacccaggagtgggcacagggtcatccaggattgaggccctggccccacctgagtgacaaatgatgtatttgacccccaccggggtcggctccatggccagcgcaagcctgaagctcagctgagagaggggccggcctcacctgcagccccttcagaaacgtgtctccattcgagcctgggggaaagccgtgccacacagcagccacaaactcagccacagtgtcgtccagggtgaagatcacggcattggggcccgcgtcaaaggtgtacgccaccttggtgtccccgtggtgggcgttgaagcggtgcaccaggtggatgatgcgccaggagatggcattgaggtaagagatgggcgggaaggtgtcgaggcaggtggcgtggaactggttgctgtccttcatggtcagctgggcgaagctggggaagtctcgctcccggatgcagcgggccatctccgccatgcgcgcgggcaccacggactcggcccggaaccgaagcagggggctggtctccacactggcccgcatgcccacggtactgcctgtcagcttcttctcagcgctcaccacaaggatgagcacgcggagttcaggccagtgtgactcgggggccacttgccgagcgatgctgtccttcccgtcggcctgctctcccatctgccactccacaaagcccccatacaggctccggcaggcgctgcctgagccccggcgagccacttctgagaggtcactctccacgccgtagacacgggccagggtgtaggctaggcaggcatagcccgccgctgaggaggccaggcccgcagccgtggggaagttgttcaccgatgccacgtgcaccttgcagctgaggctggagggcagcgggtccccatcccgtgagttcctccgcttccgggccaggcagcggatctcccgcaggcaggcctgcagcctcggctgccccacatcctcctcccggccattcagccaaatccggtcctcggtgaagtccttgctgatgacggctgttgtggtggtttttaactggtcctggtgcagagtgacgctcagggaggagttgatgggcagaaccagctcttcatcgcgcttgccccagtacttgatgaccgcgatgttgaccggcgctgtacaagtgactgccgccagcggcttctccgagg

SEQ ID NO: 98962 - DNA, 846 bp, Homo Sapiens
gtccccggctgagcgctggcggtcggtgcggcgtcaggtgcgcccgccaggtgagcgcgctccctggcaccgttggcccccggagggtcgggcccagttgcggcgagcggattggtttatcttggaagctaaagggcattgctcatcctgaagatcagctgaccattgacaatcagccatgtcatccaggcctcttgaaagtccacctccttacaggcctgatgaattcaaaccgaatcattatgcaccaagcaatgacatatatggtggagagatgcatgttcgaccaatgctctctcagccagcctactctttttacccagaagatgaaattcttcacttctacaaatggacctctcctccaggagtgattcggatcctgtctatgctcattattgtgatgtgcattgccatctttgcctgtgtggcctccacgcttgcctgggacagaggctatggaacttcccttttaggaggtagtgtaggctacccttatggaggaagtggctttggtagctacggaagtggctatggctatggctatggttatggctatggctacggaggctatacagacccaagagcagcaaagggcttcatgtaggccatggctgccttttgtttcatttgccgcgtaggtgatctttgttaccagtgttataagatctgaaatgtccagaacaagaagatactacttaagtgtgataatagtgagtgctatcctgggcatcatggtgttctattgccacaattgtctatataatgggagtgaacccaactgctcagcttctggatctctatatggtcacaatatatgccctctgcaacccaatttaatacacctgc

SEQ ID NO: 98963 - DNA, 878 bp, Homo Sapiens
gatcacccttctgagtacctctctggctgccaaattgccaggcctacacagttagattccatttctcagctccaagcattaggtaaacccaccaagcaatcctagcctgtgatggcgtttgacgtcagctgcttctttggggtggtgctgttttctgccggctgtaaagtcatcacctcctgggatcagatgtgcattgagaaagaagccaacaaaacatataactgtgaaaatttaggtctcagtgaaatccctgacactctaccaaacacaacagaattttgggaattcagctttaattttttgcctacaattcacaatagaaccttcagcagactcatgaatcttacctttttggatttaactaggtgccagattaactggatacatgaagacacttttcaacagccatcatcaattaagcacacttgtgttaactggaaatcccctgatattcatggcagaaacatcgcttaatgggcccaagtcactgaagcatcttttcttaatccaaacgggaatatccaatctcgagtttattccagtgcacaatctggaaaacttggaaagcttgtatcttggaagcaaccatatttcctccattaagttccccaaagacttcccagcacggaatctgaaagtactggattttcagaataatgctatacactacatctctaggagaagacatgaggtctctggagcaggccatcaaacctaagcctgaacttcaatggcaataatgttaacaggtatcgaccttgggcgcttttgattccaacggtcttccaaaagtttgaactttggaggaacctccaaatttgtctgtatattcatgggtctgcaaaaatctaatactcaagctctctggctgggac

SEQ ID NO: 98964 - DNA, 884 bp, Homo Sapiens
gggtactgcctgcccgagtccactgtaagagcccggtcaacacatccaggatccgagggattgaaggtctgttcctaggtcggcctgttcagccacccaactctacaagttgctgttcgtcccactcactgtctgtaagcttgtttaacccagacagtatctttcataaatagaacaaattcgtccaccagtcacatcttctaggacctttttggattcagttagtataagctcttccacttcctttgttaagacttcatctggtaaagtcttaagttttgtagaaaggaatttaattgctcgttctctaacaatgtcctctccttgaagtatttggctgaacaacccacctaaagtcccttttgcatccattttaaatatacttaatagggcattgttcactaggttaaattctgcagagtcatctgtctgcaaaagttgcgttagtatatctgccactcgaggaagattttctccagtggcaaattgaggcagttctttaattgcttgacgtcgaatagatacatcttcatcctcacagaggtctaactgtgcattgatagcagaatcagccaattctggaaaatgcttaaagaatttcggaataaattgagctgctaatcgcttttccttagtaccacctttcacaccatccaatatcacttgataggcatctttatgctggcccacttgctccgtggcatcggccaggatgccataattgcggtaaagctcctctactgtcggcatggtgagcgacaagcccagggcccggttccgctatccttgtcctgaccggcgccacacgccgcctcggaacttctccaaacccactacccgcactattacacctccagctgccgccagtgcagccgccagtcccc

SEQ ID NO: 98965 - DNA, 745 bp, Homo Sapiens
gtcacgtcttgctcctcggaggcactcattgatgtccaaggctgaatcaggcaggcctgggttcattagctgggtatagatgactggaaacaggctgtcaaacaattcattgaccatgtcatctacattgatgtcagaacccaagatgtagagagacacatctgtgaaaaattcacccacaaactcaaaagcttgtggagtcaggcttgggtagttgttcttgaacatggcattggtgtagttcttggcatggcgaacaacaatttcaaaggcctcttggaaaaccgcagcattctgaataattaagaacttgagctccatacttgcagactgaagcagctgttccatgttcaatcgtgctgttagttggtatttttcttccatctttcttgagcagcatgttgggcccttagggagacatacttgcaaatctgatcctggcacgggagtttctggcacccacttgagtccgggctgcagtctctggaagaaggagcggacttggtgacaggtggcgtccggcggcggcggcgggggctgcgcctgtcccgggaagtccaagctgagcagcatcgccaccaccaagcacgcggtgcgcacggtcccggccatcctgcttcgcagggagctaggagagcgcgggagagtggcagccggagcgagagcagtcccaggactcggcaagcctggcagtggccctgaggagcaagagacgtgctgctacccagccgctgcaaaagtttcc

SEQ ID NO: 98966 - DNA, 620 bp, Homo Sapiens
cggcgcgttccgttccgggccgatggctcgcggcggaaaagttgcgtgggctatagcacgagcggccccgggtacgggcagctagcgcgaccctgagccgtgcgcccgtggcccggccatggacgacctcgacgccctgctcgcggacttggagtctaccacctcccacatctccaaacggcctgtgttcttgtcggaggagaccccctactcatacccaactggaaaccacacataccaggagattgccgtgccacccccagtcctgccaaccgcgggcagagaggccctgaagaggcagagatacgttgaaaccccttagaccataatggtaggccacatgaggcaccgcgatatcatccacgcagaaagcctcagaaccatcatcacctgtgtacgggtccagatgacaaaaacttccagaggtctccaaacgcatcaaggaacacacagatagagaataagcacagaagacatccacagaggatgaggatgaaggaaggaaaacaccaaggaatacaaaggcattccccgcaaaccgaggcaagaaaacataggcatgaggccgttgaaaacaagacagaaagaagaagcgacggtaccgggatagcagaaagacg

SEQ ID NO: 98967 - DNA, 964 bp, Homo Sapiens
gggaagcagaggagttgggagctggcggtcgttcccggggaagaactgctaaaacatgagaccaaggcagcagaccttactgtatgagaagcaatgctcctcaaaccttctgcgtgctgacatagaccttcccagaagcaaaactgtaggcggcgacctgagcgctggaagccgaaggggaagaggaaggagacgctgaagccaggcggccggcgacaaaggcggcggactcgcggcggcagcgctctgcctcgggccgggagcacaacccacggccctactccagctgaagtcccgtcgaccggcttctaggaataaagtttacgttctcctgaggcctgcaccccccaactcccacccaggacggcacatctccgtgtcctcctcccccaaactccactcgggaccccgagaaccacccagccttccggccaccacaacaaagagccgcaccgaccggcgaggataaacagcggcggagggcgagagggcggcggggcgagcgcctccacgcagcaactccggagtcccccgattgcccgagcgcagtttctccgctgctgtttccaccggctttgtaacactgggaatttacatcctcaaccgcaaccctcacgcccgaggattttaaactcacctttactctcgaactgagagttgcggtagatgggattactggccttttccccagatggttgaaggttaagatttttggaaaccccaccacctccttatttctattattatttctgcaagaaaagtataaagagagttgtagtggaggtgagatttgtgatcgggaaagccttcgactccctccttctccgtcttccgcttctctctctctgattagttcctatccagcagcagattgaagcaggagatgattcttctcaaggtttgttcagcagcttcacttctaggcgaaggcttcatgaaccaagtgacgtcaaccaacaaggct

SEQ ID NO: 98968 - DNA, 831 bp, Homo Sapiens
tggcatcagggttgtatgtggtgtgtgctgttttgtaatgttgaatatgtggagtttccttgggtatagtttccaaggtaatatagagagttagaatataattcaggtaaacacgtggattgccaaagaggatcttattgtcttgccctgcgaaatgaacaggagttaatgaagcaaatctctaggttgttttgatacagggttttaagaccttgatggtagcaaagcagtaattcctttaactgtaaagtatgtacacatttgacactaaataagacatagcagtcttttgaccattctctcacaatgttagaaactacataataagaacttcaaatatcctttaattctttcttaatttttgaaattagataaatataaacaagctttcataagctgcaattattcttaaattggctaacaaatttattgaaagcttaaagacaatcatttaattttatctgcatcttgaactccatcattatggttaatagactttgtaattctgttttaatgctgtcctgtatataaaaaaactcttttacaatcaccttaaatacagcatacttaagttgctgatatctctcttttccaaataatcatcttaaatttggcatactcttgacccttttggctttaaaatcactatttcaagaggtaacaaaaaaaactatgctttaaaaaatattgtaatttactagaataccattgcctaagtgagctgggtctgtaaaggtgataccaaataagtcattttaatattgctgtagtttacttttgctaattcttgcatagcttttaaacacattttgtggttaaaggataaaatgc

SEQ ID NO: 98969 - DNA, 733 bp, Homo Sapiens
  misc_feature (385)..(530): n is a, c, g, or t
cacatactgacatgtgagaagcgaaggttaattacaaattagctgaacaaatttagatctttgccacttgcgcattctcaccaagtaacaatctccagttgactcatgttgaaattgccccagcagtttacattagttttatagatcttcatgaatgggtggtgaagacgcaggttgcaacataccctccaagtcacatgaggtggagctgagacagttacagttagagaggaaagttagaatccagtaataaagaatttcgctgctctgttgcttgggagcacatttgttctctcattaaaagcagcttcaagatggcttttttgttgttgtttttcataagtaatcattaataagtaatcattggaaagccccaccacacccnnnnnnnnnnnnnnnnnnnnnnnnnnnnnnnnnnnnnnnnnnnnnnnnnnnnnnnnnnnnnnnnnnnnnnnnnnnnnnnnnnnnnnnnnnnnnnnnnnnnnnnnnnnnnnnnnnnnnnnnnnnnnnnnnnnnnnnnnnnnnnnnnncctggggtggtgcaatggcgtcctgatctctgcatcttggtcactgaaggggctcgagagccgcgaggcgctggggacaggtccgggagtcaggcccaggaaagtctccatgttgtgtgtgtaagtctgctctgttagcagctccgcaggattcattcacaggtgccccctccacagttgactcttctcatcaacggatccgg

SEQ ID NO: 98970 - DNA, 559 bp, Homo Sapiens
  misc_feature (238)..(331): n is a, c, g, or t
ctgaagtctgggcttcagttgctcagccatctgcttgctgtatgttgcctgcaatgaactcgctgaagcgtgctcagccctggaactggtgctaccagagttccgtagggaacctttactctttagaggttccctgatataaatcattcataagacttcctaccctggaaaatgagtaatgtctcattcttacctgcagttggttactatgtataaaagtctttttctttaatatgcnnnnnnnnnnnnnnnnnnnnnnnnnnnnnnnnnnnnnnnnnnnnnnnnnnnnnnnnnnnnnnnnnnnnnnnnnnnnnnnnnnnnnnnnnnnnnngataacacagaacacaagaaacaaggaggcgatgggggagccgatccgaaagggcccagaggcggatcccttgacgggcaagggcaaggagacgcccctcgatgcattgggaatgtatacagaggagaaagaggcggggagaacctagaaacgaggagaggcgatagagtaaggacataaccgatagaagaggagcacagcccagagggcagcgagcacatagagagt

SEQ ID NO: 98971 - DNA, 938 bp, Homo Sapiens
tgtactatatctcaatgctgaaactgtttctgcagtgaaggaactcctgatacactgacaagctttggagattgcgtcctgggcctcggctatcattctgtcaaacttgaagattcagagtggttgttcaaaatggggacatatgtactctagcttcatgtcccaagcttcttgcctcataggactataataatctggttcagaggattcagatgctttattggtagggtcagccaagattgctctaaaacttcgatcacagtgttctgatggcttgggcagcttgtgatggtgttaagtatgcgtacgtagcccaaacctgtacgttctccagtcactttattcttaataatggctgcaatagctcgatatctccatacaccttaaatttttcccgcagatcttcttctgtgtaggactttggtatcataacaaagattcttgtaagttcttcatcttcaacatctcggtgacttccagatgatcgggactgagcaatgaaaaccttgatgggcttggtgtcgttggggccgaggcactggccatgcatctcctccatggccctgcaggcctgtgagctgcgggcgaacttgacgaaagcaatgcccttggactccttggtgtgcttgtcccgcaccacccagatgtcctggatgtcgccaaaaggcgagaagcgctccctcagcaccgactcaggtgtgtacttgctgatcacaaggaagatgcggctgttgggcggttcgtccaggctgtccacgcccgggcggaagcccccgccgctcgcagagctgccagcttcgtccatggtgctccacccgaatgcaggagcctcactgctctttgcttctgcggtgtctgccaccgctgctgtctcacacccaagcctttgccggctcggtgctccgcttccgggagaaagaggagtccggcgccaggcg

SEQ ID NO: 98972 - DNA, 932 bp, Homo Sapiens
gagaaccagacgggcagagcctgtagtagtgagagcctggtccccgactgtccccactgggtggagacaccatgtactatgtgtccacttgtgctcttcagtccagtgacaccagacatgtgtccaaaccgctgcagggctggctgcagcaactccctgacactcaggaaggcccaggctgggcaggcaatacctgctcccaacagccatgcatgccggctgccgctccaggactcccctgtccccatggagcagagatgactgcccaacagcactggcgaggtgcccagccccattcccaatggtgggctattggggctctccctggccctggcaagcctcatcatcaccgcgaacctgctcctagcccctgggcatcgcctgggaccgccggctgcgcagcccacctgctggctgcttcttcctgagcctactgcttggctgggctgctcacgggtctggcatttgcccacattgccagggctgtggaaccagagtctgccgagggttacatggtcctgcctcctcgtctacttggcatcccaacttctccttccatctacctgcattgccaagcctcttgctaggatgcaacagggggaagcggctaacattggccagtcccttgaagagccaaaatccgaagacaccccatagggaaggcaataccaggcttgggaccatcgaatccgctcaaaccatggggacaattggtcaccacttggcatatcaatcttgaccaaggatctttggcgccggtcatcattaggagaggttagaaaacccacacagtggcaacacccttcggattgccaaaatcagtggtagagcattcagacaagggggcataatactatcaccgaagacacacgcataacagatggcaaggttacagaaaaggtctattaggggcatccatagattagaccacg

SEQ ID NO: 98973 - DNA, 732 bp, Homo Sapiens
cgcaggggcgggcccgcggcgcggcgccggaggaggaagtggtgaggttgttgctccttcagcgcctatcgctggctcttggggcgcagagaggggccgcagtctccgcggctgcgtcgagctcccttgcagtcccctccatgttccccggcgccactactccccttcctaaggccgccgcttaccccggggtctatggaagtaatggaaggacccctcaacctggctcatcaacagagcagacgagcagaccgtttattagctgcaggcaaatacgaagaggctatttcttgtcacaaaaaggctgcagcatatctttctgaagccatgaagctgacacagtcagagcaggctcatctttcactggaattgcaaagggatagccatatgaaacagctcctcctcatccaagagagatggaaaagggcccagcgtgaagaaagattgaaagcccagcagaacacagacaaggatgcagctgcccatcttcagacatctcacaaaccctctgcagaggatgcagagggccagagtcccctttctcagaagtacagcccttccacagagaaatgcctgcctgagattcaggggatctttgacagggatccagacacactactttatttacttcagcaaaagagtgagccagcagagccatgtattggaagcaaagccccaaaagatgataaaacaattatagaggagcaggcaagcaaaattgcagatttgcac

SEQ ID NO: 98974 - DNA, 1098 bp, Homo Sapiens
  misc_feature (919)..(919): n is a, c, g, or t
  misc_feature (937)..(937): n is a, c, g, or t
  misc_feature (1002)..(1002): n is a, c, g, or t
  misc_feature (1016)..(1016): n is a, c, g, or t
tggaccggtccggaattctcgggatgtcccgtggagtctccatctgagccctttcctagtccaggcatcccgatgttggtggatggcccatctgagcggccagccctgtgcttcttgctgttggctgtggcaatgtctttcttcggctcagctctatccatagatgaaacacgggcgcatctgttgttgaaagaaaagatgatgcggctcggggggcggctggtgctgaacaccaaggaggagctggccaatgagaggctcatgacgctcaaaatcgctgagatgaaggaggccatgaggaccctgatattcccacccagcatgcactttttccaggccaagcatctcattgagagaagtcaagtgtttaatattctaaggatgatgccaaaaggggctgccttgcacctccatgacattggcatcgtgactatggactggctggtgaggaatgtcacctacaggcctcactgccacatctgtttcaccccaagggggatcatgcagttcagatttgctcacccaactccccgtccatctagaaaaatgttccaagtggattctgctggaggattatcggaagcgggtgcagaacgtcactgagtttgatgacagcttgctgaggaatatcactctggtgacccagcacccggaggtgatttacacaaaccaaaatgttgtctggtcgaacatttgaaaccatcttcttcaccatctctggtctcatccattacgcaccagtgttcagagactatgtcttccggagcatgcaggagttctacgaggacaacgtgctctacatggagatcagagccaggctgctgccggtgtatgagctcagtggagagcaccatgacgaagagtggtcagtgaagacttaccagaagtagctccgaaagtttgtggaaactcacccctnagttttatggggatcaanattcatttattcccgatcccagatccccaagatgtgggctgttcattcgcaggaatcccatcccnaatgggccctgggnggctcccgaaatcaagattctcccacacgtgggatgggccaaagggcttttgaaccctggttgggggggccatgaaagggaa

SEQ ID NO: 98975 - DNA, 991 bp, Homo Sapiens
gttgatctccggagtttcgccatgcggaacttgggggctttcgcggcccgcgtcggtgcggagtagctgctttagccccgaccaaaccgtcctctacagcctcctggccccggcgcaggctgcccgtactgcccgtggcatgagggagccggaagagctgatgcccgattcgggtgctgtgtttacatttgggaaaagtaaatttgctgaaaataatcccggtaaattctggtttaaaaatgatgtccctgtacatctttcatgtggagatgaacattctgctgttgttaccggaaataataaactttacatgtttggcagtaacaactggggtcagttaggattaggatcaaagtcagccatcagcaagccaacatgtgtcaaagctctaaaacctgaaaaagtgaaattagctgcctgtggaaggaaccacaccctggtgtcaacagaaggaggcaatgtatatgcaactggtggaaataatgaaggacagttggggcttggtgacaccgaagaaagaaacacttttcatgtaattagcttttttacatccgagcataagattaagcagctgtctgctggatctaatacttcagctgccctaactgaggatggaagactttttatgtggggtgacaattccgaagggcaaattggtttaaaaaatgtaagtaatgtctgtgtccctcagcaagtgaccattgggaaacctgtctcctggatctcttgtggatattaccattcagcttttgtaacaaatggtgagctatatgtgtttggagaacctgagaatgggaagttaggtcttcccaatcagctcctgggcaatcacagaacaccccagctggtgtctgaaattccggagaaggtgatccaagtagcctgtggtggagagcatactggggttctcacggagaatgcttgtgtatacctttgggctgggacaattggtcagtgggtcctggccctttcttttgaaactttaaaacca

SEQ ID NO: 98976 - DNA, 784 bp, Homo Sapiens
gaggagggggctcacccagtgctcctgtagctcaggaggcaggcctgagccctgcacccgccccacgaccgtccagcccctgacggggcaccccatcctgaggggctctgcattggcccccaccgaggcaggggatctgaccgactcggagcccggctggatgttacaggcgtgcaaaatggaagggtttcccctcgtcccccctccatcagaagacctggtgccctatgacacggatctataccaacgccaaacgcacgagtattacccctatctcagcagtgatggggagagccatagcgaccattactgggacttccacccccaccacgtgcacagcgagttcgagagcttcgccgagaacaacttcacggagctccagagcgtgcagcccccgcagctgcagcagctctaccggcacatggagctggagcagatgcacgtcctcgatacccccatggtgccaccccatcccagtcttggccaccaggtctcctacctgccccggatgtgcctccagtacccatccctgtccccagcccagcccagctcagatgaggaggagggcgagcggcagagcccccccactggaggtgtctgacggcggaaggcggatggcctggagcccaggcctgggctcctgcctggggagacaggcaggcaagaagaagatccgcctgtaccagttcctgttggacctgctccgcaacggcgaccttgacggacaagcatctggtataggtggaccaagggacaaaggggcacctttccagttctcggtcca

SEQ ID NO: 98977 - DNA, 1300 bp, Homo Sapiens
  misc_feature (698)..(708): n is a, c, g, or t
  misc_feature (1030)..(1030): n is a, c, g, or t
  misc_feature (1034)..(1034): n is a, c, g, or t
  misc_feature (1128)..(1128): n is a, c, g, or t
  misc_feature (1195)..(1195): n is a, c, g, or t
gagctctgcctcctcactcacggaaatgccttggcagagtctggggtccctggactgagccatcagctgggtcactgagacccatggcaaggaaacaaaataggaattccaaggaactgggcctagttcccctcacagatgacaccagccacgccaggcctccagggccagggagggcactgctggagtgtgaccacctgaggagtggggtgccaggtggaaggagaagaaaggactggtcctgctcgctcctcgtggcctccctcgcgggcgccttcggctcctccttcctctacggctacaacctgtcggtggtgaatgcccccaccccgtacatcaaggccttttacaatgagtcatgggaaagaaggcatggacgtccaatagacccagacactctgactctgctctggtctgtgacttgtgtccatattcgccatcggtgggactggtggggacattaactggtgaagatgatcggaaaggttcttggggaggaaacacacctttggtgggccattaatggggtttgcaatttcctggtgccattggctgatgggccggcttcgctcccaggtcgcagacaccacataccacttaatcctctgcacgccgcatcctcctccctaccggagtgtcaactgcccgcttcccctccagggtggcttcccctaataaaactagcaggcggttccctnnnnnnnnnnngagggagaaccccggggggctatcctctgggggcggacgagggtgaatttggcccaccctttctattttgcggggaattagcgcggggtcgctccccgtggggctcactctttatgtgggatccattccccataaatattgctccccggagcaacatatcgagacgaacctgtgcagacccacctccatttgacggcgtcacacatatcggtctatgatgtgggacactacaccggcagctgacgacatgaaccactatcttctcgcctctagtataactcactaatctattattcttctctcggaggatgaaccgccatcncctnccgccgcgaactgcgtgctgctgttgttgtgggaggaagagaataccatcactcaatgcgctctgtcgtagtgatttgctcctgcgtacagcgngagcctacagtgctcgagtgcagtacgtgcacagattatgtcaccatgctattatttatagacgcangcgtgtgatactgtagtgcacttcatctggttcgtgctggagcgacacgcgctgtgtggcgcgtgcatgtctgtgtgtctctgtatacttacgccctgtagcacc

SEQ ID NO: 98978 - DNA, 1464 bp, Homo Sapiens
  misc_feature (421)..(513): n is a, c, g, or t
  misc_feature (1015)..(1025): n is a, c, g, or t
atcctctgattatgcattttatctgtcttctacgcctctgcggtgcggcgcaggaatatgtgttttcttttcccctcaaagtccacctacctagaaaccaagcccacggtcttggccgtgaccctgataataaatgtgctctatggatggcgccagcccctccctccccaagccggaggcgtcatctctcttctgtaccactagagggagctctgatgcagctggagagcagcgctcaaggctctcgcccctcccctccctaacccttaccttcagtctccaccagcctgaagggcctcctaggggatcctcaggcggcccccaccagggcacaccctactgtccttgtgcctcacgccccctcctcatcctgcaccccttccatcccaccttccctttcaataaacagctgggatggatnnnnnnnnnnnnnnnnnnnnnnnnnnnnnnnnnnnnnnnnnnnnnnnnnnnnnnnnnnnnnnnnnnnnnnnnnnnnnnnnnnnnnnnnnnnnntcaagagagcgcggcagagacgacagaagagcacgcctctaggaggtagagaagcagcgaacaacagccacgccacgagaccagagctagcatcgacgaaagggcagctgtcgcctaaatagacgaagcgcaggtatataagacaggaggcgggaggcgagggcgaggcactaccatacacaccacaactaacacacaaacaccgacagcaatcaacaaacaccattccgcacatcaattgtccttaccgttcacgcttcactctacacacacaaaataaatataaaatagaatacacctgataatgaatcactcactccacaccaccacaccaaccctactacactacacaccttcactactcagctaaccaataccaacagacccagaactaagcacatctatgacacaataaaacatcaagcaatctaatcccaacacctccctcaatcccagtaacactcatcaccacacaaaaataatcctatctcacacacacacnnnnnnnnnnncgcactacccaccactactaatctcactccccacaccacactctatacacacacctcatacatgataggacggcgagacgagaacaaggttaagagccgaacgacctctcgcacgcgacaggagaaagagtgacagagagcaggcgacgggaagcgcgggcgatggcagagcgcgtgaccgagggtgaggtacgcgagcgcacggaggggtgcgcggtaccacgacatcacccccgcatgctcgcctacacaacgtgttcactttatcactccaactctcattactcatctctaactctaccaaacatcacccactaacttccccagctactcccagtcgtccacacccgaccttgttagtaaccaatactccaataaccatcgacgccttctattctctaattcacaccgtccccctgctacacctcgactccaacca

SEQ ID NO: 98979 - DNA, 939 bp, Homo Sapiens
ctgactacaggggaagggagggcaggggccgctacttgagcagccttcgcatggtgcccaacgaagggctcctgtactcccgcccgaagtggttccagtggttcaggtagttaaacagctggtagagcagcagccgctggtcgaagcccggagccttggggatcttccggtggtaggcggtgaagaaggatctggggaaccccccaaacatcaaggcgattgccagttcaaactcggaatggccatagaaggaagccgggtcgtaaataatgggccccacgtcgtcctcagccacgtttcccgaccagagatccccgtggagcaacgcggggacaatctctaggccacaaaacagatccgggatcttcacctgtagccgggaccagagttctcgtgcctctcggtcagcatagtccttctcaatgaggtccagctgcgcctggagccggtgccgggcgaaaaaggtcggccagtcatcctgccactcattcacctgcgggatgaagccgcagcacgtcaccgtgtggaagccgaacttgtccacatactgaggctcagcaccctcacctcttcggcccactgtgttctcctcctccttcaacttctccctgagcttctggttgtaaagatgcaaatctgccatctgctctccaagttttgatgcttgactgctcaagctcttcatcttcaaatgctccatcacaaaggcggccccacctcccggcaggtcgatgaccattcatgggcctcggcacccagcaccaggcccagtgctccggagggcctccaggctggccacctccccctcaaacatctgccgggcctgcgtcctgcggttgactttgacgaacactgggcactgcgtccgtgtcgtaggctcggccctcgctgatgcagccggcgccgggccgccgaaggcccgcaggtcgcggtgcgcag

SEQ ID NO: 98980 - DNA, 1069 bp, Homo Sapiens
gattcccgggatctcgagcgggacagatccaagttgggagcagctctgcgtgcggggcctcagagaatgaggccggcgttcgccctgtgcctcctctggcaggcgctctggcccgggccgggcggcggcgaacaccccactgccgaccgtgctggctgctcggcctcgggggcctgctacagcctgcaccacgctaccatgaagcggcaggcggccgaggaggcctgcatcctgcgaggtggggcgctcagcaccgtgcgtgcgggcgccgagctgcgcgctgtgctcgcgctcctgcgggcaggcccagggcccggagggggctccaaagacctgctgttctgggtcgcactggagcgcaggcgttcccactgcaccctggagaacgagcctttgcggggtttctcctggctgtcctccgaccccggcggtctcgaaagcgacacgctgcagtgggtggaggagccccaacgctcctgcaccgcgcggagatgcgcggtactccaggccaccggtggggtcgagcccgcaggctggaaggagatgcgatgccacctgcgcgccaacggctacctgtgcaagtaccagtttgaggtcttgtgtcctgcgccgcgccccggggccgcctctaacttgagctatcgcgcgcccttccagctgcacagcgccgctctggacttcagtccacctgggaccgaggtgagtgcgctctgccggggacagctcccgatctcagttacttgcatcgcggaccgaaatcggcgctcgctgggacaaactctcggggcgatgtgttgtgtccctgccccgggaaggtacctccgtggctgagcaatgcccagagttcctaattgcctagacggaacttgggagggactttgccctgtcgaaatgttctaaacgggccttacaagctggtgggacacggacgggtccgcacttgtgttaaccagaggggcacgtgacagtcgatctcatgtggtggacacggtgtgtccaacataggcgcacccgcgggcacgtgacaaccccgttgaccgcataacattggcaatagagctccacacag

SEQ ID NO: 98981 - DNA, 1638 bp, Homo Sapiens
  misc_feature (349)..(373): n is a, c, g, or t
  misc_feature (466)..(524): n is a, c, g, or t
  misc_feature (606)..(648): n is a, c, g, or t
  misc_feature (1105)..(1105): n is a, c, g, or t
cgggtgggcgccggcggctcctcttaaccacaggttccagaagtcctctgcagaagtgcttccctctctcatttccaggaccacaattcccagagacttcggcttcacgacgtttctcttttgcccgatctctcccggagctggctgggcttcggccggccagaggcccacagcgacgacgtgatccgtcgtgagcgggtcccagggtttcctcggcggcccttttttctctcccctcggtcgtcccccttgcaggctgtcgcggctggcctgagcggtgacctggcgggtcgcgcctgcgctctgccctgtttcctgcctggctggtggcggcggccattttgttcannnnnnnnnnnnnnnnnnnnnnnnnggttggagcgcagtgtccggagcgggctggggggagagagcccgagagcagggttcggtgccttttcctctgtccccagccggtgcccagagnnnnnnnnnnnnnnnnnnnnnnnnnnnnnnnnnnnnnnnnnnnnnnnnnnnnnnnnnnnacccgccaaaaaaccaaagctgaaaccgacgctatacacgggacgggcagtaagacaatatctaatagtgtgctgcacgctnnnnnnnnnnnnnnnnnnnnnnnnnnnnnnnnnnnnnnnnnnntgatctataccacccgcgcagccggagcccacacacaaacaccaccctccttattcccccgcgcgctgaccacaccgccacacgcactcccccatgcatccccaactgactcccccacgacgccctccagtacccaaaacgaatacacccgcgaccccacaccgcacgcactgcgaccccccgaaccgaaaatatacgcgcggcccgaccccaccgcacagaactcggtatcgcagcacgaagggcaagtcggccgcgatgctacatatacccacctaaccccccacgaacccaagcctaagagaacggcccctaactcaccaagatcaaaacaaccatgcaattctccatgtcaacgcatcaccccccctactatagcccaacgctcgctcatgtgctcgcgcacatccccccctgcagcagatctcgaatacagaccagatctcctgcagtattnatagcgacgctagactgtcacagtcctctcacctctcaaacgtacacccacgcctacccccccattcgagaaaaggcccggcacgtccctacatattgaaacacgtcgctgcccgcacccgcgactgctagagcgcccaataggggagaagaaaaacaatcaaccacttcaagctcaccgcacaactcacaaaaacaatacacgggcacaataactctcggtttgctataagtaaaagagtacgacactcatacaaacaccgcctcaataaagagcagaacacgaagaagcagaacaagagacaacaagaatatcgccgagccccgactgtacgagacgcgagacatcccaccgcaagagaacacccagcacctgctctgcaatcctcgctcgaaatcgacaccttcgtccggcggccagcacacacactccacggggatatgaacagccgcaagtactccgacgctgccacctctctcacacaacaagtgaccgccctcgtcccatgcatgctacgccagtattcatataga

SEQ ID NO: 98982 - DNA, 831 bp, Homo Sapiens
gacgcagccaccttcctcaccagccagcccacagcggtttgttcccccttctcgggagtgcgccaatgcctgggccgacccaaaccctgtccccaaatggcgagaacaacaacgacatcatccaggataataacgggaccatcattcctttccggaagcacacagtgcgcggggagcgttcctacagttggggaatggcggtcaatgtgtattctacctcgataacccaagagactatgagcagacagtgacatcattgcatgggttaatgacatagtatctttaaactacacaaaagtggaacagctcttgtccaggagcggcctatcgccaatctcatggacatgctcttccctggctgcatctagtcccgaagaaagtaaaactctcaagcaaagctggaacatgaatatattcacaattttaacacttctgcaagcactcatttaacgcgaatgaacgtcgactaaggtaattccagtggagaagctagtgaaaggacgtttccaggacaacctggattttatccaatggtttaagaaattctatgatgctaactacgatgggaaggagtatgatcctgtagaggcacgacaagggcaagatgcaattcctcctcctgaccctggtgaaacagatcttcaacctgccaaaaaagtctcaccatgcaaaactcccccacagcaggtgcagctaaatcaagtccagccagctaaaccaggatccacaccttctcgaccctcatcagccaaaagggcttcttccagtggctcagcatccaaatccgatcaaagatttaaaacgcaggtcatacagttaatgaacggtacg

SEQ ID NO: 98983 - DNA, 885 bp, Homo Sapiens
tgggcttcatttgcacctggattgagtcgtcggcatccaggtcaaacttcgtccacgtgccgctgggtccacaccttccacgcggtctgtgaggtcactgcttgccgtgggccaggatgaagtcgtagatgagtaacagccaggggctcgccccggatgaatggccccacccagaaaatccagtggttgctgaagttgtgtgtgatcaccgcggagccaaaggaccgagcagggttaatcccacagccagtgtagtcaatagccaggaaggtgtccaaagggctacagagaggccgatggcaaggggggctgagccaccaaggtcacggcgcctccggtcggtagtagccagcacgcatagcaccagctggagggtcccgatgatctcgatgcccaggccctggcccgagttcacaccatcagccaggtcattgcggccaagcgagttcccagtcagggaggaggtgatgcctgagaggatggcggtggcgacgatggcccccacgcactgggcgatgatgtacatgagggcacggaagatgctgatctggcagctgagcagcagccccagtgtgacagccgggttgaggtgggcgccgctgatgtggcccacactctgcgccagcgtggcgatgctcagcccgaaggccagcgacaccttcacgttgtcctggaccgccgtctggttgttccccaccgggtatttgaagcccagggcagaaccgatgctgatgaagacaaagagggtcgtggccaggaactcggccaccactgccctaccagaagagcttcttcttgaactcgctggccatgctggcagggggcttggcctgagaccgctgccgggtgctcaattccctctgagagctgagccacagcctgggc

SEQ ID NO: 98984 - DNA, 741 bp, Homo Sapiens
ctggcacaacgctgcgggcatcccgctgaaaccgctgtacgaggatttcactgccctcagcaatgaagcctacaagcaggacggcttcacagacacgggggcctactggcgctcctggtacaactcccccaccttcgaggacgatctggaacacctctaccaacagctagagcccctctaccttgaacctccatgccttcgtccgccgcgcactgcatcgccgatacggagacagatacatcaacctcatggggacccgatccctgtctcatctgctggtgagacatgtgggcccagagctgggaaaacatctacgacatggtggtgcctttcccagacaagcccaacctcgatgtcagccagtactatgctgcagcagggctggaacgccacgcacatgttccgggtggcagaggagtgcttcacctccctggagctctcccccatgcctcccgagttctgggaagggtcgatgctggagaagccggccgacgggcgggaagtggtgtgccacgcctcggcttgggacttctacaacaggaaagacttcaggatcaagcagtgcacacgggtcacgcatggaccagctctccactagtgcagccatgagatgggccatatacaagtactacctgcagtacaaggattctgccgtctccctgcgtcggggggccaaccccggcttccatgaggccattggggacgtgctggcgctctcagtctccactcctgaacatctgg

SEQ ID NO: 98985 - DNA, 1050 bp, Homo Sapiens
  misc_feature (872)..(873): n is a, c, g, or t
gggtccggaattcccgggatcggcgcagaggcgcgtcttgggtccccgcggcggcgccggtgccaagcgctggtttgcggatacccaggcagatctgcagtgcctaatgccatgagtgtggtggttcagcatgtggaggaaaaagctgtgcactcctggtcgcgcatctccacggcagggaagaaggccctggaagaggcactgcttgtctttaacccaatgagccaggatctcagtgccacagaggcccagcttgtggccttcctgcagggcctgcgagatgatggcttccaacctaccatcctgcgcagtggtgatgtctatggctatagttcatgcacagctaatcccccaagccagacgaaactgcaagctcgtgcccctaacccaactgccacatcacctccagccagtgctccccgaactgccatgcggttgcctgcaggtcgggccacactgcttcccatgccgctatctggcagactggccaaagcatccacaccagcccttgccaagcatgctaccaccaacctgctgctgagctctctgaagcaatcaagtgccagccatgcccggggtgcagcagtgggcttccccacccacctttatccaggtgtctaccctgccatgcggctctctgttgtccttgaggccctggttccacttaagactcccatgccctgcttgggtgccaagcacaaggcacagtcactgcagctctcacttgcagactctcctctgaaactgcggaaaagttcagggaaggggtcccggggaaccctcggcccaaagctcccagaaaaaacacaagcaaagggcccccagtgtctgactcgcaaaggcccctgggggcttggacccccgaacgaggnnctctgggcaccagaagcaaaaaccaacagaagccacctggggtcccccccagtgtcccggccgaaatggaaaagggggggcttctgggcccctggggccacccaaaacacagcccccaggggccaaagggtaggcctccgaaaccaactggggcccaaaaggcttgccttccgtgga

SEQ ID NO: 98986 - DNA, 877 bp, Homo Sapiens
ctggtgcacaggaaggatgaggaagaccaggctctgggggctgctgtggatgctctttgtctcagaactccgagctgcaactaaattaactgaggaaaagtatgaactgaaagaggggcagaccctggatgtgaaatgtgactacacgctagagaagtttgccagcagccagaaagcttggcagataataagggacggagagatgcccaagaccctggcatgcacagagaggccttcaaagaattcccatccagtccaagtggggaggatcatactagaagactaccatgatcatggtttactgcgcgtccgaatggtcaaccttcaagtggaagattctggactgtatcagtgtgtgatctaccagcctcccaaggagcctcacatgctgttcgatcgcatccgcttggtggtgaccaagggtttttcagggacccctggctccaatgagaattctacccagaatgtgtataagattcctcctaccaccactaaggccttgtgcccactctataccagccccagaactgtgacccaagctccacccaagtcaactgccgatgtctccactcctgactctgaaatcaaccttacaaatgtgacagatatcatcagggttccggtgttcaacattgtcattctcctggctggtggattcctgagtaagagcctggtcttctctgtcctgtttgctgtcacgctgaggtcatttgtaccctaggcccacgaacccacgagaatgtcctctgacttccagccacatccatctggcagttgtgccaagggaggagggaggaggtaaaaggcagggagttaataacatgaattaaatctgtaatcaccagctatttctaaagtcagcgtctcaccttaaaaa

SEQ ID NO: 98987 - DNA, 886 bp, Homo Sapiens
ccgtctggggatgacgctagtgtgccctgcggttcccgctgggacattgacacagacaggaccccatactacagcagaactccccagaggacagcctcaccacgtgcacagtgaacggcctgtgtgggtgctccaagacgacagcctcacagcgtgcacagtgaacggcctgtgtgggtgctccaagacatcagaggggtcccagagttctccagaaaaaataactattccacgtagctgctagcgtgagacgctgggccaacccgagcatgtggggaaggcaccttatgctctgccatcacccacaatgtgatggtcttggggtcggggctttccgaggtgagtaagtcatgaggacccattgtcgtggaaggcttgagtgcccttataaacgaggcctgagctggaaggcgctgtgaggaacaggccctccccagatggcaacttggtcttggacttcccagtccccataaatgtgagagatgattgtctgttattttaagcttcccagtcagttacagcagccaaacttccagcttcctctgcccggcaacgtccctgcccccatctcccctccaccgccaccagggcctgcatccccatctgcaaaggggacagggtgcccacgccttctgaagcacgcgctctccaggccgctctccgggcgtcaccccgccctgctcccctcgcccctgcacagcccgagtccagcctggtcgctgccatcaggacgatcaggaccgaccgccaccatcagtggggaccggccagggcggttaggcccggtccggggccccaggtcccgcgtccccgccgaggccaggcagggaggcctggctgccccgggctttagaaccaaaataagccccgaaatgattgcggcgcc

SEQ ID NO: 98988 - DNA, 1122 bp, Homo Sapiens
cgattccagagaatgttcagagatgctgccgctactgctcgtattacccccatgggatggggtcattttttctggagggtcctttctccatttagatttatggtccttccagtctcttgttgagcttcgaatgtttgtcttcacagagaaatatagtcctgtgtccactgcaaaaaggagtaccatcaccaagcagaaagagacttggtacccagggtggaaagaatgatgagatggttgacacgtgacgaaccttgagtgatggtgatgttcacagtctctgaagacacatttttactcccaacaagccccccgcagaagtaggacccgcggtcttgaagtgtggcttttggaatgtagaagtcagaattatgatgaaaatacttcctgcctttgccattctgtaaatatgtgaccttatgcagagcagtgttcttccagctgtgacacctcaggtgaatagggtcttcctccttgaacacccaccgaggggcctggagcaacagccagccgatatggacttctagctgcaccgggtcactgagggtggagaggtttgtctggcacctgtactctccactgtcgtcaactgtggcagcgtcaatgaagtagctcgaggcctggcttgagatgaggctctcattgtgaaaccactgtgtggaattgtcctcaggggagtaggctccctggcacttcagagtcacactgtccttctcgagcaccctgtaccattgaggctccaggaacaccacagcctttgggagatcttcagcccgcatgccagctgaaactagaagtagcagagcagttgggaggagcagctgccacatgatgccacactggagaggacaagtcaccaaagatatccggagccctaaagggaccaaaccgactagacaggaggaagtaaacagcctttccccagcccctccacccatctctgtcacccaccaatttccttttcttgaaacttcatctgacttctcagtctgaagtctggcaagggagccccaccatagaacaggaccaggaaggaaagagcctggaggcaaggtgggtgggtctgccccctttactccctcaaaggtctgtggctgagcatctgaggacacacacagaatc

SEQ ID NO: 98989 - DNA, 944 bp, Homo Sapiens
  misc_feature (27)..(27): n is a, c, g, or t
tcctcgttggtaagaacagcgtcaggnccccaggtcagtgatgtcccccatcatagccgcttgatggaggtgaggtttttatagaactcggagtccagagaagggcagttcatcccaccgaggctatagaagacgctgtggtggtgcccaagcagttgcctcaggaagaaggatgcaaatggcacgtccaccacaattccctcatacacagccttccccagcatcttccccacaaactcgaagagctgcaggtaattctcatggatgtaggatgtgggtgaggggtacagcctctcatccccactggttgtcttgaacagattgagtgctgggtcaaaaactctcttgatgatctcttccaagaactccttaaaaacaccgtcttgatcaatccctgcttcgtccaccccgaggtcattgacaaacttcacacggatgacccccttcatggcgtgctgggagagctgcctaagctgctcgtagccgtcctccagcatcctggaccggcggatggtgatgtgagtgacatgcggggaggcagagctggtttccaccagccccagtttctccttctccttggtaaccatggttcgaaacagtagaactctgtttttgtgagggatgacatgtgggatgtactgcaggatcaactgtgcccgttttctgtccctgtcgagttcttggaagagcacgctaggtttgagatcctttcgcagccagtggtcctcgggggtgaagcgccgccggcagtcccgctcgtacagcaccataagccacccgtggacagactggaacagctccaaggtctcacccttggcgttctctacaattccatcccagatcatcttaaacacaaaagaattcaggaaagaggagatagtgaccagctcttccagtttgaatgaaatctgttcttcataaacttcaatgtcatcaaggattgt

SEQ ID NO: 98990 - DNA, 1093 bp, Homo Sapiens
ttgtgatctggcggcggctgacccttcccttgggaccccgaccctgtcgccccggaccctcccacggtcactgttcacggccccctccttcaggacctgggctggcccagccccaaggcgtccaccaccccgtacgcttgccgcctctgctcagcacgaggggccccagtccccgcttctgccgccggcgccacagcagggagcagagccacgaggactatgaccgccagcagggccacaagcacagccactggcagcatgcctcgtgagttctcatctgggttccggaagggcacagtgcttgcgttggtggaggtcgttggagacatcattgtagatagttttacgctagagacctggggtccactggccccgctggagggctccagagagccagttgtcatggtaacagggggtccagtggtcccagtggaggtctccagagagtcagttgccatggtaacaggggctccagaggtgcctttggaagtctccagagagacagttgccatggtaagagggggtccagaggtgcctctggaggtctccagagagctagctgccgtggtaacaggggctccactggtcctactggaggtttctggagagttcgttgttatggttccacctgtcacggtgtgggatcctagagagtttgctgttatgggaacagcaggatgactggttgcatgaggggtttcctggggcactgatgacatcttgatggaaacttcctggtaggttgttggctcaggtaaaggggaaccagtgctggcaccaatggaagtccaaagaggggatccctcattgatggaagttgagggaggtagggctgaggtctggtccccagtgctgtcggccttagggtcacttgttattgaagtggtgtacatctttgagctcaggggctcgctagtagagaccaaaggctctccggaggtgggtgtctgcactgctgttgtgctccccagagcgtctgggcttaccaccagcaccccaaggagaaggagaagcgtggccatttccaggcaaacaggcaggagcaagagctgggaccggctcggctgataaggacgcagcactggggccagtc

SEQ ID NO: 98991 - DNA, 832 bp, Homo Sapiens
gcggctcggtgtgcagagcacacaatgccccggctggaaaacagaaacccacatgtgcacgtagttagtctcggtaattattgattgctgtagcgcgtataaacaatgtatgcaattaagggtaattaaacctcaactaccgcctgcaaaaatagcaaactttccctgcaaaggcaggagctgagctcctgggaacggctctatccctcctgcagcgtcccgggacaggccctcggattttgggggacccttccctggctttcagagtttcttgaacgttctctccctggtgctgcctccgccacccttcggtagccactcgctctcggctgttcgcactaaaggcggcccctcgtattaacaacgggccctacttctgctgtccctccaggggcggactcggagaagagcacggtggtggaaggcggtgaagtgcgcttcaatggcaagggaaaaaagatccgtaaacccaggacgatttattccagtttgcagttgcaggctttgaaccggaggttccagcaaactcagtacctagctctgccggagagggcggagctcgcggcctcctttgggactcacacagactcaggtcaagatctggttccaaaacaagcgatccaagttcaagaagctgatgaagcagggtggggcggctctggagggtagtgcgtaggccaacggtcgggccctgtctgctggctcccaagccgtgccgcccgggctggaaccctaactcttcatccgggaagggctcaggaggaaacgcggctctatatccccagctacacatcgtggtaccttcagcgcacaagagctatagagaaaccag

SEQ ID NO: 98992 - DNA, 436 bp, Homo Sapiens
ctctgtcccagaccctgtgtcccccacactgccccctgtccttcggtgcttcccagagacccctttgagctggcctgtggggcacgggaagccccctggatgggaggcggggccacaggtcggctagagggtctccaccaggcccactgaacagaaccccacggctgccagaatgttccctgagcccacactgtggccagtgggacagtcctggtggctgacatcagcgtccatgcttggctcagggcctggggcggggtcctgggtagagtcctagccccagagccccagcccctcatgtcttgccgcccttcctccatgtgtttgtaaatactctggcatcctttggccctgagaaggtttttaaatgtgttatttacttctctaaacatgacgattgctataaaaataaacaaaagtttagaaaaatgaaaaa

SEQ ID NO: 98993 - DNA, 1037 bp, Homo Sapiens
gtccgtctgcagtcggcagcctcgccggcagctcgctcggcccccgcttggcccggcccgcaggtaggagccgccgagggacgcggcgcccggttcccggccccgcctgcgccgcgcgctccccgctcccgccgcccgcttcgagggttctctccccttgccaccatgagcgagtcatttgactgtgcaaaatgcaacgagtccctgtatggacgcaagtacatccagacagacagcggcccctactgtgtgccctgctatgacaatacctttgccaacacctgtgctgagtgccagcagcttatcgggcatgactcgagggagctgttctatgaagaccgccatttccacgagggctgcttccgctgctgccgctgccagcgctcactagccgatgaacccttcacctgccaggacagtgagctgctctgcaatgactgctactgcagtgcgttttcctcgcagtgctccgcttgtggggagactgtcatgcctgggtcccggaagctggaatatggaggccagacatggcatgagcactgcttcctgtgcagtggctgtgaacagccactgggctcccgttcttttgtgcccgacaagggtgctcactactgcgtgccctgctatgagaacaagtttgctcctcgctgcgcccgctgcagcaagacgctgacacagggtggagtgacataccgtgatcagccatggcatcgagaatgtctggtctgtaccggatgccagacgcccctggcagggcagcagttcacctcccgggatgaagatccctactgtgtggcctgttatggagaactcttggcacctaagtgcagcagctgcaagcgccccatcgaaggactcggcggaagcaagtatgtggccattgaagaccgacactgggaaccacaactggcttctcctgcggccggttggtcatacctccctgggggggccaaggcttctttacgggatggagaccaaggtgctcttgccagggctgtaacccaggcagggcccctaaacccagggctccgtgaacc

SEQ ID NO: 98994 - DNA, 1500 bp, Homo Sapiens
cggcagagctcgagaggcggctgccgggctgcggggcgccttgactctccctccaccctgcctcctcgggctccactcgtctgcccctggactcccgtctcctcctgtcctccggcttcccagagctccctccttatggcagcagcttcccgcgtctccggcgcagcttctcagcggacgaccctctcgctccggggctgagcccagtccctggatgttgctgaaactctcgagatcatgcgcgggtttggctgctgcttccccgccgggtgccactgccaccgccgccgcctctgctgccgccgtccgcgggatgctcagtagcccgctgcccggcccccgcgatcctgtgttcctcggaagccgtttgctgctgcagagttgcacgaactagtcatggtgctgtgggagtccccgcggcagtgcagcagctggacactttgcgagggcttttgctggctgctgctgctgcccgtcatgctactcatcgtagcccgaccggtgaagctcgctgctttccctacctccttaagtgactgccaaaacgcccaccggctggaatagctctggttatgatgacagagaaaaatgatctcttcctcgtgtgacaccaacacctgtaaatctgatggggaatgtttaagaattggagacactgtgacttgcgtctgtcagttcaagtgcaacaatgactatgtgcctgtgtgtggctccaatggggagagctaccagaatgagtgttacctgcgacaggctgcatgcaaacagcagagtgagatacttgtggtgtcagaaggatcatgtgccacagatgcaggatcaggatctggagatggagtccatgaaggctctggagaaactagtcaaaaggagacatccacctgtgatatttgccagtttggtgcagaatgtgacgaagatgccgaggatgtctggtgtgtgtgtaatattgactgttctcaaaccaacttcaatcccctctgcgcttctgatgggaaatcttatgataatgcatgccaaatcaaagaagcatcgtgtcagaaacaggagaaaattgaagtcatgtctttgggtcgatgtcaagataacacaactacaactactaagtctgaagatgggcattatgcaagaacagattatgcagagaatgctaacaaattagaagaaagtgccagagaacaccacataccttgtccggaacattacaatggcttctgcatgcatgggaagtgtgagcattctatcaatatgcaggagccatcttgcaggtgtgatgctggttatactggacaacactgtgaaaaaaaggactacagtgttctatacgttgttcccggtcctgtacgatttcagtatgtcttaatcgcagctgtgattggaacaattcagattgctgtcatctgtgtggtggtcctctgcatcacaaggaaatgccccagaagccaccggattcccaggacggaagcaaaataccggggcactacaggttcagacaataac

SEQ ID NO: 98995 - DNA, 935 bp, Homo Sapiens
  misc_feature (911)..(911): n is a, c, g, or t
tgagcagccttccttctggatttggaagacacgaagggactgcgtggttcaagaggcgcttgaaacccgacattagtcatgaatggtcaactactgtggcataaacatgggccgtgggggcctcaatccctttgaagaccaccccaggagaaagatggccggaactgtcccaaagctgaatgacagcaagggtttggagtgatctagctcagatctgtctacgtggattcccagtgtggagtccaaggcggtagtaattcaggatccctgcttcagctcggaaatcctcaaatccacaggcagcggctacttgctctgagaggaaacccaggtcagaagggaaaggtgtgtaatgatctgctgagtatttcttactgtcccagttataatggtagcctacggtcacccaacgcagtttctccagtaaacttcggggtctccgctttagtcgcttctttatacctcaggaactctttgctctgttcccacagatcttgggtctcttctttagacatgtgtttgtccaggttacatacattaggtttctgggaatataacttaaggcactgtttcacccagtgccactggtaacctgggaggaaggggctttgggataaaaataaacgccaggatagcctttgagtccataggcttgccacttgctgacgggctgaagacctgctctatatgcattctgctcactgacagaagacacatttagctagagatttgatcaccttttgggcaccaggacccttgccacgggctgcgtgggccgccgagaagtcgatgaccccttccaggtctgcggtcacgggccggctctgacggtagaagcggaaaagtctccgaaaggcgtcatccccgggctcagtcgccagagtcgccacagagcccacggccgcatccantactcgtgggcagtaccagcctgc

SEQ ID NO: 98996 - DNA, 812 bp, Homo Sapiens
ggcacggcctagcgagtggttcttctgcgctactgctgcgcgaatcggcgaccccaggtgcctcgaccactatgccgcgctctttcctcgtcaggaagccctccgaccccaatcggaagcctaactacagcgagctgcaggactctaatccagagtttaccttccagcagccctacgaccaggcccacctgctggcagccatcccacctccggagatcctcaaccccaccgcctcgctgccaatgctcatctgggactctgtcctggcgccccaagcccagccaattgcctgggcctcccttcggctccaggagagtcccagggtggcagagctgacctccctgtcagatgaggacagtgggaaaggctcccagccccccagcccaccctcaccggctccttcgtccttctcctctacttcagtctcttccttggaggccgaggcctatgctgccttcccaggcttgggccaagtgcccaagcagctggcccagctctctgaggccaaggatctccaggctcgaaaggccttcaactgcaaatactgcaacaaggaatacctcagcctgggtgccctcaagatgcacatccgaagccacacgctgccctgcgtctgcggaacctgcgggaaggccttctctaggccctggctgctacaaggccatgtccggacccacactggcgagaagcccttctcctgtccccactgcagaccgtgccttcgctgaccgctccaacctgcgggcccagctccagaaccactcagatgtcaagaagtaccagtgccaggcgtgtgctcggaccttctcccg

SEQ ID NO: 98997 - DNA, 1368 bp, Homo Sapiens
  misc_feature (826)..(826): n is a, c, g, or t
  misc_feature (850)..(850): n is a, c, g, or t
gggtccggaattcccgggatcgcgggcggtgtcgctgtggggagctggtgctgttctcagatgtttccttccaatgggcttttggtgtaggatgtcggagaaccaagaacaggaggaggtgattacagtgcgtgttcaggacccccgagtgcagaatgagggctcctggaactcttatgtggattataagatattcctccataccaacagcaaagcctttactgccaagacttcctgtgtgcggcgccgctaccgtgagttcgtgtggctgagaaagcagctacagagaaatgctggtttggtgcctgttcctgaacttcctgggaagtcaaccttcttcggcacctcagatgagttcattgagaagcgacgacaaggtctgcagcacttccttgaaaaggtcctgcagagtgtggttctcctgtcagacagccagttgcacctattcctgcaaagccagctctcggtgcctgagatagaagcctgtgtccagggccgaagtaccatgactgtgtctgatgccattcttcgatatgctatgtcaaactgtggctgggcccaggaagagaggcagagctcttctcacctggctaaaggagaccagcctaagagttgctgctttcttccaagatcgggtaggaggagctctccctcaccgcctcccagtgaagaaaaggaccatttagaagtgtgggctccagttgttgactctgaggttccttccttggaaagtcccactctcccacccctctcctcaccattatgctgtgattttggaagacccaaagagggaacctccactcttcagtctgtgaggagggcttgntgggaaggagatcatgctgtgccntttggaccctggtcagttagaaacagttttggaaaagtgagctctcggttctgctctgagatggtcagagaagatgcgggccaggagacttactcaggtgggactgggcacagggcaggtatgtgggaggctgggctgcttagtgtcttctagtcacctctgcttgggctgagttgacagaggtcagtcattacagccccttatgcctcttccatgggaacaaatactgtgcagatgtttgtaagttaaacataagacacaggggctgttgcttttgaacagaaccctatattactctcctgggatctgagtttctgcaggtcatttgtatgtaggaccaggagtatctcctcaggtgaccagttttggggacccgtatgtggcaaattctaagctgccatattgaacatcatcccactgggagtggtttatgttgtatccccatcttggctggcttcagtttttgctgtagccctagagcactttgttgtgggaggctggccttcttgccctacctc

SEQ ID NO: 98998 - DNA, 827 bp, Homo Sapiens
  misc_feature (41)..(83): n is a, c, g, or t
  misc_feature (675)..(737): n is a, c, g, or t
agcaggagcagcagcagctccggaagcagagaagcgcacannnnnnnnnnnnnnnnnnnnnnnnnnnnnnnnnnnnnnnnnnncgcgcgctgggggcgagcccagcgcaccgcggggaggagggtgcgcttcgcagggcgctcggtactcggtcgggtgccgcaggggccgcagaggctgctgaggcggcgcggatcctgctctgggagctgcgcgccgtggcctacaccctggcgggcgcgcgctgacccgcttggttactccacgttgctgccgccgccgttgcaaacgcttccagcctccagctccctccttctcctgctcctccttctcttgctccaaacgccaacccagccacagacgatcagccgtcgcggttgcgttcaccccctgcgggatcacaacggcagcccttgcgacaccctggctggggagttttattcctgagggggttgcgcaggggctcccttggactcccaccctttcccaacctctgctggcttctccccaacgtggaattgctcgcttagggtaggtaggcacttgccaccctaaaatagatcctctctgtctcctcctgtctgcagccgggcagcccctcagtttgtccctggatgactccctagaccgtcaggctaataatctccatccccctcccctgcctctttcacttgnnnnnnnnnnnnnnnnnnnnnnnnnnnnnnnnnnnnnnnnnnnnnnnnnnnnnnnnnnnnnnncttgtcaggagcttctggagctcccgctcggagcgaaccttctgctgccaagagataacatcacgatcttgccgggagggggagattatg

SEQ ID NO: 98999 - DNA, 1199 bp, Homo Sapiens
  misc_feature (940)..(970): n is a, c, g, or t
  misc_feature (1068)..(1151): n is a, c, g, or t
cgccgggcgggcgggcactgcatgcttcttcctccgtggagcggagagcgagacagagctacagcgaacgagagagcggcgaaggcgggtagaggggcgcgggcgaggcggcgcagccatccccggaccaggggccgcgccgccaccatgctaaacaacctgacggactgcgaggacggcgatgggggagccaacccgggtgatggcaaccccaaggaaagcagtcccttcatcaacagcaccgacacagagaagggaaaggagtatgatggcaagaacatggccttgtttgaggaggagatggacaccagccctatggtgtcctccttgctcagtggcctggccaactacaccaacctgccccagggaagtagggagcatgaagaggcagaaaacaatgagggtggaaaaaagaagccggtgcaggccccacgcatgggcaccttcatgggcgtgtacctgccgtgcctgcagaacatctttggcgtcatcctcttcctgcggctcacctgggtggtgggcattgcaggcatcatggagtccttctgcatggtgttcatctgctgctcctgtacgatgctcacggccatctccatgagtgcaattgcaacgaatggtgtagtgcctgctggtggctcctactacatgatttccaggtctctgggcccagagttagggggtgccgtgggcctctgcttctacctgggcactacctttgtcccgaccatgtacatccctgcgccccaatcgaaaccctgcctggcttaccttttcccagccatgggccatcctccagggcatacaatgcacctggggggaaggccgtatccctgctgcaacaccacggctcgttttacgcgcacctgtggtgcctcccccgtcttgcccccctcccggtcgcccccttggctagtcccctccattctccttactactctgnnnnnnnnnnnnnnnnnnnnnnnnnnnnnnnatccctcatcaattcaatgcgcaaaaacctagaacgcggcgcgccttatgattacccctctttcccacccaccccacacatcttcctccaacaataannnnnnnnnnnnnnnnnnnnnnnnnnnnnnnnnnnnnnnnnnnnnnnnnnnnnnnnnnnnnnnnnnnnnnnnnnnnnnnnnnnntattgccgcctgtacacccgttttcttccggcgctctttccccactcc

SEQ ID NO: 99000 - DNA, 1070 bp, Homo Sapiens
  misc_feature (673)..(735): n is a, c, g, or t
tttccgggatacgtggtgaatcagctggtggctgggggtcagttccgggtggtcaaggagcccctcggctttgtgaaggtgctgcaatgggtcttcgccatcttcgcctttgccacatgcggcagctacagtggggagctccagctgagcgtggattgtgccaacaagaccgagagtgacctcagcatcgaggtcgagttcgagtaccccttcaggctgcaccaagtgtactttgatgcacccacctgccgagggggcaccaccaaggtcttcttagttggggactactcctcgtcagccgaattctttgtcaccgtggccgtgtttgccttcctctactccatgggggctctggccacctacatcttcctgcagaacaagtaccgagagaataacaaagggcccatgctggactttctggccacggctgtgttcgccttcatgtggctagttagctcatcggcatgggccaaggggctgtcagatgtgaagatggccacagacccagagaacattatcaaggagatgcctgtctgccgccagacagggaacacatgcaaggagctgagagaccctgtgacctcgggactcaacacctcggtggtgtacggcttcctgaacctggtgctctgggtcggcaacctgtggttcgtgtctaaggagaaaggctggnnnnnnnnnnnnnnnnnnnnnnnnnnnnnnnnnnnnnnnnnnnnnnnnnnnnnnnnnnnnnnnaacgggcgcagtttgtctagaggcgtgagccccggcggggtgcgcggaccccgctaatcccaccgcccttccccgcttccgctcctttcactgcctctatggaccgacccaacgtatgataccggtatgatccaacaggaccgccaatgtgtctcactagtggaagagaccgcgtcgagaccttttcgtggccacgaaccacgtactaccacacacgcgcagcgaccgacttagaacgtgctttacaccacaggcgttcacgccagggacacaactcagccgacgaccaaagaacttcctgcctcccgaagccccaccaactacaccataccgcg

SEQ ID NO: 99001 - DNA, 1147 bp, Homo Sapiens
  misc_feature (718)..(776): n is a, c, g, or t
  misc_feature (1066)..(1079): n is a, c, g, or t
gcggcggtggcgctgggagctcctgtcaccgctggggccgggccgggcgggagtgcaggtgacgtgagggcgcaagggccgggacatggggcccgccagccccgctgctcgcggtctaagtcgccgcccgggccagccgccgctgccgctgctgctgccactattgctgctgcttctgcgcgcgcagcccgccatcgggagcctggccggtgggagccccggcgcggccgaggccccggggtcggcccaggtggctggactatgcgggcgcctaacccttcaccgggacctgcgcaccggccgctgggaaccagacccacagcgctctcgacgctgtctccgggacccgcagcgcgtgctggagtactgcagacagatgtacccggagctgcagattgcacgtgtggagcaggctacgcaggccatccccatggagcgctggtgcgggggttcccggagcggcagctgcgcccacccccaccaccaggttgtgcccttccgctgcctgcctggtgaatttgtgagtgaggccctgctggtgcctgaacgctgccggctcttgcaccaggagcgcatggaccaatgtgagagttcaacccggaggcctcacgacccccaggcagccctgcacgtccccgcgcctcctcctgccacggctcccgccacccccctacccgcaggccgggaatcgggcgggcgtgggcgcccggggggcggnnnnnnnnnnnnnnnnnnnnnnnnnnnnnnnnnnnnnnnnnnnnnnnnnnnnnnnnnnntggcaagtagattgtggagggccgtgcagcgggcacccagcggatgcgacaccccgttgtccccccgtgcgcacgcgcccgccccgtgacgagttacgccggacgccccagaccccggcaccccacctccctccgcgcgctaagcccacttcaccgcaatgcctttagaccgaccccgggaggcgcgcacgctcgttccgagcccgcgggcgccggcccagtgcatggctcgcagcgggcggctggcgtgcccggtcacgctcaccgtgattatctgacgatacccgcannnnnnnnnnnnnntctccttacggcgcggttggccagcggatattgaggggaaggaggattgcctggaggcggcttacgct

SEQ ID NO: 99002 - DNA, 477 bp, Homo Sapiens
gtcggcggcggagaggggcccacggcggcggcccggccagagactcggcgcccggagccagcgccccgcacccgcgccccagcgggcagaccccaacccagcatgagcgccgccacccactcgcccatgatgcaggtggcgtccggcaacggtgaccgcgaccctttgccccccggatgggagatcaagatcgacccgcagaccggctggcccttcttcgtggaccacaacagccgcaccactacgtggaacgacccgcgcgtgccctctgagggccccaaggagactccatcctctgccaatggcccttcccgggagggctctaggctgccgcctgctagggaaggccaccctgtgtacccccagctccgaccaggctacattcccattcctgtgctccatgaaggcgctgagaaccggcaggtgcaccctttccatgtctatccccagcctgggatgcagcgattccgaactgag

SEQ ID NO: 99003 - DNA, 1061 bp, Homo Sapiens
  misc_feature (923)..(923): n is a, c, g, or t
ggtaccggtccggaattcccgggatatgacaaggacgaggacccctattctagccagttaaagctggacagaatttttaaaagcaatgaagccagttccttggatatatccacgggctttgctttgagaaggaactgagtaggcagtgagaagagtcgagtgaagcctggcccgtgagtgcctcaacaactgagatgaacgtcgactcgcttgcagctcagcagcgatctgaactatatcctgggttccagaaaaggcagaggttcttaccgaaagcaggggaggaagccgcagcccaaggaggtcgtcacttgccgggaaggtggctcgggccaggctgcactcaaaacccgtgctctgtccacactgctacggggccagagccaaggaagcttccacttcttcccccagacagccccaacagcggctaccccaaggagccagcagccttgtgtcctgggatccccagcccctgcagaatgacccaccaggatctgagcatcacagccaaactcatcaatggaggtgtagcagggctcgtgggggtgacctgcgtgttccccatcgacttggccaagactcgcctgcagaaccagcatgggaaagccatgtacaaaggaatgatcgactgcctgatgaagacggctcgggcggagggcttcttcggcatgtaccgaggggctgcagtgaacctcactctggtcactccagagaagggccatcagctggcggccaacgactttttccggcggctgctcatgggagatgggatgcagcggaacctgaagatggagatgcttgccgggtgtggggcctgggatgtgccagggtcgttggtgacctgtcccatggaaatgctcaagattcagctgcaggatgctggaacccctggcccgtccatcattcgggggtcggccttaagnacccttccacctccaggtcctaaccaaattgggttccggctttcacccccaaagggggcccccttctgccaccccctcatttggcctggggaagattgcttcccacctcccagggccctggcctgggggctcttacac

SEQ ID NO: 99004 - DNA, 798 bp, Homo Sapiens
gccggactgggactgggctggggccctggcggatggagacatgctgcccctgctgctgcgtgcccctgctgtggggggggtccctgcaggagaagccagtgtacgagctgcaagtgcagaagtcggtgacggtgcaggagggcctgtgcgtccttgtgccccgctccttctcttacccctggagatcctggtattcctctcccccactctacgtctactggttccgggacggggagatcccatactacgctgaggctgtggccacaaacaacccagacagaagagtgaagccagagacccagggtccgattcctgcctccttgggtgatgtccagaagaagaactgctccctgagcatcggagatgccagaatggaggacacgggaagctatttcttccgcgtggagagaggaagggatgtaaaatatagctaccaacagaataagctgaacttggaggtgacagccctgatagagaaacccgacatccactttctggagcctctggagtccggccgccccacaaggctgagctgcagccttccaggatcctgtgaagcgggaccacctctcacattctcctggacggggaatgccctcagccccctggaccccgagaccaccgctcctcggagctcacctcacccccagggccgaggaccatggaccaaacctcacctgtcagatgaaacgccaaggagctcaggtgaccacggaggagaactgtccagctcaagtgtctcctatgcaccacagaccatcagcatcttcagggaacgggctaggccctaggaggatc

SEQ ID NO: 99005 - DNA, 1277 bp, Homo Sapiens
  misc_feature (1087)..(1148): n is a, c, g, or t
  misc_feature (1168)..(1180): n is a, c, g, or t
  misc_feature (1183)..(1198): n is a, c, g, or t
  misc_feature (1203)..(1212): n is a, c, g, or t
  misc_feature (1216)..(1226): n is a, c, g, or t
  misc_feature (1242)..(1252): n is a, c, g, or t
gggtccggaattcccgggatcgaaaggagccgggaggcgctggcggctccaagagtctctgtgtccctggcagcggacctcatcttccctcacgccggagccccgatctctgcgccccggcccgacccagctgcgctctgtccgtctaagacgcgcggaaactacaactcccagagctcatctcgccgagatccggccccacgagtcaggtggcggaggtcaggtgacagcggacccgcctctcccaaagtctagccgggcaggggaacgcggtgcattcctgaccggcacctggcgaggctcatgcgtcccgtgagggcggttcctcgagcctgggggcgctcagattgctttggagacgctgaggagaacctttgcgagagcgccggttgacgtgcggagtgcggggctccgggggactgagcagcacgagaccccatcctcccctccgggttttcacactgggcgaagggaggactccgtgagctcgtgcctcttccagtaacattgaggattactgtgttttgtgagagctcgctaggcgcccgtaagcaacagagttctgagaaatcgagaaacatgataaggaattggctgactatttttatcctttttcccctgaagctcgtagagaaatgtgagtcaagcgtcagcctcactgttcctcctgtcgtaaagctggagaacggcagctcgaccaacgtcagcctcaccctgcggccaccattaaatgccaaccctgggtgatcacttttgaaatcacatttcgttccaaaaatattactatccttgagctccccgatgaagttgtggtgcctcctggagtgacaaactcctcttttcaagtgacatctcaaaagtgttggacaacttactgtttatctacatggaaatcactccaatcagaccggcccgaggatacgctttctttgtgatccgcaaccagcgccctttagcttcttaaacccggggatgactgactacttgggccgggcattcctttacccccggagactaaatggggggaaagggcttggggtaaatttcaatttggggttaaaaccagggggtttgggccaaaaggaannnnnnnnnnnnnnnnnnnnnnnnnnnnnnnnnnnnnnnnnnnnnnnnnnnnnnnnnnnnnnccgggggaaaccccccctgnnnnnnnnnnnnnaannnnnnnnnnnnnnnncggannnnnnnnnntggnnnnnnnnnnngaaaatatttaatttnnnnnnnnnnntcgttctttctttataataaaaaga

SEQ ID NO: 99006 - DNA, 1469 bp, Homo Sapiens
  misc_feature (209)..(351): n is a, c, g, or t
  misc_feature (353)..(354): n is a, c, g, or t
  misc_feature (358)..(359): n is a, c, g, or t
  misc_feature (364)..(511): n is a, c, g, or t
  misc_feature (513)..(515): n is a, c, g, or t
  misc_feature (517)..(517): n is a, c, g, or t
  misc_feature (519)..(526): n is a, c, g, or t
  misc_feature (528)..(532): n is a, c, g, or t
  misc_feature (534)..(541): n is a, c, g, or t
  misc_feature (543)..(706): n is a, c, g, or t
tctagtggaacgttgagctgtgcagatgcgctccggtgtagctaggctattggggcggagcgtggggctcctaggataccttccgtctacgccgctcccagccctgcacggtactgggaggggccgcggcacgaagggatgctgcgcctgccgaggccgggaggcttggtaggtgtggatcatgcttcgcgttggggtgcgtggggtgnnnnnnnnnnnnnnnnnnnnnnnnnnnnnnnnnnnnnnnnnnnnnnnnnnnnnnnnnnnnnnnnnnnnnnnnnnnnnnnnnnnnnnnnnnnnnnnnnnnnnnnnnnnnnnnnnnnnnnnnnnnnnnnnnnnnnnnnnnnnnnngnngggnnggttnnnnnnnnnnnnnnnnnnnnnnnnnnnnnnnnnnnnnnnnnnnnnnnnnnnnnnnnnnnnnnnnnnnnnnnnnnnnnnnnnnnnnnnnnnnnnnnnnnnnnnnnnnnnnnnnnnnnnnnnnnnnnnnnnnnnnnnnnnnnnnnnnnnngnnngngnnnnnnnngnnnnngnnnnnnnngnnnnnnnnnnnnnnnnnnnnnnnnnnnnnnnnnnnnnnnnnnnnnnnnnnnnnnnnnnnnnnnnnnnnnnnnnnnnnnnnnnnnnnnnnnnnnnnnnnnnnnnnnnnnnnnnnnnnnnnnnnnnnnnnnnnnnnnnnnnnnnnnnnnnnnnnnnnnnnnnnnnnccgccctgcaggagccgccctggctgcctcctgctggtcctggtccaggggtcccgggcagctcaccagccggggtagcagcacttcggccgactcggccacaaagcgcccaggcaggtcgcaagccaggcctcccagagcccgcacatcagcctcgctcagcagagacccccgcacaccccagcaggccagagccgcaggcagcagccgctgtcgctcgggagcccccctcgggagcaggtccacattggccttcgtgatgcgggagaagaaacgggtgcaggcctggggccccgagaacgcatctgggttgaggaatagcagcaggtccaatgggagggcgtccaggtcctcggggggctcagagacaaggtgagccagacagcgcagctgctctgttgagagcttgacattcttctgtgccaaggccacagccagctcccggacacgctccgtgctcaggccggacacctccgcacacgggaagccaaggagttggcgaggggagaggctggaaatgttaggtgggttggccaggactccgtccaggggcgcagcctcctggggacacagggcctgctgccctgtctctccagccagggtcctcgagggctgcacccatccgaggctgaagagcaggaacaggaggctgccgagggcgggggtcccacaggaccccaacaggggtcgagccgttggcaaggccatggtctgtgtagatcccagggagggaggcaccgtgggtatcccgggaatccggacc

SEQ ID NO: 99007 - DNA, 1033 bp, Homo Sapiens
gatggtccgtcaggttccgccaggatgggtcccagaggagcgttcccccaacgcgccacgatgccctgcgggatgctgcggatgatggcttgcccagcacgggcagcaggccccgcagagcggtccatcgtggagacaagaccatgtcgacggggggccgtagggggttcccccggccctgcagagccgacctggctgcctcctgctggtcactggtcacaggggtcccgggcagctcaccagccggggtagcagcacttcggccgactcggccacaaagcgcccaggcaggtcgcaagccaggcctcccagagccccgcacatcagcctcgctcagcagagacccccgcacaccccagcaggccagagccgcaggcagcagccgctgtcgctcgggagcccccctcgggagcaggtccacattggccttcgtgatgcgggagaagaaatgggtgcaggcctggggccccgagaacgcatctgggttgaggaatagcagcaggtccaatgggagggcgtccaggtcctcggggggctcagagagccggtgagccagacagcgcagctgctctgttgagagcttgacattcttctgtgccaaggccacagccagctcccggacacgctccgtgctcaggccggacacctccgcacacgggaagccaaggagttggcgaggggagaggctggaaatgttaggtgggttggccaggactccgtccaggggcgcagcctcctgccctgtctctccagccagggtcctcgagggctgcacccatccgaggctgaagagcaggaacaggaggctgccgagggcgggggtcccacaggaccccaacaggggtcgagccgttggcaaggccatggtctgtgtagatcccagggagggaggcaccgtgggtccaccggtagctctctgtccgcgcgtcacagcagacgggagtggaccggccaggcagaaagaggagtgcgtggcgctgagcctcctctgcctcggtttcctcaattgggaagtgggggtggagagcctggc

SEQ ID NO: 99008 - DNA, 859 bp, Homo Sapiens
gccacgcaggcgcaccgcagacagacccctctgccatgaaccagtccatcccagtggctcccaccccaccccgccgcgtgcggcgtgaagccctggctggtggcccaggtgaacagctgccagtacccagggcttcaatgggtcaacgcgggaaaagaaattattctgcatcccctggaggcatgccacaaggtcatggtcccagccaggacggagataacaccatcttcaatggcctgggccaaggagacagggaaatacaccgaaggcgtggatgaagccgatccggccaagtggaaggccaacctgcgctgtgcccttaacaagagccgggacttcctgcctcatctacgacgggccccgggacattgccacctcagccctacaaagatctacgaggtcttgctccaatggccctgctcccacagactcccagccccctgaggattactctttttggtgcaggagaggaggcaggaagaacgaggaagcagctgcagaggactgttgccaagcctgagcctcacaggttgggcccgggtaggtggtggatgggaggtctagttattacaagagaacctataggtaccataggtacctggaagggggctagatggggaggctagtggtggcccaaggctgggaggaggtgtgcctgcggaggcagatccgtgcaacagtggcaactgacaagccgggtccaacaaagcaactcgtcatggtagaattcacagtgcaagtcttgggccccgaaattgaaaccgatattcattaaactcaaaagatggatcgtcaacgtggcatgcccaatctgaaaacgccacaatctgcagacagaccggtagatgatgggtacccc

SEQ ID NO: 99009 - DNA, 1064 bp, Homo Sapiens
  misc_feature (927)..(927): n is a, c, g, or t
ccggaaggccgcggcgctgtagtgcggcgtgggagccccaggttctttagtggaagaacgcgaagcgaggatgagtgatccgtggaggcagtaacaggcgcggcgagggagaagtgattcccgaagaatcaaggctgggccggacccggtggcctggcaacagggtaataagagaaatgaagccaacaggtacagacccaaggatcttatctatagctgctgaagttgcaaaaagccctgagcagaatgtccctgttatactgttgaagttaaaagaaataataaacatcacacctttaggaagctcagagttgaagaaaatcaaacaagatatatattgttatgatctcattcaatattgcctcttggtcctcagtcaagattattctcgaatccagggtggttggactacaatttcccagcttacacagatattaagccattgctgtgtgggcttggagccaggagaagatgcagaggaattttacaatgaattacttccatcagctgcagaaaattttctagttttggggagacaattacaaacatgttttatcaagtgcagctaaggctgaagaaaaagatgaattactacactttttccaaattgtgactgattctctcttctggcttttgggaggccatgttgaacttattcagaatgtactacaaagtgatcatttcttacatttactgcaagctgacaatgtccaaataggatctgcagtcatgatgatgctacagaatatactacagatcaacagtggtgatttactcagaataggaagaaaagccctgtattcaattttagatgaagttattttcaagcttttttcaactcctagtccaggtataagaagtactgctacaaaactcctactggtgatggctgaatcccatcagggaaattttgattttactgagacnaagtacctgctaccaaagactcagacgtctactaagtaaacaggaaactgggactgaaatctcgtcaagaacttaaacagcttggtggcctttttaagccaatggggctatccggaagtagaagagcgggaacctcc

SEQ ID NO: 99010 - DNA, 794 bp, Homo Sapiens
cgctgtagtgcggcgtgggagccccaggttctttagtggaagaacgcgaagcgaggatgagtgatccgtggaggcagtaacaggcgcggcgagggagaagtgattcccgaagaatcaaggctgggccggacccggtggcctggcaacagggtaataagagaaatgaagccaacaggtacagacccaaggatcttatctatagctgctgaagttgcaaaaagccctgagcagaatgtccctgttatactgttgaagttaaaagccattgctgtgtgggcttggagccaggagaagatgcagaggaattttacaatgaattacttccatcagctgcagaaaattttctagttttggggagacaattacaaacatgttttatcaatgcagctaaggctgaagaaaaagatgaattactacactttttccaaattgtgactgattctctcttctggcttttgggaggccatgttgaacttattcagaatgtactacaaagtgatcatttcttacatttactgcaagctgacaatgtccaaataggatctgcagtcatgatgatgctacagaatatactacagatcaacagtggtgatttactcagaataggaagaaaagccctgtattcaattttagatgaagttattttcaagcttttttcaactcctagtccagttataagaagtactggtacaaaactcctactgttgatggctgaatcccatcaggaaattttgattttactgagacaaagtacctgctacaaaggactcagacgtctactaagtaaacaggaa

SEQ ID NO: 99011 - DNA, 653 bp, Homo Sapiens
ggggaacacgtgggcgccggctgccggggcggcgatcttagggaactagggtcacctggagagccgcccaccgtctctgcccgctcgactcctccgcccgggccgctcggccggtccagccgcggccggcgcctggctgtgaggtggattcccggcccagtctgaccatctccctccagtacgtacacgcggctcgaacccgcatccaaccagacgccgacccgctcctgagagccttccacactccccgaagccccgcgatggtggatagttcctcttccccaggaactccccactgacactgcccctctgagagccaggtcctcggctcctgacagcctgcctggtcagaccctcagtcctatgggactcgggtgtctgcggcgaaggagctcccgtgagggtcccctctctactcaaacataggacccacctcgatcccgcagtcttcccctgtctctctttctccttaggtttttccacttcgttcggaccttctcataactatgtccaccctctacgtctcccctcacccagatgccttccccagcctccgagccctcatagccgctcgctatggggaggctggggagggtcccggatggagaggagaccagcaacacgacgcgaaacacccggacgccagcagaacg

SEQ ID NO: 99012 - DNA, 666 bp, Homo Sapiens
aacgctccctgtcacaaaggggggaacacgtgggcgccggctgccggggcggcgatcttagggaactagggtcacctggagagccgcccaccgtctctgcccgctcgactcctccgcccgggccgctcggccggtccagccgcggccggcgcctggctgtgaggtggattcccggcccagtctgaccatctccctccagtttttccacttcgttcggaccttctcataactatgtccaccctctacgtctcccctcacccagatgccttccccagcctccgagccctcatagccgctcgctatggggaggctggggagggtcccggatggggaggagcccagccccgcatctgtctccagccaaccccgaataggcaggactccatgtacacagaacctcggctgacggccccagcgagcagggcgacacaggggggactgctgcgagccgatgggagggcccagcaggacatgctagagcaacccaagacctgcaagaagaagagagccaagacaaagagcagcctgggaggaagcacccatgaagaagagacacaaccgaagaacagacgacaaagcccacaaagcacccaacaaagaagagagaactacgaaaacagccacagagcgaacaggaactacaaataaaaccaggaaacactagta

SEQ ID NO: 99013 - DNA, 890 bp, Homo Sapiens
gtcacggaggaggtattaagaaatggagagaaaaataagcagaatccacctggtttctgaacccaggtataactcatttgctacaagtatcttgggagaaaacactggaatctggtttggttattacacttactgatggtcattcagcatggacagggacagtttctgaatcagagatttcccaagaagctgatgacatggcaagtggaaaaagggaaatatgttggtgaactgagaaaagcattgttgtcaggagcaggaccagctgatgtatacacgtttaatttttctaaagagtcttgttatttcttctttgagaaaaacctgaaagatgtctcattcagacttggttccttcaacctagagaaagttgaaaacccagctgaagtcattagagaacttatttgttattgcttggacaccattgcagaaaatcaagccaaaaatgagcacctgcagaaagaaaatgaaaggcttctgagagatgggaatgatgttcaaggacgatttgaaaaatgtgtgagtgctaaggaagctttggagactgatctttataagcggtttattctggtgttgaatgagaagaaaacaaaaatcagaagtttgcataataaattattaaatgcagctcaagaacgagaacaaggacatcaaacaagaaggggaaactgcaatctgttctgaaatgactgctgaccgagatccagtctatgatgagagtactgatgaggaacagtgaaaaccaaactggatctctctgggtggcttcagctgcttgtaagtaaagatgaattccattatttcacacgtcttgatgtccctgatattgccaccaagtagaaaaaggagacacggatgccaagaaaatctgggacaaactaaaatggtcc

SEQ ID NO: 99014 - DNA, 1016 bp, Homo Sapiens
gggtccggaattcccgggatgcggaggaagcgctggggtcccggagggcgggggtggcggcgccggaggtcgccatggctaccgagcccgaagccgcggcagccggtggtgccttcgctcgtggatcgatacttcactcgctggtacaaaccggatgtcaaaggaaaattttgtgaggaccactgtatactacagcactctaaccgaatatgtgtcatcacattggcagaatctcatccagttcttcaaagtggaaaaacaattaaaagcatttcctatcagatcagtaccaactgtagcagacttcagaacaaggtctctgggaaatttaagcggggggcacagtttctaacagagcttgcacctctctgtaagatttactgctcagatggtgaagaatatactgtgtctagttgtgttacaggacgtttgatggaagtgaatgaaaacatcctccataagccatctattcttcaagaaaagccatctactgaaggctacattgcagttgtgttacccaaatttgaagaaagtaaaagcataacagaagggttactgacacaaaaacaatatgaagaagtcatggtgaaacgcattaatgccacaacagctacgtcatgaggattgacatggaacaaaaagcaaagtgggattcttgttacctggcctaaaccatcagggtactacaggagaagaaccagtatatgtaaagcatacctaacagccagccatatgcaggggaggcctagtgcttcacttagttttccctctctgtcttcataatgagccttggttcccatttggctacagcctgccagatctgggctggccatgtactcacactggtctcttgcatctctctaacaactggcatgcaagggatgtttttctggattaaaacaaacaaagctcctttgaagaagatttagaaaatacaggaagaggttttaagtagggcaagggaaaaataaatttaaccccatcatcccccataatcccggaaagtgaaatacctt

SEQ ID NO: 99015 - DNA, 533 bp, Homo Sapiens
gcagaatctcatccagttcttcaaagtggaaaaacaattaaaagcatttcctatcagatcagtaccaactgtagcagacttcagaacaaggtctctgggaaatttaagcgggtatgttcctgtaattctgtgattatctacttacatcctctatattcatggtaatgacagatccaatgaaccttagaatccagtagcatatgcttagcatacttctctagcagtttgaggtgctaattttaggtatactttcacctaaagaaattctcagctcccccaaattaggtatctcaggaggtgtagtatctgttatattaggttctgtgctactatccctataatgcccaggatggaggagggggaaggcaggcctttcaaaggagaactctaatagcaatataacaagatattttgtcccttctagttgtattaaactagtatgtcgagttctgtaaaatttaggtgactaactcttctttaccatatatttccacatgtaaattaaacagaaaaaaaattcccaagggagttag

SEQ ID NO: 99016 - DNA, 679 bp, Homo Sapiens
cgcgaacgaatagtcgccggcgacctgtgagggcactcggaagggcgaggggagggctcggagcgctcgcgcctagtttttctatctctcccggagcctgagtctctgagccgtccccagcaaacgctcaggggctgcagaggccccgagaggtgaggggctccgtgagggcgggaaccaggctgaggccgcctctggggagcggagcgtgtccgttgctgagggagcaaggccgggtagggagcctggtgagcgcctcaggcaggggcgcacgctgagctttacggtaaaggtgttccttgaccagcggaagaggccccagagtgagcctggcccggcggtccttagtgggatgtcgcctgccgctctcagcagagctttgacggcggagaggagtcggcaggcggtgtgtggacacctcctcggccttgcatctgctccccgggagagtcaccaaccgcctccccgcccaaagggcaccggagggagcttcggttcgagggcttggctctctggcagatttcctctagtaagaggtggctctggaggccccgcgaaacgagtgtggtgtgtggttgcaaggcatgatggctgcaaaagtggttcctatgcccccaaagccaaagcagtcctttatactgagagttccgccagactccaagctaggccaagacctact

SEQ ID NO: 99017 - DNA, 932 bp, Homo Sapiens
  misc_feature (290)..(292): n is a, c, g, or t
  misc_feature (510)..(827): n is a, c, g, or t
tggagtttctcggtggccgaaaccctcttttttctcagagtccagtttcttggtgacagcgctgttggttgcgccataaggaatgttgtccttgacaacccgccggccgcagtcattcgcaagctccaggcaccgacatttcgcagaactgaggtctctcggtctcagcacagctcgttgctcgatgcctccattttctcggggcgacagcactcaggtcgccgatctgagggattcggagcttccccagctggggtgagcctggcgttcccgggcggcggcggcggcannnctgggctaggggagcccgccgcgtcctccaagccggtgacaggggagctgcccgggcgccgtctcttcccagcgccgccgcagaacccgcagaacagctcgacctccagaaccctgtgctgtggcgagcggggctggcgtgtctgtcgcaggaccccgcagattcgtctgtcgttggcttgttggtcctaacaagtttcgatttcagggtgcctgcgnnnnnnnnnnnnnnnnnnnnnnnnnnnnnnnnnnnnnnnnnnnnnnnnnnnnnnnnnnnnnnnnnnnnnnnnnnnnnnnnnnnnnnnnnnnnnnnnnnnnnnnnnnnnnnnnnnnnnnnnnnnnnnnnnnnnnnnnnnnnnnnnnnnnnnnnnnnnnnnnnnnnnnnnnnnnnnnnnnnnnnnnnnnnnnnnnnnnnnnnnnnnnnnnnnnnnnnnnnnnnnnnnnnnnnnnnnnnnnnnnnnnnnnnnnnnnnnnnnnnnnnnnnnnnnnnnnnnnnnnnnnnnnnnnnnnnnnnnnnnnnnnnnnnnnnnnnnnnnagccggtgactacgatttctatccctggttcaagtcggggaatagccaaaatgtgatttctcaacccaagcaagtacccacttaggacaaacaccagcctagccc

SEQ ID NO: 99018 - DNA, 1186 bp, Homo Sapiens
tcacgggagggccaggacgaaggtgacaaaggctaggtgtcccccacggagacgcgccaaggtagccccgcgcgtgtccgtaggcgcgctctctggaagacgcggtggggggtgcgcagggctgcaccctcacaccaattgccccggcgaaggccgagcccagaaagtgagtgcgcgtgagtgtgcgcgcgcccgcatgcgggggcgtggcagtcaacagcaacaacccacacgccggcagggccagaaactcccatctccctcaccagccggaaagtacgagtcggctcagcctggagggacccaaccagagcctggcctgggagccaggatggccatccacaaagccttggtgatgtgcctgggactgcctctcttcctgttcccaggggcctgggcccagggccatgtcccacccggctgcagccaaggcctcaaccccctgtactacaacctgtgtgaccgctctggggcgtggggcatcgtcctggaggccgtggctggggcgggcattgtcaccacgtttgtgctcaccatcatcctggtggccagcctcccctttgtgcaggacaccaagaaacggagcctgctggggacccaggtattcttccttctggggaccctgggcctcttctgcctcgtgtttgcctgtgtggtgaagcccgacttctccacctgtgcctctcggcgcttcctctttggggttctgttcgccatctgcttctcttgtctggcggctcacgtctttgccctcaacttcctggcccggaagaaccacgggccccggggctgggtgatcttcactgtggctctgctgctgaccctggtagaggtcatcatcaatacagagtggctgatcatcaccctggttcggggcagtggcgagggcggccctcagggcaacagcagcgcaggctgggccgtggcctccccctgtgccatcgccaacatggactttgtcatggcactcatctacgtcatgctgctgctgctgggtgccttcctgggggcctggcccgccctgtgtggccgctacaaagcgctggcgtaagcatggggtctttgtgctcctcaccacagcccacctccgttgcccataatgggtggtgggggatccgccagtattaccttacgggaaacaaacagcaacaacagtccccaccctggggatgaaccccccgccttt

SEQ ID NO: 99019 - DNA, 1361 bp, Homo Sapiens
  misc_feature (1234)..(1252): n is a, c, g, or t
gtgatctttccccccctctggtaggagttggtgaaggtgagactcatgagggaatacaaggtagtggtgttagggagtggaggggttggcaaatctgcccttactgtgcagttgtcactgggactttcattgagaaatatgaccccaccattgaagatttctaccgcaaagagatcgaagtggactcttccccctccgtgctggaaattctggacaccgcaggaactgagcagtttgcctccatgagagatctctacatcaaaaacggccaaggtttcatcctggtttatagcctggttaatcaacagtcttttcaggatatcaagccaatgagagatcaaattgtcagagtgaagagatatgaaaaagtcccactaatcctagtaggaaataaagtggatctggaaccagaaagagaggttatgtcttcagaaggcagagctctggctcaagaatggggctgtcctttcatggagacatcggcaaaaagtaaatcaatggtggatgaactttttgctgagatcgtcaggcaaatgaactattcatccctgccggagaagcaagatcagtgttgtacaacttgtgtcgtccagtaaagaagataacctcaatcatggccataccgagcagataaaactcagaggaaatttgcacagatgctgctttggagaactttacaacctgaggttgcagaactgagccttggtaaacctgtctctattacagcatgttgccatacatctatttaagtgcataaggtctttggccttcaagatccatcgacctaaaacaggaatgcttagcacgtttaccatacgtttaaaatccattctttatcaatcagtccttttatagctttctaagttcttattgatggctaatatacaagggttaatttttaatattttaattgatttctttaatcagtttctcgacttgtatttattaaatactcaaactcagtattacctactcaatgccttttaaaagaaagttataatggagaaaaaattgagccttaaacaaatgggtaccttcgtatattaccctcgtaccagtgcttcatcctatttgtaaaatctttctccctttaaaattattggttaatacttttgagacctttgtttacgtggtggcagtgttggtaaaaagaaactaaagaatcccattttacctggaatggatgggatattcctttttcctcaaagggcagtttggggaggggctttgggcnnnnnnnnnnnnnnnnnnnggaaataacatggtccggaagggtaccaatggatttttgaaaattgaccggaaaagcatttcaattgataaagttttagacatttccgttccacttaaggtttctccca

SEQ ID NO: 99020 - DNA, 842 bp, Homo Sapiens
ccccttccccccctaccccagtgctgggagcgcaagccggcgggcgaggctggcctggaacgtggagctgctggagctgtccggctgacctggaaagttctttggcctctaggctttacctggaggcctcttccttcagctcccttgtttttccgcacctcctcggcgtgcttgtccttctcttgcagccgttccaacatggcggcgaggtgggcctccctgttctccttgttggattccatcttctgggccagtttttccttagccatcttgatgaagttgttgttttcctcaatggccttttggatcacctctctctcatgttcccgtttctctgctaggtgtttcaggagctccgcttcctggtacttccttcgctcctcagccgcttctagtttcttctggatctcttccagggatgggtctcgccgccttggcagggaggcgttgaactcgggaaccccatcaaaggagggtggcttcaggatgacttcaaaggattggcccgaggtgcatttgttcagctcgatgacttccatgtcggaaatgacgcaccaattcaggtccaccgtgtctgcttcatatttgtaggacgacttattcaggggatcggccaggaagcaggagcagaacaaggacaccagcgggagctccttcatcttctctttgtaggcagcaagggtcatgtttctgggatctggtggctgaatctagctgaaagttacagagtgggtctgtcaccagcttgggacgctgtcaccaacgtgcagtccagttagaagcgagctgctctcttcctcactccctcaattagatcgcaggaattccggaccggtccagcc

SEQ ID NO: 99021 - DNA, 887 bp, Homo Sapiens
  misc_feature (203)..(253): n is a, c, g, or t
ttccctcaaaaccctaatatgagcttcgaaagatgcatgatttgaatatgtggagatgggaaattactgagcccgtagagtaaatatcacatgtggggctcagtcttaagtgaggttactggggcacctaccttatggacagaattcaaagcgatgccaaaaagcttattaatcaagttaaataatattttaatgaagtattnnnnnnnnnnnnnnnnnnnnnnnnnnnnnnnnnnnnnnnnnnnnnnnnnnngacaagatccgtgacaatccttcaaatatttttagacaggtgtctgaaaacctctcagagcctctaaggcttctaagagcctctctttctgggttgaaatcttgctgtggtgtcaaatgtctcttataggacatggtatttagatctctcactactcttccattaattcattcaacaaattatttgttcattgtgtgtctactaagtgccatccagaatagtaattaaatatttgtcaaattaataaacaagcaaatatctaattacagtgtttttaaaaagacacccacaggggctgtctagtctagtagaacagaagaagcattaacaaagtggtgggtgtcagaagggcttggattggatggtcaaaggatccttaaaataggtttgttatttattaagtcaataaataattatttagtatatactaaatgcagggcattctacatatatcaggcgaagcatgtcacaaatgctagtaggcaaaatgatttcagagactcaaagtggtaaaatgtcagtattttcaaagagcattaatttcctggacgcaagggctccttggtgaatttactctaagaagacaatgtttactggatacctgtctcgccttccttctaagctgtttcctcta

SEQ ID NO: 99022 - DNA, 901 bp, Homo Sapiens
ggcgctgggacccgggctggaaggcagggcatcagctatggaacaacctgggcaggatcccacctcagacgacgtcatggactcgttcctggaaaagttccagagccagccttaccgtggcggctttcatgaggaccagtgggagaaggaatttgaaaaggtccccctatttatgacgagagcgccatcagaaagtgatcccagggagaatcctgacttggcttgtctccagtcaattattttggatgaggagcgttctccagaagaacaggccaagacctataaagatgagggcaatgattactttaaagacaaaagactacaagaaagctgtaatttcatacactgaaggcttaaagaagaaatgtgcagatcctgatttgaatgctgtcctttataccaaccgggcagcagcacagtactatctgggcaattttcgttctgctctcaatgatgtgacagctgccagaaagctaaaaccctgccacctcaaagcaataataagaggtgccttatgccatctggaactgaaacactttgccgaggccgtgaactggtgtgatgagggactgcaaatagatgccaaagagaagaagcttctggaaatgagggctaaagcagacaagctgaagcgaattgaacagagggatgtgaggaaagccaacttgaaagaaaagaaggagaggaatcagaatgaggctttactccaggccatcaaggctaggaatatcaggctctcagaaagctgcctgtgaggatgaagattcagctcagaaggtctagggtgagcttttcctggatggactcagcatggagaacccccatggagccaggctgaagtctagattggcagggcaggttgaactggctggggtctttctggtacccgaaggtttgccag

SEQ ID NO: 99023 - DNA, 766 bp, Homo Sapiens
ccctgtgcctgagtcttaacccctgctgctgtggactgctgtggctggagggccagggcttcttggttggggggccaaggttgccctcaagcccagcccatgatctgggccgggacgacgtgacgctggacacctgttcagggtccacgagcacacaggagaagttggtgctgtgcaggcaggtgtcagctgctccagcaccaaggccttgcacaagctgcgtacctgtgctcccacgttcccggctggtgctcccctcccacagtcggcctgggaggtgctcaatgaaggaaccattgcccagccagtagaggatggctgaagttggcggaagcggcgtgcaggccacacaggagtaagctcagcgttccattcagtggcacttccacctctggccaggtcacttccaatgctggacactgcttaggctgctgggaacactgggggctgggaggggacaggggtcctttgtgcttctaactgaggcagtggcagctgtggtggtctgcgagacaggtgtggctctgaccaggagagtgacgacgtgggcacacaggagcaggacccacaaagggctgaggtctggtgtccagttgtgtctcatggtcatgatgcatgcgtcaggagctggtgagcctggctctttatctgtgacaacgtcctcttctctggctcctaagaggtcctgaagagccttcctttccagaagcttccctctaggagctccaagactcaagttagctgtgtctagctgcgtgtgaaccca

SEQ ID NO: 99024 - DNA, 737 bp, Homo Sapiens
ggctgctccggttggaaacgccaagccagctgcgtcctaatccaaaagccatgaacagcggcgtgtgcctgtgcgtgctgatggcggtactggcggctggcgccctgacgcagccggtgcctcccgcagatcccgcgggctccgggctgcagcgggcagaggaggcgccccgtaggcagctgagggtatcgcagagaacggatggcgagtcccgagcgcacctgggcgccctgctggcaagatacatccagcaggcccggaaagctccttctggacgaatgtccatcgttaagaacctgcagaacctggaccccagccacaggataagtgaccgggactacatgggctggatggattttggccgtcgcagtgccgaggagtatgagtacccctcctagaggacccagccgccatcagcccaacgggaagcaacctcccaacccagaggaggcagaataagaaaacaatcacactcataactcattgtctgtggagtttgcacattgtatgtatctatttcattaagttctcaatgtgaaaaatgtgtctgtaagattgtccagtgcaaccacacacctcaccagaattgtgcaaatggacagacaaaatgttcccttcatctggtgactcctggtctgaacaatgttgtcatggctattacagctgatctcattctgaaaaaacccccaggcacagcagggcacatacaaaaacaacatgtaaccacaaaaaagggg

SEQ ID NO: 99025 - DNA, 708 bp, Homo Sapiens
  misc_feature (96)..(96): n is a, c, g, or t
gaggcagcagactctctgggctcctgtccccgctttccagggcccagaggccccctgtcaggtatctccctgggatcccctggttcaggctgttgngcattcctgggcccctcggggctgaagctccctttcccttccaggatggcctgcaccacagccacaggcagtggcgggggggctcctgccatcactggagggagaaagcctggtcccctcaggggatggagagtcttctgggatgtcagagatgatggggccctggccctgtgagggctaaggcccaaatttgtctctgggagaggctggccaggtctaagggagaaggtttgagggaggaggctcagtccacgctggagggcctgggtctggttggggggaaggctggcttccatcttctcttccgactggatgaagtaggggtcctgcagaagggcaccaggtagagggcaggtgttgaacttggcaggtgttgggcatgagctcccctcatccagcatcagggacagctttctcttgcctcctgcattgctcggccccgcctgaagtggcccaaagagacactggatcagcttgccaatgacccggtgctgctgaccgtggctctgccgaagtgtcaccacctcccgccacaagatctcgttctgcctgaggaaggggtgggagggtgctgaggcatctgagagttcgcccagtcaccaccccccacag

SEQ ID NO: 99026 - DNA, 815 bp, Homo Sapiens
gggaaagtaacagaagttagaaggggaaatgtcgcctctctgaagattacccaaagaaaaagtgatgtgtcattgctttatagactgtaagaagagaacatctcagaagtggagtcttaccctgaaatcaaaggatttaaagaaaaagtggaatttttcttcagcaagctgtgaaactaaatccacaacctttggagacccaggaacaccctccaatctctgtgtgttttgtaaacatcactggagggtcttctacgtgagcaattggattgtcatcagccctgcctgttttgcacctgggaagtgccctggtcttacttgggtccaaattgttggctttcacttttgaccctaagcatctgaagccatgggccacacacggaggcagggaacatcaccatccaagtgtccatacctcaatttctttcagctcttggtgctggctggtctttctcacttctgttcaggtgttatccacgtgacccaaggaagtgaaagaagtgggcaacgctgtcctgtggtcacaatggtttctgttgaagagctggcacaaactcgcatctactgggcaaaaggagcaagaaaatggtgctgactatgatgtctgggggacatgaatatatggccccgagtacaagaacccgaccatcctttgatattccctaattaccctctcccattgttgatcctggggtcggcgccccattttggagaaggggcacattccaagtggggttggttcctggaagtatggaaaaaagacgctttttcaaggggggaacccacctgggctgaaaatggaccttattcctttc

SEQ ID NO: 99027 - DNA, 595 bp, Homo Sapiens
ctgctccctccacgcctggctgggctcccccttagctgggctgccatcctccaagctctgctggggctcaggttccagggaccgcaaggtgccatcctctgacacctgggacttctcggtcagcttgtcaatgcctggagtagccaccagactggtcttgagggtgcctggctctgcaggggcagcggggcgggagccctccatggaggtgccctcctgggagccggtgcgagacaagggctcaggtgtccgccggcgccgctgcagggccttgtgaatggtgggcgggtccgtgggcaggttggccagctggtggaagatgctgcgcttgcggatgatggcgtagaccaggttggagttgccatcaaactggtactggatgatgttgctgaagacctccaggaggaagaagaccaggtggtggttctgggcggcagagaagaggaaccaggtggtggagaaggcctccagcaggtgcagcaacttgttggcggtcaccatggacaggctcttgaggtagggggacacgttgaccacgatggcgagcaggcagtcgaagaggggctgcaaccgctggtgcccgctgaagatgatg

SEQ ID NO: 99028 - DNA, 970 bp, Homo Sapiens
cggtccggaattcccgggatgcgggagcaggtggaggactggcggcggtcgagatcgtgctgccatggctcagcctctgggtccagagcctcagctcctacctcttccctccttgccagcccctgatgcctgccagacttttgcctctgctggagcccctgcctgaccagcttcccctccctgtctggttgggatttgggggctgagctgtctggggtcccagggccaaccaatgcagtgccggctcccgcggggcctggctggagccctcctcaccctcctgtgcatggggctcctgtgtctgcggtaccacttgaacctgtccccgcagcgggtacaagggacccccgagctgagccagccgaacccggggccccctaagctacagctacacgatgtcttcattgcagtgaagacgacccgggctttccaccgcttgcgcctggagctgctgcttgacacgtgggtttccaggaccagggaacagacatttgtcttcaccgacagcccagacaaaggcctccaggagagactggggtcccaccttgtggtcaccaactgctccgcggaacacagccacccagctctgtcctgcaagatggctgctgagttcgacaccttcttggccagtgggcttaggtggttctgccatgtggacgatgacaactatgtgaacccaagggcgctgctgcagcttctgagagccttcccgctggcccgcgacgtctatgtgggaaggcccagcctgaaccggcccatccatgcctcagagccacagccccacaaccgcacgaggctggtacagttctggtttgccactgggggtgctggcttctgcatcaatcgcaaactggctttgaagatggctccgtgggccagtggctcccgtttcatggacacatctgctctcatccggctgcctgatgactgcaccatgggctatatcattgagtgcaagctgggcggccgc

SEQ ID NO: 99029 - DNA, 961 bp, Homo Sapiens
  misc_feature (524)..(524): n is a, c, g, or t
  misc_feature (581)..(581): n is a, c, g, or t
  misc_feature (880)..(880): n is a, c, g, or t
gggtccggaattcccgggatcggcgactgtggcgacggcggcagctgtggccccggcgccagcgcccggcacggacagcgcctcttcggtgcactggttccgcaaagggctgcgactccacgacaacccggcgttgctggcggccgtgcgcggggcgcgctgcgtgcgctgcgtttacattctcgacccgtggttcgcggcctcctcctcagtcgggatcaaccgatggaggttcctacttcagtctctggaagatttggacacaagtttaaggaaactgaactcccgcctgtttgtagtccggggacagccagccgacgtgttcccaaggctgttcaaggaatggggagtgacccgcttgacctttgaatatgactctgaaccctttgggaaagaacgggatgcagccatcatgaagatggccaaggaggctggtgtggaagtagtgacggagaattctcataccctctatgacctggacaggatcattgagctgaatgggcagaagccaccccttacatacnagcgctttcagggcatcatcagccgcatggagctgcccaagagccagtgggcttggntgaccgcccagcaaatggagagctgcagggccgagatccaggagaaccacgacgaggactaccgggtggccttccctgggaggagctgggggtcccccactggaaggattggtccaactgtcttgggaagggaggagaaaaccaaaacttctgggcccgccttggataaacacttgggaaccggaaaggcttggggttgcccaactatgggaaaacccccccaaaggaaaggcaaaatccccttcctgggccaggccccccaaggggccttaggccccctacctgggggcttttggggnggggtccttcccgggccggcctcttttttaaataccggccctgggggggaacctggtattaaaaaaagggggaaaacgggg

SEQ ID NO: 99030 - DNA, 739 bp, Homo Sapiens
ggctggtccggtccggaatcttagcggataagctgtggtggctccacgtttctttagctgggcagtgttttatatatataggttaagattatcaccagctcctcctggcccatgggtcgagtttgagtggctgaggcagttttggtttcaaggcaatcgatacagaaagtgcactgactggtggtgtcaacccatggctcaactggaagcactgtggaagaagatggagggtgtgacaaatgctgtgcttcatgaagttaaaagagaggggctccccgtggaacaaaggaatgaaatcttgactgccatccttgcctcgctcactgcacgccagaacctgaggagagaatggcatgccaggtgccagtcacgaattgcccgaacattacctgctgatcagaagccagaatgtcggccatactgggaaaaggatgatgcttcgatgcctctgccgtttgacctcacagacatcgtttcagaactcagaggtcagcttctggaagcaaaaccctagaaggagcacaagtctcaggcggaggagaaacaagagatcggcttttctcctccaacgttgtcatgggcttaagcaagagcagtggagacttctcttggcccctagattgtagcacccgggtcccaatccaaaacagctaggaaatggtgcccatgaagttctaaatgtcctcaaaatgaccctgtgttatagtctgatttggtgttaaacaggaccttcttcccc

SEQ ID NO: 99031 - DNA, 1420 bp, Homo Sapiens
  misc_feature (66)..(66): n is a, c, g, or t
  misc_feature (256)..(256): n is a, c, g, or t
  misc_feature (550)..(550): n is a, c, g, or t
  misc_feature (798)..(806): n is a, c, g, or t
ttgcgatatagagaagcgagagaatataatggctctagcgcagctgctgcgcggacgtgcgaagcnaactccggagtctgtagggatgcaaggagagcggcggcgcgtactgtgctatgactagtccacgagcggtctctcgatgcctgcgtatagatgaggggcatgcgttgagagacgagacagagtacgttagaatcgcagcgagatcgcgctctgatagtatccgcgtcagtgtcaatgtcatttatgcggngacgactgtgtacatatacgcttgggtatacaggcgcacgcgaagccaattgacttacacgcgtggtgcattaaccaccgttcttacataagaccatttatgagagtgaatatccacataattgcggcgtcagaagttattcagaatggaaacgacgctccggactcgcgctcgccttatacagccattacatcgcggcgtgttcttgagacagtcgcagtggcggtctgcggcgtggtcgtctgatggggataacgtgcgcgccgggaatgccgccaggcacgccgagagagnttgtatggcgtaataaagtggacgaagccgtgtacacacaggcggggcgtactgccacttgacttacacgaagcgggacgtggctgcgcgcggcataacccgcccgggttctagcttggatttgggcagaggggggagtatgggacccggctgtggggaggggggagagttggtggcggagggcagcttatctccgccatgttgtgcgaccgggcgcaccccaacgatggggcgttgcggaccccgcnnnnnnnnnacggactccgatcagctgtacctggtcttcacgtccctgccagtgggcaccattggtgaatgcggtgagatgtagagccgggaatccgtgctggaggggatcaagcgtgcgcgcggctccaatagaagcttgcgccaggacaagggctggcatggagtggtcgttgaggatcatcccgtcggagtaactacggccgatccagtccgggtaggtgcgggggaacgacggcggtggcggggcccccgggggctccccgtccccgctgcggcggcggctccggcggctgccgctggtggtgctgccgccgcttgggggaagctcgggactgctgcggctcgggggcggggcgggctccggatgcatggagcacgccgcacgaggcgcgggccggcccagggcgccagcgaggcacctccagccggaggcagccgccgactgccccctacgcgggcccggcctcacccggccggccgcacaggacgaggaggacgaggtcgaagaagtgcccgctgccccagcacgcaggcacgcggcgccgctggcaaaagccatggagggaatccggaccggaccagcgcctgcgaccgcgggcgaccggacagcaccgcggcccc

SEQ ID NO: 99032 - DNA, 776 bp, Homo Sapiens
  misc_feature (92)..(104): n is a, c, g, or t
gttataaacataagaccaagtgttcttatagttatttaaaaactacaactactcaatggataaggaatagataaggtctccttattgtaccnnnnnnnnnnnnngaagtttatatgccagcaggccttttgtttttttccttttcagaatgtttcttattctctgaagcatcagcattttgaagtgtcttttatggaagtggggacagaaatgggggtaaaaatgagtgtaaacaaagcctagccctacggtcagtacccactggaggtgagaagcagaatggccttggttgtcctggcacctggcccaggggcctaggacagaggtcaaggctaggcccctgtgtctggccagattctgccttatagaattcaaatctttcttacaagggttctggacccgtttcatttctagatatatacctaattctccaaatcattgtcattgggcctcagtagtaaatcttacctctgaagtcttgcttcagtcgctattaatattaccaagtaataataacagcacaggcagagtttatcataatgttatttttaatttgtcatactttattatggtttgtaaggtaccatgaaaatgtaattatgtgtgatcggtaggtattaacagaacttaggctaattgaatttacatgaaactaaataaaatctttactactgagccccaaatatgtattgtgctatgcctgtctgtataatgtacttcatatagtttaacaatgcacttcagtgatacaaaaaaattctataaaataaacctat

SEQ ID NO: 99033 - DNA, 744 bp, Homo Sapiens
ggagctcgggagcgggagcagcggctctggcggtcgtggcggtcgtgagatccgagagctctgcttctctgaaaagctgtgtggctttctggacttgtttcaggccacccacgagccagcgggaaaggattgccagccagagaaatgacgaactccgaagtcccaatgcacagatcagcccccagtcaaaccaccaagaggagccgatcgccattttccactactcgtcgtagttgggacgacagcgagagttcgggaaccaacctgaatattgataatgaggactattccaggtatccgccaagagagtacagagcttcgggtagcagaagaggaatggcctatggacatattgactcttatggggcagatgatagtgagtgaggaggtgggctggtgcctgttgagcgaacgccagtgagagggaaaactggcaagtttaaagatgataagctgtatgacccagagaaaggggcaaggtcttaaggcttgggacacctccacatttctactagtatttagaccgtgatgtgagagaggagcgagacaagttagacccagtccctgcagcaaggatgctcagctagcagagctgacttcctgccacaaagtagtgtggcctcacgagtcgtcttcttgaaggcaagctggctacaaaaggtgacagctcggaaaagggagagaagggagcaaaatttacctgcacgtcccagcagggctcctgtgagtattgtggtggtgggg

SEQ ID NO: 99034 - DNA, 923 bp, Homo Sapiens
  misc_feature (68)..(126): n is a, c, g, or t
  misc_feature (169)..(218): n is a, c, g, or t
cggggctgagctaagccgagcccacgtgtgaacggctctcgccgctgccccgtgctccgccgctcgcnnnnnnnnnnnnnnnnnnnnnnnnnnnnnnnnnnnnnnnnnnnnnnnnnnnnnnnnnnnatctcggggctcggagccggccgccgctcctgctccgatcgcnnnnnnnnnnnnnnnnnnnnnnnnnnnnnnnnnnnnnnnnnnnnnnnnnngctcagatatggatggcaatatgggagccaatggcacctctgggcagcgccaacgactcccatgcacgaccccggtaaaatgtttatcggtggactgagctggcagacctcaccagatagccttagagactattttagcaaatttggagaaattagagaatgtatggtcatgaaagatcccactacgaaacgctccagaggcttcggtttcgtcacgttcgcagacccagcaagtgtagataaagtattaggtcagccccaccatgagttagattccaagacgattgaccccaaagttgcatttcctcgtcgagcgcaacccaaggatggtcacaagaacaaagaaaatattggtaggcgggttatctgcgaagcacagtagtggagagatgtagagcaatatttcgagcaggttggcaaggtggaagatgcaatgctgatgttgataaaagtaccaaaggcacagagggataggctttgtcacttttgagaatgacgatgttgtggagaaagtctgtgagatcatttccatagaatcaataattacaatggtagaatggacggaaaggctcagccgcaaggaagtccatgtggccaacctgggacaagcaggccgggaccggtgactgccatacaccactggaccgcgtaacatgcttggcatgggaatgctgggaatatcccagcatcgtgagcgaccagaga

SEQ ID NO: 99035 - DNA, 1070 bp, Homo Sapiens
  misc_feature (791)..(792): n is a, c, g, or t
  misc_feature (877)..(878): n is a, c, g, or t
  misc_feature (890)..(891): n is a, c, g, or t
  misc_feature (912)..(914): n is a, c, g, or t
  misc_feature (921)..(931): n is a, c, g, or t
cggtccggaattcccgggatcgccgtccccacgcacgcgtccggctcacgcgtccgcccgcccgccccgcttgtgccgcccctaccagagacccccaggagcaggatgtccttccagggcaagaaaagcatcccccggatcacgagtgaccgccttctgatcagaggtgggaggatcgtgaatgacgaccagtccttttacgctgatgtgcacgtggaagatggcttgataaaacaaatcggagaaaacctcatcgtccctgggggcatcaagaccattgacgcccacggcctgatggtccttcctggtggcgttgacgtccacacaaggctgcagatgcctgtcctgggcatgacaccggctgacgacttctgtcagggcaccaaggcagcgctagcaggaggaaccaccatgatcttggaccacgtcttccccgacacgggtgtgagcctgctggcggcctacgagcagtggcgggagcgggcggacagcgcggcctgctgcgactactccctgcacgtggacatcacccgatggcatgagagcatcaaggaggagctggaggccctggtcaaggagaagggtgtgaactccttcctggtcttcatggcatacaaggaccggtgccagtgcagcgacagccagatgtacgagatcttcagcatcatccgggacctgggggccttggcccaggtgcacgctgagaaccgggacatcgaggaggacggagcaaaagcggtagctggagctcggcatcactggccccgagggccacgtgctcagccaccccnnaggagtggagggctgagcggtgtaccgagctgtcaccatcgccaagcaggcaaactgcccgctgtacgtccaccaagtgatgaanncaagggggcggnncgacgccatcgctcaggcaannnccaaaannnnnnnnnnncccggggttttggggaaaccccttcccccggccagccttgggggcacccgaccggttcacacccttactgggaggcaagaaaatggggggcccaaggggcgcgcaacccttttggtcacaaattcaacccccccgtggt

SEQ ID NO: 99036 - DNA, 726 bp, Homo Sapiens
cggcgcggcccggccgctctgggcgactgtgctggcgctgggtggcgctggcgggcgttggcgtggagggcccaacatctgtaccacgcgaggtgtgagctcctgccagcagtgcctggctgtgagccccatgtgtgcctggtgctctgatgaggccctgcctctgggctcacctcgctgtgacctgaaggagaatctgctgaaggataactgtgccccagaatccatcgagttcccagtgagtgaggcccgagtactagaggacaggcccctcagcgacaagggctctggagacagctcccaggtcactcaagtcagtccccagaggattgcactccggctccggccagatgattcgaagaatttctccatccaagtgcggcaggtggaggattaccctgtggacatctactacttgatggacctgtcttactccatgaaggatgatctgtggagcatccagaacctgggtaccaagctggccacccagatgcgaaagctcaccagtaacctgcggattggcttcggggcatttgtggacaagccctgtgtcaccatacatgtatatctccccaccagaggccctcgaaaacccctgctatgatatgaagaccacctgcttgcccatgtttggctacaaacacgtgctgacgctaactgaccaggtgacccgcttcaatgaggaagtgaagaagcagagtgtgtcaacggaaccgagatgcccca

SEQ ID NO: 99037 - DNA, 914 bp, Homo Sapiens
ggccactgtagggactggagcgaggccggggagtccgctccagcgttggcgctccagtccctcagacgtgggctgagcttgggacgagctgcgttccgccccaggccactgtagggaacggcggtggcgcctccccagcaaaccggaccgactgggtccagccgccgcagggaatgacgccggtgctcctacagccacggctccgggcggggaaggcgagccccacagccggccctgcgacgcccgcctgggcagcaccgataaggagctgaaggcaggagccgccgccacgggcagcgcccccacagcgccagggaccccctggcagctgggagccgcgggtcgaggttatggatccagcgggcggcccccggggcgtgctccccgcgtgccctgccgcgtgctggtgctgctgaacccgcgcggctggcaagggcaaggccttgcaggctcttccggagtcacgtgcagccccttttggctgaggctgaaatctccttcacgctgatgctcactgagcggcggaaccacgcgcgggagctggtgcggtcggaggagctgggccgctgggacgctctggtggtcatgtctggagacgggctgatgcacggaggtggtgaacgggctcatggagcgggcctgactggggagaccgccatccagaagccccctgtgtagcctcccaagcagggctctggacacgcgctggcagcttccttgaaccattatgctggctattgagcagggtcacccaattgaagacctccctgaccaagttgccacgctatggctgtgccggcggctgctgtcacccatgaacctgctgtctcttgcagaacggttccgggctgcggcctcttcactgtgctcagcctgcctgggcgtcattgggattgtgggcctaagcgagtaca

SEQ ID NO: 99038 - DNA, 1078 bp, Homo Sapiens
gattcccgggatcgcgcgcgcctgggggtctggtccctagccgcgttctcggtcgcttccctcttctctcgccgcctcctggcctccgcaccgacgcggcccgggctggagccgagccggggccgagctgcaggccggaccggagccggatctgtacccgctgagacgtggaaacatggaggcctgagccggtgtgcgccacctgggctgcggcggcgacagcgacttctcctgacccctctgccaccctcccatccgtccgcgggtccgtggagctggagcagatcccccagccggctgagacaggttgtcttttggaaatgcaggtttaaggacaaattatctgcttaagctagaagatgggatcgaatagcagcagaatcggcgatcttcctaaaaatgagtacttgaaaaagttatcaggcacggaatctatctctgagaatgacccgttctggaatcagcttctctcattttctttccctgcaccaactagcagtagtgagttgaaactcttggaggaagcaaccatttcagtctgcaggtcattagttgaaaacaatcctcggaacaggaaatcttggtgcactaattaaggtcttcctttctagaaccaaagaactaaaactttcagccagaatgtcagaaccacatcttcatttggcagacacacaatgctttgtttattattttgctgtatgctgaaagtgttcatctgtcagatgtcagaggaggaataacaacttcattttacttatgaagaaagaatctcctgggcaattacagttctgactcagaagatcttctcggaaaaattggctgtgctggttttgatgcagttggaatccctgacaattccccccctaaatattacattatggaaatttcagtagaaagctttatcaacccatggtttgggtttccttttcccggcgcaaattttcccccaaacaaatctttgggggaagaagatattctgccccccagacacttgttaatgcgaggatcccacggactttcccataacctcggatgaagattagggacagaaccccctttttgtccgacgctcctctca

SEQ ID NO: 99039 - DNA, 565 bp, Homo Sapiens
agaatgagaggtcggcttggaagtgtggacagttttgaacggtccaacagtcttgcttcagagaaggactactcaccaggggattctccaccagggacaccgccagcgtccccaccgtcctcagcttggcaaacgtttcccgaagaggattccgactccccgcagtttcgaagacgggcacacacgttcagccacccaccttcaagcacaaagagaaagctgaatttgcaggatgggagggctcagggtgtgcgttcccctctgctgaggcagagctccagtgaacagtgcagtgatggagaagggagaaaaaggacctcatctacctgcagcaatgagtccctaagtgtgggaggaacctctgtcactcctcgccggatctcctggcggcagcgcattttcctcagggttgcttctcccatgaacaaatctccctcagcaatgcaacagcaagatggattggacaggaacgagctgctgccactgtcccccctctctccaaccatggaggaggaaccgctggttgtattcctgtctggggaggatgacccagaaaagattgaaa

SEQ ID NO: 99040 - DNA, 785 bp, Homo Sapiens
  misc_feature (78)..(147): n is a, c, g, or t
  misc_feature (190)..(190): n is a, c, g, or t
  misc_feature (223)..(223): n is a, c, g, or t
  misc_feature (282)..(283): n is a, c, g, or t
  misc_feature (316)..(316): n is a, c, g, or t
  misc_feature (329)..(330): n is a, c, g, or t
  misc_feature (344)..(344): n is a, c, g, or t
  misc_feature (360)..(360): n is a, c, g, or t
cggagcgggctgggcgggagcggcacccccactgcggcttccctgcttttctgtctgctgttggtgagcgatttccannnnnnnnnnnnnnnnnnnnnnnnnnnnnnnnnnnnnnnnnnnnnnnnnnnnnnnnnnnnnnnnnnnnnnatggaagggccaaagcggccccgttctccacgtggtctccggnccgttcactccaccccttcccccggcttgccancacgtgggcatgcggggtggatgctcgaggcagcaggcctgctcgggccttaacagganncccggaggcactcagcgcaggtgaacgcggccngagagcacgaagnngggggcgcgctcgnggtcaaccatggaagnccggggcatcgagtccctgggcgcggacttggagagatcaggcttctggaaagtgtacaggtcggaattcccgcagcccagctaaatcaagtgctgctgctggtctcctctggcacctccaattgctgcgcgctgcggcggaagcccggggctcgcagcgcagtctgttctggtcggagggggcggcggcgaggggccgccagactcgctgcccgggtggaaggtccagggcggctttccgggctagtagtgtttcattcgccggcgcgtccctcttccctgctagcaccgcccgggagccggctgagagatgggaccctggctgttcactccggcgcatcgaacttgcctacgcgtccgtaggaacgcaaaaaagacatctgcccacctgctggttatttgccaagtgattcgggaaaccagaa

SEQ ID NO: 99041 - DNA, 1238 bp, Homo Sapiens
gccttccccggcggctgctgctgctgctggcgctctgtggtgcaggcggcgcggcccatgggctatttcgagctgcagctgatgcgcgctgcggaacgtgaacggggatgctgctgagcggcgcctgctgtgacggcgacggcctggacaacgcgcgcggggggctgcggccacgacgagtgcgacacgtacgtgcgcgtgtgccttaaggagtaccaggccaaggtgacgcccactggggccctgcagctacgtgccactggcgccactgccctgtgcttggggcgggcaagctccttctaccttgccgcctggcggtgcgctgctgggggtgaccgagcgcgggcgcgggcccgggccggcggcgaccaggacccgggcctcgtcgtcatccccttccagttcgcctggccgcgctcctttaccctcatcgtggaggcctgggactgggacaacgataccaccccgaatgaggagctgctgatcgagcgagtgtcgcatgccggcatgatcaacccggaggaccgctggaagagcctgcacttcagcggccacgtggcgcacctggagctgcagatccgcgtgcgctgcgacgagaactactacagcgccacttgcaacaagttctgccggccccgcaacgactttttcggccactacacctgcgaccagtacggcaacaaggccctgcatggacggctggatgggcaaggagtgcaaggaacctgtgtgtaaacaagggggtaaatttgctccacggggggatgcacccgtgcctggggagtgcaggtgcagctacggctggcaagggaggttctgcgatgagtgtgtcccctaccccggctgcgtgcatggcagttgtgtggagccctggcagtgcaactgtgagaccaactggggcggcctgctctgtgacaaagacctgaactactgtggcagccaccacccctgcaccaacggaggcacgtgcatcaacgccgagcctgaccagtaccgctgcacctgccctgacggctactcgggcaggaactgtgagaaagctgagcacgcctgcacctccaacccgtgtgccaacgggggctcttgccatgaggtgccgtccggcttcgaatgcactgcccatcggggctggagcggggcccacctgtgcccttgacatcgatgaatgtggcttcaaaccctggtgcgggccggtggccacctgtgtggaaccaagtgggaccgcttttaatggcatc

SEQ ID NO: 99042 - DNA, 1704 bp, Homo Sapiens
gtgctcattctaagcatgtgctgagcaagggtgctagcttgggcggctagccctcttgcgcatgttcgttctgattgacattcacatgcggtaggctgtttgcgggaagagtggtgcgctagcgtataggttccgcctcccacgcggaagtcagagtcgccctgggacgaaagtatcgccaaggtgaacagttttttgccaaggtcagggggggtttaaagaaggtgggcgccagtgccttaggtttataattcagacttccgctattatgggcccccttttgttccaaagaaaacctcgggttcgcggataagcctggggcccccttggaggggattcttctagaaggcgcccgttcatttttgttcttggaacggcccggtgcctggctgagcagggggcatgacggctggtcagggtcttttcccgtaatcgtccgaggacaggatcttctccttctcccgtatccagccttcctcttcttgccatctcccagaagaacttccagaggcggcgggactcttccagacgggccctgcgctcagccgccagctggcaaagctcttgataacagaactccatgtgggccacgcggtctcggatcacctgggggtcacagggcttgtaaccttccccgtctgttgcgaacttctgggcggaggcattgacacctctcacccgctctgcctggatgccaatgtctgcttcaaccagggtgtgcttctgtaacaggtcttccacaccaagtaagtgtttgccatagtcttgagacaatactagcaccttcatttcatccatccagtccataatgtagagcatttcctggaatatcttctgcagccccaggttcatctcgagccgctgtctccgggccctgagcagttccagtaggtattcccagagccggatgacattgtccttcctcgctgtgatgcgcttgatgtcgtggtaattctcggcctcgagctccctggccacggctaccacagcctgcacacgctcctcgtatgcggcaatgtctgtctcaatggcctcgtgcttttttgtggcggcctcaactgcaggaaggtcaaacccaaagttgtcctgagacaccagacgctggttttcgctcagccaagtctccctcatagctgccttgcgatcaaatctgcgggcgagctgttccagtttctcctgtcttatgagctcattccgcaaagccagttctctttcgtgttccgctttttccagtctttcccaggccttgttgatgtcagagatgagcttcccctcccggggcatgtagaccttctggttgttggccctcatcttgctctgaatggtgaagagcagcacttccaagttccccttctcagtaaatttgggtggtttctccacagtgcggtaagtgttgaatgcctgaagctgctgttgaaccccgaccagtgaattggcaaatttgcgattgttcagaatgatgatggtttgttcaatccattccagaaggtcagaggcaagtgattcatacttttcaatcattttttctgtttcaatagcattgtcaagcacctttccaattcgttttccttcaacagctaaggccttcatcttagagaagtagtggtaataagtcacccaaatttactgagaaggggaacttggaagtgctgctcttcaccattcagagcaagatgagggccaacaaccagaaggtccagtatg

SEQ ID NO: 99043 - DNA, 1296 bp, Homo Sapiens
  misc_feature (1107)..(1131): n is a, c, g, or t
attccccaacaaccaatatcaccgccccaacgagctccaaaaccgccgggaccggcccgggatatccgggattgagagtcggagccacagccagagccctgcccaggccgagccggagctgcagcccgagcgcggtggtgccctcagccccgtcctcttgtcctcctcagcctcggtgccttggaatttgtgtcgctgagtcagcaagcctttcagatttgcccggtttttgttgtttgtggtttgtatcaagatgggaactcaaacaagtcattcctcctaaggagctggtgtcttcatccagaagggacagtttgtgccagctctccagagagaaaagatctgccggaggcgctgggcaatgaccccgggactccaggccagaggggtctgaagctgtttgggaaagcagcgggactccttgggaagatggccatggccccaagcccttccctggtgcaggtgtacaccagccccgcagctgtggccgtgtgggaatggcaggacgggctgggcacctggcacccctacagtgccaccatctgcagcttcatcgagcagcagtttgtccagcagaagggccaacgttttgggcttgggagcctggcccacagcatccccttgggccaggcagacccctcgctggccccttacattattgacctccccagctggacccagttccgccaggacaccggcaccacgcggactgtgcggagacacctgttcccccagcactcagcccctggccgaggtgtcgtctgggagtggctgagcgacgatggctcctggaccgcctatgaagccggcgtctgtgacgatctggagcagcaggtggccaggggcaaccagctcgtggacttggcccccctggggtacaactacactgtcaactacaccaaccacacgcagaccaacaagacttccagcttctgctgcaacgtgcggcgccaagcaggggccgccttacccagtgaccaccattcatcgctccgccggggcacacagggcgtcacctgctcttggccaccaatgcctcaggggcaaacgaaacttggcctgtgtacagccgctaccgccacttccttgacaaccttcctggctaannnnnnnnnnnnnnnnnnnnnnnnnaggaacccttctggggtttgggacccacccgggcctttggccgcgaacgaaagaccttctattctccgggggcccgggtttgggccccagagttgaaccccacgaaatccctgggtaacagactctccctttccgtggggggagcagccctcttaaagggttcat

SEQ ID NO: 99044 - DNA, 1252 bp, Homo Sapiens
  misc_feature (92)..(140): n is a, c, g, or t
agcgcccacccaccgcggcacacacaccaacacggctggtaccggtccggaattcccgggatcggagcgggaggccggaccggggagccgannnnnnnnnnnnnnnnnnnnnnnnnnnnnnnnnnnnnnnnnnnnnnnnntaatggcggagctggtgcaggggcagagcgctcctgtggggatgaaggccgagggcttcgtggatgccctgcaccgggtccggcagattgctgctaaaattgattcaattcctcacttgaataattccacacctctagtggacccctcagtatatggatacggagtacaaaaacggcccttggatgatggagtaggtaaccagttaggggccttggtacatcaaaggacggtaataacggaagaattcaaagtgcctgacaaaatggttggatttattatcagcaggggaggtgagcagatttcacggattcaagcagaatctggctgcaaaattcagattgcttcagagagttctgggattccagagaggccctgtgtacttaccggaaccccagaaagtattgaacaagccaaacggctcctgggacagattgtggaccgcatgtccaaatggacctggctttcataatgacatagacagcaacagcacaatccaggagattcctcttcccccccctagagggggtctggtcctcccgccgaggaggggacacccttccgcccgttgcggggacgggacatgggccgaaaatggctcatgccttccaagcaagagcccatgatgcccgcggggcacccagcaccgaaaccttccttcctgattcccctcggacacatgccctttttacctgcgttcccgtcaaatgcgtgcagacgcaacctgggcgtggctccctcacaggcattttcttccgccgccccaaatgtatgtgatctgcttacgcctccaaaactatattcaaccggggcggtggatcaagcacgccttgcgcattttattcaacgcttcctctcctagccatgcgcccaaggcaccgttcttccccctttctccacagcctccccctccttgcaggggactccgatggtgcccccttatgggaggggccgcgccgcgtgcggacagtgatagggcagacttctggggtcgccccgccgtgataccttaacttctccgccaccccccgtttgctagccgcgccccatcaattgctttgcgcctgccgtgaggactcatgctcattccccctgccgagccaatcacatcccg

SEQ ID NO: 99045 - DNA, 851 bp, Homo Sapiens
  misc_feature (333)..(333): n is a, c, g, or t
  misc_feature (638)..(650): n is a, c, g, or t
  misc_feature (677)..(689): n is a, c, g, or t
  misc_feature (726)..(735): n is a, c, g, or t
  misc_feature (742)..(782): n is a, c, g, or t
ctagcgcggctgcggggcggagagctgcggctggcccagcgcgcccacctgaggaggcggcggggtccgcaggcgtcgcgggacgaggagatcggagccgggagactcgcgcagcgccatggcccccattggcctcaaagctgttgtcggagagaagattatgcatgatgtgataaagaaggtcaagaagaagggggaatggaaggtgctggtggtggatcagttaagcatgaggatgctgtcctcctgctgcaagatgacagacatcatgaccgagggcataacgattgtggaagatatcaataagcgcagagagccgctccccagcctggnagcctgggtattctccatcactccatccgagaagtccgtccactctcctcatcagtggacttttaaggaccgcccaattggttaataaccgggtttgacacgttttcttccctgaatcttgtgccaaaagccctgtgtttatgaactgggaaaatcccccgaaggcccaaggtttttaaaatttctttggcggaaatcaaaattggcgttttctccccccaagaaaccccccggggtttttcctttggggacctgggggagcttttttccaaaaatttttttaaggccccccccacagggttttnnnnnnnnnnnnnccctcttttttgggggccccctcttgnnnnnnnnnnnnncccgcccacccttttggtgccccccctcaaaagggannnnnnnnnnttgtgtnnnnnnnnnnnnnnnnnnnnnnnnnnnnnnnnnnnnnnnnnccccccccgccggggtggccccctttttttcctccgaaaaaaatttctctgctgcgcttttttaaaaaa

SEQ ID NO: 99046 - DNA, 700 bp, Homo Sapiens
tcttctccggagctgttcctgggttctgacatgttcgtcatcctcatgctctacctctgcttctgccatcggcctggccttgcgccggcttctgctgccacctagctgctgttcgatcctccgcggcagatctctgccaccagcttcggaatgggttgtcattgagggccctgtccctggctgcaagaacttacaagaggctcttcggaaagatggtggctgctgggcctgctggtccccatgttcaatgtcggaagtgagatgctccaagcagcaggataagtagtagacactcccgtcagtttatctctctgtctctgtctctgactcctcctgagcataaaaaccatggcagccttgtcgtccacccatgactcacatacaaccttgtgctggtaaggtcctagcatcttcccctcaccttccacccatgagaacagcgtgagctggtggatcatgacaaggaggaaaaatgtccccccaggcatttctaggctcctcacgagccagccaggtggctgtctagcatgttaggctgcctctgctttctttcgcgtccccttgggatccctgctttccccctctgcctggctcatccattctccaccgtgtctcattcatcactgctgtctgctagagcccttcctctcagcccccatgttgggagaggaagggctctagcagacagcagtgatgaatg

SEQ ID NO: 99047 - DNA, 739 bp, Homo Sapiens
  misc_feature (593)..(696): n is a, c, g, or t
gtcactgttaagggggccgccatggcccggctgtggggcgcgctgagtctttggccactgtgggcggccgtgccgtggggcggggcggcagccgtcggtgtccgggcttgcagctccacggccgccccggacggcgtcgagggcccggagatacggcgctcctattgaagccacctgaagcgtatggtgatgtgaactccaaaaacgccgttatcaaaagtgagagaatttggatatcctacgttgtgctgatcggcttcatctacatagtgttgctgatcatccagattgaaagtgtctctgtcatctggacccttaccaacctcattcacaacatgggcatgtatatcttcctgcacaagatgaaggggacatactttgagaccccaaactactgtaaggagacgctgttaaccaactgagagtagatggattatgggatcgaattcacggacctctcagaacttcttgaccatcactcacatcataatataatccctcaaaaaaatactagattaaataagaccacatccatatttatgctaaatgaaagagaaaatgtataaagatcgctaaacaccacagttggcccnnnnnnnnnnnnnnnnnnnnnnnnnnnnnnnnnnnnnnnnnnnnnnnnnnnnnnnnnnnnnnnnnnnnnnnnnnnnnnnnnnnnnnnnnnnnnnnnnnnnnnnnaacgaatttacctcacaaataaatatactcctctccgcttatt

SEQ ID NO: 99048 - DNA, 733 bp, Homo Sapiens
ctgacacgcggcgggacatgcaggtaaccctactctggaaactgtcagtcccaggcactggggagggctgaggccgaccatgcccagcctgctgctgctgttcacggctgctctgctgtccagctgggctcagcttctgacagacgccaactcctggtggtcattagctttgaacccggtgcagagacccgagatgtttatcatcggtgcccagcccgtgtgcagtcagcttcccgggctctcccctggccaaaggaagctgtgccaattgtaccaggagcacatggcctacataggggagggagccaagactggccatcaaggaatgccagcaccagttccggcagcggcggtggaattgcagcacagcggacaacgcatctgtctttgggagagtcatgcagataggcagccgagagaccgccttcacccacgcggtgagcgccgcgggcgtggtcaacgccatcagccgggcctgccgcgagggcgagctctccacctgcggctgcagccggacgggcggcccaaggacctgccccgggactggctgtggggcggctgtggggacaacgtggagtacggctaccgcttcgccaaggagttgtcggatgcccgggagcgagagaagaactttgccaaaggatcagaggagcagggccgggtgctcatgaacctgcaaaacaagaggccggtcgcagggctgtgtataagatggcagaacgtaactgcaaat

SEQ ID NO: 99049 - DNA, 1230 bp, Homo Sapiens
cacacaccccacacagcccagaaatagacaagctggtaccggtccggaattctccggatcgggtccacagtgctgcactgagcagagaggaaggggcgtcccgggatatttggaggataaagggtgatgaccacacctgccggctccggcagcggcttcggctccgtgtcctggtggggcctgtccccggacgctggacctgcaggctgaaagtcctcctgtggacccagactcccagtgcctgatacagtgcacagcaaccccgagctagatgtgctgcttctgggctctgtggatggacggcacctgctgcggaccctgtcccgagcgaagttctggcctcgcaggaggttcaacgttctttgtgctggagaataatctggaagctgtggcccgacacatgctgatcttcagcctagccctggaggaaccggagaagatggggctgcaaggagcgaagcgaagacctatcctggaagtgtgggggaacgcgctgctgcgcccgccagtggccgccttcgtgcgtgcccaggccgacctgctggcgcacctggtcaccgaagcccggaccgcctggaggaaacgctgccctggctcagccctccccgccctcaagttcccccaagcgggaagcccctgaaagccggaattccccctcctgggctgggcgggccagaaaggggcccccaggcgatccccccatgaaaccgccctctggggactcccgccctggcgccacttaactgggggttcccctctacctaaagcacggcgccccggggaccaccgacactggggaagcctgtcgccaaggaaacgcttgctataaacccccggggcgcccacacggccttcccgcgccccggaggatgacgccaacccgcttggcggggaacacacagggggattaggcgcatcttgggaatctaacgggggagactccgaggaggccactaatcaccggtaggcccgccagcgacggaaacccgagagtggggtctccgggcggggctcgtctcggaggccatactctacggggtgggataccatcggttggaaacacacgctccatgcagcatttctacgtgggggtggagtcttacataccccccagtgagcgcttcattattagggggtaatctagagtactccttcttacaacggtaagacgcagcccgtgcacccatcacctctgggaaaatataatacaccagcgcccaacccgcactg

SEQ ID NO: 99050 - DNA, 821 bp, Homo Sapiens
cttttccgctcctcgcgcccacaccaacatgttctctcaggactcctgggtcccagggtcggaattgggcctgagcgggagaggaaagagacttggctttggccgcggggtcggaggattggggccaggccccctcccccacgcacttttgggggtgtggattatctcatccctgcagggaggtaggagaggtcgccggctgcccgcctccctgccacctccccagcggcgccggaccgcggctgcccagcagcatgaggtggtgctggcggctccgggtcgtggcgcgaccgctgcggcggctggctgctcggggggcgctgaggtagccccccggagcggcacggaggacagcgcttctcctctgcgcgccggggcctcgaggactatgtatactccaagccgagaggacgcggatgtgatatacgaagactttgtgtggcacacgtaatgacctcacgtatccgattgcctgctggcagaacctacaactgtacgagcatcagagttggcccgagacagacagcatactgaagtggttttgcaacaatccttcttctgggataaccagtgtacaaagctttccacaaagtcaataaacatgcatcaagggagcaaaagtcattaggttgagattgtaagatcttccaacgcattcatagaatttgaacctagagcagggaaaataatggaaacaaggagggttgatgattccacagatacacccaaggtgaatggatccaaagaaacgatagggcagcagtaaagagaggatatctttacagttatgaacttaaaagtcaaattttttgtaagtgacc

SEQ ID NO: 99051 - DNA, 1081 bp, Homo Sapiens
  misc_feature (56)..(98): n is a, c, g, or t
taaaagaccccccaaaagggggggaaccccgtgttgattccccctaagttgagaannnnnnnnnnnnnnnnnnnnnnnnnnnnnnnnnnnnnnnnnnnggaataagggtgggttggagcttgggcagaggcccctggccccgtttgggggcccaggcactttccagttggcaggaaggagggcccaggcgggggcacccccaggagcggggcacccgagccagggaccaggggggatccccaggaagaagtcccagggccttgcaggccgcgccggggggccccccggcccaaggaacacgcagaagtagttgtgcaaggcaggtgaccaggagggacaggacccaccagcagggcgcacaccacggccgacaggcgcttgggccgccggcgccagtaccaggcggggaagatgaccgaggcgcagcgctcggcgcggacggccggcaggagggctcaccccggtaaggaacatgcagagccccaggacccggcacacgctgcggatgtagtcggcaaacgtgcccaggaagccccccgtgttcaggatggagaacaccgccttgctgaagaggtagcccacatcggcgctggccaggtgcaggaagtagatggagaaggggttcctcttgatggagaagccgaaaaaccagaggaccagcccgttgcccaccaggccacacaggcagaggagcaggaagatgtagttcatgacggccggaggcggcagcatcgcgatctgctcgatggtcaggaagccccggctgtagagttccggggcctcgctcaggccagggcacatcttgttcctgttgccgggatgggcctcccaggagcagtttccagccatctccaggcctggcgcgtctgggcccctgctggcagctcaccagtctgcacacccacctgcagctgtcctgatccgccgaggcctccttttgtggagggctcttcctgtgactcccgcctccggccggcggacccgccggggcagcaggccagcgccgagcgcggcccggagccttggaaaataggagctcagagtagagccctctcctgctgatcccgggaattccggaccc

SEQ ID NO: 99052 - DNA, 760 bp, Homo Sapiens
cttggcgctgcggccactgcgcggcacgacgctgcggcacccgctccagacatgctgctgctgaagaaacacacggaggacatcagcagcgtctacgagatccgcgagaggctcggctcgggtgccttctccgaggtggtgctggcccaggagcggggctccgcacacctcgtggccctcaatgtgcatccccaatgaaggccctccgtgggcaatggaggccctggtggagaacgagatcgcagtgctccgtaggatcagtcaccccaacatcgtcgctctggaggatgtccacgagagcccttcccgaactctacctggccatggaactggtgacgggtggcgagctgtttgaccgcatcatggagcgcggctcctacacagagaaggatgccagccatctggtgggtcaggtccttggcgccgtctcctacctgcacagcctggggatcgtgcaccgggacctcaagcccgaaaacctcctgtatgccacgccctttgaggactcgaagatcatggtctctgactttggactctccaaaatccaggctaggaaccatgctaggcaccgcctgtgggacccctggatatgtggccccagagctcttggagcagaaaccctacgggaaggccgtagatgtgtgggccctgggcgtcatctcctacatcctgctgtgtgggtacccccccttctacgacgagagcgcacctgagctcttcagccagatcctgagggccagctatgagtttgactctcctg

SEQ ID NO: 99053 - DNA, 1365 bp, Homo Sapiens
  misc_feature (1031)..(1040): n is a, c, g, or t
  misc_feature (1066)..(1076): n is a, c, g, or t
  misc_feature (1217)..(1250): n is a, c, g, or t
  misc_feature (1264)..(1264): n is a, c, g, or t
cccaacacacctctccatccctccttcgagataactaatagacgctggtccggtccggaattttcccgatgttgcgcgctgggcagctgtggcggcctgggtaccttgtcggagctggggctgggcagccgtccccttcggtccccaccgtggcctcagcgtgctgcttgcacggatacctcagcgggcgccacggtggctcccagcttgtagacaaaagacgtcactctcattccttaatcgaccagaccttccaaacctggcttataagaagctaaaaggcaaaagtccaggaattatcttcatccctggctatctttcttatatgaatggtacaaaagcgttggcgattgaggagttttgcaaatctctaggtcacgcctgcataaggtttgattactcaggagttggaagttcagatggtaactcagaggaaagcacactggggaaatggagaaaagatgttctttctataattgatgacttagctgatgggccacagattcttgttggatctagccttggagggtggcttatgcttcatgctgcaattgcacgaccagagaaggtcgtggctcttattggtgtagctacagctgcagataccttagtgacaaagtttaatcagcttcctgttgagctaaaaaaggaagtaaagatgaaaggtgtgtggagcatgccatcaaaatactctgaagaaggagtttataacgttcagtacagtttacttaaagaaacctgaacatcccctgccttggttacattaaccccaatttccctggtgaaacttgccccccataaagaaattgcctcccaatgtggcaatgcaaaagggaatgaaccattttggttaacccctttgtgggccaataacactttcaaaatgggcccaaagtgttctgtgcccggaaattccgaaagagttaaaccttccaaaagccaaaccaaaaaaatgggtgtgggaaaattatggttttaaattcccccttttccccggggacaaaaaacaccactccaagcgcggggaattnnnnnnnnnnggataaaatgggcgcgagcggggacnnnnnnnnnnngtccccagagaaacaattttttattacaaaccccttctccccccctggggagctctaaacacacccccataattatttggggaaggggggacacctttttaaaaattttggggaataataaaagggagtttgtctctcccnnnnnnnnnnnnnnnnnnnnnnnnnnnnnnnnnnccctacgaggggtnaaataattcaccaaccacattgtggtttcttcttaaaaacccccctttaggggcgctaacatgctggttaataaaacaaccaccccctaaacgtggggggt

SEQ ID NO: 99054 - DNA, 808 bp, Homo Sapiens
  misc_feature (158)..(158): n is a, c, g, or t
  misc_feature (390)..(404): n is a, c, g, or t
cgggtgtctctccatcacagctgcggctctggcttcttccaggaagtgaggtggttcgctccccgtgcagctgctgctgccgctgcgttcaacgctctgtaggcctgcacggcccgctctctctcctcctccacaatccgctggcgggccagggagcnggtcagaggctgggacacaccaccggggctcagaagcatctgcagcatctgcgatctcctgccaggctggtccttgcttacgctcctctggggcctggcagtcagctctgggggctgcaggacaacctcaccaaacttcaccgtgtctcggagcaactcctgctccagcctgtctgccgccttttcctcctttttccgtcggactttatctagtcgccgcttctggaacgcnnnnnnnnnnnnnnnctgctcagacttctccttgggagctgcctgcacctctggctgccggatggcctggttcttgctgaggaacagcacatgctgggcctcttgctgcatgcgctggatataggccccgtcggactcccccttcctctgtttgaacttggggactgcgatgtcgggctcctctccctttgcttccttctccaatgtctttctgaaggtcacctgggctgctttcttcctcttcttgttactgatcgggtttttcatctcttggcggctcctcataatctcccggagccaggaaaggaatctcctgttcgtcctggttcttgggcttgcagttcactttcttcttctctttgctgcgaagcccgggccacggggctgggcgctgcttccccagccaaccgtggactagt

SEQ ID NO: 99055 - DNA, 845 bp, Homo Sapiens
tctcttaacatttccgcaacttcattagtatctccatgctcaaaatatgtcctgtatgattggtgttaaagtcttctcaaatgcccttgtcatccaaaggcaaaactacagtttcataaacacagttctcctggtcatcatcatagttaggatctatcacatccacctcctccacatcatacacctgtccaggtgtaccccagacacctttgcctcctgcaccacctttctttggtagtccccttcctttcccagatctggatcgcctatccagcaaccttccctttggactggttggcacagttaatccacttctaagggcgtcactcccactgtcgctgaccgaatcgcctctgccagagtcccgggatgagtttttccttagtcgcctttttgccttggcattaattctagcttcgttaatggaggatgctgaaatccaatttccatttatttcattctttacttcctcagtcccagcattttcttcatcaccggaaaagagagagtcacttaagttatcaggatctgcagggtttacattcagtatctgctcattttctacatccattttcccttaatttcgcttgcactgattaaacaaattacctaatggaaatcttccttcagaatccctcgggcccccgccgctgctcgcccaggttcctggtcagccggccccgaccccgctcttctgtctctgccgccgcctcggagagtctctggcccttctcgctctgtttgtttttgttttcttctacccagtaacacgggggcgagagggcggcgcttattggccgaggccgcctggtcggctggccaatcgtggcggcggagccggagct

SEQ ID NO: 99056 - DNA, 1060 bp, Homo Sapiens
agcgaggcggccagtgtgagcgggcgcgagtggcggctgccggagccgcctgtgcacgggcggcggcgaggcgagggtggcggtcgcctgagcagctagagccggggcggcgcggaatccgcatccgccgcgagtgtgatgaagctaccctgcctcgctgctccgcttgccgccagctgacaccgcctgcacccagcccgcccgggaggggagacgccgcggggccgtgaccttggcggaggagggcacactgataattcttgtatcttgagtgtggaccaagttttgggtgacatggcccaggggaataattatgggcagaccagcaacggggtggccgattgattcacccaacagtgctggtgtacagaaagatggaagacgtcatagcacggatgcaagatgaaaaaaatggaattcctattcgtacggtcaaaagctttctttccaagatacctagcgtcttctctggttcagacattgttcaatggttgataaagaacttaactatagaagatccagtggaggcgctccatttgggaacattaatggctgcccacggctacttctttccaatctcagatcatgtcctcacactcaaggatgatggcaccttttaccggtttcaaaccccctatttttggccatcaaattgttgggagccggaaaacacagattatgccgtttacctctgcaagagaacaatgcaaaacaaggcacgactggagctcgcagactatgaggctgagagcctggccaggctgcagagagcatttgcccggaagtgggagttcattttcatgcaagcagaagcacaagcaaaagtggacaagaagagagacaagatggaaaggaagatccttgacagccaagagagagcgttctgggacgtgcacaggcccgtgcctggatgtgtaaaatacaactgaagtggacattaagaagtcatccagaatgagaaaccccacaaaacacggaagtctgtctatggttaacaagatgatattagaagtcacagtcctaccacacaaaccaacagaaataaactcccacagaagag

SEQ ID NO: 99057 - DNA, 1375 bp, Homo Sapiens
atcgcggccatggcggggccgggcgtccccggtgcccccgcagcgcgctggaaacgccacatcgtgcggcagctgcggcttcgggacctgtacgcaaaaggcgcttttcctgtgagctggtgccggcctataaccatctcttagagaaggctgagctgctggacaagttctcaaagaagctgcagccggagccaaacagtgtcactcccaccacccaccagggcccctgggaggagtcagagcttgactcagaccaagtcccatcactggtcgcactgagggtgaagtggcaggaggaggaggaggggctccggctggtctgtggtgagatggcctaccaggtggtggagaagggcgcggccctgggcacgctggagtcggagctgcagcagaggcaaagcaggctggcagccctggaggcccgcgtggcgcagctgcgagaggcgcgggcgcagcaggcccagcaggtggaggagtggcgggcgcagaatgcggtgcagcgggcagcctacgaggcgctgcgcgcgcacgtcgggctccgggaggcggcactgcgcaggctccaggaagaggcgcgcgacctgctggagaggctcgtgcagcgcaaggcgcgcgccgcggccgagcgcaacctgcgcaacgagcgccgggagcgggccaagcaggcgcgggtgtcccaggagctgaagaaggctgccaagcggaccgtgagcatcagcgagggcccggacaccctaggcgatgggatgagggagagaagggagactctggctctggcccctgagccagagcccctggagaaggaagcttgtgagaagtggaagaggcccttcaggtgaggacccaggtgacagtctcagagctctgagctgagccccaccccagaggctgccagggtcttcctcttggaccttggagccagctcttgggttgggagggggcttgaggagaggccagaaagctcagatctcccagggctagtctgacctccattgtctggagccacttggggtcagttccatctcaccccccagaagccctaccctcaaccctttccctccttcttgggatcagagctctgggggtggggagtcaggcttctgaatagctgtcaccaggagagaacctgtgggcaaagcccagagcccagtcatgccaggcatgtgtgcgcagccataggtgtgcaagcatgtgcatccgcagggacatgagggccacaaggtgtgtacaaggcttgactgagcccgtctgtatgtgtgactatactcagcatgtgtagatgtgtgctcacacttgtgggacctgattggggcttcagaccttgggttgactgtccgtagggtctcctccatccttctgaattgcctgtcattgg

SEQ ID NO: 99058 - DNA, 775 bp, Homo Sapiens
cggcggcgcgcgcctgagaagaggggacgccagcccggtcaggcctcggcgcggcctacacgctccgctcgctcgctcgctcccgcctcccgtccccgcgcccggcatggcggagccgtcgtccgcccgacgcccggtgcctctcatcgagtcggagctgtacttccttatcgcccggtacctatcggcgggcccgtgtcggagagcggcccaggtgctggtgcaggagctggagcagtaccagttgttgccgaagagattggactgggagggcaacgagcacaacaggagctacgaggagttggtcttgtccaataagcatgtggctcctgatcatcttttgcaaatctgccagcgcatcggtcctatgttggataaagaaattccacccagtatttcaagagtcacttctttacttggtgcaggaaggcagtctttgctacgtacagcaaaaggtaccttaatttgaagaagtgttctgctttgtattaatagcctaataattattataattgtgaagtaatgtaagcattgtggaagaaaggtgataatgtaactataaatcatgctgtggactataaaattctctgcatttagcatagaacattgaattttattacataagtgtttaatgggtccttctgcattaaaaagttgataaagatatagatgttaagctaaaaagcttgaatttattctgagatgttgtttgaggttttatcaatgtgagttcttaattttccattttgtagctcactcataacttcattgaatg

SEQ ID NO: 99059 - DNA, 1614 bp, Homo Sapiens
gctgggcaggcgtctgtcttcaggcggctctggcctgaggccggcgtgtgctccctggcgctgccctctgacctgcagctggaccgccggggcgccgaggggccggaggccgagcggctgcgggcagcccgcgtcaggagcaggtccgcgcccgcctcttgcagctgggacagcagccgcggcacaacggggccgctgagcccgagcctgaggccgagactgccagaggcacatccaggggcagtaccacaccctgcaggctggcttcagctctcgctctcagggcctgagtggggacaagacctcgggcttccggcccatcgccaagccggcctacagcccagcctcctggtcctcccgctccgccgtggatctgagctgcagtcggaggctgagttcagcccacaatgggggcagcgcctttggggccgctgggtacgggggtgcccagcccacccctcccatgcccaccaggcccgtgtccttccatgagcgcggtggggttgggagccgggccgactatgacacactctccctgcgctcgctgcggctggggcccgggggcctggacgaccgctacagcctggtgtctgagcagctggagcccgcggccacctccacctacagggcctttgcgtacgagcgccaggccagctccagctccagccgggcaggggggctggactggcccgaggccactgaggtttccccgagccggaccatccgtgcccctgccgtgcggaccctgcagcgattccagagcagccaccggagccgcggggtaggcggggcagtgccgggggccgtcctggagccagtggctcgagcgccatctgtgcgcagcctcagcctcagcctggctgactcgggccacctgccggacgtgcatgggttcaacagctacggtagccaccgaaccctgcagagactcagcagcggttttgatgacattgacctgccatcagcagtcaagtacatcatggctccagacaccaacctgcaggtgctgggagcggcctacatccagcacaagtgctacagcgatgcagccgccaagaagcaggcccgcagccttcaggccgtgcctaggctggtgaagctcttcaaccacgccaaccaggaagtgcagcgccatgccacaggtgccatgcgcaacctcatctacgacaacgctgacaacaagctggccctggtggaggagaacgggatcttcgagctgctgcggacactgcgggagcaggatgatgagcttcgcaaaaatgtcacagggatcctgtggaacctttcatccagcgaccacctgaaggaccgcctggccagagacacgctggagcagctcacggacctggtgttgagccccctgtcgggggctgggggtccccccctcatccagcagaacgcctcggaggcggagatcttctacaacgccaccggcttcctcaggaacctcagctcagcctctcaggccactcgccagaagatgcgggagtgccacgggctggtggacgccctggtcacctctatcaaccacgccctggacgcgggcaaatgcgaggacaagagcgtggagaacgcggtgtgcgtcctgcccaacctgtcctaccgcctctacga

SEQ ID NO: 99060 - DNA, 824 bp, Homo Sapiens
ttctggttgcttagagacaaaccatgtaggcccagaagtcggtcagagagtaattctcagacctcgctgcttggatggttttctgtaggctcttagccaagtcccactcctgtcgggtaaatcgatgtttcaggtcagcctcgagagcttccatgtcaccatcattggtgtagagagaagatattgcccaagtggatccagagaccccctgcgaggtacgtgacggcatccaacaggccctgttctttcatctcactcaggaccccaaggcaggcaatgtgagcccgcagtcctccgcctgagcccagcacagcaacaactggggcctcatcagcctcaatccttagcttcttcagagctttcagcacatgaagtcttcgtctctccacggccgccttttcttctttctggagcccaggaattatggaaacttcagagcttcccatggtgcactgcggtcagaaaattctcagtcctcctgagcctgggtctggggcgtgtgcgcatgcgcggtggagcttgtgctccggaatccggtgcggaggcttgggctccggaatccggtgcggaggcttgggctccctgcgcttagcggtgtagtcgctggacagctccttcagccggaatctccgcgggtgaagactgcggggatcctcggtgccaaagcttctgtggtcctcctgctttccttttccacctgtgggaggaggtcgcgggcctggaggtgtttcctcctggtcctgagcagggccaacctggagggtaaaatggccctgcgcctttaaacagccctcctcggcttgtaggcctgcttgttgctccag

SEQ ID NO: 99061 - DNA, 952 bp, Homo Sapiens
tcacggttgctgttgcagacccaggagtctctgaaggcttccgcggctttggggccggttgtgagatgccaggcagaggccgctgcccggactgcggctccacggagctggtggaagactcgcactattcgcagagccagctggtgtgctccgactgcggctgcgtggtcaccgagggggtccttaccactaccttcagcgacgagggcaatctccgagaggtaacatattcccgaagcacaggggaaaacgaacaagttagtcgcagccagcaacgaggtctccggcgagtgagagacctttgtcgagttctgcagttgccaccaacatttgaggataccgcggttgcctactaccaacaggcatatcggcactctggcatccgagcggccaggctgcaaaagaaggaggtgttggttgggtgctgcgtcttaatcacctgccgacagcataactggcccctaacaatgggggccatctgcacgctgttgtatgcagatttggatgtgttttctagcacttacatgcagatagtgaagctcctgggactggatgtgccatctctgtgcttggcagaactggtgaagacctattgcagcagcttcaaactgttccaagcttcaccttctgtgccagccaaatacgtggaagacaaagagaagatgctgtctcgaacaatgcagttggtggagctggcaaatgagacgtggctggtgaccgggaggcatcccttggcccgtcatcactggctggcgactttccttgggcttggcaattcgcctgcaagccctgcaaaatccgggcttttccatgtttcccccttggcgcgaggttttgttaattgggggcaaaagggtggaaccctgggccccttaccccgggggggttcccttcccgccccctgggaaggaaagggctggccttgggccttggtggcctgtgcctagccggg

SEQ ID NO: 99062 - DNA, 828 bp, Homo Sapiens
  misc_feature (640)..(645): n is a, c, g, or t
  misc_feature (647)..(647): n is a, c, g, or t
  misc_feature (649)..(650): n is a, c, g, or t
  misc_feature (653)..(655): n is a, c, g, or t
  misc_feature (658)..(658): n is a, c, g, or t
  misc_feature (666)..(666): n is a, c, g, or t
ccgagtcagccataaagctacgcgctaggctcttggccctgacgtgaggcgcgcagagatggcgtaacgggaatagttttcaacgtctatttcattccctgcttcagaggacctctttaatctttgattttggtccctgtttctaagaaaagcaactgaaaaggtcgtaataccgcccctgagaaaaaaggagcagcgctaaataatcgagaaaatgcctcctcttgaaacggatatagagatggaaacaagatataagaaggattgagaatcatataatacaggagcttaaacacctatgcgcgatgataaagagggtactattagagcgcttggaaaataccaggaagttgagagagttaacagaagggcgcacgctggattggccacaaaatcgaattactgaaggccactactgattaggacacttatggagaacgtgggtagcactgaagcagcattctagtttccagtgccatcaacctcatacgtatctacctggtctctgatcgaagctaccgtaatgtgttcttgaggtcaacatgtcatcgtggaagtcactgtattctgccccctttatgtcaattacctattataaaccgagagaaatggggaaaattaaaaacctgttttggaaccnnnnnnanannaannnaanaataaaantaaaacttgtcgggccgccctcgggccctccaagaagcttttctagaacccttcgttttgggcgcgcggggcccaggtaggtaagtggaacatggtccttagcctgttttccttaaggaaaatcccgggccatgaactaagtggcttgggatttcccaccca

SEQ ID NO: 99063 - DNA, 876 bp, Homo Sapiens
aagatggcggacattcaggtgcggactcggggttggatgccagtgtgcggggtccgccttggccttcaggggcgcgtccgggagggcagagcccggcggccaagttcgggggttaattccgggcgtccgtgattattttctagagattaactggagtggagggcgcttgttttgtgtttctagatgagtgcttcctaattcctgggggctcctggcgttaatggaggctcaagcgttttaggacttaccttcttaaaaaccaagtttaagaaggttttttttggagttctccggtcttcaagggtaattctgtggaaacggactcaataagggctaatccagggagcctgccgtctggtatttaattctgaatccttatgtactacataaggagtgaatcctgggtgggcgatcttgggtcttggagaatgatcctcgctgaaaggtgtccagggtgtgagagggttgatcctggtttagaggatgaattttgcaatccctgagaggccttctggagtatataaattgaaataacctcgggcttagatctgagtatgaattacaggtaaggtcagggtggtcatgtcttagagggtgattctggggcaccaggccttggacgccggcgcttttgcaagtaaatgtagagcatggggtctgggcaggttctgggaaggtctctagggctggttggctgccggcttcaaacttagcagctcatcagtttctcctcataatctgtagactgagcgtgcctaccaaaagcagccgaccatcttttcaaaacaagaagagggtcctgctgggaggaaacttggcgaggagaagctccgcggtactacaaggaacatcggtctgggcttcaagacacccaag

SEQ ID NO: 99064 - DNA, 1054 bp, Homo Sapiens
tggaccggtccggaattcccgggatcggccagccatggagcggagcttgctggcggcgaggccgcggcgacaaggtagccacccccgcagcatgcctcgaccgcggtccgcagctgcaccgcctctccccgccccccagggtgcgctggtcccggtcgcgcgctcagacctccgcatcccgggcgtggtcggttaagtccccggccgtgacccaggcccggggagctagtctccgcccttcgctcttacggatcccctcggagtacgccgcaccatgcagctcaggctcttccggcgcctccttctcgccgctttgctgctggtgatcgtctggaccctcttcgggccttcggggttgggggaggagctgctgagcctctcactagcctccctgctcccagcccccgcctcaccggggccgcccctggccctgccccgcctcttgatccccaaccaggaagcttgcagtggtcccggggcccctcccttcctgctcatcctggtgtgcacggctccggagaacctgaaccagagaaacgccattcgggcttcgtggggcgggctgcgcgaggcccgggggctcagggtacagacgctattcttgctgggagagccgaacgcacagcaccccgtgtggggttcccaggggagtgacctggcctcggagtcagcagcccagggggatatcttgcaggccgccttccaggactcctaccgcaacctcaccctaaagaccctcagcgggctgaactgggctgagaaacactgccccatggcccgatacgtcctcaagacggacgatgatgtgtatgtcaacgtccctgaactggtatcagagctggccttgcgaagggggccgttgggggccaagttaaaaaagcacgggactccccaaaaaaggcttaaccggcaaggaggccaggtttttgcaccgcgagggaagggcctccttcctgtatcttgggccggtgggcacggcgccggggaaccccttcttcgaaaatcgtggggtgcgaggtccccccgtttctcttaagggagaccgttgcgcctt

SEQ ID NO: 99065 - DNA, 825 bp, Homo Sapiens
cagggtccccggtcccgttccctgggaaccggctcctcccccacggagagagcgcactagactctcgggtactttgcgccccagcttcagctcgatgtctctgaggtctggcagcgggctgtcttccatgacttttccggaacggcgataatagtaataaaacgcagcagatgaaaggcagccacggcttcgaaggctgctgcgaaatcagcagacctctccgggggccagggtctctatcctccgccgctccggtgtaccgtcctttccataaccgcctatgcggtatcagccctgaaatccgcacaggacgcggggggtcgcagctgcagttcccagtccgctgcgactcctccgacactaagatgatcaagatctcctcattctctctctttttggccacctcactgcaaagttgagttcactgatattgcagacagagggggaataaagagggggaagtagtgaaagaaaagagagggaaattaaatctgttttagctttaccaagggaaaattttcacattataaaaccgtccgttcacatccctgcgccgctcactgactgcccatctggtactacgcgacacaaaataatgatgcagccagaaacgatgtcctgggtcgtttcattttccagccatatgcctccaagctttcgggatatcctgggttgtcagaaataatctctggtcagtgaaagaggagttcggtcgtgtgcatggacccataaaaaagagctagttagcttagcaggagtttaacggcttccttgatgcagcaaaaatgtccttcttcccatttaggctgtatgatccaagtcatt

SEQ ID NO: 99066 - DNA, 1065 bp, Homo Sapiens
ctgggacagggggtcagatattgcactttcactgcaacagttacatgaaaacttggtccataaataatcgttgctttatacataatgcctgaaaacacagagctacatcttaaatatgaataaccctgaaggttccatccctccagacttttttctctgcacagaataaatagctttcactctgtatagacccacttttgcagaacatttacacgaccctttggctgtacatatctacacacgggaaaaagttaacatcactctgtgcacctccccagcccggtccatgcgtcccaacaccagacccaggtcggccgtagcttctcggggacagagcctggtcgctggacaaaggccgaggccaggcaggctctcccacttccgggaaagccgaaggagcagcagagggccgccggagctggccgttgagcgccacagccaaggtcacgcttggtgctggggagagagggcagacggtcagacccagcgtgcaggacagcatggtccttgttcaggcgagaaatgaagtcatggctgcctgccctgaagctgacaaagcaagttgtggcttcttagattcggcatgaaaacggaattggcattaaaaaaaccgaagtgtgtgccccacccaccccagagtagaaattcagtgggattgccggggccaggtgaggcaaggagcccatgcctcgctaagtgggcaggagcagggcccacgggacccagaaccaggctggactccgtcacagtgctgggtgttttcagtgtggaggggctgctctcagtactgaaagagttaagaaaaggaagcagccaaggattgctcgtttaaaaaaacctcatagaaatcagattgagaagtagaaaggcgtagaaacgtgggcgggcggccttgactgatggcagggagcggaagaggcggccaggcccgtccagcccgtggcctgaggctggaaacacactggcctgggctccaggcggggcaggcagacaggtgggcagggtccggggtgcagaaattaagatacagcctttctctcctgcttgcacgaggctctgccgcac

SEQ ID NO: 99067 - DNA, 1619 bp, Homo Sapiens
attcattcaaaaggcgcgcaggctgcgcggctgtccgggcgctcgccgagccgggccgcggcgccgagtcgaacggggagccgagctggagctgccgcggcgcagccaggccggcgaccaccaggggcctgaggatgaagccaagtctgctgtgcctggcccctgtcctgcttccttatgctgctgccctggcctctcgccaccctgacatcaacaaccctttggcagtgcccacctggggaggagcccgacctggacccagggcagggcacattatgcaggccctgccccccaggcaccttctcagctgcatggggctccagcccatgccagccccatgcccgttgcagcctttggaggaggctggaggcccaggtgggcatggacaactcgagatacactctgtggagactgctggcctgggtggtttgggccttggggggttccccgcgttccatgtcaaccatgttcctgggcacctctgggtactcatggctgtgatgagatgggggcggctgggccctgacgtggcagtggaggtggcagcaggggccagcagcggtggtgagacacggcagcctgggaacggcacccgggcaggtggcccagaggagacagacgaccagtacgcggtcatcgccatcgtccctgtcttctgcctcatggggctgtctgggcactcctgtgtgtgcaacctcctcacgccgcgaccggctaccactgcacggcgcacaaggaggtcggccccgctccctgcacgtggccgccgccgcgaatccaaacccatgcccatacccggacaccgacacgactgcccaacagagcgacaaccaatcggccagtccctggcctgcgcgtcgcacttaccagccagaacacagcacgacacccgcatcgcagcgcccctgcacccgacacctgcacagcacagcacgtcacacaacgcacaaaacacgccagagccggcccacacacaaggacccaagagcaccactagcatggtaccaaacagacctgcaccgcacacacacgcacccccccgaaaacacgcctcgcaccaacacaaccaatccactagcccccccggccacaccagcgacaacaccactacccatccgcgccagcaccacggagtcggcacagaacgggcacctcggggccagcaacggcgctacctccttggggcacgccacacctggcccaacagcactaccccacaccgaggcacagttcacaccagcacggacacacgaagaacgttcgggcgcccccgcaacagctcggctccagacataggtcaccccccgtagcaacgcggcctagcaggagagaacccaggcccaccctaaccctccctgcgcacaacccagccacatatcatccggccttaaagcgcacccaagccacacaccgggtcaccccagcaacagcgggccaaccgcaggcacccaaagcggcccaacagggccacactcaagcgccccaaacacatccagccactcacccagcactcggccgagaacacgcagtcccacggctagccgtcgagcaattgctagaagccacaggcgcaaccgaacctacaaaccaagcgacacaatccgagagagccaccccac

SEQ ID NO: 99068 - DNA, 1099 bp, Homo Sapiens
gctactgcgagctccggtggctgcctggggacgctcagggacgctcattcctggccagagtcctgacttctttctcggatcgagatctcgttgctggctcgaggaaatcaccggctcttctcccggatccttttcttctctcacttgctggctttcttcttcctgactccctggcttccatctcccaaccccgcgattccctcctctactcccgtgctcccgtcgcccgccatcctgagccatcccacctgcaaccttctgtcttttgcccctccttgacctcagagggtcctgccttaagcttctcaccagaatctcctagatttctatctcttccctgcttgccagctcttgactcccaaattccagctgacgtttgaccacttgacatttgaccctgacacccttgactgcaaatctaaattcttatcttctgcaacctgtactgctgaaacaggccttccccctgtcttccaaccccgctttctgacacccatttttactttcttactcttgggtcagttcctgctacagctatcccaccatggacttcttgatgagtggcctggcagcctgcggggcctgtgtattcaccaatcccctggaggtggtgaagaccaggatgcagttgcaaggagaactgcaggcccctggcacataccagcggcactaccgaaatgtcttccatgccttcatcaccatcggcaaggtggatggccttgcttgccctgcagaaaaggcctggcccccgccctcttgtaacagttcctgatgaatggcatccgactgggcacctatggggctggctgaggcttgggggctaactgcacacagccgaaggcacccacagtcctgcccgcagcgcagcagctggggccatggctggggtcatgggagcctacttggggagccccatctacatggtgaagacacacctgcaggcacaggcagcctcagcaaattgctgtagggcaccagtataagcatcagggccatgtttccaggcgctaaccgagattggcagaaaccatggtctggtggggttatggcgtggggctctggggcggcctgccccgaattatcgtcggttcctccacca

SEQ ID NO: 99069 - DNA, 598 bp, Homo Sapiens
tgtggactctccgatctagaggcagattcctgactaatcccagagggctggcccagcctgtgctccccgggctgctatgaagcgatgaccactcttgttagcccaagttgaagaaagccgggctgtgcctggaagccgagagaggcggtaatatttagaagctgcacaggagaggaacatgaactgacgagtaaacatgtatggaaattattctcacttcatgaagtttcccgcaggctatggaggctcccctggccacactggctctacatccatgagcccatcagcagccttgtccacagggaagccaatggacagccaccccagctacacagataccccagtgagtgccccacggactctgagtgcagtggggacccccctcaatgccctgggctctccatatcgagtcatcaactctgccatgggctcaccctcaggagcacttgtcagtcgcctccagcgtatcaaccttgtgttgccccacccagctctcatctaaatgtgcgtcaacagtgtcagcagttcagaggacatcaagcccttaccagggcttcccgggattggaaatctgaatctgacccagtccaccagtccc

SEQ ID NO: 99070 - DNA, 582 bp, Homo Sapiens
taagcctgttatcatctttaatccaaaaagcatttacaagatgtcagaggaacgggaaacaaagcacttaatgaatattttggagtgtttcttctaggctggttgcctgggtttcatttctgtgactcaaaatctcctttgctcctccgtttcattttactggtcactagtgtcatggggaagcagcctcctggagggttcagggctcacagtatctgttttcacagccctagcgatgtggagagcagaagttggagagcaggggaagaacaccctccatagcctgcgggaaacttcatgaagtgagaataatttccatacatgtttactcgtcagttcatgttcctctcctgtgcagcttctaaatattaccgcctctctcggctcccaggcacagcccggctttcttcaacttgggctaacaagagtggtcatcgcttcctagcagcccggggagcacaggctgggccagccctctgggattagtcaggaatctgcctctagatcggagagtccacatagtgcgtttgagacggctgtggcggcagcagctggtgcctgtcagtaatcacgcataatgct

SEQ ID NO: 99071 - DNA, 1318 bp, Homo Sapiens
  misc_feature (294)..(325): n is a, c, g, or t
  misc_feature (1187)..(1187): n is a, c, g, or t
  misc_feature (1202)..(1202): n is a, c, g, or t
  misc_feature (1254)..(1254): n is a, c, g, or t
  misc_feature (1299)..(1299): n is a, c, g, or t
gcttgagccggagctgagcggaggcactgggccgagcctgcttcccgggccttcctaccatgccaggctgctccctgcctccgccaccctggcacaccttcacccgcgtaccgcctcctccccgtcgctctgccttttccaaaactcacttgggccctccgtgcgcagggttcttttttggtttttctgtaaaaatcaaaacaaaaaacagagacttttgagaggagcagatgccacctaaagtcccactgcattccctgcaaagcactcaaatgtggaagccagtcattggcnnnnnnnnnnnnnnnnnnnnnnnnnnnnnnnncaccagtggctttttgtaacctctgtgttctgctgtgtttcttgtgtttagtcttcgagtgcttcgactgaccatgatcccctgggccccctccctcctggctgggagaaaagacaggacaatggacgggtgtattacgtgaaccataacactcgcacgaaccagtgggaggatccccggacccaggggatgatccaggaaccagctctgcccccaggatgggagatgaaatacaccagcgagggggtgcgatactttgtggaccacaatacccgcaccaccacctttaaggatcctcgcccggggtttgagtcggggacgaagcaaggttcccctggtgcttatgaccgcagttttcggtggaagtatcaccagttccgtttcctctgccattcaaatgccctacctagccacgtgaagatcagcgtttccaggcagacgcttttcgaagattccttccaacagatcatgaacatgaaaccctatgacctgcgccgccggctctacatcatcatgcgtggcgaggagggcctggactatgggggcatcgccagagagtggtttttcctcctgtctcacgaggtgctcaaccctatgtattgtttatttgaatatgccggaaagaacaattactgcctgcagatcaaccccgcctcctccatcaacccggaccacctcacctactttcgctttataggcagattcatcgccatggcgctgtaccatggaaagttcatcgacacgggcttcaccctccctttctacaagcggatgctcaataagagaccaaccctgaaagacctggagtccattgaccctgagttctacaactccattgtctggatcaaagagaacaacctgnaaagatgtggcctgnagctgtacttcatccaggacatggagatactgggcaaggtgacgacccacgnagctgaaaggagggcggcgagagcatccgggtcacgggaggaaancaagggaagagtacatccg

SEQ ID NO: 99072 - DNA, 1076 bp, Homo Sapiens
  misc_feature (693)..(693): n is a, c, g, or t
  misc_feature (751)..(751): n is a, c, g, or t
ggaccggtccggaattcccgggatgctctccatctgcttcggatgcacgcaggctgtgaggctctgtcttgccctggatctttgtaaacagggctgtgtacaaagtgctgctgaggtttctgtgctccccgcatcttcgggctgtagagcgctgggcagctaagatctgcataggtcgggattggcatcgagaccctggcaactgcaccggtgccagctgtcttgggggccacaaggccaggtccagaccagggctgggggctgcctgaggactcctatccgggcagcctgctggcgggggttcccctcttcagtggccaggtcacagggatggagctgcgctgtgcatagggtgccacctcaggtgtctgtcccttgtgtcctcaggaggcagccttgctaccacccgtggcaaacgccaggtgctttttctgggagagcccacagccgtggccctccagggcttccccgacccttagcgccaggtggagggcccctgggcagcctgtgtctggaattcttcgtcctgaggccgcctgagtgtggtctgtcctggggaggctgtgcgcctcagcagccgtcctgacgctgagccctctgcaaaggttgggccggccaggcctcttggggctgcctgagccactgcaggaagtggcctggctgggaagttgggtgccggtcacctcccagcangaaggcacagtggacagagatgggaagccctgggggacacagccccggtgctcccagncctccaacctctggctcccaacccagtctccccatcctagcgagcttggcccctcctcagtttcgtttcaagcccttgggggctgggagctggcccctgctgcccctggcaccccccggtgggctggaacctggggtccccgtgggcccaagtggagggtccccaaaaggggcaaggccgggggctcccccaaaggaccaaaaaatggcaggggaagggccggttcagggcccccttgggaaagggggaacttcggggaacccttccagggtcccgtgttggggaaccccacccccctggttggccttggggaaatccaaggtta

SEQ ID NO: 99073 - DNA, 828 bp, Homo Sapiens
  misc_feature (86)..(86): n is a, c, g, or t
  misc_feature (781)..(781): n is a, c, g, or t
ctgtcaaccactatggtccaaggaggcacggatccacgacccgatgcaccaagatcgacataaccgtagtccgatacatcatgttnaccacgtatttgtcctctgcggacccgtgcccttcggcctaacctcctgctgatcagttacccaacgacccgtcccagaggaatacgtgcccactgcatagtggtcaaacacagtgggcacgtattcctctgggaaggcgtcgttggcgtagctcatcagcaggcaggttttccccacggcaccgtcccccaccaccacacacttcaacatcttcttctcgtcgttgcccctgcagccgcagctgctgtcagttccctctttgcagttcattcttgcggctccagctgctggggactcctgctgctattgcttctcctgctttttccaaagcacatgaagcggcagaaagccagtgccaggcttgagtttactctgtctgactttgggtaccttggatcatacagacatgtccgaggctgggatatgtcctgttgcttaccatgctggtaaagaaaggtaacacacacttgagggagttatgaaaagggtctgcccctttccgctctcagtgtgagttaagaaaccctcattttcacagaattcgaggggcttcctaacagcctagaaatttcagcagcctgagggttttactctgctctacctgtctctagcctggcaaaagacacggtggaattttgctaaatctttctcattttccaagtcacatctaacatcccgggaattccggaccggntccgggcttcgtatcattgtggtgggggggtggggaggatgaaagta

SEQ ID NO: 99074 - DNA, 1208 bp, Homo Sapiens
aggggcgccgggtcttgccccagaagctgccggcacatccacgcctgaaatgcggcgctcagtcctggtcacgaacccaggccacaaaggcctgagacccgtttatgaagagctccactctgactccgaggacctagaccccaatcctgaagatcaggacccggtttctgaagacccagagcctgatcctgaagacctcaacactgtcccggaagacgtggaccccagctatgaagatctggagcccgtctcggaggatctggaccccgacgccgaagctccgggctcggaaccccaagatcccgaccccatgtcttcgagtttcgacctcgatccagatgtgattggccccgtacccctgattctcgatcctaacagcgacaccctcagccccggcgatccaaaagtggaccccatctcctctggcctcactgccacccccaaggtcctggacaccagccccgcggtgctccccgcccccgccagcccgccccggcccttctcctgcccggattgcgggcgagccttccgccgcagctccgggctgagccagcatcgccgcacgcacagcggcgagaagccgtaccgctgccccgactgcgggaagtccttcagccacggtgccaccctggctcagcaccgtggcatccacactggggcgcggccgtaccagtgcgcggcctgcggcaaggccttcggctggcgctccacgctgctgaaacatcgcagcagccacagcggggagaagccgcaccactgcccggtgtgtggcaaggccttcgggcacggctcgctcctggcacagcacctgcgcacgcacggcggcccgcggccccacaagtgcccggtgtgcgccaagggcttcggccaaggctctgcgctggctcaacacctgcgcacgcccacgggcgagcggccctaccctggtccgcagtgcgggcaggccttccgggcagagctccgggctgctggaacaacaacgcacacacacggccgagcgccccttaccggtgcccccactgggggcaaagccttcggggagaacttcaactttggcaaacccacctgcggcatccacacgcggcgaaggggcccttagcctggcccgaacttggttccagggccttcgcgccaaaaatttaagggtgggttccagcaccctggccgtggcattttggggcgaacggccccattggccgtgcagctct

SEQ ID NO: 99075 - DNA, 691 bp, Homo Sapiens
gctggggtcaggctctcgggacagaatcctgatggatggcacatcagttggatggttgcaattccagaacatgtgggatggtgtgaacttttggacaggtgtcttagacacataggagtagagacagaagaaggcatcagcagtgacagccagtgtttgcacctgcttaaacctgctggccagcatgaggcaggggtcttccatttcaatcctccgcacctgggacttcaggaagagctggaaatcaatgcccttggcctgagagggggtggtgaaaaatcgggcgggtatccgagaagtgtctttgtgatcctcttggccaaagcccagactgaagaggacatcttctgcatcttcttgcactttgtccagaatttctgagatgcttgaactagtcttgtaggtccccccagtcatgctgctggaagccaaactacagccaagatcaagtagctggcaggcctggctgtctcgaggaaactcctggagaagagtttgccattggcggccagtagtgtggcctccgctcccagggtcaagtcatcttcaagctggtcccatggctgcagaagccattgtagataaactgtcctgcttcctcagaaaatccttcttcagagtatccgcatcctgcagccagtcttcattttattgattggattccctagaaaagtcagacactagatcactg

SEQ ID NO: 99076 - DNA, 658 bp, Homo Sapiens
atagcgggcgggggtgtgccgaacaggctgctcgcagagccgcgcgacccgcgcgcccgccctgggctgccgtgccagaggagccgagggggccgccctcgcccaacctgcccgacatggggaaccccgggccagagcctagacatggaggagaaggactacagtgaggccgatggcctttcggagaggaccacgcccagcaaggcccagaaatcgccccagaagatgccaagaaatacaagagtgccatctgccgggtcactctgcttgatgcctcggagtatgagtgtgaggtggagaaacatggccggggccaggtgctgtttgacctggtctgtgaacacctcaacctcctagagaaggactacttcggcctgaccttctgtgatgctgacagccagaagaactggctggacccctccaaggagatcaagaagcagatccggagtagcccctggaattttgccttcacagtcaagttctacccgcctgatcctgcccagctgacagaagacatcacaagatactacctgtgcctgcagctgcgggcagacatcatcacgggccggctgccatgctcctttgtcacgcatgccctactgggctcctacgctgtgcaggctgagctgggtgactatgattgctgatgaggcatgtg

SEQ ID NO: 99077 - DNA, 865 bp, Homo Sapiens
cagcccatcccgtgcggaccctacgccgagtccagcccggggctgctgggccagcgggagcgggaaccggacggcgctcgcgttctgccagagcggagaacgactcggggacggtgcggaggaccagggaggagatccgcgcccgcacgcaccatcagccgagaggacggcccgcatcgcgccagtgacctaggagcgactcggggacggcttcgggctcccaggccctcctgggccaccgggcactgaggagagcggcggctggaaactgtgggacccgaagggcgggagcccagggagccgacacccgacggagacgccaacccggcgcagtggcacaacgcacccacgaccaccggaggaatgggccaagcggcacggcaagaccgagcaagatgcgtcacggccgggaggcggatacatgcagacgagaacacataacacccgtgacggactgggccggccacagacatgacgagaatacaaggacgacgggacaaaaaacacgtaacgggcgcagacccgagaggcaagaaggaacagagaaccacaagaaggaacaggccacaaaaccgagaaagaaaacaggcaggaacacagagcgagcacacggcgaagccagaccacaaacgaatcagaacgaaccatcccgacatgagaaacacaattgcgaacgggaccacgactggcaccaggcgagacacaagaacgaacaacaaacgccgaccgtatgacacgcgaaacaatccccagaccaagaaagagacaggaagccacccacaaaaatcacggaacgaggaaataccaagaacacactacacgcgaacaaaagaaacccacactgaacaaacaacagacaagaacg

SEQ ID NO: 99078 - DNA, 871 bp, Homo Sapiens
tctgaggtctgaccagcaggagccagccctgtggtgccctcagctgagaggggccccaggcgcttcccttcatgaggccatagaggaggaacctgtaggggttctgggctccaggccttgtaggataggatcttgctctgtcgccgtccacgagcaaggcctgggctgcccgttcgtgtcctcatactggaccacgaaggaatcaaaggggcctgggccacgctccacgagaggcgcatggagtctgggattgtgtcggtcacggtcagcactcctaggcggggctcttcaggaggctcaggggcctctggggctaactctggggctggtgtgtcctcttctggggctgtcattcccagggcagagaccgggcccaggcgctttcccccaaggagcccgtagagcagaaacttgtatttcttgccaggctccaggtcctctacggtgactgtgcgctggtctgcggccacaggcactgcctgggctgcccgtccgtgtccctgtactggaccacgaaggagtcaaaggggccctgggctaccgtccaggacaggcgcagagagctggaggtctcctcaaccacggtcagttcaaccaggtggggaggtagctccttctccaggggaactgtggtgctgtcaacagagatggggcccagtcgtttcctgcctgacagaccatagagcaggaaccatgtatttcctactgggctccaggcactggactgtgacctcccactggttggctgcaccgcaccacctgagccgacatccttatccttgtactggacacgaaggagtcgaattcgcctcaggaccgtccacgagaggcacacgagtaagggtcgcatctgttacagtcagctcccccc

SEQ ID NO: 99079 - DNA, 687 bp, Homo Sapiens
cggcgggcgagcttgagggtggcaacccctgagcgggctgctgaatgcgctggcccaggacactttccacgggtaccccggcatcacagaggagctgctacggagccagctatatccagaggtgccacccgaggagttccgcccctttctggcaaagatgagggggattcttaagtctattgcgtctgcagacatggatttcaaccagctggaggcattcttgactgctcaaaccaaaaagcaaggtgggatcacatctgaccaagctgctgtcatttccaaattctggaagagccacaagacaaaaatccgtgagagcctcatgaaccagagccgctggaatagcgggcttcggggcctgagctggagagttgatggcaagtctcagtcaaggcactcagctcaaatacacacacctgttgccattatagagctggaattaggcaaatatggacaggaatctgaatttctgtgtttggaatttgatgaggtcaaagtcaaccaaattctgaagacgctgtcagaggtagaagaaagtatcagcacactgatcagccagcctaactgaagatgatgtatgaaggagttggagttgttgaaaccaaggtgtccatgatccctccccactgaccttttctaagaaaattcttgtgcccgcattggtattaaatcctcgcattcaggaaa

SEQ ID NO: 99080 - DNA, 1369 bp, Homo Sapiens
ggaattctccggatgcggagccgaagcagccgcaacgagccgggagctgagccgcgctgcgctgcggtgcgaagagccgggcggcggccagagccctccccgcgctgccagtgggacgcggagccaggatccccggctttgccccggggctggggtgcaacagactcttaacttggtcctcgcgccccgccaaccgcccccgggcaggaaacgcccagaaccaccaccgcgccgcgctccacaaaagccccgggagttccaagacgggagggatcgggcgcgctccagaggcaggagggtcccccacaccctcaggctcatgcccagctcccccatcgggcagcccccagccccatgaggaccctcaggccggggcgagagcccggcacagcccggaccgaaattttgccgctgccttagagcgttagacaggatgtggctgggccgccgggccctgtgcgctctggtccttctgctcgcctgcgcctcgctggggctcctgtacgcgagcacccgggacgcgcccggcctccggctacctcttgcgccgtgggcgcccccgcaaagcccccgcaggcccgagctgccagatcttgctcctgagccccgctacgcacacatcccggtcaggatcaaggagcaagtagtggggctgctggcttggaacaactgcagttgtgagtccagtggggggggcctccccctccccttccagaaacaagtccgagctattgacctcaccaaggcctttgaccctgcagagctgagggctgcctctgccacaagagagcaggagttccagggcctttctgtcgaggagccagtccccagctgacccagctgctcatagcccctgccaactccccgctccagtaccccctacagggtgtggaagttcagcccctctcgggcatcccgctagccacggcttacccttaagggcagctttctggccagagaaggtataccacagttaacctcacctctctcccctacacccctgccaccccgccaacgccaccggcactctaacactacatcgcctgcataaccgccccccacaaccctacccccttaccatcccaaaccctaactccatcacccgcctcccccccgcactgcagctccactcgaaatcccgtgccctcccctcaccgagcccgcacactacctccgatcgactccatactccaatccgcaacctaccctcttcgctacaccccataccctctagtcgatcagcctcatcctacccacgcactctcacctcgacccaaaatatcacacaccacctagttcttaccttcccgacactcacgtacattacgtcatccacacgcctgacacctaaccccttcccgcatatctg

SEQ ID NO: 99081 - DNA, 852 bp, Homo Sapiens
gagacgggcgatggctgtggtccttctgctaatgcaaacaacaaaacggtgcacactagtcacccccgagggaggccaccatcactgtaactgttggccaaagctacaaaagaagcgagggaatccaaccgagcgcagcgacactgagaacagcttcccctgccttctgcggcggcagaagtgaagtgcctgaggaccggaaggatggtgcagtcctgctccgcctacggctgcaagaaccgctacgacaaggacaagcccgtttctttccacaagtttcctcttactcgacccagtctttgtaaagaatgggaggcagctgtcagaagaaaaaactttaaacccaccaagtatagcagtatttgttcagagcactttactccagactgctttaagagagagtgcaacaacaagttactgaaagagaatgctgtgcccacaatatttctttgtactgagccacatgacaagaaagaagatcttctggagccacaggaacagcttcccccacctcctttaccgcctcctgtttcccaggttgatgctgctattggattactaatgccgcctcttcagacccctggttaatctctcagttttctgtgaccacaactatactgtggaggatacaatgcaccagcggaaaaggattcatcagctagaacagcaagttgaaaaactcagaaagaagctcaacgaccgcacagcaagcgatgcagaaaggcaagaaacggcagcttgaaaaataaaaggaggttgttcacttcccagaaagagaaagacgacgtatcagaaagaaggtatgtgattctaccaaatggactactttggaaatagttgaagtaccagcat

SEQ ID NO: 99082 - DNA, 918 bp, Homo Sapiens
cgctcggggagggagccagcagcctagggcctaggcccgggccaccatggcgctgcctccaggcccagccgccctccggcacacactgctgctcctgccagcccttctgagctcaggttggggggagttggagccacaaatagatggtcagacctgggctgagcgggcacttcgggagaatgaacgccacgccttcacctgccgggtggcaggggggcctggcacccccagattggcctggtatctggatggacagctgcaggaggccagcacctcaagactgctgagcgtgggaggggaggccttctctggaggcaccagcaccttcactgtcactgcccatcgggcccagcatgagctcaactgctctctgcaggaccccagaagtggccgatcagccaacgcctctgtcatccttaatgtgcaattcaagccagagattgcccaagtcggcgccaagtaccaggaagctcagggcccaggcctcctggttgtcctgtttgccctggtgcgtgccaacccgccggccaatgtcacctggatcgaccaggatgggccagtgactgtcaacacctctgacttcctggtgctggatgcgcagaactacccctggctcaccaaccacacggtgcagctgcagctccgcagcctggcacacaacctctcggtggtggccaccaatgacgtgggtgtcaccagtgcgtcgcttccagccccagggcttctggctacccgggtggaagtgccactgctgggcattgtcgtgggctgctggggcttgcactgggcaccctcgtggggttcagcaccttggtggcctgcctggtctgcagaaagagaagaaaaccaaaaggcccctccccggcaccatctctgatatcaagtgactccaaaaactaaaactcaaaacgtgcgctg

SEQ ID NO: 99083 - DNA, 888 bp, Homo Sapiens
aaacgatcaaggagttgttaaagtatctgatttcggcctgtccaggtatgtcctggatgatgaatacacaagctcagtaggctccaaatttccagtccggtggtccccaccggaagtcctgatgtatagcaagttcagcagcaaatctgacatttgggctttggggttttgatgtgggaaatttactccctggggaagatgccatatgagagatttactaacagtgagactgctgaacacattgcccaaggcctacgtctctacaggcctcatctggcttcagagaaggtatataccatcatgtacagttgttggcatgagaaagcagatgagcgtcccactttcaaaattcttctgagcaatattctagatgtcatggatgaagaatcctgagctcgccaataagcttcttggttctacttctcttctccacaagccccaatttcactttctcagaggaaatcccaagcttaggagccctggagcctttgtgctcccactcaatacaaaaaggcccctctctacatctgggaatgcacctcttcttagatcccctggaatagtggcttctgagcaaaggccaaaaaaattattgtccctgaaatttcccgagagaattaagacagactgaatttgcgatgaaaatatttactaggagggaggatgtaaatagccgcacaaaggggtccaacagctctttgagtaggcatttggtagagcttgagggtgtgtgatgtgaacggtggacccgcactttggcaagaatctgactggtgtcataacagatccgacgggacaggtgtcgagataaagcttaacatacctcaaaacgctgaaaacaacaaaaccaacccactcacccaacaggcggacccccacaaaacacac

SEQ ID NO: 99084 - DNA, 981 bp, Homo Sapiens
  misc_feature (403)..(403): n is a, c, g, or t
  misc_feature (970)..(970): n is a, c, g, or t
acgacgtttgggagcctttgctgagtccagggagagaggcgtcccccaccgtgccgctgcagctcgggcagagccgccaagctttggggtgctgaggaacctctaatcatctcccatggatttgtgatcagcgttgcagctctcccagcagccctggacagtggcccccagcagtcagcatgtggctgccgcgcgtctccagcacagcagtgaccgcgctcctcctggcgcagaccttcctcctcctctttctggtttcccggccagggccctcgtccccagcaggcggcgaggcgcgcgtgcatgtgctggtgctgtcctcgtggcgctcgggctcgtccttcgtgggccaactcttcaaccagcaccccgacgtcttctacctaatggagcccgcgtggcnacgtgtggaccaccctgtcgcagggcagcgccgcaacgctgcacatggctgtgcgcgacctggtgcgctccgtcttcctgtgcgacatggacgtgtttgatgcctatctgccttggcgccgcaacctgtccgacctcttccagtgggccgtgagccgtgcactgtgctcgccacccgcctgcagtgcctttccccgaggcgccatcagcagcgaggccgtgtgcaagccactgtgcgcgcggcagtccttcaccctggcccgggaggcctgccgctcctacagccacgtggtgctcaaggaggtgcgcttcttcaacctgcaggtgctctacccgctgctcagcgaccccgcgctcaacctacgcatcgtgcacctggtgcgcgacccgcgggccgtgctgcgctcccgggagcagacagccaaggctctggcgcgtgacaacggcatcgtgctgggcaccaacggcacgtgggtggaggccgaccccggcctgcgcgtggtgcgcgaggtgtgccgtagccacgtacgcatcgccgaggccgccacactcaagccgccaccctttntgcgcggccgc

SEQ ID NO: 99085 - DNA, 957 bp, Homo Sapiens
gactgacttcctcttgtcccggaatgagcatgcctgccctttgcaagcaggtttgggtctcacgcagaggaaaccaaaagcaataagagggagggaaggcagagcaaccaatcaagggcagggtgagactcaaaacgagcgggctccctggggagccagacagaggctgggggtgatggcggagctacagcagctgcaggagtttgagatccccactggccgggaggctctgaggggcaaccacagtgccctgctgcgggtcgctgactactgcgaggacaactatgtgcaggccacagacaagcagaaggcgctggaggagaccatggccttcactacccaggcactggccagcgtggcctaccaggtgggcaacctggccgggcacactctgcgcatgttggacctgcagggggccgccctgcggcaggtggaagcccgtgtaagcacgctgggccagatggtgaaccatgcatatggagcaaggtggcccgaagggagatcggcaccttagccactgtccagcggctgccccccggccagaaggtcatcgccccagagaacctaccccctctcacgccctactgcaggagacccctcaactttggctgcctggacgacattggccatgggatcaaggacctcagcacgcagctgtcaagaacaggcaccctgtctcgaaagagccatcaaggcccctgcaacacccgcctccgccaccttggcgagaccaccccggattcccgagccagtgcacctgccggtggtgcccgacggcagactctccgccgcctcctctgcgtcttccctggcctcgagccggcagcgcccgaaggtgtcggtggggcccccacgcccaaggggcaggcagcacctccagcaccaactctccccagcttccttggaccccacatcatccaccagaagccgtcgaaggtgttcaagcgagctcccacg

SEQ ID NO: 99086 - DNA, 759 bp, Homo Sapiens
gggtgatggcggagctacagcagctgcaggagtttgagatccccactggccgggaggctctgaggggcaaccacagtgccctgctgcgggtcgctgactactgcgaggacaactatgtgcaggccacagacaagcggaaggcgctggaggagaccatggccttcactacccaggcactggccagcgtggcctaccaggtgggcaacctggccgggcacactctgcgcatgttggacctgcagggtggccgccctgcggcaggtggaagcccgtatggtgaacatgcatatggagaaggtggcccgaagggagatcggcaccttagccactgtccagcggctgccccccggccagaaggtcatcgccccagagaacctaccccctctcacgccctactgcaggagacccctcaactttggctgcctggacgacattggccatgggatcaaggacctcagcacgcagctgtcaagaacaggcaccctgtctcgaaagagcatcaaggcccctgccacacccgcctccgccaccttggggagaccaccccggattcccgagccagtgcacctgccggtggtgcccgacggcagactctccgccgcctcctctgcgtcttccctggcctcggccggcagcgccgaaggtgtcggtggggcccccacgcccaaggggcaggcagcacctccagccccacctctccccagctccttggacccacctcctccaccagcagccgtcgaggtgttccagcgggctcca

SEQ ID NO: 99087 - DNA, 905 bp, Homo Sapiens
ccgggatctcgcccggagaacggggaggaatatgctgtggagctcctctgccatataaacaaaaagaggaaatctttcaaacatggctgaagcaaagacccactggcttggagcagccctgtctcttatccctttaattttcctcatctctggggctgaagcagcttcatttcagagaaaccagctgcttcagaaagaaccagacctcaggttggaaaatgtccaaaagtttcccagtcctgaaatgatcagggctttggagtacatagaaaacctccgacaacaagctcataaggaagaaagcagcccagataataatccctaccaaggttgtctctgtcccccttcagcaaaacagaaaatggcgatgaaagccacttgcccgagagggattcactgagtgaagaagactggatgagaataatactcgaagctttgagacaggctgaaaatgagcctcagtctgcaccaaaagaaaataagccctatgccttgaattcagaaaagaactttccaatggacatgagtgatgattatgagacacagcagtggccagaaagaaagcttaagcacatgcaattccctcctatgtatgaagagaattccagggataacccctttaaacgcacaaatgaaatagtggaggaacaatatactcctcaaagccttgctacattggaatctgtcttccaagagctggggaaactgacaggaccaaacaaccagaaacgtgagaggatggatgaggagcaaaaactttatacggatgatgaagatgatatctacaaggctaataacattgcctatgaagatgtggtcgggggagaagactggaacccagtagaggagaaaatagagagtcaaacccaggaagaggtgagagacagcaaagagggatatagaaa

SEQ ID NO: 99088 - DNA, 700 bp, Homo Sapiens
aaggcttgcacagggtgaaagctttgcttctctgctgctgtaacagggactagcacagacacacggatgagtggggtcatttccagatattaggtcacagcagaagcagccaaaatggatccccagtgcactatgggactgagtaacattctctttgtgatggccttcctgctctctggtaagaacctttcagctttgttaagatccgtggaatcctactgtctccatgatgagtctgaccacagcaagcccaggcctgacgacttggtgggttttacgtcactttctactgagcatggtacaagaccacatgcaaaaaagactttcctggagaagaaggaagtgttatgattgagagcagctgatggcaggcagctgggatggagctctcccccccgtgtgcttcttcctcctctgcagtctcacatcagatgagcctagatgctcagagtagggtagcctggcccatcccatggggatggggggaaagctgctgcactgaggcccctgagacttgactctttagttccacacatattctcttctggtcttctctgaccctgtgtctgtcttgctcaagctcctaggaaacaacgtgacagaattccaaaagtctcccttgcattcggagcactggctttcacgtccctgacttcccgtaccctctctcactcccttccctacagcccatgcacatacc

SEQ ID NO: 99089 - DNA, 813 bp, Homo Sapiens
tacgagtgggaaatatacgccgaagaaccaggcgcaagatttccggttgatttcatcaaggggccagacacctttgtggtatgacggtagaacatccaggaaaaagcagggaacaatgttcccatgagggggatagttccgcgatttccgcaaacaggccagtgggaccacttcgagattgggatccttgcggcttgtggttaaaattgggtcccactgtttccgtcgaggctccgttgtgtttatcagagggggttggactggggatggccctatttgcttctccaaagatgatgctgtgtgcatctggctggtagactctcggtagttctgccagctccttctgtaggtggaagagctgagacatccccaggcccaatcctaccaaggcaaccagaaccatgggagacatcacaaggagacacaggcctgtgctgtggttccctctcttcttcaggggtggcatcggtagtggagtcagtggtggcgcggcggcggaggtggtatgtgcggtgcggtgtggtggtggcctcctttgacccaggccttctgggcaccacgaggcttggaccagggaagaactgtgcctggaggggcccagggagagctggcactgctgtccacccagtagatctggggatatgggtaattgaagggctgctgcatggcagctggtgagtcaggccagccccagcaaacggttttacttcttctcagtcctgtagaggctgaggtgtcaaggacgggaccctgttgctgactgctcaagaggaggcaagctggatctctcttatagagtttccatagctaagg

SEQ ID NO: 99090 - DNA, 1214 bp, Homo Sapiens
  misc_feature (915)..(915): n is a, c, g, or t
  misc_feature (991)..(991): n is a, c, g, or t
  misc_feature (1001)..(1001): n is a, c, g, or t
  misc_feature (1036)..(1036): n is a, c, g, or t
caggctgttacgctccggggttaacgggctgtacgctcagagcatcaggacatatgtgctcgggacgacggacatagtgctgatgagtagccagtggagctctggatgggagactagacgtcctgtgtgggcaggtgttccctgcctctgctgctcctgctcatcatgggaggcatggctcaggactccccgtcccagatcttagtccaccgcccaggaccagctgttccagaggacccttggccctggctaggattagctgcctgagactcagtgccagccagctcgccaccatccgcatggttgctgaatgggcagcccctgagcatggtgcccccagacccacaccacctcctgcctgatgggacccttctgctgctacagccccctgcccggggacatgcccacgatggccaggccctgtccacagacctgggtgtctacacatgtgaggccagcaaccggcttggcacggcagtcagcagaggcgctcggctgtctgtggctgtcctccgggaggatttccagatccagcctcgggacatggtggctgtggtgggtgagcagtttactctggaatgtgggccgccctggggccacccagagcccacagtctcatggtggaaagatgggaaacccctggccctccagcccggaaggcacacagtgtccggggggtccctgctgatggcaagagcagagaagagtgacgaagggacctacatgtgtgtggccaccaacagcgcaggacatagggagagccgcgcagcccgggtttccatccaggagccccaggactacacggagcctgtggagcttctggctgtgcgaattcagctggaaaatgtgacactgctgaacccggatcctgcagagggccccaagcctagaccggcggtgtggctcagctggaangtcagtggccctgctgcgcctgcccaatcttacacggccttgttcaggacccagactgccccggggaggccagggnagctcccgtnggcagaggagctgctggccggctggcagagcgcanaagcttggaggcctccactgggggccaagaactacgagttccaagtgagaccattcctctgggccggggctcgaaggccctggacagcaaacgtgctggctccctgaagggctgccccggaaaaaaatggcccagtggcccccccaccctccagggaaaggtgaactcctaaaagccc

SEQ ID NO: 99091 - DNA, 1251 bp, Homo Sapiens
cccccacctctcaagacaatgagggtatcaggtagaggggctatcccaccccaggaaccaggcaagcaggggtgacaagcccacagtagaaaaagggggctggaaaggtggggttagggtgcccccctgtggatatgcaatatgtgtacagtcaccacagtcctggccacctgagattgcccctgccttggggtaccccaggtcccagttaggcaccggaagaactaactactccttaagagactagaacaggaggcagggcagggggcacacaatggaagatcaaggagaggactccatgaggtctgagggcctagccccaggtgacattagtacagacagcagcaatagcagtgacattttccaaggactctacggatgtgtcaggccctgcattatgtgctccccatgcaccctctcactgtcaccgaaaaggtcagctcagggggaggactccacagctcaggggaggccagacgactagcccaaggcaacccaggagtcaccatccaggctcctcaccacctcccttgctcctaactttaccctgtgaccccgggggctcagacctgatctctcgaagacctgagagatcaggtggtgcaccccccaccaacagtcttgggccaatgtggtaccacacctgagatcagcacgagcagcaggtcatcagctgtgagtccctcagccagttgctggatggccagtgcagcccgcagcgcatcgcggtccgggaggttgtcctccgcaccctcgaatacctggacacggctatgtggcttcagcagcatctcctgcttgccggcacgctccatggcagcacggatccccttgggaacgctgatcacgccctgcacaagatgctggcccagtagttcctcagctgcagctgccatacccagcacagccttgccaaagcccaccaggtagaggttttgcctcagctgaaagttccggtcccgcaccttcagctgtctgccaccagggtccaaggatagtgcccggtgcagcatggggcccggcagcactgcacctacagcactctcaaacagctgcctggcctgctctgccaaggccatgctgctggccagacgggccactgagccccgccagaggagtggatgcaagggggctcgggccaagcggggcaggacctgcagggctgcagcatgccccactgctctcagcactgcctggcacccatggctgccagcccacagcatccaaaaattccggccggtacagcctgca

SEQ ID NO: 99092 - DNA, 940 bp, Homo Sapiens
cggtccggaattcccgggatctcgggagcacatcagaggcttagaggcgagtgggaagggactcagacagtgcaggacgagaaacgcccgcggcaccaaagcccctcagagcgtcgcccccgcctctagttctagaaagtcagtttcccggcactggcaccccggaacctcaggggctgccgagctgggggggcgctcaagctgcgaggatccgggctgcccgcgagacgaggagcgggcgcccaggatggggtgcatgaagtccaagttcctccaggtcggaggcaatacattctcaaaaactgaaaccagcgccagcccacactgtcctgtgtacgtgccggatcccacatccaccatcaagccggggcctaatagccacaacagcaacacaccaggaatcagggaggcaggctctgaggacatcatcgtggttgccctgtatgattacgaggccattcaccacgaagacctcagcttccagaagggggaccagatggtggtcctagaggaatccggggagtggtggaaggctcgatccctggccacccggaaggagggctacatcccaagcaactatgtcgcccgcgttgactctctggagacagaggagtggtttttcaagggcatcagccggaaggacgcagagcgccaactgctggctccccggcaacatgctgggctccttcatgatccgggatagcgagaccactaaaggaagctactctttgtccgtgcgagactacgaccctcggcagggagatacccgtggaacattacaagatccggaccctgggacaacgggggcttctacatatccccccgaagcaccttcagcactctgcaggagctggtggacccctacaaaaagggggaacgacgggctctgccagaaacggtcggggccctgcatgtccttccaacccccaaaagccttggg

SEQ ID NO: 99093 - DNA, 654 bp, Homo Sapiens
ggtccgcgctgagagtcgccgactagtcggcatcgggcctcgggcgcccccggggcgggttgggttgcagcccagcgggcggctggaccgccgcggtggggcggggacaatggggtacaaggacaacgacggcgaggaggaggagcgggagggcggcgccgcgggcccgcgggggtctagactgccccccatcacaggcggcgcctccgagctggccaaacggaaggtgaagaagaaaaaaatggaagaagaagaccaaggggtctggcaagggggacgataaacatcagagtcagagcctgaagagccagccgctttcttcctcctttcatgacatcttaagtccttgcaaagagcgtggcccgaaaccagagcacagacagagcaaagtggaaaagaagcacctcccttctgactcctccaccgtcagcactccccgacctttgccgaaatagagaaccttgcgaaatcggatcaacgaaagtctgccgattgggatggaatacttgcctgacccggaggcagagacggaaaggattcgcatctataaactgaatcggagaaaacggtcccggtgcttggccctcaagggcttccaccccgacccccgaggccctcaagggctttccaccccgaccccgaggcccctcaagg

SEQ ID NO: 99094 - DNA, 1181 bp, Homo Sapiens
gggcaaagcagggaccactgtggataagaaccccacacgggtcactcgcaacagtcctcccacagtccacagccacgacggagccaaatctcatttgtcaccctcagtcaccaccccacaagatggagccgctggttacgacatggatgacaggtgtcatgcacagggagagaatttctccccggatacccctgaggaccaaggaccacccccaggctagggtgggaggattgagagcagtgcaagaaaccaaggaggatggagcatccaaaggaagagaaaggcaggctggggatggagggcaggaagggctgagcacccactcctccagccccagttctagggacagggaaggcctggattggaggcctggacccagcctggtgctctggccactgtgttctgagggcggctgctgggggacatggagagccctccagcccagtgacttccacctccagggtgatggccttagaggtggggcgtggccagcatcccccttttgccggctgcttctgagcctggggttacagttcggagcagagtaagcggaacaactggcctcacccagcgtggtgctgctgagaaataactgccatgtcttctgtgttgggcgggatggcttagcttagctggccctggctgtccatggtaggacactgttggttcccagggcctgtcctctgccacgtcccagcacctggtgcaaggtccaaaacatgaccgaggtgaacaaaacagaggtggacttgggctgatggggtggctcctgcagtccggctgccagaggctccccaggcaccggtccctgcaggcatttggcactagggaaggttcctgggtctcctgggcaccactcagagctctgtgcctgtgggtccaacaagtccagagctgttggcactggtgcttcccggctctggggcagtccgggggctgcaagtggaaacccaggggccctgcctggctggggactaagcagtgtccagagtgggggcagggagaacagagggcttgaggagggaggcagaggcctgtcagtgggtaccctcctccctcccatggcacatctaggtccccaggcacagcctgctgtacaagcacacgactggcctgggtgtgggcgttggcctcagccacctggaggcatcttggagtgggagaggtgtgttggcggccgc

SEQ ID NO: 99095 - DNA, 1282 bp, Homo Sapiens
gctggaccggtccggaattcctgggatgtccccgcgccgaggcgccgctagggcgggcgggggtcgggacgccgggctaggggcgcgtcatgtggccgctcacggtcccgccgccgctgctgctgctgctgtgctcaggcctggccggacagactctcttccagaacccagaagagggctggcagctgtacacctcagcccaggcccctgacgggaaatgcatctgcacggccgtgatcccagcgcagagtacctgctctcgagatggcaggagtcgggagctgcggcaactgatggagaaggtccagaacgtctcccagtccatggaggtccttgagttgcggacgtatcgcgacctccagtatgtacgcggcatggagaccctcatgcggagcctggatgcgcggctccgggcagctgatgggtccctctcggccaagagcttccaggagctgaaggacaggatgacggaactgttgcccctgagctcggtcctggagcagtacaaggcagacacgcggaccattgtacgcttgcgggaggaggtgaggaatctctccggcagtctggcggccattcaggaggagatgggtgcctacgggtatgaggacctgcagcaacgggtgatggccctggaggcccggctccacgcctgcgcccagaagctgggctgtgggaagctgaccggggtcagtaaccccatcaccgttcggggccatggggtcccgcttcggctcctggatgactgacacgatggcccccagtgcggatagccgggtctgggaacatggatggctattacaaaggccgccggggtcctggaagttccgtaaccctggggagacttcatcaaaggccagaaactttatccagcacctgctgccccagccgtgggcgggcacgggccacgtggtgtacaacggctccctgttctataacaagtaccagagcaacgtggtggtcaaatacccacttccgctcgcgctctgtgctggtgcagaggagcctcccgggcgccggttacaacaacaccttcccctactcctggggcggcttctccgacatggacttcatggtggacgagagcgggctctgggctgtgtacaccaccaaccagaacgcgggcaacatcgtggtcagcgggtgacccgcacaccctcgaggtcatgcggcctgggacaccggctaccccaagcgcacgctgagaggctcatgatctgggtgtgtctagtgacaactccacctggctgggccaggtctattgctatttacaaacgtcagt

SEQ ID NO: 99096 - DNA, 1081 bp, Homo Sapiens
catccgtacgcccacaaggactccatgcagctgggggaggggagcgaggggctctgaagagatttgcggttgcagcatctcgggaggtatgagcaggaatttgaccctctagggcatgaatactgtgctgttcagttctgagctgtgctagcaatacccttcaaaggaagagcaatggctgcagcagcagcttctcacctgaacctggatgccctccgggaagtgctagaatgccccatctgcatggagtccttcacagaagagcagctgcgtcccaagcttctgcactgtggccataccatctgccgccagtgcctggagaagctattggccagtagcatcaatggtgtccgctgtcccttttgcagcaagattacccgcataaccagcttgacccagctgacagacaatctgacagtgctaaagatcattgatacagctgggctcagcgaggctgtggggctgctcatgtgtcggtcctgtgggcggcgtctgccccggcaattctgccggagctgtggtttggtgttatgtgagccctgccgggaggcagaccatcagcctcctggccactgtacactccctgtcaaagaagcagctgaggagcggcgtcgggactttggagagaagttaactcgtctgcgggaacttatgggggagctgcagcggcggaaggcagccttggaaggtgtctccaaggaccttcaggcaaggtataaagcagttctccaggagtatgggcatgaggagcgcagggtccaggatgagctggctcgctctcggaagttcttcacaggctctttggctgaagttgagaaagtcaatagtcaagtggtagaggagcagagttacctgcttaacattgcagaagtgcaggctgtgtctcgctgtgactactccctggccaagatcaagcaggcagatgtagcactactgggagagaacagctgtatgaggaggagccaaagctcactggcagcttgccctcgggaactcacccctgcacaagaaggggaaggctcccttaaagggaaggttcatggtttggcccccccttccacaaaatgggcacaaagctggg

SEQ ID NO: 99097 - DNA, 1199 bp, Homo Sapiens
  misc_feature (1100)..(1109): n is a, c, g, or t
aacgggtgatgcggttgcagcagcggctggcagcgctggagcaggaagaagctgaggcccgtgagaaggtaacccatacgcagaaggtggtgctgcagcaggacccgcagcaggcgcgagagcatgccctgctccgactccagctggaagaagagcagcaccggcggcagctcctggagggggagctcgagaccctccggaggaaactggctgcactggagaaggcggaggtcaaggagaaggtggtgctctccgagagtgtccaggtggagaagggcgacaccgagcaagagatccagaggctcaagagcagcctggaggaggagagccgcagcaagcgcgagctggacgtcgaggtgagccggctggaagccaggctttcggagctggaattccataactccaagtcatccaaggaactagactttctgagggaagagaaccacaaattacagctggagagggaaaacctgcagctggagacccgaaggctccaatcggaaatcaacatggcagcgacggaaacacgagacctgcggaacatgaccgtggcggactctgggaccaaccatgactccagactgtggtccctggagagggaactggatgacctcaagaggctctccaaggacaaagacctcgagatcgacgagctgcagaagcgcctgggctccgtggccgtcaagcgggagcagcgggagaaccacctgcggcgctccatcgtagtcatccaccctgacacaggccgcgagctgtccccggaggaagcccaccgtgccgggctcattgactgcaacatgttcgtgaaactcagaagccaggagtgcgactgggaggagatctcagtgaagggtcccaatggggagtcctcagtgatacacgacagggagtctggcaagaagttctccatcgaagaggccctgccaaagtggcaggctgaccccctgctcagtatgaccgctatggcaaccaaagatatgtccctcccgggagcctgggcgtgtcttggtattcgggggccaaaagtaaggccacagcttcttgcaactctttcttaaacgggaaaacgcttgggcctttttctttagaagcaggggggnnnnnnnnnnttgggggcgcgcccctcctcccaataaacccctgggtgggaggggccaagcaattttttaataaacataacccccccgcctgtgccgaat

SEQ ID NO: 99098 - DNA, 988 bp, Homo Sapiens
  misc_feature (540)..(559): n is a, c, g, or t
tggaccggtccggaattcccgggatgttgatgaactgcggaggcttcggcatggaagccacgctgctgttggtggtcggctactcgcactccaagggcgtggccatctccttcctggtcctagccgtgggcttcagcggcttcgccatctctgggttcaacgtgaaccacctggacatagccccgcgctacgccagcatcctcatgggcatctccaacggcgtgggcacactgtcgggcatggtgtgccccatcatcgtgggggccatgactaagcacaagactcgggaggagtggcagtacgtgttcctaattgcctccctggtgcactatggaggtgtcatcttctacggggtctttgcttctggagagaagcagccgtgggcagagcctgaggagatgagcgaggagaagtgtggcttcgttggccatgaccagctggctggcagtgacgacagcgaaatggaggatgaggctgagcccccgggggcaccccctgcacccccgccctcctatggggccacacacagcacatttcagnnnnnnnnnnnnnnnnnnnntgtccgggactactgaccatgtgcctcccactgaatggcagtttccaggacctccattccactcatctctggcctgagtgacagtgtcaaggaaccctgctcctctctgtcctgcctcaggcctaagaagcactctcccttgttcccagtgctgtcaaatcctctttccttcccaattgcctctcaggggtagtgaagctgcagactgacagtttcaaggatacccaaattcccctaaaggttccctctccacccgttctgcctcagtggtttcaaatctctcctttcagggctttatttgaatggacagttcgacctcttactctctcttgtggttttgaggcacccacaccccccgctttcctttatctccagggactctcaggctaacctttgagatcactcagctcccatctccattcggttcat

SEQ ID NO: 99099 - DNA, 883 bp, Homo Sapiens
tggaccggtccggaattcccgggattacagcctgagtggataacgtcatttactgttacaggtctgagcattggcctcagaactcctctggtgctgggagtgaggagtttcaaggtgactgctttttagctccaggggagaaaggagggcacagtgcccaaggccatgccagggcaaggacgggccactggcccccgccggccgagtcaaccagaggcaaagccagattgagggttcccaggctgacaaatgtctgctgcctctgccacaggagagagaaggggaaagagggcaaaagaaacaaagacatcacgcgttgcaagtggctggacttttaaaaacctacctttgcctccagggttttctaggttactgtcaccccacttcctaaaaagtgtctcccccctcatcctatttaagacctgatgcagtctccccactggttctcccagggaaagaaaaggggaaatgttttgttgaaaataaaagggatgacaagaaagaaaggaaaaaaagctattgttctcatccctaatttataatccaagaggcccccaattgtttctttctgactcaaatctttgagctgttaattataaaagtaactggacttggcgccaacgggctaactatgatcaggctcagcaattagaaaaactctgtagaaagtttactgagtgattatatataaataaatccctagttacagactgaacactgaccattttctggagctaataaaagcagttactccccctcccccacgtgtatgccacttaatttcccaaagcagaaagtgaatccatcctggagggtcttgaaggaaaaaaaaggagaggaatcaaaagcttcagtgtgtctgtgttgctcttgcagctgtgta

SEQ ID NO: 99100 - DNA, 1079 bp, Homo Sapiens
  misc_feature (125)..(125): n is a, c, g, or t
  misc_feature (149)..(149): n is a, c, g, or t
  misc_feature (156)..(156): n is a, c, g, or t
  misc_feature (188)..(188): n is a, c, g, or t
  misc_feature (206)..(206): n is a, c, g, or t
  misc_feature (237)..(237): n is a, c, g, or t
  misc_feature (249)..(249): n is a, c, g, or t
ccccggaaaccaaggcaggggtcgtttaaaatgaaaggttgtgaattggcccgccaaaacccaccttccggaaattggccgctcccgggtaggttttggtggaaaaggaggcccgtccatcttgnggcttctttcttcttctcctccancaggccnttggtttcggcagagatgctgccgtggatgcntatgtggacttggccctngacagtcaggcagtcctccacttcgtttgtncgtgagcccttncagggccagctcgcaggtgcgcagggcagtgagggccgatatgcggccacccagctccacagcccggatgaagtgggtgccgtagttggagataagcctgaggtaggcgggctgggtggaggcgttgaagtggtggggcaggtccccgagggccctcgttgaagtcagggtgcagcgggggagtgttgtaccacatggaaactgtagaagcggcactccaccgtgtcagtgctgaagctgtactggtcctggtgggtcttctgggctgcaaagttggctgcctgtgagtgtgagccggccacagacacatgcacattgctggtgggcttaggagtcacgtccagcccgaccttccagtcgttgcggatgctacgagccgcatcccggggccacagcttcagtggagctgactttggccctggttacatggcgctggcagccagagccctgggcccgccagttggtgagcgccagaggcaggcgctggagggtgccctcctgtagggcattttcacagagggtgcaggtgccgtcgggccgcaggaacctttgtgtgtccactgggaaggagcccgagcggcggaggctggtcacgtccacaccctccccggccagccatgcaccaggcacgaacttgtggctgcgcttgcactctgagcgtgcggctgtgtggcacggggcagggacgggcaggggcagcagcaggagaaggatgcccaggaggagcagacgggctgccatggagctggaatcccgtatagagaagcggctacacagatggatatcctctcttcaccgaggctcctggaatggtggcatcagccccccag

SEQ ID NO: 99101 - DNA, 938 bp, Homo Sapiens
  misc_feature (135)..(135): n is a, c, g, or t
gcaaagggggccattaattgccggttgcctttggttcctggcaaacactttgggattccaacactttttcctggggtttcacctttgtagcagggatccctgcagaccaggggcccatgacaaacacccgtcttncagcgggcagagcaaagaaagggcacagcgccagggcagtgggtgcagctgcctgtcaggaagaggcttacttctggtgaaactgggcagacaaaaggcagtgagaaatgtgatctcggggtggtggaggctctagggaaaggaaaaggcaggagtgaacttccacacagcagcaatggcagaaccaaaggtggctttgacctccacgagggctcagatccaggccaacagcatgtccaggacagggtgccgggtgtatcactggtccaggagcactatgctggcagaatccctttggtgcctgatggccctgcctctgcaacactggggacactcacaagagtgtgatccaagtcggccgtcgtcttctgcagctctggagacctgatgctggggaagggcatgcctggcatcaccacacactggcctaggttgtgagagaagttgatgctgtcactcatctttcctccaatctttcccctatgcctggttgtggtattaagttacatgcagacaacaggggccagaagatgaacaatggcccatcccactctaggcatggctcctctccacaggaaaactccactccagtgctcagcttgcaccctggcacaggccagcagttgctggaagtcagacacctgcagatgaagaccacagcatcaagaccctgtgacctctcaaaggcccggtggaaaggacacgggaagtctgggctaagagacagcaaatacacatgaacagaaagaagaggtcaaagaaaaggctgacggcaagttaacgatcccgggaattccggaccg

SEQ ID NO: 99102 - DNA, 1057 bp, Homo Sapiens
  misc_feature (892)..(892): n is a, c, g, or t
ggaattcccgggatcgagggcccagagaggcggtggggtgggcgaccctacgccagctccgggcgggagaaagcccaccctctcccgtcgccccaggtaaaccgccggcgttcggcgctgcgcagagccatggaattctcctggctggagacgcgctgggcgcggcccttttacctggcgttcgtgttctgcctggccctggggctgctgcaggccattaagctgtacctgcggaggcagcggctgctgcgggacctgcgccccttcccagcgccccccaaccactggttccttgggcaccagaagtttattcaggatgataacatggagaagcttgaggaaattattgaaaaataccctcgtgccttccctttctggattgggccctttcaggcatttttctgtatctatgacccagactatgcaaagacacttctgagcagaacagatcccaagtcccagtacctgcagaaattctcacctccacttctgggaaaaaggactagcggctctagacggacccaagtggttccagcatcgtcgcctacttaactcctggattccattttaacatcctgaaagcatacattgaggtgatggctcattctgtgaaaactgatgctggataagtgggagcaagatttgcagcactcaggaccacaaagcgttggaggtctatgagcaacatcaactcgaatgtctctgggatattaactcattgaaatgcgccttcagcaaggagaacaactgccagacaaacaggcaccccatgatccttatgcaaaagccatatttgaactcagcaaaatcatatttcaccgcttgtacagtttgttgtatcacagtgacataattttcaaactcagccctcagggctaccgcttccaaaagntaagcccgagtggtggaatccgtacaccggataccataatcccgggaaaagaaagaaatccctccaggcctgggggtaaagccaggataaacactcccaaagaggaaagtacccaggaattttctgggataattgtccctttctggccaagggatgaaaagtggt

SEQ ID NO: 99103 - DNA, 1511 bp, Homo Sapiens
  misc_feature (46)..(46): n is a, c, g, or t
  misc_feature (74)..(75): n is a, c, g, or t
  misc_feature (281)..(281): n is a, c, g, or t
  misc_feature (558)..(566): n is a, c, g, or t
ggcaggaggtgtgctgcgagcgcacacgataactcctggcgccctntcgtctgtcttagcccgcaccgcggctnncggccatttaatgtcgtggtcggggggaggaggggagtacaattcccaggagaccgagcccgcccgccccttagtaactgctggcggaagataggaggcatcggccgaccacgttatcacattccggcgcgctcgggtttggctatatgcgccgaatcacctatcggcgtggcgaagtcaatgtttttatgcgtatctgtggtgtntggtcgtgctcggggcgcgaccccttgcgcgcccgagagagctgttgtgggggcccgtacggcggtcgctccaccggtgtctgcgcgccacgtcatagcacacccgctgtggtgtgccaggagcgatgctttggcgtgggtgggcacagcgacgtggcacacgggtggtcgaatcgcggccgtccacgcccgccagccgctgctccgggcagctcttgtggcggtgttgtgggtgtgacagttggtggcgtgacgacgggtatatggatagggctcnnnnnnnnntgcatatgcgtgtttgtttgaatgggcgccgacctgagccctgtcgcgagatgctcaaggggctacacctcccgtgttgtccaggcgctcccgggggggtcgttccaaggggcgcctgcttgggcggcccccaggggtcgtccactgatcccctgtgccttttgtggtgtcccgggggacccccttctcaatccggcgttgtgggttcagtcgtaccgggcgtttaaagtccgcccttcgccatttcggctgctccccgcgccttctttcccccgcccaggatggctcccgtaccgcccgcagaaggccccttccggggggtttcctccgccaatgattggtccaggtggttcggggaggtggacccagtgaagtatgcaggtggcggaggcctcccgtggcagacgcacagcagggcgtcgtccagcctgaggcggtccttgcttgccggggccccgtccccttcccggccagacctggccgcttcccccctcaggcgcgggcgcaagaggggggcgaaaacatggagcatcctgagggccccgcggctgacccctgaccccgatccgcgcaccggagaggctgacccctgacctcccacctcacggggtaaaccctcagctcctcgggctgcactcggcgccaggccccgcccaagtactcccggcaccattggtaggctcggcgctcggcgtcacgcgacagcgacgaggcgcgccgccgttttggggtagtgtccgggcacttagactgctgcaagccgtctttggccaggcagccgccaacagccccgcttccggccacagctgtcgcctcggccgccatggcgcgggctcgaccgggccccaggccaggctgcgatccgctcccttcggacgggcatcccggaattgccgggccgggggcgggcggtgagggagcatttgtgttttatggggggtgtag

SEQ ID NO: 99104 - DNA, 1054 bp, Homo Sapiens
  misc_feature (21)..(21): n is a, c, g, or t
tcccgggatgaggatccctantgttcggaaaacagcagcagtctgcgtggcaaaactccatgatatcaatgcccaaatggtggaagatcagggatttctggattctctacgggatctcatagcagattcaaatccaatggtggtggctaatgccgtagcggcattatctgaaatcagtgagtctcacccaaacagcaacttacttgatctgaacccacagaacattaataagctgctgacagccctgaatgaatgcactgaatggggccagattttcatcctggactgcctgtctaattacaaccctaaagatgatcgggaggctcagagcatctgtgagcgggtaactccccggctatcccatgccaactcagcagtggtgctttcagcggtaaaagtcctaatgaagtttctagaattgttacctaaggattctgactactacaatatgctgctgaagaagttagcccctccacttgtcactttgctgtctggggagccagaagtgcagtatgtcgccctgaggaacatcaacttaattgtccagaaaaggcctgaaatcttgaagcaggaaatcaaagtcttctttgtgaagtacaatgatcccatctatgttaaactagagaagttggacatcatgattcgtttggcatctcaagccaacattgctcaggttctggcagaactgaaagaatatgctacagaggggggatgttgactttgttcgaaaagctgggcgggccattgggacggtgtgccatcaaggtgggagcaatctgcagaaccgctgtgtaagcacattgcttggatctaatcccgaccaaagtgaaatatggggggccaaaaagcaattggttggccatcaggggacatctttccggcaaatacccccaacaaggaattggaagtatccttccgcccctcccgggggggaagaaccttaaaattcgctgggatggagcccgaaggcttcgaaggcagctattgaattcggggattggggggggaaaaaaatggctcgaaaagaaatttcaccaatggccacaagtcaatt

SEQ ID NO: 99105 - DNA, 587 bp, Homo Sapiens
  misc_feature (301)..(343): n is a, c, g, or t
gtcacgcccacaagactgctgtgggtgtcgccatatctgctggcttcctggccctgaagatctgcatgatcaggaggcacttatttgacgacgactcttccgacctgaaaagcacgcctgggggcctcagtggtgagggatgtggtgctcgggcctggctctgccccacccagcgaggcaccgagggccactctgtgatgctggctacagcaagaatgaacccacaagcgcagagcccaacaggctgtaaaggaaggcagtgacctctgcatgtttctgtctctctcactaaccctttgcnnnnnnnnnnnnnnnnnnnnnnnnnnnnnnnnnnnnnnnnnnnatttgtgttcctttttctgtctccctttccatgtctctgtctttctgtgtctctttccctctgtacttttcctttcagttgctcttggcagtcctgagaatcacatttcctggagaaaggtgggagaggaactaaaattggcttcacacagaaatttctgttctctcatccaaatgatgagatcaaataaacccagtcccagtaggcagcgaggttagtcctgtgggcgtgacggtaccggcca

SEQ ID NO: 99106 - DNA, 1142 bp, Homo Sapiens
  misc_feature (197)..(211): n is a, c, g, or t
tttatttgtaaccggttaaaaatcttcaaacaattgaaaccccccgaaagttctgtccatgctctcccccaagcaccacgggggcttcggggcattccccaggaagcatccacgacaaaaagaagctgaaggcgtcacgggggaaggcgcatcagacccgcacagggggacggcatcaccattgatattgtttggcnnnnnnnnnnnnnnntggttaaaaagaagaatcaaaagggaacacaagcagctctacaattcgattggtgggcgcagggctcagaactggccggcactgctccggtcgcacctgcaggaggcgcacaatgcacgggtcgcttttggctcctcggatgaactccttccagggagagttttccgtctctaattggtgtccatctgccggaaagatcttttctgttcttttctctggggttgactcatcttcaggcattttcattacagaggaaaccatcttatagattgcctggcacgatctctagcatctctgccttgctgatatagccatttccgtccaggtcgtacatgctgaaggcccatttcagcttctgctccagcttccccctcgaagttacactcaaggcgatgatgaattctctaaagtctattgtcccatctccatttgcatcgaaggtgcggaagacatgctctgcaaatttggaagcatccccataagggaaaaagttcccatatattttcttaaactcttccattgacaaatgtccactggggcagtctctcaagaagcctttataccattcctggatctcatgctctgtaaagtctgtgctttccagcaagtcctgcatgacctccgggcgcagcttgctgttctgtttccccatcctggcggcaagaattcagttcaaacagctgtgtgaagttcaaatcctcaatttcatttcagagttctttttcttagtatgcagtcactcagtgcctgggatctcggggccttcctcggtatcacgacagattttaacaccaggagatcagatgccctgcaatttctgactgtcagcaacgagtggtcccaggagaccaaagttgagataatctagtggtagatctctcacagcacactgcaggctcaagtcagaagaaatcactcgcctcggccgctc

SEQ ID NO: 99107 - DNA, 397 bp, Homo Sapiens
tgcgtaggcgacggcgccagaaagattggtctctggggccggactgagaaatgcctgaaggagacgacggaggagatccggcagatgggcactgagtgccattacttcatctgtgatgtgggcaaccgggaggaggtgtaccagacggccaaggccgtccgggagaaggtgggtgacatcaccatcctggtgaacaatgccgccgtggtccatgggaagagcctaatggacagtgatgatgatgccctcctcaagtcccaacacatcaacaccctgggccagttctggaccaccaaggccttcctgccacgtatgctggagctgcagaatggccacatcgtgtgcctcaactccgtgctggcactgtctgccatccccggtgccatcgattactgca

SEQ ID NO: 99108 - DNA, 1096 bp, Homo Sapiens
aagcttgcctgccttattccccacaattgggctgaggtcccttgaaaaagcaaaaggaaatttagttgtgggtctaaagaaccattctttggccaaccataagtaattccacacctggccttgtagagaaatttaattttccggaatttagatcatattagctttaaaaagcccccccagtatgctaaaaatcgaaaataattgctaaaaggaggaaagcaagggcttttgtctccatcatcatttctttatatagcactagaaaattcttattccctttctaatttgcaatttcatccaactggcccctaaattctagttccaaaaacaaattaaagtgccagttataacattacctcccactcccacctctctcaagaaagaggcctaaaaataagaatgatgacatttacccttttttgtactagagctttactgaaggttggtatttttatgtcaaccttcctaggactgtcaagtctgcctcctaaagagcgctgtcaggatttcatagcacaatctccttattcactctccaaattatttacatagtaaaacttctatggggtctcagccaccaccaaattacaaaactgcccatttcttctagaataatagttttaaaatttccttccatttcagtatatgcatactcagttcatcacatagtaatatcaataaaaaaataaacttccatttcttataagaaaaacattaacttaattcacagttagccttttcccacaacactcaatactccagtagcttctaggaagagaggtatattagtgataaaaatggaagattaaaaatccatgacttgggagtaaacggagcccttaactcctcctctccccctacctgaatcacaaaagggttttcctgagaatgagaggggatgggactggggtcagcaggattctcacctcggtctaactacaaggtacggggagaagacaggagggctggccatttggcagaatccaagcctactagcttgggatatactagggagataaaagcccatgcctggcatattggtccccattctaattgtcttgcccatgttagacctgtcatcacactaaggcaagtc

SEQ ID NO: 99109 - DNA, 1062 bp, Homo Sapiens
cgaaattaggccccgggtgaatgtaccacactaattgacaaaaatttcattttaggggcaaggttcccagggagggaggaatttttcaagattcctccagttcatatttttgagaggatattctccaccacccggtaattccatattggcttgctcatctggcctttctccataagcggaggcttccccccagagggctccatcccggagcattttccacctggacgggagcattgtgagccaaaagtaaaggggcacattctttatttcctaaccatcacagcaaggtgtaaaggagtattcccggtgattatctttctgcccgatattgtgcgtgcgcatgagagaggagagtctcctcacatccccccttgaagacgcactcgtgcaccgggtagtgtgcggggcaactgcctccatccgcgacgacagcaacggggttggtgccggccagaagggccggggactgggagttggcagtcacggaggaattgtgcagcggcagagccggggcgccggggggattggaggaggccggagctgccttcagctgtagccggtggtgatggttactgaagatcttatgacaagctttgccgcccttgccaatcctgcttctggtaaaggtaccgccgagggcagccgccgcttcctcatccccgggctccagcaggtccccttcttctttgctgggcttgtggtccctccgcagtgagcggatcttctccccggtcatcgccgccgccaggggcaagggggggaatcgggaggctcaccgctggcgacggagctggcgctgcggcggcacaaggcgattagagcggtggccaagagcctccagcgcagcatgaactcccactgagcccccgagcctgggacaaacgcatctcccggggaagagccggctctcgcctaggcacgaagggacgcgcgctcgctgggggaagctagaactcaggtgcccacgacaccaggatctcagtctcgccgtcgcagccgccgtcgctgccttacaccgaaaaacagggcacggccatcttcctcttgcatcccgaaaattcc

SEQ ID NO: 99110 - DNA, 1206 bp, Homo Sapiens
ccgtcgtctggtgggttgcgagcggcgagtagggcagaggttgtgggggttccgtggtcagacactgttcggtctgtctgtgttgggtcttgtggcgcgcgcattgttggtattctgtgtgtgtgttcttgagtgaggatgtgtttagaggtcggtgtctgcgagggttgtggtcggtgcgatgttgtctgtgtctatagttggggggagaggcgttggtactatcatattcactgtgtggtgtatgcggcaagaggctggggttttctaagtagactcggttgcaagggttcttgtgtatgtgcggccagattgcgcgggagagtgtgttatgcgggtgggcggttctgttgggactatgtgtagaggtgcattagtgttggggatagcccaggtgtgttttggggctccccacgggatggagtgtgtggagtgatgcaatggcacgtggggggagtagtggcctttgcaagaattctgtaaatgtttttattccaaagccaaaaaggtacagatccagtccacattaaggactaatctgcatgtaacattttaacttcgtgaatggatgcagcattcaatagacaggggtgtgaaaaaaggcatccacacagctactaaacatcttccctagtgctctcaaatactaaaaatggctgaagcaatttattcccactatgtgggctttctcttttacaactaagttttataaatccctcaaaataaggtatttagaatggaaatcctccctcactatagtggaattaataaatgttactgatacagccgcttgtggggttgtttaaatacctatatacttagagctatatataatcaattctcagttaaaatgggaaagagatggaactaatcaacaaacacagcaactcataaatattcccccaactaattctacccaattgcttcaatctaccatctatctaacttcttaccagaacagataaaagtagcaatgtggctgagtgtcaccaactgtccgtcccttctctctaactgcagtgcgaaacagcactgaatgttcatgaaggtagtgggaggagaggcaaatgtgataactgagaatcgaccatacagacatagcctcccccaaagcacacttacagacatgaagagctgaaaaccaaaactgtgatcccgggaattccgggccggtgtcaggtcgtctgttgattgggcgttgtgggt

SEQ ID NO: 99111 - DNA, 1063 bp, Homo Sapiens
  misc_feature (892)..(940): n is a, c, g, or t
aaatggaaaaaaggggttgagggccaaattaaaatatttttgggcaagcttttgggcacacctttaaaagaggggtattttttggccggaggcggggatgaagccacaggaagggcggaccgcccccacccagccttttgacgttgaagggcagggaccacccaccggaccttggtgaagtggatttgtcggttttattgggtccaaaaccttgattcacagttcctgatttcttacacggggggggctgttttaggggcggttcctccaagcttctccgtttttgataggcttgaaaggcgtctgatgggttctgcagggaaataatggtgaaggacgagtacaggcctgagtggatgtattcgttgcggctcgtgcttctgagggcggccaggtccgtgtttgtgggcctcgcggccctccggagacgccttgcagtcgctgtcctgcagcagaaggctctcccggctgatctccaccgcgtgaggatccatcttcaggatctccgggaaagagacaaacttgtacacaaacttctgcccgatcaccttcttgatgatgttcttgtcataatagtatcgcagggctctgctcagcttatcatagttcatatttgttttgttttttcggagtccccacagcttggccacttcttctgctttgaggagcttgaattcaccatcgttcgaggtccagcagatcaaatgctcatgtttctgatccagcagcaactgcaacaggaactgccacagcgtgattgcactctccatacccagatgtgggggagtcttcttcggggggaatttctaggaggacccgggcgaaagcccccgactttccatgctgacaggcgtctgcagacggtctgtggctcttgtaatgagatcctgannnnnnnnnnnnnnnnnnnnnnnnnnnnnnnnnnnnnnnnnnnnnnnnnggtgtgtgtgagagcaggaagttggagcagtcaggccgagccggctcacttcctttactgcattattccccaggcggtgtgcagtctgtgtaaacaggctaattgcgccccgcgccgcgcaac

SEQ ID NO: 99112 - DNA, 1234 bp, Homo Sapiens
gggtccggaattcccgggatttgacagcgggtgccagcaggtccaggcctactgacgggcggaagtcggcccggtgccccctcacacgcccacacgccgggcgtgcctcagtttcctctattgtgacagaatagagatgagacgatgcaggttaaaattacctaccggcgcataatgagttctccagcatctagctagttctaccataggattaatacccaaaaccacgtgggtggagctgaaaaacacgatgctgtggggggaagaacccaaaaagccatagtcggtctgatgtccatttataggacattctagaagaagcaacagtggcgatgcaaagcagttgcctgggaaaggagtggaacaggacagaatggaatgcacaggagcgggggaactttggggcagtggtgggacaatttcatatcttaataggagcggcggcaacatgacgtatacagtcgccccaaatcatcaaactgtagtttctaaatgggtacggtttattaacattcaaattataagaaaagtcatttcctcaaaagtttcggggttgggggaagagttaaagaaggtcgtggctaggtggttgttgaggaataagggagaaaatcacagcttacaaaatctgagagctgaatccgtgctgtttctcgattgagaagcagtggacatcagcagtaggaatggctcaagtcccagaaggctatgccctaccagacccggttgatgtgcttccccggatttactctgtcccaccgtccacctccaccccggcctgcaccttctcgcttagggtagaggcctggcctccagtgccatctcccgacagcctcccccaggtgaaggtcatgcttcagcactgcctccctgacagaggctctgatgatgggatgctctgactcagactcaggtgagaaatttgaaggaacagaatgctcttgcctagcagttgccgggaggggtcaggtgctgcccccagagaagtgggagagttagaggtccgtgaggcatactttccccaaagggggcagaaagcatgaagtggtcagcatagaaactcgtctccctgccatccacacagtcccaaggcatgctggttctacatggcttgtctggaagctgtccttgaatgtaaagttgttttcagctcaataatgtatttgcctgccttcgcctttcctttcacccttaccaccttggaattgtaccgcctaataaaatcttcgccctt

SEQ ID NO: 99113 - DNA, 1056 bp, Homo Sapiens
  misc_feature (781)..(781): n is a, c, g, or t
  misc_feature (941)..(941): n is a, c, g, or t
gggtccggaattcccgggattgagcctctggcagcccctggtcctggtgctcctggtgctgggctgctgctttgctgcccccagacagcgccagtccacccttgtgctcttccctggagacctgagaaccaatctcaccgacaggcagctggcagaggaatacctgtaccgctatggttacactcgggtggcagagatgcgtggagagtcgaaatctctggggcctgcgctgctgcttctccagaagcaactgtccctgcccgagaccggtgagctggatagcgccacgctgaaggccatgcgaaccccacggtgcggggtcccagacctgggcagattccaaacctttgagggcgacctcaagtggcaccaccacaacatcacctattggatccaaaactactcggaagacttgccgcgggcggtgattgacgacgcctttgcccgcgccttcgcactgtggagcgcggtgacgccgctcaccttcactcgcgtgtacagccgggacgcagacatcgtcatccagtttggtgtcgcggagcacggagacgggtatcccttcgacgggaaggacgggctcctggcacacgcctttcctcctggccccggcattcagggagacgcccatttcgacgatgacgagttgtggtccctgggcaagggcgtcgtggttccaactcggtttggaaacgcagatggcgcggcctgccacttccccttcatcttcgagggccgctcctactctgcctggcaccaccgacggtcgctccgacggcttgcncctggtgcagtaccacgggcaactacgacaccgacgaccggtttggcttctgccccagcgagagaatctacaccccaggatggcaatggctgatgggaaaccctgcccagtttcccttcatctttccaaggccaaatcctactcccgcctgcaccacggnacgggtcgctcccgacgggttaccgcctggttgcggccaacaacggcccaacttaacgaccggggaacaaagctctttcgggttttctggccccgacccgaagcttggaaccttc

SEQ ID NO: 99114 - DNA, 1050 bp, Homo Sapiens
  misc_feature (152)..(152): n is a, c, g, or t
  misc_feature (726)..(726): n is a, c, g, or t
cggtccggaattcccgggatgctggggctgggcgtgtggagccaggcagtctcgaatactctcctggtttagggaggggaaggaagaattcctttggctaccggaagaaaagggaggagaagtttacaagcagccagacacagtctccaacngccaccaatagcctccgtacgccaagcttcgagctggggctgtccagcttccctccattacctggagctgccggcaatttgaagacagaggacttgtttgaaaacaggctatctagcttgataataggaccatccaaagaaaggaccctcagtgcagacgcaagcgtgaacacccttcctgtagtggtctccagagagccctcagtgccggcttcttgtgctgtatcaacaacgtacgagcgatccccctccccagctcatttacccgatgatcccaaggtggcggagaaacagagggaaacccacagtgtggacagacttccttccgccctcactgcgaccgcgtgtaaatcggtgcaggtgaacggagccgccacggaattgctaaagcccagctacgcagagattctcagagaacgagtagagagcctccttcttccccattgcaaccccaaacagaacagaagccaaacactgttggctgtgggaatgaggaaaagaagctggcagagcccgcagagagataccgggagcccccagccctcaagtccacacctgcagcccccacaagaancagagcggtcggcagagggccggccctcgtcctcgaacatggggaatcgtatcaaccgagatcagacactccccccaagtctcctcagtgaaaaacgtacgtctggggagaggtcgccctagcgctgtgatcacccccaaacgagaaactcctcccactcaaagacaagggcggaaccccctggggtacgaagcttgcaatgccctggaggcccggtgtgggaaccctcaagttagccctttccttccgggaaaattgcgatccttccccctctcttgggaaacaaaatccgaattgttttcagggactctgatttaattacaa

SEQ ID NO: 99115 - DNA, 956 bp, Homo Sapiens
gggtccggaattcccgggatccgcagcgtccccccagctctccctgtgctaactgcctgcaccttggacagagcgggtgcgcaaatcagaaggattagttgggacctgccttggcgaccccatggcatcccccagaaccgtaactattgtggccctctcagtggccctgggactcttctttgttttcatggggactatcaagctgacccccaggctcagcaaggatgcctacagtgagatgaaacgtgcttacaagagctatgttcgagccctccctctgctgaagaaaatggggatcaattccattctcctccgaaaaagcattggtgcccttgaagtggcctgtggcatcgtcatgacccttgtgcctgggcgtcccaaagatgtggccaacttcttcctactgttgctggtgttggctgtgctcttcttccaccagctggtcggtgatcctctcaaacgctacgcccatgctctggtgtttggaatcctgctcacttgccgcctgctgattgctcgcaagcccgaagaccggtcttctgagaagaagcctttgccagggaatgctgaggagcaaccctccttatatgagaaggcccctcagggcaaagtgaaggtgtcatagacaaagtggaagtgcaaagagtggaccttccaggcagttgcgtccatgacaccaggaagatgtcagtgtgtgtttttcatttgatttatttatcttggggaaagtgaaaaatgtaatctgcaagttaatgaccctattggcttgtgtacatctatatgctaaaatgacttccccacattgacatttgtgcgccacctttaatcactctggggccactctcacatcttgctgcatgtacatgtatacggctactattgaagtgtaattgtgagatgggactccacagcatgtgactggtgagattgtgtgtgggaaaatgattacacccccc

SEQ ID NO: 99116 - DNA, 1442 bp, Homo Sapiens
  misc_feature (754)..(778): n is a, c, g, or t
  misc_feature (1034)..(1067): n is a, c, g, or t
  misc_feature (1092)..(1184): n is a, c, g, or t
  misc_feature (1310)..(1323): n is a, c, g, or t
  misc_feature (1371)..(1380): n is a, c, g, or t
cccgccgcctactcccccgctccctccctttccatcccctgccccttctcacccccgcctggcaccgcgtccggcattcccgggatcgcaattgcaactccggctggagccccggacctgacaagcctgtgtgtccgtgggtccgtctgcccagccatctgctggtggcacctctccctcctgccgcctccctcggtgaaccccaccttgcagaagtgcagctcgcccggagcagcccacgagctcaacatgcgtcccccaggcttcaggaacttcctgctgctggcgtcctcccttctctttgctgggttgtcagctgttcctcaaagcttctcgccatctctgaggagctggccaggcgccgcctgcaggctgtcccgggccgagtcagagcgacgctgccgcgcacctgggcagcccccgggggccgcgctgtgccacggacggggtccgctgcgactgcggcgtctgcatctgccacgtgactgagccgggcatgttctcccggcccctgcgtgactgccatcactgggtgtgctacacctacaacctcagcacctgtgcacgactcgacaattgcgaatgtggcaagccgttccgcgcccccgtatgccacggggaatgtttgccatcatccccttacactgtgaactttacaacccaacaatcatcgccctctcgtccaaagaatccttccacacaacctcctgcttttaaatgtcccataccacttccaactgttaggcctcggcgnnnnnnnnnnnnnnnnnnnnnnnnnatctgcacactggccatttcggtgcccctgggcccataatttctcctgtcagaaccggctttaatcccaccaatcgaaatattgcccccgccatttacccccttaaaccacctcgtaaacaccaaatctcactcagcttgcacgcaatgggcaccttgtgcgccgcacacaacatttagcccttaaaaccccacgggcgtccggctaataaacaccccgcggcctacacccctgtgggtcaaattccacggtcttnnnnnnnnnnnnnnnnnnnnnnnnnnnnnnnnnngcgattacaacaccttgttcccgannnnnnnnnnnnnnnnnnnnnnnnnnnnnnnnnnnnnnnnnnnnnnnnnnnnnnnnnnnnnnnnnnnnnnnnnnnnnnnnnnnnnnnnnnnnnaaaagataataatggagcttttcccgcctctttttttacccacacccgcacgtgtgcccaaaaaaacaaagtctccgctgcccttctttccacaccctccacaactctgtcacaatatttttgctnnnnnnnnnnnnnnttccccgcctttataacaatttcccgccaccttcttttgtcctccttnnnnnnnnnnaccttttccacctttccgcacatttgaggtggttgccccacactatttgctcccaaacatat

SEQ ID NO: 99117 - DNA, 1265 bp, Homo Sapiens
  misc_feature (106)..(115): n is a, c, g, or t
  misc_feature (446)..(455): n is a, c, g, or t
  misc_feature (546)..(600): n is a, c, g, or t
  misc_feature (612)..(732): n is a, c, g, or t
  misc_feature (785)..(795): n is a, c, g, or t
gggtaggggaggatgtaaagtcaaccgacggacattaagggggcgcaacggcggggcgcaagagggaggatataatgtgcaaaaaaagatcttccgggggaggagnnnnnnnnnntggtgtgaaagggggggaagaaagattagaggggatatggttgtatatgcacgcgtgttatacggggagggagaagtggtagtgggagtgttcggcgggggaaggggaaatagaaagttgatgtgaaggggaagggttttgccagcgaaatttttggccccccccgcgaaaaggaagagggtgtgttccccccgcggaaggttgccacccgggagggcgcgggttttccgcgcgacacccaggcgaatgttataaatataggggggggcgcgatgccccgaaatttagttaagaaaaaaaggcccccaaaaggaaggggcccctcgttggnnnnnnnnnnggggggggacataaagaaaggtgggccccccgggggggaatttttaggaagggccccccccaggttaaatggggtgggaggagatatggtnnnnnnnnnnnnnnnnnnnnnnnnnnnnnnnnnnnnnnnnnnnnnnnnnnnnnnntgaggggggttnnnnnnnnnnnnnnnnnnnnnnnnnnnnnnnnnnnnnnnnnnnnnnnnnnnnnnnnnnnnnnnnnnnnnnnnnnnnnnnnnnnnnnnnnnnnnnnnnnnnnnnnnnnnnnnnnnnnnnnnntattccagtgaaatcaagataggagaacttttcccttaagtttaaggtagttnnnnnnnnnnntaggagaactaattcatggagaacatggccaagttatgagccaaagcacaattcctctgaagagtaccaaaacaaattctctctctattgcttaagtcagaaggaaacaatgaaacccctgaggggtcaccacaaaagacagaggccccgctgaacccccgacccatgcttgagaaagccagggcccactctccctctctcaaacagttttagggtagagaagtcaatgcttagggctcctcactgggagacacaagggcattttaaaagtctgtccccaaaacaatggcatttccaaccagagtaaagcaatggttccagtgcaaatctgcttcatgaagacaaatgtctctcaaatatgaaattcaatgaagaagaacataacttgcaggtaacaaaaaataaagactcatgaaactaaaattaaaatgtttacagaataatagcataagatattaaaataaaaatat

SEQ ID NO: 99118 - DNA, 1021 bp, Homo Sapiens
  misc_feature (992)..(992): n is a, c, g, or t
cggtccggaatttccgggataggaacggcctcgaaagggggtccttccccagccgagaaccaggaatcttccctcggcccgcgcgcgcgaccggccggtgcgccgcggcccgcggacaatcctccaaacacagactgtttgacttagaatcttcccttttttactccattcaagagcagcattcataaatttccagaatggagatctcctctcatcagtctcacctcctgcagcaactgaacgagcagcgcaggcaagatgtattttgtgactgcagtattctagttgaagggaaggtcttcaaagcacatcgaaatgtattattcgctagtagcggctactttaaaatgcttctttctcagaattcaaaggagacgagtcagccaaccacagctacatttcaggctttctcccctgacacttttacagttatcttggacttcgtatattctggcaaactgtctcttactggtcagaatgtcatagaagtgatgtcggctgctagcttccttcagatgactgatgtcataagtgtatgtaagacttttattaaatcttccttagacattagtgagaaagaaaaagatcgctatttcagtctctcagataaagatgccaattctaatggtgtagaacgttcctctttttatagtggtggctggcaagaaggaagcagttctccacgttctcacctaagcccagagcaaggaacaggtataataagtggaaaatcttggaataagtataattatcatccagcctcccagaagaatactcaacaacccttggccaagcatgaaccaagggaaagagtccattaaaaagaccaaacactttgagattgtcacagcccttctgaagttactcattataagtcaagcaaacgagaagtacgaacatctggatctctccagccatggtttcccagtctgaagaacaagcacagaatggatggctgaaaagggactcctactcctggttgggctatcagntacgggtcaaaaggatcttgatggtccca

SEQ ID NO: 99119 - DNA, 1060 bp, Homo Sapiens
ggaattcccgggatcccggcggctcttgcggggacaggtgagccctggctgcgcgcgcggcccctcctccccggcgcctcccagatgggggctccggaggtggcgcccaggctctgagctaccctaggtctgcagactagcgggcattggccagagacatggcccagccactggccttcatcctcgatgtccctgagaccccaggggaccagggccagggccccagcccctatgatgaaagcgaagtgcacgactccttccagcagctcatccaggagcagagccagtgcacggcccaggaggggctggagctgcagcagagagagcgggaggtgacaggaagtagccagcagacactctggcggcccgagggcacccagagcacggccacactccgcatcctggccagcatgcccagccgcaccattggccgcagccgaggtgccatcatctcccagtactacaaccgcacggtgcagcttcggtgcaggagcagccggcccctgctcgggaactttgtccgctccgcctggcccagcctccgcctgtacgacctggagctggaccccacggccctggaggaggaggagaagcagagcctcctggtgaacggagctccagagcctggcagtggcacagcgggaccacatgcttcgcgggatgcccttaagcctggctgagaaacgcagcctgcgagagaagagcaggaccccgagggggaaaggggaggggccagccgggcagcggcggggtctgctcctgctgtggccggctcagatatgcctgcgtgctggccttgcacagcctgggcctggcgctgctctccgccctgcaagccctgatgccgtggcgctacgccctggaaacgcatcgggggccagttcggctcagcgtgctctcctacttcctctttctcaagaccctgctggctttcaatgccctcctgcctgctgcttgctggtggccttcatcatggggcctcaggtcgctttccaccgccttgcggcctgccccgtctgcacaggcctggagtcctcacaggcgcgggttgttcaccaca

SEQ ID NO: 99120 - DNA, 810 bp, Homo Sapiens
gtgtagcacagtgttcccaggatgccagctgaggatgaggttcctgcagatggccacgtacacctgccagtaccggggagtcatgcggctccagggcggccaggacacggcacaggatagagggtcccaccaggttgaggaggccaaccaccaggggcaggaccagcagcacagcctcctggccagcagcctctggactctggatcatgaactccgagaagacgtggacggccacggcgcagcccagagcggtccccagacacagcagccacacaagccccagcacagccgcctgccgcagcctcccgcacacgctcttggggctgtgccgcagctgccactcggccagcagctccttcagccgggtgcgaatattgtcctgctggaggcgggaggcccgcttctgcgtcaccttgtagtcccaggagcagaagacggtgatggcgtggatgccagaggtgctgcccacccggtagctctccccgaaagagtgagccatgctgtacaccagggtgatgcaggtgataaagaagctcacgcccacagtggagaggtaggccaggggcatgttgtagggcaggccacccaccctgggtgtgcactggctgccatccagggggctgccacacggctggttcagcgtggcgttactgtagtggccgtagtacatgacggtgtgggtgaagcaaccctgccacagggagatccagccgagtcagggactttccccacgccccacccgaccctcaggcctgacagccacaggggcaaagcaggaggaggccaggcaggggcagtgagggaaacagc

SEQ ID NO: 99121 - DNA, 1020 bp, Homo Sapiens
  misc_feature (877)..(877): n is a, c, g, or t
  misc_feature (932)..(934): n is a, c, g, or t
  misc_feature (961)..(961): n is a, c, g, or t
gggtccggaattcccgggatgtcgaaaccggggtcggggccggggccggctgagtgaaaggaaccgcggcaggggccaagcctcctcaactatgacctcaaccggccaggattccaccacaaccaggcagcgaagaagtaggcagaacccccagtcgccccctcaggactccagtgtcacttcgaagcgaaatattaaaaagggagccgttccccgctctatccccaatctagcggaggtaaagaagaaaggcaaaatgaagaagctcggccaagcaatggaagaagacctaatcgtgggactgcaagggatggatctgaaccttgaggctgaagcactggctggcactggcttggtgttggatgagcagttaaatgaattccattgcctctgggatgacagcttcccggaaggccctgagcggctccatgccatcaaggagcaactgatccaggagggcctcctagatcgctgcgtgtcctttcaggcccggtttgctgaaaaggaagagctgatgttggttcacagcctagaatatattgatctgatggaaacaacccagtacatgaatgagggagaactccgtgtcctagcagacacctacgactcagtttatctgcatccgaactcatacccctgtgcctgcctggcctcaggctctgtcctcaggctggtggatgcggtcctgggggctgagatccggaatggcatggccatcattaggcctcctggacatcacgcccagcacagtcttatggatggctattgcatgttcaaccacgtggctgtggcagcccgctatgctcaacagaaacacggcatccgggaggtctttatcgttagatgggggatgtgcaccacggtcaaggaacacagntcacccttcgaacagggaccccagtggtcctcctattttctccatcacgctaaannnaaaccaagggtaagggttctggggccnccaccctgaaaggggcctctaaactggggtcccaacccacaagggggtttcgggggccc

SEQ ID NO: 99122 - DNA, 1858 bp, Homo Sapiens
gggtccggaattcccgggatgagcgctcgggctgtctgcggaccctgccgcgtgcaggggtcgctggcctggctggagctgtggagtgagtgcgtgcggagtgagccatggtgaggaggagccagtgtgagcaggaccctgtgctgggcgcggagtcacgcagtgctcgaggaaggcagttggtgggaagtccagcttgggtccctgagagctgtgagaaggagatgcggctgctgctggccctgttgggggtcctgctgagtgtgcctgggcctccagtcttgtccctggaggcctctgaggaagtggagcttgagccctgcctggctcccagcctggagcagcaagagcaggagctgacagtagcccttgggcagcctgtgcggctgtgctgtgggcgggctgagcgtggtggccactggtacaaggagggcagtcgcctggcacctgctggccgtgtacggggctggaggggccgcctagagattgccagcttcctacctgaggatgctggccgctacctctgcctggcacgaggctccatgatcgtcctgcagaatctcaccttgattacaggtgactccttgacctccagcaacgatgatgaggaccccaagtcccatagggacctctcgaataggcacagttacccccagcaagcaccctactggacacacccccagcgcatggagaagaaactgcatgcagtacctgcggggaacaccgtcaagttccgctgtccagctgcaggcaaccccacgcccaccatccgctggcttaaggatggacaggcctttcatggcggagaaccgcattggaggcattcggctgcgccatcagcactggagtctcgtgatggagagcgtggtgccctcggaccgcggcacatacacctgcctggtagagaaccgctgtgggcagcatccgttataactacctgctagatgtgctggagcggtccccgcaccggcccatcctgcaggccgggctcccggccaacaccacagccgtggtgggcagcgacgtggagctgctgtgcaaggtgtacagcgatgcccagccccacatccagtggctgaagcacatcgtcatcaacggcagcagcttcggagccgacggtttcccctatgtgcaagtcctaaagactgcagacatcaatagctcagaggtggaggtcctgtacctgcggaacgtgtcagccgaggacgcaggcgagtacacctgcctcgcaggcaattccatcggcctctcctaccagtctgcctggctcacggggctgccagaggaggacccccacatggaccgcagcagcgcccgaggccaggtatacggacatcatcctgtacgcgtcgggctccctggccttggctgtgcttccctgctgctggccaggctgtatcgaggggcaggcgctccaccggccggcacccccgcccgcccgccactgtgcagaagctctcccgcttccctctggcccgacaggtactgggcgcatcccccacctcacatgtgacaggctgactccagaagggagaaccaagtctcccactttggcagttctccctggaaacaggttcttcccgggaagtccagcttatcccctggccaccaggacgtgcgtcctctcctccatgcgggcccgcgttttggtcgccgcgcgccgcctggcccctgtatataatgcccacaagcccagcaatgccatagctacttactaccttatccgccaatacgccaagcccaagacatctgcactccccacccacaaatactcctccgttagctacacccacgcccgcttaatagtcacattgagcggacaatcgccaccaccactaccccttttacccccacttca

SEQ ID NO: 99123 - DNA, 1376 bp, Homo Sapiens
  misc_feature (305)..(314): n is a, c, g, or t
  misc_feature (668)..(676): n is a, c, g, or t
  misc_feature (790)..(799): n is a, c, g, or t
  misc_feature (823)..(851): n is a, c, g, or t
ggtacggtccggaattctgggatcccgcagtctcaaactccggcaccagtcaggttgtggggtgggggcggcggagggcggagagcgcaggcgcagagtccgcgcggcggcgcccctctccctccgcagtactccggacagcgcccgcctcgattttcccaggcgagggcacgcccgcgccagtcgcctccggcgcaccttcctcgccacgacacgcaggtataagggacccgggagctggacgattggtggccgactggtaccttgatcctgcttgcttcccctcccgacccggcacctcagannnnnnnnnnaaatccacacaaccgctctttacccgccacacctaatggccatcacaagacctttccacgtagaggttatgctcaatcgcctacccctcccacaatcgtttcatgcttttccacccttccccctccctctcccgttcctttatccccacgtccttttactctctccgtttaataccctctctcccgacacgcgagtctatccgcttcggaactcccctatcctttcattctaagccatcctaatcctcttcccccccgtccttattgtttctccccctacttccctccccgtattatattcatcctccccttccttctggcctattcgccccttttccttccctccctttttannnnnnnnngccaatttgcacttgataacctccgcacgctttaggagttctccagaacctcgactcccatccccctactcccccccttcaacatttccgctacccgcttatttatctctattnnnnnnnnnntatcaccatctctctccttttatnnnnnnnnnnnnnnnnnnnnnnnnnnnnntccattttccgtaacactcgttccgccccgtaccccgtttatctccgccagtcacacgtacccttacctcccttatcttttcctctacccccgctcttatttttgttttaccccgcacattattttcccgcggtaataactacatatccaccccgcttccgtttctccactccgtagccccgattattgtttcctatcctctcccgcccccttccctctatttcgtccgacttatcacacacttgcatctcctttcccccgccccatatattacatccgccaacttatactgttaggccccgcgtaatactcctccccccaatatctaccaacttgcgcgcaccctttacaccctactatatacaatccatcacgcccccttattatccccccctctattttttattattttccccgcctctcttatatattctcccccaccgtattctccccccgtcttgatcccactacgcccaggcggatcagcgcctttttatttctagcagacttcctcttttcttctct

SEQ ID NO: 99124 - DNA, 1084 bp, Homo Sapiens
  misc_feature (858)..(858): n is a, c, g, or t
cggctggtaccggtccggaattcctgtcatcaggcctgagctccggatatttctcctgttctggagacagtgagaagtgaaagagaaatggctgcccctgcaccacttaccgcgaaggaggctcaaggctggggggcccctctgccttccagtgaccgcccgtgtcacatcctgacccgctcagcaggagaacacagcaggtccctccgaccgcagtcggcctctccagcctgccatgcctctggccatgaggcgacccgctggagtgatggattcccgtcactaccacccacagggcgagggggtgcattggtctgcttgggccgctgtaacaaaatgccacagcctggatgagtgactgacattgcttccccaccgttctggaggctggaggcccgagatcgaggtccctgacactatttcagtgatgccagagcccaggaggagtcgaccaagccccagcgtggccataagcaccttcgcaggaccacggagtcgctgcaggtgttcagccctgttgagagtgggagtcggtgtcgatggtcacagctcagtaactcatcgtcaccagcgagtaccacagagcagacacaactgcacttctctgtagagcctccagtcgatactgagagccactggggcgtctgacacccaagggtgcagacattcactccaagtccagagaccgcgccctttctaaggccctgtctcacagtcgccccgtgctcattgtgccggatgtttccacagccacagagacggtgaggtgcagcctagtgcatatgactgacagaaacgtgaagccacagtggacgcctggatgagacacagatcacctttcaaaatctgagtgtgggnctggggaccaaccagggcagccaggggagaaggcagagaccagagggaaacccaggtgcccctcaaatcccagcctccctctatcccaggcctccccaatcccaggcctccccaatccccaggccttcctaatcccaggccttctttccatcccagggaacccccattccccaggccttccggattcccaggcttcctcctgattcccaagcctccccctaaaaaa

SEQ ID NO: 99125 - DNA, 1101 bp, Homo Sapiens
  misc_feature (1034)..(1042): n is a, c, g, or t
  misc_feature (1066)..(1066): n is a, c, g, or t
gctggtaccgggtccggaattcccgggatcatagccccacatctagtcacacgggcattcctcttattttatcagggtctgttttcccccaacccagtgaaaccggtgagtgtgtaactccttgggaagattcttttctaaatacaggtataaagagaaggtggagggtgcgggtgcatggaagaaatactatgtgtgaagcagattcaccttcctgggaccggtgacatggtggtgacagtcaatggcttggacagacagacgggctcagtggcatttggaaccctctttggtgccctcccattctctctggaattgtttcaagtctgctggatttcaaacaagaaaagacctttctggccatagggagaatagcagggagtctatgttttggtggtctacattggaaacatcttaagcaagatagggaaagttgattttaggcacacatgtaccctccttgacagcaggaactcagacttcaatcttgggggtctaagaccagaatattttccttctgccagaaaagaatcttgcacatatactcctgaaagcatgagtgtgtggcccatggcaagaaatagctaaaggctgctttccaggacccaaagccccatttaatgcaagaaccagagaagtgttctacgccattagtggacaatgtcatgtttggagaaagataacaacacaaataatgtaaccctttccttaaaaggcagaactcaatccatgtttatttgatgcttattctaacccctaaccctgggtcacctggaaatgaagaactctatgaaataatatgttgattctacaacgtggttatgcgttatggtgaaaaactaaacagtgtgccctttttataaagactgcacaaaattattaaatcttttatttctaaaccctaatccccaaaaactagccccagggcacacccccaagatggtcctttaatgcactattgggggaagattacaaaaagggcggggggcggttctttgggggttttttggagagtggctgcccattggttcggnnnnnnnnnccaaaaaaaccagtgggcctcagnttcagggccttaaactaggaaccacacaccccgga

SEQ ID NO: 99126 - DNA, 1203 bp, Homo Sapiens
  misc_feature (820)..(820): n is a, c, g, or t
gatccgctgggtccccgcgccgttgtcaagaccggggacctggacgcagcggagagaggtgccgccgcccgccccgtccagtcgccgcgcgcaggcactgcagtcagcggtgaactgacttcatcccaatccctcagcccccaccaggaccagtctggagtccctcccctgcccccattgaaatttcccttccgtccccaaacttacctctgatctagaccttactcacctccttcctgtttcctaagactccttcctgccgtccacagaccgagccttttatctttgtccaccctgtgccagacacctccttttccagaaccttctccttactggtgaccttacttatctctgttgctttctggggtcctaggaaatgccagcactcccacccacattgcctgaactttccaacactccctaactgcgctgtgtcctatctcaacactttctcatgtatttcttgtggcttctagaacattcccccgccattattacttcaatatggctacacatacttcctaattgccctggaaaccatctccttctcaccattgcccagcgatgctttcgtctcctccataaacactcccggagaccaatttttgtgtcacccccatactccctcgttgacacactgactccatacataacctccttgaaaaacctctttattaatctcaccatcctccagacttcccccctggcataattccatccctcctccaacttttccctctcaagctctgccctttcccagcccaccccagcctacccaacctcatctcttccctgtagaccacatcccaccatgttcccntgagcctccaaggaaggggctcagggggccccatggcctcccgctccctgtggccccacagcccccgtgggccaggggaagcgccccagaagccgaagtgcccaccatgggcaaccacacgtgggagggctgccacgtggactcgcgcgtggaccacctctttccgccatccctctacatctttgtcatcggcgtggggctgcccaccaactgcctggctctgtgggcggcctaccgccaggtgcaacagcgcaacgagctgggcgtctacctgatgaacctcagcatcgccgacctgctgtacatctgcacgctgccgctgctgggtggactacttcctgcaccacgacaactggatccacgccccgggtcctgcactcttt

SEQ ID NO: 99127 - DNA, 1111 bp, Homo Sapiens
  misc_feature (412)..(495): n is a, c, g, or t
  misc_feature (692)..(743): n is a, c, g, or t
gaattcatgaactgcatctcatgagaatatgtagagatgacgtgggcaggtaaagtaaaacttcaggttgaatatcctatgataatttaaaaatgacaaaatagtgtggtgaataatagagcttgagcactttaaggcaccatagggaccccttcaatgtaatgatgacagtgctgaggtgcagagaagttaggtaatcagcccaagccactactctaaggacagaccctatctacttttcctaatttgtcagaagactgcctatgatactactaataaaaagtcctatgaaattggtatgtcattattttacaaataaaataatcttcaattttgtttcctctatgcatgggttacttagtattttgtaatttgaatttcaagcataattaaaaagaaatcaggtatctannnnnnnnnnnnnnnnnnnnnnnnnnnnnnnnnnnnnnnnnnnnnnnnnnnnnnnnnnnnnnnnnnnnnnnnnnnnnnnnnnnnatctttgttgatctctacactgattgtattctctcttttattctatgaaagttaaagattttttctgatactacatattgtcagttttttaaatactcagttgtgctaaaagaaaacattcggcaactgatatctgctgttctgtatgtatctgtcagtccagatttgtccattatggtgtatgaatctaatagaannnnnnnnnnnnnnnnnnnnnnnnnnnnnnnnnnnnnnnnnnnnnnnnnnnngagctcatcactgttaactcagcctgggtttttcacagcagtcatggaaatagattcattaataatagtaacaaatatatagtctccctctcaaagaaaccttgagtggcagtggcataccagatacacagtaggaaatactgtagaattatgttgttaagttcataaccaaacatcatacatgatgataaaagacaagataatggtcacatttatgcagtattaactgagagggcaaatttgtgcctgagaagctattgggaatgttctctctctttgcattactaggaattacatgggaaacacatgtagacagtcttcaggctattaagatttgtccacttaatctttacttatacatgaataaa

SEQ ID NO: 99128 - DNA, 1090 bp, Homo Sapiens
ggctggaccggtccggaattcccgggatagcgggatggcgcgctttgactctggagtgggagtgggagcgagcgcttctgcgactccagttgtgagagccgcaagggcatgggaattgacgccactcaccgacccccagtctcaatctcaacgctgtgaggaaacctcgactttgccaggtccccaagggcagcggggctcggcgagcgaggcacccttctccgtccccatcccaatccaagcgctcctggcactgacgacgccaagagactcgagtgggagttaaagcttccagtgagggcagcaggtgtccaggccgggcctgcgggttcctgttgacgtcttgccctaggcaaaggtcccagttccttctcggagccggctgtcccgcgccactggaaaccgcacctccccgcagcatgggcaccagcctcagcccgaacgacccttggccgctaaacccgctgtccatccagcagaccacgctcctgctactcctgtcggtgctggccactgtgcatgtgggccagcggctgctgaggcaacggaggcggcagctccggtccgcgcccccgggcccgtttgcgtggccactgatcggaaacgcggcggcggtggggccaggcggctcacctctcgttcgctcgcctggcgcggcgctacggcgacgttttccagatccgcctgggcagctgccccatagtggtgctgaatggcgagcgcgccatccaccaggccctggtgccagcagggctcggccttcgccgaccggccggccttcgcctccttttccgtgtggtgtccgggcggcccgctctagagtaatccctcgaggggcccaaagcttacgcgtacccagctttcttggtacaaagtggcccccaataatggaaggcgtattataaacctaggcaccggggccggtcgtttttacaacggtcccggaactggggaaaaatggcctaaacttggggaatcttttggggaaaggaacccttcaccttcgtgggggtggggacattaatttgggacaaaacttaaccttacggaagaatttaaaaggctcctaagggcaaaataataaaaattt

SEQ ID NO: 99129 - DNA, 1079 bp, Homo Sapiens
gtggtaccggtccggaattcccgggattccggttgcactcttcctatagcccagagggcgagagggcctgtggcctgggggaaggaggacgaggttctgcctggatcccagcaggacgctgtgccatttgggaacaaaggaatagtctgcctggaatccctgcagatcttggggccggaggccagtccaacccttggagcaggaagaaacgcaaagttgtcaagaaccaagtcgagctgcctcagagccggcccgcagtagctgcagactccgcccgcgacgtgtgcgcgcttctctgggccagagcgagcctgttttgtgctcgggttaagagatttgtcccagctgtaccatgggccgcactcgggaagctggctgcgtggccgctggtgtggttatcggggctggtgcctgctactgtgtatacagactggcttggggaagagacgagaacgagaaaatctgggacgaagacgaggagtctacggacacctcagagattggggttgagactgtgaaaggagctaaaactaacgctggggcagggtctggggccaaacttcagggtgattcagaggtcaagcctgaggtgagtttgggactcgaggattgtccgggtgtaaaagagaaggcccattcaggatcccacagcggaggtggcctagaggccaaggccaaggcccttttcaacacgctgaaggaacaggcaagtgcaaaggcaggcaaaggggctagggtgggtaccatctctgggaacaggacccttgcaccgagtttaccctgcccaggaggcaggggtggaagctgccaaccccaccaggagtggatctagggccgggggcaaggccaaatggaaaatccaaggggaaaagccccgaagtaagaagcaccagggcctccagcctacaacatggccctgtcccgaaaaggcaaggttcaactttcccttataaaattggatgaatttcctgagtggctcccaaccctccaaaaggtcctcaacatccctggaaacggaacaatggatctttttaatttcagaaagaaaccctttggccccctcctggggtaacaaaggc

SEQ ID NO: 99130 - DNA, 700 bp, Homo Sapiens
gtggaccggtccggaattcccgggatccttcatcccacttaccgcagctccagagccctgcgggaggactcagagtcagggacacagcagcgtccggcgagatgaaggcgctcggggctgtcctgcttgccctcttgctgtgcgggcggccagggagagggcagacacagcaggaggaagaggaagaggacgaggaccacgggccagatgactacgacgaggaagatgaggatgaggtggaagaggaggagaccaacaggctccctggtggcaggagcagagtgctgctgcggtgctacacctgcaagtccctgcccagggacgagcgctgcaacctgacgcagaactgctcacatggccagacctgcacaaccctcattgcccacgggaacaccgagtcaggcctcctgaccacccactccacgtggtgcacagacagctgccagcccatcaccaagacggtggaggggacccaggtgaccatgacctgctgccagtccagcctgtgcaatgtcccaccctggcaaagctcccgagtccaggacccaacaggcaagggggcaggcggcccccggggcagctccgaaactgtgggcgcagccctcctgctcaacctccttgccggccttggagcaatgggggccaggagaccctgacccacggcccctccccacccccaaccgcatcacccgttcgggta

SEQ ID NO: 99131 - DNA, 1058 bp, Homo Sapiens
  misc_feature (200)..(202): n is a, c, g, or t
  misc_feature (206)..(207): n is a, c, g, or t
  misc_feature (217)..(217): n is a, c, g, or t
  misc_feature (253)..(253): n is a, c, g, or t
  misc_feature (836)..(883): n is a, c, g, or t
ttggttccaagaaccttgcaaacttaaatttttccccctttttgggggagggccccccaccctttttgccccctcgggtggagttcccctgctggggaggggcccttggggttccaaggggggaggccaaggtcttctattttcatgggaagctgttcagaatgagaccattgcgaattggggagtctttcagccttttnnntttnncggccggcgncggtttcgttaaagccggggaccgccagtgaaaaancaggagactttcggttcttcccagactgggtgaatgagccggcggcaggttctccatctgcacggttccagcccggcgcttcatgctgcacatctccatttttactcgtgcaggtgccggttcatgtcgttcttgggccgtggccaactccagctctatctggtcaatggtctcctgatactccttctcccgggttttgaacagggactccgtatctttaatcaccttctccaggctatcttcctgctgctctccctgggcctctgcagctgccatggcatagcctgagaaatcctcccaaagcagcagggtctcctcagtctcctcccaagtcaggccgtcacagtcgtccgtcaaaatcatactccctcagctggttgagcatgcgctgcatctcctcgttgatgctgagggctgtgctctcctcctcatccccatcgggctggcggggcccctcactctccgacagggaggtgtcctcctcgacggcagccttgcgctcccgcttccgcccccccatggatgggaccttaatgggagacaagtgcagagactacagagacgaggccgggtgcatgaggannnnnnnnnnnnnnnnnnnnnnnnnnnnnnnnnnnnnnnnnnnnnnnnaagcatgaaccagtaggaagggggggcagacagagagaaaagtcacagttacaatgacaggaacagaaacacggacagtcaccaagggccagacacacagcggggtcagggctgcaaccgagaaggcagaacaagaagaaatcgagaagaaagcagtcaaccaggaagaaggctc

SEQ ID NO: 99132 - DNA, 1100 bp, Homo Sapiens
  misc_feature (1013)..(1013): n is a, c, g, or t
  misc_feature (1015)..(1017): n is a, c, g, or t
  misc_feature (1030)..(1060): n is a, c, g, or t
cggtccggaattcccgggattgcgtctggagatggagatggagcggatgagacagacccattctaaggagatggagagtcgggatgaggaagcacaaggctgccgtggctcaggcttcccgggacctggctcagataaatgatctccaagctcagctagaagaagccaacaaagagaagcaggagctgcaggagaagctacaagccctccagagccaggtggagttcctggagcagtccatggtggacaagtccctggtgagcaggcaggaagctaagatacgggagctggagacacgcctggagtttgaaaggacgcaagtgaaacggctggagagcctggctagccgtctcaaggaaaacatggagaagctgactgaggagcgggatcagcgcattgcagccgagaaccgggagaaggaacagaacaagcggctacagaggcagctccgggacaccaaggaggagatgggcgagcttgccaggaaggaggccgaggcgagccgcaagaagcacgaactggagatggatctagaaagcctggaggctgctaaccagagcctgcaggctgacctaaagttggcattcaagcgcatcggggacctgcaggctgccattgaggatgagatggagagtgatgagaatgaggacctcatcaacagtgagggagactctgatgtggactcggagctggaggaccgtgttgacggggtcaaggcctgggtgccaaaaaacaagggaccttcccaggcagctttctgatgatgggcagctttaaagaggtccagcccgcaccagctacttggaaagtcccttggcccctgattcggccacaatgacgacccaggattcttcccggaaacacccgcctagaaccgcgcctactttctccgtgcattcctgcgggtccacggaaacccctaagccccaaaccctacgggaagccctaaccgtaccagtgcccgggggggattggccctttatccccaagtttatttctataagggcccgccntnnnacccgcccatttnnnnnnnnnnnnnnnnnnnnnnnnnnnnnnngcatacctggcaccatgcccctgcgcctttacttcccccc

SEQ ID NO: 99133 - DNA, 343 bp, Homo Sapiens
aagaacagtgctcccagcaagcgagagatcgcccagctcaagaaccacgcatggaggagtcagagtacacctgtgcggcagccgtgaaagcacggaaagcaatggaggtggagatcgaagacctgcacctgcagattgatgacatcgccaaagccaagacagcgctggaggagcagctgagccgccttcagcgtgagaagaatgagatccagaaccggctggaggaagatcaggaagacatgaacgaattgatgaagaagcaccaaggctgccgtggctcaggcttcccgggacctggctcagataaatgatctccaagctcagctagaagtgcgcctgggtg

SEQ ID NO: 99134 - DNA, 1142 bp, Homo Sapiens
  misc_feature (919)..(919): n is a, c, g, or t
  misc_feature (987)..(987): n is a, c, g, or t
cggtccggaattcccgggatgcgtggcctgcggccctggcctccgctgcagcgctcgcctggcccggaggcaatgtgagtcaccctcacagccccctccccttcactttccgcgtggggtggaccgggggacgctgggcccacggacggcgagggtggggattagggaagaaggacttggaggcccaagtcccgctccaggtcaaaggggctgtgccttggggtacccgtctatctctggttggggtgaggtgtgcgtccctgtcccgtaggtgtccacatctgtgtgtccaggggtgtgtgtgtatgtgtcacactcttgctgaatacgcccactgctaacaatatggacgcccaggtgccagaaaggtcaggcagtgtattcccctgcctccggactaaaaatatatctatctctccatgcatccttccatccagagaggagagaatctgggcggtttttaaagacctcccgaggagtgaccactgtgcctgtgtgcactcacatccacttgtcatccgccttacacacacccacggtgtttctgggccaccacaggtgtgtgtgtccagaaagggtgcatataacatacgaggggccggtttacggtgacggaccttcctcccctggtacttcacccgcatcagggaaggcataaggcaaaggcaagtggaatggacctccccgtctaccctgacaaaaccgacacaaccttaatgtcaacactctccagccaccttaccctgcatcccctactctcattgttacaccatgtaccaccgccctcaaacctccctacatgccgactttccgcactctcctatacataatcaccgcttatacctattgcacgtgctcttccctccgcgctagtcttatctaaaagccgccacccttcgctcgtccttacctcatatcncaactcaccctatccaccgcgcgaccgttcatactcatatgctgggctatctctacgcacgcgcgtanatagactgaccacccccgtaggagcacagcagctcaccgatatgatctcctccgacaactgacacttcagtaacaacttctcgctcccatgctaatcacaacatgctttggatctcataacatgccaaatatattccctttccccaactacggat

SEQ ID NO: 99135 - DNA, 1125 bp, Homo Sapiens
  misc_feature (647)..(678): n is a, c, g, or t
ggctggaccggccggaattcctggaagacctccatttgacccacaccatgactcacctgggcatcagcaggggcatgggcctgggcccaggctatgatgcaccaggtgagtgactgtcctggccatgtgcccactgggtgctgcctgactgaaggaatgaaggggaggtaggtatgagcacctgagatcctgctgtgatcacccacaccgcctgtcacctctgaacccaaggattccctcacggcagtactcagccagtgataactggtaggtgtggtgtttcctaaaagagaagaggaagggcagtccccagatgggcagtgctgtcaggcatagagtagggaggacgttgtgttgccgctttcatagtctggtcactgccacccattctgggtggaaaggggctcagttcccatcagtaatgttggcatctctggttttttgtctgtgcctgcaggacttcattcacctctcagccacccatccctgcagtcctccctaagcaatcccaacctccaggcttccctgagcagtcctcagccccagcttcagggctcccacagccacccctctctgcctgcctcctccttggcccgccatgtactgcccaccacctccctgggccacccctcactcagtgctccggnnnnnnnnnnnnnnnnnnnnnnnnnnnnnnnnacttcatctccctgttttgggcgccccctcttaccctgcttctacccctggggcctccccccaccaccgccgtgtgcccctccaccccctgagtttgctcgcgggcccagccgacgccagaaggtcccaacagcagctgcccaaacaggtttcgccaacaatgtcacccaccttgtcttccatcactcagggcgtccccctggataccagtaaactgtccactgaccagccggttacccccataaccatacagcttcccccagtctgggttctgccctaacccagccccacaaccccaaaagtctctacaggcaggccaggggctggccctctcaagccttgggtcagtggcagtccctcagggtggggccaaccccccagggcaaggcagtcctcattttatggggaaaccggtaccccacccttggggcccccatgggggcaatg

SEQ ID NO: 99136 - DNA, 319 bp, Homo Sapiens
catactccctacctgacctcaccaacctgcactttcccccaccactgcccacccccctggaccctgaagagacagcctaccctagcctgagtgggcgcaaacagtacctccaatttgacccacaccatgactcacctgggcatcaaaaggggcatgggcctggccacaggatatgatgcaccaggacttcattcacctctcagccaccaatccctgcagtcctccctaagcaatcccaacctccaggcttccctgagcagtcctcagccccagcttcagggctcccacagccacccctctctgcctgcctcctccttgg

SEQ ID NO: 99137 - DNA, 1202 bp, Homo Sapiens
  misc_feature (107)..(159): n is a, c, g, or t
atagggggggccaaaggaaagggagcccccctttcctttgggggctttggggaaaaccggggaaaccttggtttttaaaagttgggggaagcccaatgcccttttcnnnnnnnnnnnnnnnnnnnnnnnnnnnnnnnnnnnnnnnnnnnnnnnnnnnnncccatgggggccaactgggctttcgccccctgggggaaaaatgggaaacccatcccagggtgggggaatgttctttgctggaccgggtttgggattcccaggcgccgtggatgtacttcgtagggcggaaccaggccgttccaggttaatcgggaactatagcccagccaccttcgccaattcccgtcgtcacagtagggaactttcatgtcccaggctgtggcggctgagggaaggccctcggcccacagtggggctccaggctgcctgggtgggggatggcttcgcagatgagcaccaggcactgcagcgggggctctgagtcagggctcccagctggagaagtctgcacaggtggcttgtaggccctcatatgtccagagcagttcagcaccttccaggtggccgccttgaggttgagggtgcgcccgcggctggtgagcgtactcttcatgcgcaaggagaagcaccgctccgtgggggcctccaccttcctcctggacagggtctgctggggggtcagggcgtcctgaagctcctcttggtcacaggggtggatgaaatcaaagatgctgtgtccaatgagctccagctgactgaggcccaggtgtttgctgacattctccgacaggtaagccatgtctccctcggcggtgagcaccatgacgaagccctccagggccttcaggtagcaggcatccagtggttctccccctgctcccacctggttccactcccctgcggcgcagaggcggtgcatgcgcaggtagctgatggtgaggcgcatgatagaggccttgtccaggtgggcgctgacgccgcgggcgaagggcagcgtgtgagccagctggtacagcacctcggtctcctggctgcgccggctgcgggccgcatcccgggacttttccttgcgcagctccgtggtcgaccatcgcccaggcccccgttggctgaagggccatccagggggtgcaggaggggacgcggtgcaagccaggacccgggtgcgagttacgagtgggtgcgcacggcggtgagatgac

SEQ ID NO: 99138 - DNA, 1102 bp, Homo Sapiens
  misc_feature (842)..(844): n is a, c, g, or t
  misc_feature (846)..(847): n is a, c, g, or t
  misc_feature (849)..(849): n is a, c, g, or t
  misc_feature (851)..(903): n is a, c, g, or t
  misc_feature (959)..(967): n is a, c, g, or t
ggctggaccggtccggaattcccgggatattgctgattgcctctttctcccaccgctcagtttccgtgcaggatggcatccttctggccacgggtttacatgtccaccggagcagtgcccacagtgctggggtcggctccatctttgacagagtcctaactgagctggtttccaaaatgaaagacatgcagatggacaagtcggaactgggatgcctgcgagccattgtactctttaacccagatgccaagggcctgtccaacccctctgaggtggagactctgcgagagaaggtttatgccacccttgaggcctacaccaagcagaagtatccggaacagccaggcaggtttgccaagctgctgctgcgcctcccagctctgcgttccattggcttgaaatgcctggagcacctcttcttcttcaagctcatcggggacacccccattgacaccttcctcatggagatgttggagaccccgctgcagatcacctgagccccaccagccacagcctccccacccaggatgacccctgggcaggtgtgtgtggacccccaccctgcactttcctccacctcccaccctgacccccttcctgtccccaaaatgtgatgcttataataaagaaaacctttctacacatgagacttttataggtggacttttgtatagatgttaaaggtaatacgctttgctgtctacagggctgggagactttctggaagttcttgggaaaactaatcaagcctctgtacatacaattggtttaaattattttttcacttgccctggaaagcaaacaaatgagtaataaaataatatgtgtgaaattggcaaaannnannanannnnnnnnnnnnnnnnnnnnnnnnnnnnnnnnnnnnnnnnnnnnnnnnnnnnnggggggccccccctaaaaatccccctaagggggccccagtttttccggtaccccannnnnnnnngtaaaaaagggggccccataaaggggaccgatatttaaaaacttgggccttgggccccctttttttaaaccccctgggacgtgggaaaaaacccccaccctgggggaattttttggaaaaggaaccttttcctcc

SEQ ID NO: 99139 - DNA, 983 bp, Homo Sapiens
ctcccagttcctcctgcctctaggttcctctttccctgctgattccaggagcctatcaacccagataaagcgggacctcctctctggtagaggtgcaggggcagtactcaacatgatcacagagggagcgcaggcccctcgattgttgctgccgccgctgctcctgctgctcaccctgccagccacaggctcagaccccgtgctctgcttcacccagtatgaagaatcctccggcaagtgcaagggcctcctggggggtggtgtcagcgtggaagactgctgtctcaacactgcctttgcctaccagaaacgtagtggtgggctctgtcagccttgcaggtccccacgatggtccctgtggtccacatgggccccctgttcggtgacgtgctctgagggctcccagctgcggtaccggcgctgtgtgggctggaatgggcagtgctctggaaaggtggcacctgggaccctggagtggcagctccaggcctgtgaggaccagcagtgctgtcctgagatgggcggctggtctggctgggggccctgggagccttgctctgtcacctgctccaaagggacccggacccgcaggcgagcctgtaatcaccctgctcccaagtgtgggggccactgcccaggacaggcacaggaatcagaggcctgtgacacccagcaggtctgccccacacacggggcctgggccacctggggcccctggaccccctgctcagcctcctgccacggtggaccccacgaacctaaggagacacgaagccgcaagtgttctgcacctgagccctcccagaaacctcctgggaagccctgcccggggctagcctacgagcagcggaggtgcaccggcctgccacctgcccagtggctgggggctgggggcttggggcctgtgagccctgcctgtgactgtggcctgggcagacatggaacaccggacgtgcatcaccctgtgcccccgctgggggccc

SEQ ID NO: 99140 - DNA, 1139 bp, Homo Sapiens
  misc_feature (54)..(85): n is a, c, g, or t
  misc_feature (1039)..(1039): n is a, c, g, or t
gctggaccggtccggaattcctgcgatcgcgggcggaatggggactgctgctcnnnnnnnnnnnnnnnnnnnnnnnnnnnnnnnncggggagggggcgcgtagtccgacccccgccgccgtgtcgctcggcctgggcgtggccgtcgtgtcgagcctggtgaacgggtccacgttcgtgctacagaagaagggcatcgtgcgtgccaagcggcgaggtacttcctatttaacagacattgtgtggtgggctggcacaatcgcaatggctgttggccagattggaaacttcctggcttacacggcggtccccacggtcctggtaacccccctgggcgcccttggagtaccgttcgggtccattttagcttcctatctcctgaaggaaaagctcaacatcttgggcaagttggggtgcctgctaagctgtgcaggctccgtcgtgctgattatccactccccaaagtctgagagtgtgacaactcaggctgagctggaggaaaagctgaccaatccagtgtttgtgggctacctgtgcatcgtgctgctcatgctgctgctgctcatcttctggatcgcgccggcccatgggcccaccaacatcatggtctacatcagcatctgctccttgctgggcagtttcaccgtgccttccaccaagggcatcgggctggcggcccaagacatcttgcataacaacccgtccagtcagagagcccctctgccttgtgcctggtactcctggccgggctccggctgcagcatcatcgtccagttcaggtacattcaacaaggcgctgggagtgctttcaactccctcggtggtccggggccattctactacgtcgttgtttaccacgctgggtcctggctggcctcaacccttcccccttccggaaggggaacaacccggggccccggtgcaacttccttggggatggcccggtggaatatccgacccgctctccttggggatttgttctttttgccggggcttaaacgagtttcgtttcccactcttggggggaaatcgaccagacnctatttttctgcacagatttgcaattgcctctgcagcgcttcgaaggtactccagggaatttggccttctgacgcggggatttccgggcccgtctacttg

SEQ ID NO: 99141 - DNA, 1365 bp, Homo Sapiens
  misc_feature (18)..(18): n is a, c, g, or t
  misc_feature (950)..(950): n is a, c, g, or t
  misc_feature (1200)..(1200): n is a, c, g, or t
aaaatataacttaatttntagggaaatagatgaaaaaggtcacagggacaggctggaaccggtccggaattcccgggatcagagatggacattttattgatggaaaaaaatcacgttaagttagaaagctctcaaaagtacctggtatttacaactccctgtcagggagggcgaactcgatctcagagttttattttcatcagggattacgttgaggtacccagaaatgagaagatttgcccaaaatggcatattttaaaattggcccagaccagaacccagtttcctctgggattatttgttagtaatcgttttacaggctgagcatgtaactccaaagcttgaaggactttttctcattttcacttgttttctctaataaaaataatgctgtaatttcaacttcacaagatgaggcctcatggaagagtgtttaccaaaatattaaaaatactttgacagaaaaaaatcaagcgaactctttgccaaccaaatatcatcatgactgatgtaacaagtaatccaacacagatatgaaaatcacactggtaaaaatcatctcagttaattctaaaagcagagctaaccaccccttttgtcctaaggctttatggtattaaaaaataaactgtacaaaaatatagattttcccctatcccctacccctggaaagtaatatactgaaagcctcctcatactggttttgggggattccagctaaattaaaatcttctaggtggaataaaagaacctgttttcctggacccccccaaggttaagttaaagcggagcggccgagctagggttccccgggggccgaatttaagcatgacaggctccctgttaaaaagaacaatacatccatgcacaaaagagtacacaccgaacaggctcccacgcattcgtctcacccacacatttatccgtctctccggtaatcacgcctctanagtagcgcgccacaccccttccagaggttaggcggcgctccgagttattatcctcaggtaagccgatacaggtgcatcccctactctccacacaatagattgataccataccaaatgttatataaactagcgtcacccatagagatcttaaattacatcacccccgccacacccggagtggccttcgccctcgaagtcacggagagggagcagaaaaattataaacaatatcctccgcttgccgcgagcnctagcacacaaatcccaccacggctaacctaacgaagacactgctattgaagcaacaaccggggggactatttacccggcgcgctcccctcgaccgggtcgcgtcgttgaacaactctggagacaaccgtacacaaaaagaccccacgcacgacagttactaccc

SEQ ID NO: 99142 - DNA, 1037 bp, Homo Sapiens
gggtccggaattcccgggatctcacgggcagtagctgtggtgaggtgggttttcttcccatcactggagcaccaggcacgaacccacctgctgagagacccaaggaggaaaaacagacaaaaacagcctcacagaagaatatgacagctgtccctgtcaccaagctcacagttcctcgccctgggtctaaggggttggttgaggtggaagccctcattccacggatccatgtagcagcactgaattgtccccagtttgcagaaaagcacctgccgacctcgtcctccccctgccagtgccttacctcctgcccaggagagccagccctccctgtcctcctcggatcaccgagagtagccgagagcctgctcccccaccccctccccaggggagagggtctggagaagcagtgagccgcatcttctccatctggcagggtgggatggaggagaagaattttcagaccccagcggctgagtcatgatctccctgccgcctcaatgtggttgcaaggccgctgttcacccacagggctaagagctagcgctgccgcaccccagagtgtgggaagggagagcggggcagtctcgggtggctagtcagagagagtgtttgggggttccgtgatgtagggtaaggtgccttcttattctcactccaccacccaaaagtcaaaaggtgcctgtgaggcaggggcggagtgatacaacttcaagtgcatgctctctgcagccagcccagcccagctggtgggaagcgtctgtccgtttactccaaggtggggtctttgtgagagtgagctgtaggtgtgcgggaccggtaaagaaagggctttcttcgaagggggatcccaaaagctttccttaaaacagggccttgacttttgggaaaagcggccgcttctaaagatatccctccaagggggccaaaagttatcgcgcaaacccaggcttttctttggatcaaaattggcgcccacataaagggaaattccatatataaaatctttagggacactggaccccctgcagttacta

SEQ ID NO: 99143 - DNA, 1119 bp, Homo Sapiens
  misc_feature (103)..(180): n is a, c, g, or t
cagtagctacccttctcttcctcctcatgatagtactttgagaagcagcaatagtgattgaaagtactccggatttaaacttaaatagctttgagagtcgaannnnnnnnnnnnnnnnnnnnnnnnnnnnnnnnnnnnnnnnnnnnnnnnnnnnnnnnnnnnnnnnnnnnnnnnnnnnnnaaatcgattgcatgggaattcaatgatgtagctggtttgtctgaatttctctggtgtgcacaccggaaactcaaagcacgactctatactgtacttttgtaatgtacaatgattgccgtggagagcagcgatggagatgttagtcctctttccttctccatcccccttgccctggtgcctgtgaaacagagcatccccatggcaacagcagcagctggtccctagataagaggagctggagccggccagcagcagccactgccgcagaggagccaggcccagcctcggtgagcacacacgccctccctgtctctcgccttcgcttccctgcatctgcgctgattgtgctggagaagaatacatccacccaccctcctttgatgatgtccactgagcaaatgcagccactggaactctcagaagacagactggacaagctagaccctcgttgcagccacttagatgatctttcagaccagttcattaaggactgtgatctcaaaaagaagcctagaaaagggaaaaaatgtacaggccaaccctgaatgttgagtcagaccaaaaaaaaccaaggaggaaagatacaccggcgctgcacatcccacctttcataccaggtgtgttttcagaacatttaattaaaagatacgatgttcaagagagacatccaaagggcaaaatgatccctgttcttcataacactgacctggaacagaaaaagccaaggagaaaagacacacctgccctgcacatgtccccctttgcagcaggtgtgacattgctcagggatgagagacccaaagcaatcgtggaagatgacgaaaaggatggtgacaagatagctatttaaagatagttcccctgagaccacttgtaaataggttagattggttccctgtggtgacctagagaaaaaatagacttgtttctgctctcaaa

SEQ ID NO: 99144 - DNA, 1004 bp, Homo Sapiens
  misc_feature (545)..(546): n is a, c, g, or t
  misc_feature (552)..(575): n is a, c, g, or t
  misc_feature (590)..(590): n is a, c, g, or t
  misc_feature (593)..(593): n is a, c, g, or t
  misc_feature (621)..(621): n is a, c, g, or t
ggaccggtccggaattcccgggatataagttattacttataatcagtttttttattgttactatggcaatattttatacacaagaatggctgaggttaggaatttgtgccctgaaaattgtatcaacatatcaaatatgaagtaaataacaatttcttgctttaaatataacaaagatgtgggaagaagtggtaggcaagagtctctgtgttaccatgggaacgattaagttttccaaggtgcaaaccagcctcattccagcttcagggtcaatgacttactagctcagagggaaatgtataaatatttaagtacatacctactatctgtacagagtgactctcattacccagagaactgctgtaaaatattatttattcacagattacacaaaaccaatctaaattagtacttttatacattctatttggggagtacttaaggtgtatgagcaaacaaattgttatccaggtcactccagaactgttgtatacagattaagaattgatgttggatactaattaaaatcattaaagcaaaatcannaaaccnnnnnnnnnnnnnnnnnnnnnnnnccaaacacaaaaggnccnaaccctctaaaaaaaccctcccagggcncaaacccccacgcgcaaccccaactcccttggcgcaaacgggcttcctatccccccataccgcctcgttggcccccgggcccctggttccttcgttttccccaatgggccgctgacctgggtcacaacgcgcccccccttttgtggacaaccccggggaacccttacccattaccttcccgccgtccggagacaccccaattgggccgcggctctccctttcttccaaattctaaaggccttctagagggcaaacgcataacactttcttttcattctcgttaaaacggccattttcaccctcccgtcgtgcccgtgcggtttgtctccgccttgcaccatctcccttgcctttacctgggacaaacggctttttatcgcgac

SEQ ID NO: 99145 - DNA, 692 bp, Homo Sapiens
ggatgaaaaagcaacaactgaatttaaagatgcggtagagcaactattaagctgcttcccaaacgcttttctggcttccaagatggaacccgtggtctatggagggatctccaggctccaggctgacctgaactgcatcagagatctttctgccttcgaggtctcatggaagtacgttatcaacacctgtgggcaagacttccccctgaaaaccaacaaggaaatagttcagtatctgaaaggatttaaaggtaaaaatatcaccccaggggtgctgcccccagctcatgcaattggacggactaaatatgtccaccaagagcacctgggcaaagagctttcctatgtgataagaacaacagcgttgaaaccgcctcccccccataatctcacaatttactttggctctgcctatgtggctctatcaagagagtttgccaactttgttctgcatgacccacgggctgttgatttgctccagtggtccaaggacactttcagtcctgatgagcatttctgggtgacactcaataggattccaggaatgatccctctcttgtcacccaggctggaatacagtagtactcaaactcactgcagcctttagctcctgggctcaagcaatcctcccacttcagcctccccagtagctgggactacaagagtgcatcaccatgcttggctactttaac

SEQ ID NO: 99146 - DNA, 822 bp, Homo Sapiens
ggcgggcaagctggagcaggcgctgaaacaggagcagggggcacggcggcgacaggcggaggaggatgagcagtgcctgtctgagtgggagcacgacaaacagcagctgctcacaggtctgtgccccagaggccagacgcctggtgcccaggggctctgccacagcctttgcatggatgtttgtgagacagggcttccagggcaagtggtttgtgtggaagaacccaggctgggacacaggcaagaggcagggaagggagggcagcaaggaagggggtgttcatccggtggtgacactgtgatctcagtcccactggggccaccaggagctgggctaggacgcttgcccagactcgtccatcggtcagtgagggaaccgaggtatgtatccacttgcactgtcagtcattgagggctacttccagagagttattcccctggcacttccagccaagcagagcagcctctctggttgtggcaaaagccattagagacaaagttcctggcaccagaagttggccagtgcccactgatgggaggcctgagggatttgccctttctgagcctcatcacagttgcctccatggacgacaccaaggcccagagaggtgtagacacattggcagccagcccatgagaagcagggtgggtaagggccagccgcttccaccagcctccctagagctcctcccatggccgcaggcggcccctcggcaggcgatgggctgcctccactccacggggcacactgggcattgaaggccgtcggcccgggtccatgggacccctctgaaggggcctctctctttggctgccttagaa

SEQ ID NO: 99147 - DNA, 850 bp, Homo Sapiens
tcttaacatacttgcagctaaaactaaatattgctgcttggggacctccttctagccttaaatttcagctcatcaccttcacctgccttggtcatggctctgctattctccttgatccttgccatttgcaccagacctggattcctagcgtctccatctggagtgcggctggtggggggcctccaccgctgtgaagggcgggtggaggtggaacagaaaggccagtggggcaccgtgtgtgatgacggctgggacattaaggacgtggctgtgttgtgccgggagctgggctgtggagctgccagcggaacccctagtggtattttgtatgagccaccagcagaaaaagagcaaaaggtcctcatccaatcagtcagttgcacaggaacagaagatacattggctcagtgtgagcaagaagaagtttatgattgttcacatgatgaagatgctggggcatcgtgtgagaacccagagagctctttctccccagtcccagagggtgtcaggctggctgacggccctgggcattgcaagggacgcgtggaagtgaaagcaccagaaccagtggtataccgtgtgccagacaggctggagcctccgggccgcaaaggtggtgtgccggcagctgggatgtgggagggctgtactgactcaaaaacgctgcaacaagcatgcctatggccgaaaacccatcttggctgagccagatgtcatgctcaggacgagaagcaacccttcaggattgcccttctgggccttgggggaagaacacctgcaaccatgatgaagacaccgtggttcgaatgtgaagattcctttgacttgagactattacgaggagacacct

SEQ ID NO: 99148 - DNA, 813 bp, Homo Sapiens
gggaacaccgtgcccactgccttgccgtttgggggtatgagtcctgccttcttgggcctggcgtgtagtgtcatatgtcctgctgcttctctggcgtcccttcaggaccacggggccccggtgctgggttaggcacgtcatacacctgggaagtcagagtcggcagtgaggcccggacagttctgggaagcgtgaggatggcctgttttgcaaagctgagagtcttttcacagatgattctggcactggtgggacggttcggggaattcatagacttgggcagtaggggcctggggcccctccgcccaactcctcatctgctcataaacggggcctggagtgggagggcggggtagagtgggcacctgataggtctcctctgagctggcaggagcttcttccaggcctctcaggaatggggggcacggcctgtctgcagcgacctccgtgaggatttggaggcggttggcaggggccaggccttgcctcccatggagcaaacacttccaccaaccctcgctttctggcacgtgttgctccagaatggtcaggatgtcccctctgctgaaagccagctcgtcagagcagtcagggcagttgtcataaagtgccctggccaggagtgccttgggcgcacagtccatgatgcctgttcccttcatgtcggtgatgtggagcagctcccctgagctctgcagctagtatctccagcttcagaggcagattgtgcaatgtcactgcatgcttctggctggttctcagaaactgaattctatggagctatctgacaacacatgggaaacgatcaaaaag

SEQ ID NO: 99149 - DNA, 648 bp, Homo Sapiens
agccagtggcgctgcgctgaatgcaactgcgcgcgcccgccgggtgagccagcgatctgagccaggcgggggcggcccgacctttcccgcccagcctgggtcagaggaagccgaaagcggcctcagcaagtggcttcgttccgggcctccagctatcagctcccgatctcgtgtttgagggtagcgaccccgatttctgtttgcatgcacagccagcagccctagcgccagatcctaaagctggatatcttttaactgggctaccagcccgggcctcaaagttttgagtgagggccgccaggctcaggccccagcgaagccccgagcgccatggccgacccgcaggctggctccgcggccggggactgggagatcgatgtcgagagcctggagctggaagaggacgtctgcgtgggcgccgcggtccacgccccccgggcccagcccgcacgccggcggacggggactgcgaggacgacgaagatgacgacggggtggacgaaagacgcggaagaagagggcgacggcgaggaggcaggcgcgtcccccggggatgcccgggacagccgggagcagcgtgtggggaccgcacccgaaggccgacgactcgcgcctcaggcctcacccgccggaccaggtccccgagag

SEQ ID NO: 99150 - DNA, 500 bp, Homo Sapiens
ccagccatggcctctggggcgggcggaagctggggtcgctccccaccgcagagcgcagtcccgacgccctgggtcaccttcctgcagcccctctcgtgggccgtcccacctgcgcccccgcagccaggccgcgtgaaggaagacctgctggaactgatgatgctgcagaacgcgcagatgcaccagctgctgctgagtcgcctggtggctggagcgctgcagccccggcctgcctcgccctgccctcaggtctacctggaggttccacaggaagagcctgaggaggaggaggaggagatggacgtgcgggagaaagggcctttggtgtttcaccaccactacttgccctatttgatgccctccccgggtgccctgctgccctgtgccagcgccccattcattcgccacagcaccatgaattgtcgagcccgtaagttgacaggacgtgcgccagggatacaggcatagtgcatggcgtgcgagggaaagggcagtgggag

SEQ ID NO: 99151 - DNA, 678 bp, Homo Sapiens
cttgggggatagaggtgaccgggccagtgccctggggctctggccatgaagtctcggcagaaaggaaagaagaagggcagcgcaaaggagcgggtttttgggtgcgacttgcaggagcacctgcagcactcaggccaggaggtgccccaggtgctaaagagctgtgcagaatttgtggaggagtatggagtggtggatgggatctaccgcctctcaggggtctcctccaacatccagaagcttcggcaggaatttgagtcagagcggaagccagacctgcgtcgggatgtttacctccaagacattcactgcgtctcctccctgtgcaaggcctatttcagagaactgccggatcccctgctcacttaccggctctatgacaagtttgctgaggctgtaggagtgcaattggaacctgagcgcttggtcaagatcctagaggtgcttcgggaactccctgtcccaaactacaggaccctggagttcctcatgaggcacttggtacacatggcctcattcagtgcccagaccaacatgcatgctcgcaacctggccatcgtgtgggctcccaacctgctgaggtctaaggacatagaggcctcaggcttcaatgggacagcggccttcatggaggtgcgggtacaatccatcgtcgtggagttcatcctcacacacgtg

SEQ ID NO: 99152 - DNA, 686 bp, Homo Sapiens
aggcgtccagctgcacttcccacttctgactctgtgcctgctgttccctgctgggaagaagaaaagccagtgatgctggcttgaggccatagtgggaggcccagtggatcctgagaagctagcccgggcagtgagtgtggatggcttggcaggtgagcctgctggagctggaggaccggcttcagtgtcccatctgcctggaggtcttcaaggagtccctaatgctacagtgcggccactcctactgcaagggctgcctggtttccctgtcctaccacctggacaccaaggtgcgctgccccatgtgctggcaggtggtggacggcagcagctccttgcccaacgtctccctggcctgggtgatcgaagccctgaggctccctggggacccggagcccaaggtctgcgtgcaccaccggaacccgctcagccttttctgcgagaaggaccaggagctcatctgtggcctctgcggtctgctgggctcccaccaacaccacccggtcacgcccgtctccaccatctgcagccgcatgaaggaggagctcgcagccctcttctctgagctgaagcaggagcagaagaaggtggatgagctcatcgccaaactggtgaacaaccggacccgaatcgtcaatgagtcggatgtcttcagctgggtgatccgccgcgagttccaggagctg

SEQ ID NO: 99153 - DNA, 639 bp, Homo Sapiens
gccatggcggcggcagcggcgacgagaacggcgagcgaggggtcgagcgcggccggggcctgaggaggctacgcgaccatggtggcacgcagcacagcctggatggcccaggggagggctcggtgcagcctctacccactgctggggggcccagtgtgaaggggaagcctgggaagaggctctcagctcctcgaggccccttcccgcggctggctgactgcgcccatttccactacgagaacgttgactttggccacattcagctcctgctgtctccagaccgtgaagggcccagcctctctggagagaatgagctggtgttcggggtgcaggtgacctgtcagggccgttcctggccggttctccggagttacgatgactttcgttccctggatgcccacctccaccggtgcatatttgaccggaggttctcctgccttccggagcttcccccgccccccgagggtgccagggctgcccagatgctggtgccactgctgctgcagtacctggagacactgtcaggactggtggacagtaacctcaactgcgggcctgtgctcacctggatggagctggacaatcacggccggcgactgctcctcagtgaggaggcgtcactcaatatcccttgcagtg

SEQ ID NO: 99154 - DNA, 1041 bp, Homo Sapiens
  misc_feature (813)..(813): n is a, c, g, or t
  misc_feature (1021)..(1021): n is a, c, g, or t
gggatcaaggattctggacaaagtactctccgaagaggaattgacataggcacgggggcatcttgcatctaccccttacttggagcaaccttgaatggctggtatttcctcgcaacagaagtggatgatatgtgtttcaactatgcaaagaaaaatgtggaacagaataacttatctgatctcataaaagtggtgaaagtgccacagaagacactcctgatggatgctcttaaagaagaatctgagataatctatgacttttgcatgtgcaaccctcccttttttgccaatcaattggaagccaagggagtaaactcacgaaatcctcgaagacctccgcctagttctgttaatacaggaggcatcacagagatcatggcagaaggaggtgaattagagtttgttaaaaggatcatccatgacagtctacaacttaaaaaaagattaagatggtatagctgcatgctgggaaagaaatgcagcctggcgcctctgaaggaggagcttcgcatacaaggggttcccaaagtaacgtacactgaattctgtcaaggtcggacaatgagatgggccttagcttggagtttttatgatgatgtcacagtaccatcaccaccaagtaagcgaagaaaattagagaaaccgagaaaacccataacattcgtggtgctggcgtccgtgatgaaggaattatccctcaaagcatcacctctgcgctcggagacggcggaaggcatagtcgttgtcacgacatggattgaaaaaattctcactgatttgaagggtcagcataaacgagttccctgtgggaanagaggaagtcagcctttttctaacggccatagaaaactcctgggattcattttaggagaaagaaaagagagcgtgtgagacagctgagagaagttcccccgagctcctgaggacgtcattcagggctttggaagagaaaaagcccacccccaagagtctggcaatagccaagaactggccaggggcccccccagaagaggacccccgngggccctgctcttgccggaa

SEQ ID NO: 99155 - DNA, 915 bp, Homo Sapiens
aaccaggagtcggttgggctgagaccctgagccccaactgtcagaaggagcctgaggctgaggtggaggctgggagtttggggctgtgggtggatcctctgaaggccatggaatcctccacggggcccaggatgcctttgctcaaatactgcagcgtggccacaagcctgaaggcccctggctgggacggtgctgctccaccttgggacctctccttcacctacccctttgccctccaagcaccctggctcaccgggcacaagccccttgcaaggcatgcctcttcttgcccatgtctccacgttgccgacccagcatggcaggggcctggctggctgggaagagctggagatgctgccaacacatgggtcctagcaagaagggaagcagatggtttttactaccgggcccaaataaaggccactcccgagctggagagacagggggtcctgcttgtggaattcgaggctccacttgtcgcaggcccaaagctgccagcccagcagcagagagtggtcttagaagaggatgtcattcctctctcaccatctgtaggatactcactgagaccagggataaggtgctggcactctgggagccaggccaacagcagtatggccctggcactgttcttttgggcttggagatgagagatccccagagagcatcaaaggaaaaagaaatcactgttcatttctggaatggcaaagctgctaaagtgccccctgtgtggggtccagtcgggtgtccctgaccatctggaagaaggggtgtggagaggttgccaaggtctttcaccagggagcacccatgccccttcactgggcccttgctgctctctgctaggggcaatcactgggcggcatctactatgagcttctcccgggtgctcccttcctgggcctcttctgcgct

SEQ ID NO: 99156 - DNA, 818 bp, Homo Sapiens
ggccttggcctgggccgcagccactcccaggcccagggaccagactctcaggcagccctgggccaggccccacctgctcatgggtcgtcgcccgcgttcctgcaggttctcgatgtgcggccacagtccagccggtacctcccgcccggcacgcgggtctgcgcctactggagtcagaagtctcgatgtctgtacccgggcaacgtggtccggggggcctccggtgacgaagatgaggacctggactcagtagtggtggaatttgacgatggggatacaggccacatcgccgtctccaacgtcaggctgctgccccctgacttcaagatccagtgcacagagccctctccagccctgctagtgtctagcagctgccggaggaccaagaaggtatccagtgaggcacccccgcctagtgaagccgccacccccagcctgtcccccaaagcacaggacggccccgaagctttgaagacacctgggaaaaaatccattagcaaaagacaaagctggtgccaaatcccccacgggggcctccgaccacttcctgggccgccgtggcagccccttgctgagctggtccgcggtggcgcagaccaagcggaaggcggtgaccatgcggccagcaaggggcccgggggtgctgcagaacctcttccagctcaacggcagcagcaaagaagctgcgggccctgcgaggccctgttccccgtgcacatgcgtgcgcacacccatatttggcaacggttccgcgccgactccttcagcagcctgccagctcctacgcgcccttcagtcggggggaccgggcgggctcc

SEQ ID NO: 99157 - DNA, 796 bp, Homo Sapiens
gtctttcactctctcatactttctcctctcccctctcccaagcacatctgagttgctgcctgttcttcacacttagctccaaacccatgaaaaattgccaagtataaaagcttctcaagaatgagatggattctagggtgtcttcacctgagaagcaagataaagagaatttcgtgggtgtcaacaataaacggcttggtgtatgtggctggatcctgttttccctctctttcctgttggtgatcattaccttccccatctccatatggatgtgcttgaagatcattaaggagtatgaacgtgctgttgtattccgtctgggacgcatccaagctgacaaagccaaggggccaggtttgatcctggtcctgccatgcatagatgtgtttgtcaaagttgacctccgaacagttacttgcaacattcctccacaagagatcctcaccagagactccgtaactactcaggtagatggagttgtctattacagaatctatagtgctgtctcagcagtggctaatgtcaacgatgtccatcaagcaacatttctgctggctcaaaccactctgagaaatgtcttagggacacagaccttgtcccagatcttagctggacgagaagagatcgcccatagcatccagactttacttgatgatgccaccgaactgtgggggatccgggtggcccgagtggaaaatcaaagatgttcggattcccgtgcagttgcagagatccatggcagcgaggctgagcgcacccgggaagcgagagccaaggtccttgcagtgaaaggaga

SEQ ID NO: 99158 - DNA, 841 bp, Homo Sapiens
ccggaacattacaataaagatccagtttatgtgtggagaacatgctagcaatgcgatgccggtcatctttggaaagtccagcgggcctgaatttctgcaggaagtgtacacagctgttacataccataataatggctgccaattctcttaaatgaacgtcttcaaactggatcctactgtctcccaggtgccttggaaaaattgccacccaactactccatgcattctgctgagaaagtcccattacagaatcctcccattaagtgggctgaaggacataagggagtatttaatattgaagtgcaagctgtttcttctgtacacacccaggacaaccacctggagaagatcttcaccctctgccactccctggagagccaggtgaccttccccatccgcgtgctggatcagaaaatcagcgagatggcgctggagcatgagctgaagctcagcatcatctgcctcaactcctcccgcctggagccgctcgtgctcttcctgcacctggtgctggacaagctcttccagctgtccgtgcagcccatggtcatcgctggccagacagccaacttctcccagtttgccttcgagtccgtggtggccatcgccaacagtctgcacaacagcaaggacctgagcaaggaccagcatgggaggaactgcctgctggcttcctacgtgcactacgtcttccgccttgccagaggtgcaaagggatgtgcccaagtcagggcgctcccattggcctcctagacctcggagctaccacacgtatggcgcacatcagttgctgctgtgagttcaaagctgctgcaggccgggtgatgagcagagtaaccca

SEQ ID NO: 99159 - DNA, 702 bp, Homo Sapiens
agaaggtctggttctgcgccactgcatctctaggccaagctcaaaagcactccttattccaacctcgaaagctcttctctggaccttgactccagatccattgctcaacatggggctcaaagaaacacctccaagctgaatcctgaagtgtagctccagattctcatgggaccctaatcccagacacaaatgagaccatcactttggcttcacataatatctctgagtctgtttcaaaaggagcctttagtaccacctggagcacaagttcaaaggaaaccatgaatgtggcttccagcggccactccagatctgatttgagcgtgaccatcactcaagcctcgtatgtgaccctgattcctggctccagcgatggtatcagcctgcactccagcacccatgggcccaactccaccatctctccaccctcatgcatgactctaatcctgggttccaatgagactctgagcctggactccagcctcctgttcagcgacacctccaccttgacgctgagcagtcagcaggatgatgccaaggacaacagcatccacactgtgcccctggaggagaatctggagagttggagtgagatggccagcattaaggtgggccagttcccgctgggattccccatctccaaccccgcaggcaaggacgccgtgaccttgcaaggcatccctgaggatggagtttcactct

SEQ ID NO: 99160 - DNA, 1129 bp, Homo Sapiens
  misc_feature (1081)..(1089): n is a, c, g, or t
gggtccggaattcccgggatagctcgtggccgggaccccgaggcgggagcgcgggctgggccgggctgggccacgcgcacgggctcggccgccgcccctgccggttgcataccctgtcctgagggcgcggcacggagtgcatgcgggccgcggccatgacgaccgccatcttggagcgcctgagcaccctgtcggtcagcgggcagcagctgcgccgcctgcccaagatcctggaggatgggcttcccaagatgccttgcactgtcccagaaacggatgtgccccagctcttccgggagccttacatccgcaccggctaccgccccacggggcacgagtggcgctactacttcttcagcctctttcagaaacacaacgaggtggtcaacgtctggacccatttactggcagccctggccgtcctcttgcgattctgggcctttgccgaggctgaggccttgccatgggcgtctacccactccctgcctctgctcctcttcatcctgtcgtcaatcacttacctcacctgcagccttctggcccacctgctgcagtccaagtcagagctctcccactacactttctactttgtggactatgttggcgtgagcgtttaccaatatggcagtgctttggctcatttcttctacagctctgaccaggcctggtatgaccggttctggcttttcttcttgccagcagctgccttctgtggctggttatcttgtgctggctgttgctatgccaaatatcgttaccggaggccttatccagtcatgaggaagatctgtcaagtggtgccagcaggtctggcttttatcctagacatcagccctgtggcacaccgtggtggcgctctgtcacctggctggctgccaggagcaagcagcctggtaccacacccctcagatcctcttcttcctgggtagcgcttatttcttctcctgccccgtggctgagaagtactttccggggtccctgtggacatcggggcccatgggcaatcaaatcttccctggatttcctgtccatctggaagcttcctccaccgtgggaggcatcctcctggagaaaacaagannnnnnnnnagggaaaattttttccttgggaggggccatgggacccccc

SEQ ID NO: 99161 - DNA, 755 bp, Homo Sapiens
ctgggccgcaggggcgcgcagcgcggggagctgccagaaccaattcaggcattggaaaccctaattgttgatctcgtgagctgcgggaaggagcactccctggctgtgtgccacaaaggaagggtcttcgcatggggagctggttctgaagggcagctggggattggagaattcaaggaaataagtttcacacctaagaaaataatgactctgaatgatataaaaataatacaagtttcctgtggacactaccactccctggcattatcaaaagatagccaagtgttttcgtggggaaagaacagccatgggcagctgggcttggggaaggagttcccctcccaagccagcccgcagagggtgaggtccctggaggggatcccactggctcaggtggctgccggaggggctcacagctttgccctgtctctctgtgggacttcgtttggctggggaagtaacagtgccgggcagctggccctcagtgggcgtaatgtcccagtgcaaagcaacaagcctctctcagtcggtgcactgaagaatctaggtgtggtttatatcagctgtggtgatgcacacactgcggtgcttacccaggacgggaaagtgttcacatttggagacaatcgctctggacagctgggatacagccccactcctgagaagagaggtccacaacttgtggaaagaattgatggcctagtttcgcagatagatagtggaagttatcacaccctggcatatgtgcacaccag

SEQ ID NO: 99162 - DNA, 972 bp, Homo Sapiens
ctggccatgaccaaagcccctgctggcaccctggcccagctctgagtcctgggaccctcggtcctctctcctgggccatggccaactcaggcctccagctcctgggctacttcttggccctgggtggctgggtgggcatcattgctagcacagccctgccacagtggaagcagtcttcctacgcaggcgacgccatcatcactgccgtgggcctctatgaagggctctggatgtcctgcgcctcccagagcactgggcaagtgcagtgcaagctctacgactcgctgctcgccctggacggtcacatccaatcagcgcgggccctgatggtggtggccgtgctcctgggcttcgtggccatggtcctcagcgtagttggcatgaagtgtacgcgggtgggagacagcaaccccattgccaagggccgtgttgccatcgccgggggagccctcttcatcctggcaggcctctgcactttgactgctgtctcgtggtatgccaccctggtgacccaggagttcttcaacccaagcacacctgtcaatgccaggtatgaatttggcccagccctgttcgtgggctgggcctcagctggcctggcgtgctgggcggctccttcctctgctgcacatgcccggagccagagagacccaacagcagcccacagccctatcggctggacctctgctgctgcccgagagtacgtctgagctctgctgcctggcaggcccccaacccagtggccccctttgcccagcatccagccagtctcgcagcacctgggcaggggccactggggcatatggatgggcattggtgctctgagcagttgtctctactaaagcacccaccctgaatctgagaaccagatcttcagagagacccagaggcggacccgcccccaggttacccgatgcggtccggccggcttgtttggcgccttgtgggcaccgttgtcccctgaaaaggcca

SEQ ID NO: 99163 - DNA, 1026 bp, Homo Sapiens
ccggaattcccgggatgaaactctgtatggattatttcactataatcctatgatgcttggacttgaatcgcttccagatcccacagacacctgggaaattatagagaccattggtaaaggcacctatggcaaagtctacaaggtaactaacaagagagatgggagcctggctgcagtgaaaattctggatccagtcagtgatatggatgaagaaattgaggcagaatacaacattttgcagttccttcctaatcatcccaatgttgtaaagttttatgggatgttttacaaagcggatcactgtgtagggggacagctgtggctggtcctggagctgtgtaatgggggctcagtcactgagcttgtcaaaggtctactcagatgtggccagcggttggatgaagcaatgatctcatacatcttgtacggggccctcttgggccttcagcatttgcacaacaaccgaatcatccaccgtgatgtgaaggggaataacattcttctgacaacagaaggaggagttaagctcgttgactttggtgtttcagctcaactcaccagtacacgtctgcggagaaacacatctgttggcaccccgttctggatggcccctgaggtcattgcctgtgagcagcagtatgactcttcctatgacgctcgctgtgacgtctggtccttgggggacacagctattgaactgggggatggagaccctcccctctttgacatgcatcctgtgaaaacactctttaagattccaagaaatcctccccctactttacttcatccagaaaaaggtgtgaaaaaattcaccccctttatttcccagggtcttattaagggattttgaagggggaactttccgtccaacaatctcctttgacaccccctttttttaaaggagtacctgggaaaaagtctgtgttttggcaaaaaagcttgggccaagggtcccccccgaaccgaaggctttcaaaatcctggttggcaaaaacccggccttgggaaggatggcttcccaaaaac

SEQ ID NO: 99164 - DNA, 826 bp, Homo Sapiens
  misc_feature (100)..(108): n is a, c, g, or t
aaaaatgtgctgcgttctgaaaaataactccttagcttggtctgattgttttcagaccttaaaatataaacttgtttcacaagctttaatccatgtggannnnnnnnncttagagaaccacaaaacataaaaggagcaagtcggactgaatacctgtttccatagtgcccacagggtattcctcacattttctccatagaagatctctttttcccaaggctagaacgacttccaccatgatgaatttgctttttaggtcttaattatttcacttctttttagaaacttaggaagaagtggataatcctgaggtcacacaatctgtcctcccagaaatgaacaaaagtcatcaccttttctgcttgctacacaggcaacgattcccccatcagctgcccggaccctttggcctggcttggtgtgcaggcctgtctgtttgcttaaagtcagtgggttctggtgcagggagtgagaagtgggggaagtgaaagggaaagcatccgtgagaaagcggccacggttttccctccttgtgtgcccatggggcacaagcttcatggtctttttcagtcatcccagtttgtacagacttagcttctgaactctaagaatgccaaagggaccgacgagactccccatcacagcgagctctgtccttacatgtattttgatgtgcatcagccggaggagaacactggttggccctgctccgctgagtgtctgtgaaactaccctctagtttccctcccatatccagaacaaaaatgatacttggacattcctttccaaaaaagtcaggcctaaagaagttactgccactcctatg

SEQ ID NO: 99165 - DNA, 632 bp, Homo Sapiens
  misc_feature (412)..(530): n is a, c, g, or t
gtcttcttgtgctgggagctcagcagcgatcataacacagcaaatcgctgggttggaaaccttggcacggtgtttcctttgattctagacttcaggggctgtggctgtggttgcaaaacctccactgatgatctgatccagagatctaaggccttgaggatagaacatccctcatcctagcaggaaataatgaaaccttctaaccttaaagccctttggaagaaatgaatataaacatgtgagtctctagcgttgctgcgatccttcatattttacggcacgcattctcatttaatcctcaataacatgaaggagcaattggtcacatcagccctaagttataggcaagaaaggcacttgtcccagatcttgtggtgaggaccagagcttaagctagacgcagtggctcatnnnnnnnnnnnnnnnnnnnnnnnnnnnnnnnnnnnnnnnnnnnnnnnnnnnnnnnnnnnnnnnnnnnnnnnnnnnnnnnnnnnnnnnnnnnnnnnnnnnnnnnnnnnnnnnnnnnnnnnttagccaggtgtgctggcacacacctgtagtcccagccactcgtgaggatgagatgcaagtatcactgagcccgggaggtaaagctggggtgagccatgata

SEQ ID NO: 99166 - DNA, 114 bp, Homo Sapiens
cagcacttgcggggggcaggggctggggccgaccgggaggccggtgccaaggatgggggccgcccggctgccccgcgcgtgaggaggccgaggggcgcgccaccccggcccggg

SEQ ID NO: 99167 - DNA, 1604 bp, Homo Sapiens
ggaacctcgaaagtggtagcagggcgcgagagaaaggcgggaaatgtaaggggaacggaggccggtaagggaggagggtgcccaggagggcgggaggggagtctgaagagggtgggcggggggaagtccaagcggcggagggcggagagaagatgaccggcggggtgaccagtgatgtgactgaggtgtcgtggtgagtggacggtggggagatacgctgaggccagcatactgggacagtttgtattcagatgtgtgcttagtatgtgctaggcaaaatgctgtttgactactgttaggtacgatatttgctatttcaagtagtgggatttgtagtcagaactagttccttctgagcgtaccactcatcggggacgaactctgtacacgagaacagaaggaaaatctttcagcacattaaaagtcatgctatgaacataggcctcagaaaggaagaaaggtataaaggaatgagagaggacataagaaaagaaagacagaaccctgaagtccacgttgacttgcttaacatttagaattcaatacaatccattacatttgatgattcaagtacgctaagatttttgcagggacatattttgtcgctttagtgcaaaatatacttgtaatttttaggcataatccactcaaatcacaagtaagaaactcaccgtgactaaacaggtgaattataatatggagagtttattttttctctaatatggtaatcagcacaccagcaagaacattccctaaacctattaataagaatgaggtttgtaactgaatgtaaattaaattgctccattaatatgctaaaatatacttttaaaaaaccacacacattgactttcctatgctaatttaatttgggcatacatgcagcttaaatttcagaactgatcatctaatcaaatagtagtccaaaaaaatcaactggcagaatgtttttttgaatgtctggattgtcaaattttctgatctattctttataaagggaaaacccttgaatcttttgatttagttcttaccatttctgtgaaatgagggcctcttatgcaatgagattattcaaaagcccttgtattcatttggtaagagagcaaattttaataattaaacttattctttcttttgttttttacaaaaatgctctattgataacaagttatttatgttgtaaaagaagttaattagtaatttagaggtgattcattaaattaatagattattattattttctacaatagttattctgaattactggcttactgaatattcttacctaacaactatttaaagaataatttggaaaattttaaactaatacttattatcaagtaataaagtcatcaaaaattaccagaaataattctttaagaaatgtactttgcatgtaaagtatatgtatttagtagtcctattttgcagtagatgtcattatatttcaataagcttctcaaaagagaaaacttctacccattacagttttttacacagggtggcttgacaaatattaacttggttccccagcaataaactgagtcttccagggtcaagtcattgccttctgaactcaaatttatccaacaaaataacatttt

SEQ ID NO: 99168 - DNA, 644 bp, Homo Sapiens
gacggcctatgggatgcctggggcccatggagtgaatgctcacgcacctgcgggggtggggccgccaactctctgaggcgctgcctgagcagcaagagctgtgaaggaagaaatatccgatacagaacatgcagtaatgtggactgcccaccagaagcaggtgatttccgagctcagcaatgctcagctcataatgatgtcaagcaccatggccagttttatgaatggcttcctgtgtctaatgaccctgacaacccatgttcactcaagtgccaagccaaaggaacaaccctggttgttgaactagcacctaaggtcttagatggtacgcgttgctatacagaatctttggatatgtgcatcagtggtttatgccaagtaagtgctgatttgttctcattcaacttgtccagagggtttcaatgtctttgtgtaaatggtttacatagtctcactctctgaatcactcatctttacactttttagagtttgtaaatggtgaaagatttgaaaattaaggtatgatttcagtgaaaagtaccaagtgttgtattgtgcgaaggaaaagtagactagagttatttttctttccttgagtgtcacttgaatataaaagaataaaaatttttgaatagtgttaaaaa

SEQ ID NO: 99169 - DNA, 757 bp, Homo Sapiens
  misc_feature (234)..(274): n is a, c, g, or t
cgatgaattctgcacgccggcgtgggggatctgggggcggccccggagggcctggcaggggcctcggccgccgccctcaccgcgcacttgggctcggttcacccgcacgcctctttccaagcggcggccagatccccgcttcgacccaccccagtggtggcgccctccgaagtcccggctggcttcccgcagcggctgtctccgctctcagccgcctaccaccaccatcacccnnnnnnnnnnnnnnnnnnnnnnnnnnnnnnnnnnnnnnnnnctccgcctccgccccgggctggcgccctgcagcccccggcctcggggacgcgagtggttccgaacccccaacacagtggctctgccccggacccctccagcaaagacctcaaatttggaattgaccgcattttatctgcagaatttgacccaaaagtcaaagaaggcaacacgctgagagatctcacttccctgctaaccggtgggcgggcccgccggggtgcacctctcaagcctgcagcccctcggccggccagttcttcccatctctagatcccattaacgaggggttctgcaatccctgaatccccttaaacctcgaaacccaagaaaattcagttccggcattccagttccaaaaaaacgttttcccgggtcccctatggggggggcttcccgaaagggaaccctggccccccaaagggtacaaaaaggaaaccgttctttgtggttcccgccccttgttgttttctccaacccgtgc

SEQ ID NO: 99170 - DNA, 853 bp, Homo Sapiens
gcagcggcatggcttccctctggctcctctcctgcttctcccttgtgggggccgcctttggctgcggggtccccgccatccaccctgtgctcagcggcctgtccaggatcgtgaatggggaggacgccgtccccggctcctggccctggcaggtgtccctgcaggacaaaaccggcttccacttctgcgggggctccctcatcagcgaggactgggtggtcaccgctgcccactgcggggtcaggacctccgacgtggtcgtggctggggagtttgaccagggctctgacgaggagaacatccaggtcctgaagatcgccaaggtcttcaagaaccccaagttcagcattctgaccgtgaacaatgacatcaccctgctgaagctggccacacctgcccgcttctcccagacagtgtccgccgtgtgcctgcccagcgccgacgacgacttccccgcggggacactgtgtgccaccacaggctggggcaagaccaagtacaacgccaacaagacccctgacaagctgcagcaggcagccctgcccctcctgtccaatgccgaatgcaagaagtcctggggcaggaggatcaccgacgtgatgatctgtgccggggccagtggcgtctcctcctgcatgggtgactctggaggccccctggtctgccagaaggacggagcctggaccctggtgggcattgtgtcctggggcagccgcacctgctctaccacacgcccgctgtgtacgcccgtgtcaccaagctcatacctgggtgcagaagatcctggccgccaactgagcccgcagctcctgccacccctgcttaagatttcccattaaatgcatctgtttag

SEQ ID NO: 99171 - DNA, 1452 bp, Homo Sapiens
  misc_feature (519)..(519): n is a, c, g, or t
  misc_feature (662)..(671): n is a, c, g, or t
  misc_feature (724)..(785): n is a, c, g, or t
  misc_feature (901)..(946): n is a, c, g, or t
aaggggcgggccgaagaaatggccaccgaggggagagagggggagagggtgccgcgcagatgggtgccggaagggcgggccaagaccgtgggcgccaagcgctgagtggggacgcccctgctggggtgtagacagcaactcgcgggtaaagcccgctgtcgcccttcgcgggggaaagcgctgcaggggccacgtccacgggaggcgcgcccttgcgcttgtggggcgcttccggaggcacacccttcctgtggcgcacctcgtaggggaggcccctcggtgcgctgaactacgcgcgccccttggcggcgccttcgcggggaatttctctgggggggccccagcgcggctggtgccgcccgcagggagcccgagtgcccgggcctatttgggcctcttgtgcgccactgcccgctctctgggattttctgccacaaggaggggttcaaggggcgcacgttggccccgccacggagggcgttccaaccctgcacagctgccaacccacagcacacacgnggagcaagagtgggaaagacccgagatgcccgattcacgggcggatagaaattggcgggggggcaaggaacttggggtgtctcccacgactggctgtcgtgcgtattttgctgtttgtgcacctgcccccccggtaaccatcnnnnnnnnnntttaagtcttggttttctgagccgcactaatacagcctaaaggaaggggtatnnnnnnnnnnnnnnnnnnnnnnnnnnnnnnnnnnnnnnnnnnnnnnnnnnnnnnnnnnnnnngggaatagatcaattgacatgaaatttgggggttcctaatttctctatgtaattctgcaagtctgctgtcaatcctccggacttttccatccaaatctcccgggaccacttcctannnnnnnnnnnnnnnnnnnnnnnnnnnnnnnnnnnnnnnnnnnnnntccaaccgccagacttcccacactccccgcatcagtgcacggcccccgaggactccacatttcttggggggtccccaggagacgggcaaagatgatccctaggtgtgctccggtgggggggtccccaagatcttccttccaggagcacaccagggagtcaggctactcgtgggggcatgtctgctcagctaccgccatctccaatgtggccaaactccttcctcactctggctgggccaacacacagtaagtaaggtgtatcgggaatgggtggggtatggggagcatcgtggctcacgctgcgggggccgtggggacaggcgccaaggaggccagcctcacaagggcatctctgtcatggtggaaagatggaattaggcctgggacacaccccgcccaccctacgggtgtatcccaaatgccgccggccgcacactcaggccgcaccatctgagccccctcctctgagaggcagggcacagacaggccgaggggcagtggagatg

SEQ ID NO: 99172 - DNA, 883 bp, Homo Sapiens
catgatgctccggctgctcagttccctcctccttgtggccgttgcctcaggctatggcccaccttcctctcgcccttccagccgcgttgtcaatggtgaggatgcggtcccctacagctggccctggcaggtttccctgcagtatgagaaaagtggaagcttctaccacacgtgtggcggtagcctcatcgcccccgactgggttgtgactgccggccactgcatctcgagctcctggacctaccaggtggtgttgggcgagtacgaccgtgctgtgaaggagggccccgagcaggtgatccccatcaactctggggacctctttgtgcatccactctggaaccgctcgtgtgtggcctgtggcaacgacatcgccctcatcaagctctcacgcagcgcccagctgggagacgccgtccagctcgcctcactccctcccgctggtgacatccttcccaacgagacaccctgctacatcaccggctggggccgtctctataccaacgggccactcccagacaagctgcaggaggccctgctgcccgtggtggactatgaacactgctccaggtggaactggtggggttcctccgtgaagaagaccatggtgtgtgctggaggggacatccgctccggctgcaacggtgactctggaggacccctcaactgccccacagaggatggtggctggcaggtccatggcgtgaccagctttgtttctgcctttggctgcaacacccgcaggaagcccacggtgttcactccgagtctcccgcttcatcgactggattgaggagaccatagcaagccactagaaacaaggcccagctggcaagtgcttgatcgatcccacatcctgaataaagaataaagatctctcaga

SEQ ID NO: 99173 - DNA, 770 bp, Homo Sapiens
cggctctgaggaaaacgggcgttcgcctgcggttggtccgactgttagcaacatgagcggctggatggggtcaagaggaccactcccctccaaacccacagcatcattatttctgaccaagtcccgagcgaccaggacgcacaccagtacataaggctccgcgaccaaagcgaggcgacacaggtgatggcggagccgggtgagggaggctcggagactgtcgcgctcccgcctccaccgccttcagaggaggggggcgtaccccaggatgccgcgggccgtggcggtactccccagatccgagttgttgggggtcgcggtcatgtggcgatcaaagccgggcaggaagagggccagcctcccgccgaaggcctggcagccgcttctgtggtgatggcagccgaccgcagcctgaaaaagggcgttcagggtggagagaaggccctagaaatctgtggcgcccagagatccgcgtctgagctgacggcgggggcggaggctgaggcggaggacggtgaagacaggaaagtgcgccaccgtctcagcagccgtggctgagagggagagcgctgaggtggtggtgaaggaaggcctggcggagaaggacgtaatggacgagcagatggcaggtacaaggagcagccgccagaaggtgacgcaaataggaagtggccggaggaggatagatggcacggaggaggcgagggaggaaagaagggccctggcctttgcatgaggctctccgcatggaccctctggaggccatccaa

SEQ ID NO: 99174 - DNA, 563 bp, Homo Sapiens
tgatgccgaggtcgcccagctgtcccatggattctcaccagaactgtttccctcatgttgggtggtctgagtgggagtgtgctcagcttctcctgatttgcttgtctgccgtgtcacatgtctctgcgtgatgtgtggccggggagatcctggtgccggccagtgcgggagtgcgggcagagcaccttcgttgccggctgactttggctctcggatctgagcatcagctcttcctgctcctggtcaccccttcctccccacgcttgaaccccccaggacccctgcagaggccacggagcgtgacgggtggggatgctgggctgccaccctggccaccgagggtccccacctgagcccagcactgccctgcagatcaccttccaggtgaaggtcacggccacagagtgcatccaggagcagcgaatgtcatccgggcgctgggcttcacggacatagtgaccgtgcaggtccttccccagtgtgagtgccggtgccgggaccagagcagagaccggagctctgccatggcaagggcttcttggagtgcggatctgcaggtgtga

SEQ ID NO: 99175 - DNA, 826 bp, Homo Sapiens
  misc_feature (721)..(721): n is a, c, g, or t
  misc_feature (742)..(742): n is a, c, g, or t
tgagccactgcgcctggcccccctccttggacttttaggatgttgacttcccttcccatccagcctgttctgtctgagcacttacccacccagctagactgacttggtaactggatctaagaaggaggcgatattgctgttttcgaggtcgatgggccagaggcctgggctaaggcacttagacaagcccctgccctgcccacctggtcaccaccattcacagtgatcactcatctgtggcaagaggtgggcagcggaggaagctgactagagatacccgatgtataactttttggaggtttttacaaaagcagatacagtggccagtggcatcaaagaaatggaatgagaacttgagcccaggcacccggagcaggtattttctgagccctcagctccctctacaggcctttcctgaccacagccagtccatctggggagccatgtctcagctctggcttgggtacagcagggagggctccagaggcccctgctgagcagggttgatcctaacactattcctctgtggcctatattgtcttttctcttttacctgttaatcatgttctcttttgcagcaagcatattcctgaattttcgctccttctagaactcagtgagggtcttacagagaataccagagattgctgtacgtctcaggggatcagatcactacagagtattctgcagtggcttcctggacaccaagtctctcatctangggagtcgtccacatcatcanatcgttctggcagaatgtcagctgatcgacacggagcgagcgcgcacgagcagatcaacaccgcaacggaactctcagaacaag

SEQ ID NO: 99176 - DNA, 835 bp, Homo Sapiens
atagtcctcaggaaagctatacggagctgtcgtctgccctgttggctcttgcctgggcaggtggacggaaccctgtctgctcatcccagaggtattgcttccgagctgcctgtgtcgctcttccacggagtatgctagggacgcgagtctgccttgccgcgttccacacaggagtggttccacggctgccacgggcgtcttgtggacccagctgtgccagaggtgagtgctgctccaggtaattggctcgcgagagtccgaagcacaggcatttgccgagagcatcagtattcctgtcggctgatgagtcttcatgttgatcgtgcatctgtgctgtcactcttggagctgattgacataccccatcctgtcctgtgctgtcccactccgggcgatggggactccaagagagaaataggtgtcagagcatcccgcatctcagtccagatgctcaatcatggattccagtatcagacttcttgatcgtagagctcgtatccgtgcatcagctgtggccccggggatatgggggaggcgcgcggaacccctcgggggacaggtggctgagcccacagcaggtgaaccactgtctggcccaggggatggccagctgctctgcagggcccatgggtgtccatctgcagccctgcgggagccgtgagcctaacctgccttctctggatgcccccatgccagggctgggctgggacgctctgccacgctgtgtccctggggtgtgggcctggcctggtgggggaagccacaaactggtgtgtgccccggttcagggcctgtcttgaatccccaggctcagtggtgatgtccgcccctcatg

SEQ ID NO: 99177 - DNA, 515 bp, Homo Sapiens
attcaagaagctaagcctgatctcctgtaaaaacagcagtttccctgatggacaccagcggcaatgggaagctggagtttgatgaattcaaagtgttctgggacaagctgaagcagtggattaaccttttccttcggtttgatgctgacaagtccggcaccatgtctacctatgaactacggactgcactgaaagctgcaggctttcagctgagcagccacctcctgcagctgattgtgctcaggtatgcggatgaggagctccagctggacttcgatgacttcctcaactgcctggtccggctggagaatgcgagccttcatcacatttgacaatgaacatctgaggctgccttgtagagatgcagcctgcaccagctgaatcttggcttctggaccttgaccttcagaacttctcttggtgtggaaccattacgcccagggttcactcccctctcatcgtccggccttctcccttcatcttgatctgggaagaatgaaatgaactcagctagc

SEQ ID NO: 99178 - DNA, 747 bp, Homo Sapiens
ggcccttgccgaagtagtagcacttccgttggaaagtgatccacttttcagggcacgtgttgcacacaaagccgctggacacctgcaactccatccttagctttgtcacctcctcccggagtcttttcccagcaaatctgaagcttcgttcctctcgttcaattcctgagatttcaatctctgctgttcagctcgaagttcctccagttcctgtgaaatctgcgtggactgggatttctgcgccatctggtcaccgtggtggctttccaagttcttggaaacttgagagacgttccgggcagccctctcgttccagctgttttagactctgtgtggtgtcccagtgccagtgaaggagggaacacagaagggccccatgagttggggggaccacatggagctgggggtgtcctcacgccacaggagaagcagagtcagcagcccagcccacagagcggcggtcaccagccccagcagcacgatctgagtcccgcgcctgcaacaccgcctcctgggaagctcctcgatctctgaatattgaccttcctccatggcggtcctgcttggattctcccgatgatggagcactcactccctgacaacgcagtccactcagcgggcacaatcacagctctggtagcgtggttagcagggagacacagctggtgtggagagatagcagcctgagatcagaagtggggcactccagagcccatcacacttgagctaacacagcaggtgcaccca

SEQ ID NO: 99179 - DNA, 750 bp, Homo Sapiens
gtcagcttgccacacacagcccataccacctcctggtaggtcctcgtcattgctggcctgggagcagtaggccaggatgacaaggccactgatgatgaaaaccagcaatacccatctcgcagtgcgatgcctgctcgccacgccccccgcagtgtctgaaggctgctgggaagttgagtaaccctgcacccaggcacgcgttgtacgacgatgatagatggccaccaagtgtggaacgtggtgcctctgtccagacccccaggtagaggcttcccactcactcttgggggctgtgtccacacagggacatctgcagacacgccgagcccgctccccggcatccgtgctcatagtcccactcgctgtagtcattgttgatgctgacctgggccatggccccgagagccttcttcctgcaaggtcatgtgggttctgccttacaaccacatgcctcagggagactgagcaacacccacctgtttggggctgttagcattaggactcttctcaacctgctctttctccctgatgggctgtgccagaggcggttgctccttctccccaaaggtctgggatctgattctcctcacttccctttctggacccaatttcttctttctcaagactcatgcctaaaatttgctgtcagcagagggaagagctttgggctacttctctgctggcttcagcagagcctggagcgaaactagagcggctctcacgcttactcatgaaatgagcttgatcccg

SEQ ID NO: 99180 - DNA, 1397 bp, Homo Sapiens
  misc_feature (115)..(115): n is a, c, g, or t
  misc_feature (145)..(145): n is a, c, g, or t
  misc_feature (321)..(321): n is a, c, g, or t
  misc_feature (326)..(326): n is a, c, g, or t
gcttctggttgcagccagtctatgtctaagttcgggatactggcggagggatggggtgttgtgtccaccatatttgggttctaggtattcccctaacgcctcccttgtctcgttntattctggatcgtcgactactcacctagtncttttcctcagggcgttggtgtgagttgttggcgttcggtcgggacgacagcgggcagcgggcggcacgcgcagcgtcacgcgatcgtgggtcgtgacacgcgcgatcggcagagggccgtcggggctccacccggcggtgacgcgacgcgcgtgcgatcacgacccgtctcctgncaaanaacagattcgcgcgcgtcgcgtcagggcgcgcgtgagctggcgtacagggtattgttggcggcagccgcacatcacctctcgtcgcgtgtgagctgacaggaccgcggccgcgcatcatcaccgctcaccacaccgcgacgaggctcgtcgtgcgcattccgtccgattgtggtcgtcattcggcgtgaggcgcaggtcttcgccgtgcatgagtactcggtgccgccttgaggcctcaggcggacttgctcgggctttgaagcacgcgctgctcccggaccggtggcggcgcgggagttcgctttctcggtaggttttggggctttcggacctcaccttcttcgttttgttggacgcggccgccgcgtcgatcaggcgtgccctccgtgcacatcattgctcgttgctggcctcccgcccgcgtgtgttgctgagggctctgaacgccagcttaactccacttaaacttggtgatgaggcaacaatctcctgttctcgaagagtcttctcttcatcacttatagcctcaaactgcaattggctatcctttaagaaatcctgaattttatccttgggtaaaatactaaatctaaatcgaaggagatccatttcttgttgaatgaaccagcgtctaagttcttcagactggcaataagcaagccgcaaaataaaatgagaaatatgatctcttcttcgtggttcatattcatcttctaagttttctctgtaggaaaacttgagcttccgaagctcactctccaacttactctggtattgttcagttcctttcacatagctcactccaagattttcaactgattttaacaatttaactctatcaatagccaagttttcaaattctattaaagatatgttttcagaaggtggctgcaagtaaaactgaaggcaatgagggtaggaagcattcctctggtcacctgccaacctcagcttcctccactttcttccagaaaactccatcttggtcacctgcaagaattcaaactcgggaaaacacaaacggtggcagccactgttcccgggtggcgggagagttcatatcccgagaa

SEQ ID NO: 99181 - DNA, 1257 bp, Homo Sapiens
  misc_feature (1151)..(1197): n is a, c, g, or t
ctctttgatgtattactcatattaccaaggaataaccggtgggcacagggtcaggtgctgaagggacattgtgagaagtgacctagaagccaagaggtgagccctctgtcacgcccacataaggggccgctggagggctccttgatcaagtggtaacgccagtgtctgggaatgcacccgttaattagcagaccgcgaaagggagtctcctttccttggaagagttggggaacactctgctccaccagcttcttgtggaaggctggatattatccaggcctgcgcgcagtcatccggaggcttaaacccttccctgtggtgctgtgcttcaatggtcccactccttgtccactttcatgctcctcccgtactcctggttcctctttgaagagcgcagtagatagcggtagaagaaatagtgaaagtcttaaagtcttcgatctttcttacaagtgcagagaagaaaacgctgacatatgctgccttccctctctgcttcggctacctaaaagggaagggccgcctatcctgtaatcacatgacttgcttcaccttgtcaatcacttagaagattcaccctccttaccctgcccccttgtcttgtatgcaataaatatcagtgaccccagccgttcagggccactaccggtctccgcgtcttgatggtagtggtcccctgggcccagctgttttccctttatctctttgtcttgtgtctttatttattacaatctctcgtctccgcacacggggagaacacccactaagcccccgtagggctggaccctacacaggaagtccccttcattgctgtgtggacgtggtagataaagtgttctcaagctggaaagatttaacagattggcccctcggggacctggacattgaatattttactgatggaagcagtttcatactaaggggagtctgccgagctgggtatgccgcggtgactttggactcagcagtagaggtactgtctgtgtctgcagaaacttctgcttagaaagcagagctaatagctctgacaagagctctctggctaggaaaagagcagaaggcaagtatttacacagattccaaatatgcttctgccactttgcatgttcatgaggctgtttacaaagaataaaagacttttaacggctggnnnnnnnnnnnnnnnnnnnnnnnnnnnnnnnnnnnnnnnnnnnnnnngaccgcgtatgcggccgcaagcttattccctttagttgagggttaattttagcttggcac

SEQ ID NO: 99182 - DNA, 592 bp, Homo Sapiens
ccgggtgcctggccagaggggctgagacccgtggttcctccaggatgaagacatttgaggaattccccatgaccccaacgacctacaaaggctctgtggacaaccagacagacagtgggatggtgctggcctcggaggagtttgagcagatagagagcaggcatagacaagaaagcggcttcaggtagctgaagcagagagagagaaggcagcatacgtcagcattttcttctctgcacttataagaaagatcaaagactttaagactttcgctatttcttctactgctatctactacaaacttcaaagaggaaccaggaggacaagaagagcatgaaagtggacaagaagtgtgaccactgaagcaccacagaaaggggttaggcctccggatgactgcgggcaggcctgggataatatccagcctcccacaagaagctggtggagcagagtgttccctgactcctccaaggaaagggagacgccctttcatggtctgctgagtaacatgtgccttcccagacactggcgttactgctagaccaaagagccctctagctgcccttatgccagcgtggcagatggctcacct

SEQ ID NO: 99183 - DNA, 942 bp, Homo Sapiens
ctgcctgtaggcttcacgtcttcccctacaacacgccatgcttgccatggctggaagaggggctccagaaacttggaaacctgggcctgtagctggcatatggaaaagaggcctggaaaagcaccactcctgtccatgaagcccccagatggaaccaggtcctgttcagaaaccccatctgtgcctttggagagactgccccgagcacacaggcccagcaaccgccatctatggcccccaggacctaatcccttctacatagggttcagtgcatgtgagtatacaccgggcttgattcctgcctagtccctgccagataccccatgcccacctggtgaagagaatgaggccacacaaacacacccaggccatcgtggtgatggagtgcctggggtcctacttgcccacccttccttgctggttcagagccagctgtctgaccacattcctaccctgagatgagactttggggacattgtccaccagggtcactgaccccttttaaaattccagaaacagagggccagctggtcccctaagaagtttggcacatgggataagccaaggcttgccttcaggaacaggttttccaccacgtcgctgcccaaggcccagggcatccccaagttcatgtggcacctgcctgccatgtccacaacccatgccgacccctcctagagccactggaatgcttgttcctgggcatgtgataaacccagacagcttcagccttgcaggacaactatgcacatctggccagcagtagccggagggccatggcacagacgtcggcgggtgaaccagaatgctgtgacaatatcaggcaccactgcatactatacaagtgccttacaatgcagccggacgacaggtgacactcaaattcactacctgctcagacaccctggctgtcagaccagtaaaatccacgctgcttccacc

SEQ ID NO: 99184 - DNA, 994 bp, Homo Sapiens
  misc_feature (626)..(663): n is a, c, g, or t
  misc_feature (829)..(829): n is a, c, g, or t
  misc_feature (876)..(876): n is a, c, g, or t
  misc_feature (953)..(953): n is a, c, g, or t
ctcgagttggcatgtgcaggtcatggcaggagccagagctttgacccagacccatgagttgcgcaggaactgaggggcgaactctagcgactgacttactgtgaagcctggggcaagccccgttccaccatcgtctgggcctcgagttatccttagaacttcaacatgacagtacccattcgccgtaagatagagagccatagcgtgtcgttctgggatggctctgcttccagatcgcaggcctttcagcatctttctttggaggaagattggaggctggtgctcactgtccaggcctcagactctggggcagagagggggattctcagcctgagccctcccttcaccctgcccctccccccagcaatggcctgagcccccatggctgcccctcaggacctggacatcgctgtgtggctggccacggtgcacctggagcagtatgcagacacgttccgacggcatggcctggctacagcaggtgcagcccggggcctgggccacgaggagttgaagcagttgggcatcagcgccacagggcaccggaaacgcattctacgcctgctacagacaggcaccgaagagggctccctggatcccaaatcagatagtgccatggaaccatnnnnnnnnnnnnnnnnnnnnnnnnnnnnnnnnnnnnnngtgccgaagcccaggaccgtgtttggtggactcagtggccctgccaccactcagagacctgggctgagcccagccctcgggggaccaggagtgtccaggagcccagagcccagcccaaggcctcctcctctccccacttcctcctctgagcagtcttcagccctanataactgtggagatgatgcctaattccatctacttcggcctggactncagaggcagggcacaggcagctcaggacaaggccccagacagctcccaaatctctgcccccacccctgccctcaggncccacacagcacagtgcacatccatggatcctggtgcccct

SEQ ID NO: 99185 - DNA, 1309 bp, Homo Sapiens
agaacaatgtgctatgtgaatgagtaacgtcaagcctgtcgctgactagtttggagtgttccccttccactgagggcagtcgatagagctgtattaagccacttaaacatgtcacgttttgacaaaggcaagcacttgtgggttgtggtcttgtctttgcattcagtcttacgaatacttttgccctttgattaaagactccagttaaaacaaattttaatgaagaaagtggaaaacaaggaagtcgaagcaaggagactatgtaacatgtaggaagtaggaagtaaattatagtgatgtaatcttgaattgtaactgttcttgagtttaagtaactctgtagggtaattagtaacatgtgttaagtattttcatagagtatttcaaacttggagcttcatggcagaaggcaaaccctatcaacataggaattgtcccttaagacaagagaattaagaactcctcaatccagcgtatgttcatagttgaacaaaagtagagcctgacgggatctttactagttataaagatacagaactctttcaaaacctttgtgaaattaagcctctcactataccagtataattgagttcttcagtggggcagtcattatccaggtaatccaagatattttaacacatctgtcacgtagcaacttggactgtacctgcccccaatccatgaaccaagaccattgaattcttggttgaggaaacaaacatgaccctaaatcttgactacagtcaggaaaggaatcatttctatttctcctccatgggagaaaatagataagagtagaaactgcagggaaaattatttgcataacaattcctctactaacaatcagctccttcctggagactgcccagctaaagcaatatgcatttaaatacagtcttccatttgcaagggaaaagtctcttgtaatccgaatctctttttgctttcgaactgctagtcaagtgcgtccacgagctgtttactagggatccctcatctgtccctccgggacctggtgctgcctctacctgacactcccttgggctccctgtaacctcttcagaggccctcgctgccagctctgtatcaggacccagaggaaggggccagaggctcgttgactggctgtgtgttgggattgagtctgtgccacgtgtttgtgctgtggtgtgtccccctctgtccaggcactgagataccagcgaggaggctccagagggcactctgcttgttattagagattaactcctgagaaaaagcttccgttggagcagaggggctgaataggcagaaggttgcacttccccaa

SEQ ID NO: 99186 - DNA, 792 bp, Homo Sapiens
  misc_feature (726)..(726): n is a, c, g, or t
  misc_feature (733)..(733): n is a, c, g, or t
ggctacgggagcacctgcagacgcaccggggccctgccaagcactacatgtgtcccatctgtggtgagcgcttcccttcgctgctgacgctcaccgaacacaaggtgacccacagcaagagcctggacacgggcacctgtcgcatctgcaagatgcccctgcagagcgaggaggagtttattgagcactgccagatgcaccctgacctgcgcaactcactcacgggcttccgctgtgtggtctgcatgcagacagtcacttccacgcttgagctcaagatccatggcaccttccacatgcagaagctggcgggcagctcagcggcgtcctcccccaatggccaggggctgcagaagctctacaagtgcgccctgtgcctcaaggagttccgcagcaagcaggacctggtgaagcttgacgtcaatgggctgccctacggcctctgcgccggctgcatggcccgcagcgccaacggacaggtgggtggcctgtgcccgcccgagcccgccgaccggccctgtgccggcctccgttgccccgagtgcagtgtcaagtttgagagtgccgaagacctggagagccacatgcaggtggaccaccgtgacctcacgccggagaccagtgggccccggaaaggcacccagacatcgccagtgccccggaaaaaagacataccagtgcatcaagtgccagatgaccttcgagaacgagagagagatccaaatncacgttnccaaccacatgatttaggaaggcatcaaccacgagtgtaagctgtgcaaccagatgttt

SEQ ID NO: 99187 - DNA, 895 bp, Homo Sapiens
gccggagcggctgcggagccgggcgctctccgccttcaagttgcggggcttgctgctccgtggtgaagctattaagtacctcacagaagctcttcagtctatcagtgaattagagcttgaagataaactggaaaagataattaatgcagttgagaagcaacccttgtcatcaaacatgattgaacgatctgtggtggaagcagcagtccaggaatgcagtcagtctgttgatgaaactatagagcacgttttcaatatcataggagcatttgatattccacgctttgtgtacaattcagaaagaaacaaaatttcttcctctgttaatgaccaaccaccctgcaccaaatttatttggaacaccaagagataaagcagagatgtttcgtgagcgatataccattttgcaccagaggacccacaggcatgaattatttactcctccggtgataggttctcaccctgatgaaagcggaagcaaattccagcttaaaacaatagaaaccttattgggtagtacaaccaaaatcggagatgcgattgttcttggaactgataacgcagttaaaagagggaaaattttttctggaagatcctactgggaacagtccaactagaccttagtaaagctcagttccataggtggtttatacacagaggcatgctttgtcttagcagaaggttggggttgaagatcaagtgtctcatgtcaatgcctttggatttccacccactgagccctctagtactactagggcatactatgggaatattaatttttttggaaggcccttctaatacatctgtgaaagacttctgccaaaactaaaaccagctagaaagagagaattaaggaggctaaggttttggggtttttatcccgaaggtttgggtg

SEQ ID NO: 99188 - DNA, 615 bp, Homo Sapiens
gcagctggcgttgctggcccccgtgcggcgaccccgggaagctgcggcaggagggtcccgacaaccctggggggcaggcgcagcgcggcccgcggggcgtctgctggcatgggacgcccaccgggcactgcagctcccggcaggagcgcgccacccgctcgcaacgcggaccccagaacggctgggcacagtgacaggtgaaggtcagcccacccccaggacccgggctaggacggcactggcctccatgctggcatggctgggactcgcagggagacatggacagtctgacagcgaggacctgagaagccagcatgacaaaggcaacggaaacctccgcctgggtcctgcaggcagtcccgggtgtgtgccgcgtggcaggcacctgagcgacactcattgatgtctgcctcgcagcgcaaaccagtgtatcctggggggacaggtgcagcggaaaccacccaccaggtccacgcaggtgccattgtgtaggcaccggggccctgagtccagcggtgggcctgggccgcagtcatcctcattaatctcgcagagcacccccagcgttcctgggggacaggagcagagatagcgggccacgaggtcaatgcatga

SEQ ID NO: 99189 - DNA, 355 bp, Homo Sapiens
atgagctaccctcctctagtatttctgtagcttgagtgaacttctgctgttctaggtacccacagttcaccatctgcctccccacctgtctgcgagacccttgaaggcagggacgtgactttcctctatcttccccaggctcagttatagagccagctataggcagctgcttgggaggcgctggttaagctgaatggaggaaccagtggagctgagatgcccgtgcccgcagccaccagaccctggctgactctctccaaggttattacctggaggccatggagtggaaccagatgaactcatggtggtcctcatttccgaactgttccagcacacactcggcttgggccagccg

SEQ ID NO: 99190 - DNA, 858 bp, Homo Sapiens
ccttactgccccaaggcgttctccagttgactttgtgaatacagacctctggggtatagtgatttatcggcgtggttgtacactgggggcaatatggtttagcactgaatttcaatttcgtccttaggtctatgagtgagtccgatcttatcttgtgaaagccttttgggcatcgtactacccactctgcctagaagtgtgtggaggactcaccacgggccagggtcgccctggcccacagcacgtgagcctgcactcactgcggcctttgtaacagaaaccagtctgtggtcctcagcatcttgaagcagctgcatacttcagtagtaaactatttttcattatgttagttttgtcacaagaaatcgaccattgtactactctcacttacagcagttaaacagcatagaactagtaaacctgtctgcatttccatttgttctttctgtatggttgtgggttttaggacatagggggttaggagaaggggtttcttgatcatgtcatgaattctcctttgtcctgtttctcctgtgtcatctctcctccgcctgctgtatattacctgagctggtgttgtatcttcaagtccatatgcgtatttgcagacctttcctgttcccactctgtgcttggctcttctgatttatgcacagatggttcccagcatgtgtccagtgcttcatggatgggaccatcccagcaactaatcagacttcctgccagtgtcctaacccccagggcaacctgttcaaccatatgtaaaaattggaatttgtataaagttgcttccaagttttataatgcatcattttacatcttttgtaattaaaagcatcccaatgaggttgtctctgc

SEQ ID NO: 99191 - DNA, 1026 bp, Homo Sapiens
ttcacttaatactcccagtcagtattataaagtaagtgctcttgttatttccttttacaggtgaccaaactgaggcatgggggtttaataagcttacccaaaactacacagcaaggaggaggctgtgtcgggaatcaaactcagtcactgtggacccccaagtccatgctcataaccaccaggtaaaaaatgtgcctcctattctaatttcctgtctgaacagtgggcccagtcatggtttcaatacagctcagcagagcaatgcagcaaatccaggtggcaacactaaaatactcagaaaagaccaaccaagcaaccaaagcataacatcagcaatagcacaaccaatgtgaatcatgagaaccctctgatctttattaaatttgggggaagaaatcaaggtcacgaaatcaagtgactggtgatggggcctagaaatgagtgtctccccccacccccggtttccgctctggcaggcgggtgttacgcggatggtgtacttgtcccacttcttctcggggtcataggcctcccagcggctggcggggaagatgtgcttgttcttctcgtaccagctgcgcagcaccaccttgcccgcgtgcgactcgtccttctccatggtggcgtcgctgagcaggcgcacgtcatcgtgcacatcgaagctgaagagcggcccgctcttgcccctcgccctggcgatgatgaagtcgtaggaaggtgtggtagtgcggcaaggatgaggtcctccttgatgacatgaggctgctccacgccggcggagcgcagctccaggaagtccttgcgcagccctgcagcgccttcttcaggaactgctgcacccgtgtttgccctttgcgcgccccgcaccgtgcgccggtggccccgagccgtccagttagctgaaggttgacctccatctccctcgtccttcacttgtctcgcgcctggcgcctccacattttgggcccagctcctcctcggagcccggttctcctccttctcggcgggccccgctcttggcgggaa

SEQ ID NO: 99192 - DNA, 972 bp, Homo Sapiens
ctgagttacgcacgctgcgcaccagagaagcaacaacctgtttctcgacacaactccgtgatttattggccgcgcacctcttcaactggggggagagaagccaccaggcttggtcgtcccacacatgttggggccatcgcctgcgtgccccctgatatccgtcttttcgcacaaatactgctacacgccctggggcaagaaggggtcgccccaaccgcggtcacgatatgcttacatccccgccacggcgcggcgggttcatccaggaatcacgaaagggcgtcctcacatggttgtcacgagggagatgcgagacgtgaaattaggtggagagcctcggggctcggaatattacttttgtcttccccgtggagattctgggggcactcacgagagaacccaacgagaggaacagtcttgtggcgtcgcaacgccgacgacattaaagctgcaagccacgaggcccacgctctcgtcgcacaccagagcgccccacgaaaaagcactggcttccctccatgctcctggtcgctcccctcctaccaaaaggcgcacgcagtcttgcacgaggcacgagaagctcgtagagaggtgggtcccggcctccatacctgctgtgggaaaaatgctctgtgttctcacgcggaccattgaagcttcctttggttgtataggggagaccagcaaagagaggcacccctgccgctgctcgtcagaagcacgtaattacaacctgtcgttttttttggtcaaaagagagtctctccaccggagagtcgttaatcccggcagtggtcactgctgagacgccgaagatgggcgatatctgacgtgcgctgtccgcacacatctggacgagctgggcctgggcgctgcgcgccggaaccgaccctgtcctggagccgcacgcacagcacctgaccccgcgccaccggcctgcgggcgagacctcaggcgcgagacgggctgtgt

SEQ ID NO: 99193 - DNA, 844 bp, Homo Sapiens
agcagctcatcctaatgcgaagagtgtttggagttcactggatttggttgacctttgtggaacacaaataatgaaggagcagaacatgacaagctaagatgaaattctgacatagtacatctctgccaaaaaccacacaccctctgtggatatggatatgaattcccagattttatatactcttgaataaaaggtttatttttatttataagtgggcataaaataagaaatgtccatgcagccatttttccaacagatgctgtacaccgttcattttatatagactagggagattcaaatacagtgcattttctattggtatttgttctgtgcatttttagcaacttctaccagcaaataaagtattctcagtaaaacgaaaatgattctcaagttatcagtttgctgtttttaccacttatttcatgccctgccaaattcaagttacacagacttccattttcttaagataatcaatcatgaagaaatcctttatcaatcattcaaaagtaattttaagtgtaacataactgtgtttacttcccatgcacttaatacccttatgcgctaattttgtgaattaagtttactgattatagaagtatgtgctgcatagaagtctgtgcttagagggtgaagttcctaagcttaccttgaattacagctacatttcagtgttaaactgtgcatattaacgaataattcttctggggaaagaaattatgaatcttcaggacagtctacaaggtttagagttacattctgctagactttttatgactgctgctattgttttaaaaaccccatttagtcttcttcctttctgattctaagtaagctcgaa

SEQ ID NO: 99194 - DNA, 2431 bp, Homo Sapiens
atgtttctgtgtttacgctaccgtgtcctgcaatggttgattttcgcgctgctccagtcccgctgttttctcttgtctgcgcttgccttaccactgactacccttccctcctcgcggttctgttagttttacttatctgctgcgctgctacctgtgcctatctatcttactgtccagttgggctgctcgccccgcgcgtgtactgtctttcccctctcctcctaactagttggctcgctgtttccctcgcccctcgcgtgctcatctggccgtctccagcactgattgggtgctggcacctgctctcccgccgtccctcctgtgtgtactctcggatggcgcgctcagtccttaggtctgctgcgatcagttgattcagcctgccacttctaccaagagggcaccgtccctgtgtgcctctaatcgtgcatttgtcccgcggggtgttggctctctcttcttttagattcgtcactacttcacctcacgagtcattcacactacagaactcccgacacccgcgcgccctcgcgtccgctgcgcttacttctctcggctacgcgctacgcgctgctgctcgtcctctgtgtctctttctcgtcctccgtctcagtcgggtttgtagcgtgtagtagggttgtatgttcatgcggtgtttgattcttttatgtgttgttggtttttcttgtgtctttttttgaggcatacacatctctttatttacaaaaatgcggtgaagagaaaatatctagatatttgggtgtaattattccaaacatagaaaacacacaatagaatcaagtgaagggaaagctactgtaacagcttagatactttttaaggagaactgatagtaaatctgggaatgggaaaaaaacacagagctagaatttgtttagcactccagtgcaaaaaggcaaaaagctgataaaactggagtggacggaggctccgaatgtgcccctccagctgctctctctcctgcagtctcatccccggcacttagccctgacctctcctccgaagcccactgaagggagaagtgtggctaagatggaaattgctaggcagcagagctgttggcttgtttgcatttattgcttttaggaacccagagtccactcttgcaccgggcctgccctgcctgtgaggcagagctggggttgctcagagcacaagggcctaccccattcctgcgtctccagcccgacttggaaacacaggtggggcctggccacggagtaaactgggatctcagaacacaaattaggaccattggggaactagggggtgatgggggatgcagtgagatgaggcctctgttctgaagggctctgtcctccctctcggcctgggggcccatgggggtctgtggaggcctggctgctaaagccagaccccactgacagggctgagtgtgcgctcctggactcatcttgaaggcagttctgtctggtccctaccctccccgcagctgttccctacaccagggcctccagcagtttgttctgccctggctcctgctcccactcctgccagaacagatggaaccatccagaaccatctatggccagtcactaggaaaagtgcccttcctgtccaggaatggggaggtgacagctgggggactggtcaggcccaggaggagggccccagtgtggggtatcccgggtgtccgtagctacctggtgaaggccgcgatggcaaccacctgcaggacggcctccaggccgtgaagggccaggagcgtggcgctgagggcccagtccgcccacaacactagggcctgccaaagcaggaagtgggcagagaggagggcggtgccagccgtgagggccaggctggcggccagcggcctctcagcctctgtcaggttgcccctggtgcccaggtataaccgaactgcttctagaatccccatcagaaacagcagagcaagatcgaggaccaggtagcggtgaggatagctgaacacctgacttttatacgtgatcatcaggagcgtggcgaggaaatacagggcgtagtacgttccgctgagataaaacagcatttgaaggggaactgaagagagctggtgagtggttaaggatcctcaagctcaacaggcttgggagcagcctcccaggtggctgaacaagaggggctggttctgtcatctgtttggtggccacagacaccaagggaccatggagtcttggcaatggctcactgcctatctgaggcttctgtcactatgctggctgccaatgtggtcccatgagctgacaaggcctttgtgggacccccctccatgccacaacaatgcggtctgtgcactgcagcccctgccctcctgactgtggacaggactggtcaggggatagcctccacacactggcatccccagtgatgtcaccctgcctttggccccagttatgagttaagagag

SEQ ID NO: 99195 - DNA, 743 bp, Homo Sapiens
  misc_feature (723)..(723): n is a, c, g, or t
ggcgacggaacaagatgacagcctacatcacagaactgtcagatatggtacccacctgttagtgccctggtctcgaaaaccagacaagctaaccatcttacgcatggcagtttctcacatgaagtccttgcggggaactggcaacacatccactgtatggctcctataagccgtctttcctcactgatcaggaactgaaacatttgatcttggaggcagcagatggctttctgtttattgtctcatgtgagacaggcagggtggtgtatgtctctgactccgtgactcctgttttgaaccagccacagtctgaatggtttggcagcacactctatgatcaggtgcacccagatgatgtggataaacttcgtgagcagctttccacttcagaaaatgccctgacagggcgtatcctggatctaaagactggaacagtgaaaaaggaaggtcagcagtcttccatgagaatgtgtatgggctcaaggagatcgtttatttgccgaatgaggtgtggcagtagctctgtggacccagtttctgtgaataggctgagctttgtgaggaacagatgcaggaatggacttggctctgtaaaggatggggaacctcacttcgtggtggtccactgcacaggctacatcaaggcctggcccccagcaggtaagaaagtgaaatagtaaatatttccccttggtacagttggttcctcacagagtccatganagctaatatttattatatac

SEQ ID NO: 99196 - DNA, 1208 bp, Homo Sapiens
tgtgtctctcagttcaaaggcaaaatgagtacttgatgccataatcataggaccagtcaatgcttcctccactggcttggtagatgacagagcagattggtcccactttgtacttggtgccatgcaggcttctcagagattgggcagccttttgggccacttcactcagctcatcaaagtcatctaacttggtacatttgtacccataggggaacatcagcagctgggaatagctgtggagggtaatgaaggccttgacttttccatgactcttgatgaagtccactatggatttcacttcaacttcagagttggcactgggtccgtggtatgaatcagagcaagggttgctgctggctccaggtcctccaaaacctgcatcccagttccggttaggatccacaccaacacagaggcttccagataccttggaccgggtcttccgccacatacgatttttggtttgagagaacacgtatccatcagggtttgtgactggcaggaggaagatatccagggcgtccagaatggaagtgatggatgggtcctttccataatcagaaacaatcttatttgctgtccaaagtgccgtagcttgtgtaacccactctcgagcatggatcccagcatccagccagatagctggcttgtctcctccggtgctgaacttgagcacgttcataggccggttctcaaaagaagagccaatattcactttgctcactagaccagggtgctcagccacgaggttatccatttcttgggaaatctcttccagggtatggtaggccccaaaattgaagttaccactccgttctcttctcctattaaaaagcatttcttcattctctttgtccaacaggacctgcacgtcttcaatcatgatggaataggcaattccctgggactccaagaacactttgactgcctggacgttgacgaagggaactcggacgtgggctgtctcccctggggtggtgggtgatttccaaaaatcaagctggagatgttcttgagcctccaattgtagcagatttttaatttgttcttcattgcttggtacaatctcaagaacttggtctcccacaaatgtttctagacagtagatatgccccaaaagggcacccaaaaacaggatcaacctcatggccatgggttttcctggagtccagaattcagagtccttcctgaactttatttgtagggat

SEQ ID NO: 99197 - DNA, 1166 bp, Homo Sapiens
  misc_feature (875)..(875): n is a, c, g, or t
  misc_feature (891)..(891): n is a, c, g, or t
  misc_feature (1003)..(1003): n is a, c, g, or t
caccctgctttggccaggatgcctttgggacgcttggcagggagcgcccgctccgaggagggaagcgaggcatttctggagggaatggtggattgggagctgagtaggctgcagcgacaatgcaaagtgatggaaggggagaggcgggcctacatgctaaggaagtccaccagcgcatcaacaagcaacttgaggagatccggcgcttggaggaggtacggggcgatctccaggtgcagatcagcgcagcccagaaccaggtcaagcggcttcgggacagtcagcggctggagaacatggaccgcctgctgaagggccgggcccaggtgcaggcggagatcgaggagctgcaggagcagaccagggccctggacaagcagatccaggagtgggagacgcggatctttacccacagtaagaatgtcaggtccccgggattcatcctggatcagaaggtcaagatcaggcgaaggatcaggatcctagaagaaccagttggacagggtcacctgtcactttgacaaccagactggtacggaatgcggccctgcgggaggagctggatctgctgcggatcgacaggaaccgctatctgaacgtggaccgcaagctgacagaaggagatccaccacctgcatcacctggtcagcacccttatcctctcctccacctctgcctacgccgtcagggaggaggcgaaggccaagatgggcttgctgcgggagcgcgcggagaaagaggaggcccagagcgagatggaggcgcaggtcctgcagcggcagatcttgcacctggagcagctgcaccacttcccctcagctcagaacaacgacccggcagccggatcccgatgtcctggagaagcgtgaaagcanggccggggaaggtggnccgagggcgtctggaagacctccccaggagaggctggtgcctttgctacgaggacgccctgaataactgtcccccttgaatgggggagagtgaccctgacctgggtgtgcanaaagtattctggaggatcgaggagcgccaactttgctgagttcaacttcatcaacgagcaaaaactttggaactggaaccattggggcgggaaaaaaatcaagggaaattccccggagggctttttggtgaaacggccccgggcccaccaaggggatgaccct

SEQ ID NO: 99198 - DNA, 915 bp, Homo Sapiens
aacgggtgatgcggttgagcagcctggagagcagtggggctgaccctgactggcaggagctgcagatcgtgggcacctgccctgacatcaccaatgcactacctgcgcctcacctgtgcccccgacccgtccaccgttgcgccctgtggcagttttgaaaaagtcgctgtgcatggtcaagtgccactggaaagagaagcaggactacgcgtttgcctgcgagcagatgaagtcgatccggcaggatctgacggtgcagggcatccgcaccgagttcacggtggaggtgtacgagacccatgcccggatcgccttggagaagggtgaccatgaagagtttaaccagtgccagactgcagctcaagtcgctgtacgccgagaacttgcctggcaatgtgggcgagtttactgcctaccgaatcctctactacatcttcaccaagaactcgggagacatcaccacggagctggcatacctcacacgagaactgaaggcagatccttgcgtggcccacgccttggcattaaggacagcctgggccctgggcaactaccaccgctttttccggctctactgccatgcaccctgcatgtctggctacctcgtggacaagtttgcagatcgggagcgcaaggtcgccctcaaggccatgatcaaaacgtatgtggtgccaagctcccttctgcctttgctcttcccatccttccgcctcgcaccgcccctcagaccagctcctggccgcaggcctcccccagcccccaacccttgtcctggtccttgcttccccatcatctttctccattcagccctcccctctccagttcctcttgctctccttgttggtcacctctgtgttccgggtcactcctctccctctccccactgtacccagctgcactgcggtagcccttaaa

SEQ ID NO: 99199 - DNA, 1083 bp, Homo Sapiens
gggaaaggtgaacagccagccaagtgacccagccatgcccctgtaggtacaagtggttctaatgtgtgggctgcatatagacccagatttctcacagtaccacttctgtgaaaatttgcatagttataccagtacattgcttgagaaaggtacatctctaagaacagtaggagccagcccctccaaagggaaatccagccatcttcagatacttgctttgctgacgaatcgatgcagttccacgtaagaaaacttcttggactgcatcttggttctaatccattctagtggacttatcacagttactgcaccaaatctggctaccattccagcaacaattggtatgcaggtttcattttctcctaacttagatctcagaagagcacttaattgatcatagcaggtaaaataaataacttgtggcaggaactgccatcactagggtaggaggaaggccactccatagagatttaatgccctcatttcgaatgattttaaaaaaatgcatccaatgttcccctggaaatttccctggcttcttataccatagtttgttgcctccctcttcacagacacatagatgatccatgagtccattactatatacaaaacattttcctttggggagtgggttgttttgggcttggagtctaattttaacaacatccaggggtgtcactattactgatgtcagtatagctccagtacatgaggcaagcatttgttgaagaggtgtcactttgataatctcttgtccccttgtctcaggatccatatttttaactaattaaataaaaacctggtttgagtctgttcttcaactctatgctccaatattttattgttcgtaacatcagtagccaaaaacctggggcagaaggcagctgcagggccggcagtcctggcaaacctagaaggcgggaataaccctggtgacgggcggggccgggctccggcgctaactgcatccactaggtttggtcaacacagagccgcgccaactctctgaggctgcgccaagacctgaagcggcggaccgagagcccgggtctgagactgagagagcaacggaatggaggcccc

SEQ ID NO: 99200 - DNA, 1548 bp, Homo Sapiens
  misc_feature (614)..(614): n is a, c, g, or t
tcggggggttggacggggttgagccggagcccggggcggaggggccgtgagacccggttcgggctctgcggctccagggcttgcgggccctgtcatggctgcgttgtccgggtgtgggtgaggtacatgagtttgtagatccgccagaatacatgtgaatttttgggattacccgagtcatgagatttggtccggaactatccctacttcagctgttggaaaatattatctggcaacttcaggtgacagattaactctgttgtttgttttaaataaagtttaaaggaaataagtatctaataccattttcaactagccatgcgaaattggcttctctccccgaatcctgtatttgaaaaaataactttaacataacgtttggcattaacttatatttgctcatcataaaaaacccaaagaaatttttatatctcaaatttggtaaactttaccaaatatttaacatatgaggaagaggtatatcttacagaattatttggctatgtcataaggcagtaatgaagatggaatttttcctatcataaatctgacataagtgaaagtctataacatggtcattctccataaatctgaaagcttgttggttacagcantatgatcatgccacactgtcgtcgttattgaactttgatgaaagtagactgaatgagaaaggaacaaatttggtgcctgcaccaacgtagaatttgttctgaaattctacccagtggaggcgtatggcgtgaagaaacgcagaaagcccttccatgatcagaaggatgaaaatggtcaaaactgcaaagagcgcgataaccgggagcagtagcaagacgccataggtggtgtcaacgcggaggcccacgcgcatcagcatggcccacagggacatcagacaactgtgcgtgagccaggctaagcgccccagagcctcaggtaggaggcggtgttggagatgcatcccagacagtactcgatggaatggattacttgggtcattaatatttctccaaaattaaactcttcacacgccatttctctacatccatcttccacctggtgatttccctcttctatatcttggcttcccagcaatgaaacttcttcctcactatctttccttataagtgtgtagccactccggttcaccccgaagcaactacgcccattgtgaagccacaacaaaaacagtggctttcccaagaagaggacagggacagacaatgctgtgacaaccagcagcactctctggacatactcctgccctgtgtaaaggccacttgttttactggctgggaataaaaacatgttaataaattcaatcagaatgctgggagcaactctggaggtttctgctgaaaaaaccagccacttgtagaaaatcataaatataaggtatccaaagatacagagcatgaagagaagttccgggatggaaaccaggtaaatgttgaacttcttcctgaagtgcaagtggttaaatattcccagaatgactccaaaagtcatatgaatgattcctaaaatcacggacattttcattttgaaaga

SEQ ID NO: 99201 - DNA, 1352 bp, Homo Sapiens
  misc_feature (1006)..(1006): n is a, c, g, or t
ccaaccttctcccttctcaccacgtagttaatagattcagagggagaaggaaagggtccggaatttccgggatgcgcgcagctcacaggccctgggagtgagctggtgcccggagacctggcacccgcgcctggataaggggcgtctacatcgtcccaggagcagcaccagctacaggaacctgccgcatctgtttctgtttttcctcttcgtgggacccttcagctgcctcgggagttacagccgggccaccgagcttctgtacagcctaaacgagggactacccgcgggggtgctcatcggcagcctggccgaggacctgcggctgctgcccatggtctgcaaggatggccggacccgcaatcgcagctgccagagctgcaccggtgctgagtggaacccccctctctccttcagcctggactcccggggactgagtggccagaacgtgaccctagacaaccgctctggggagctgcacacttcacctcaggagatcgacagggaggccctgtgtgctgaagggcgtggagggactgcgtggaacggcagccgttccatctcctccctctccttctgactctagcctttagctgctggatgggcttgccctgccccaagaagacttcacgggttgcgaaagtgaagattgcccacggaacacatcaatgacaaggcccccgtaggttccctgtttcccaatactctccagggcgggttccccgacaaatgtaacctgttaaccccccccactggcacataagagcatccctggctgtggaccccataatgtagtacattaaatggccgttccacaacctaattcacattagcgggacctaccacaggggaacgtgtcacccctggtaaccgggcacgcttaaatgacaaaactgcgcgttgcgaacacctcccatacctatatcttgcatttgggcccgcatttggaaataggcgaaacccctcagtggaatccagtcatgtgggacacaatttcttcaccaanctttaacgcatgatttaggggtcattccaatctatcttcttttgaggctgcacgcccctcacctacgcgaatttgtggctcaacgaccagtgaagtggtgtatattcaacatgtaaacatctctcgcattcaccgtaaatctccgccagagttccatggagagacacggtaggcccttgggcgtcaaacacgcataaggtagagaccttccacttccgacatttatgctgctttgtcacggcgtttgtcacagtacttcctaacctaactctctacttgcgctagacgtatcgaaccatgaggaggtactagtccccttctatctattaacgtactcttacgcaca

SEQ ID NO: 99202 - DNA, 899 bp, Homo Sapiens
ccggccatcgtccccacctccacctgggccgcccggcaggcaggcgacggaggcccgggagccatgggtgactggggcttcctggagaagttgctggaccaggtccaggagcactcgaccgtggtgggtaagatctggctgacggtgctcttcatcttccgcatcctcatcctgggcctggccggcgagtcagtgtggggtgacgagcaatcagatttcgagtgtaacacggcccagccaggctgcaccaacgtctgctatgaccaggccttccccatctcccacatccgctactgggtgctgcagttcctcttcgtcagcacacccaccctggtctacctgggccatgtcatttacctgtctcggcgagaagagcggctgcggcagaaggagggggagctgcgggcactgccggccaaggacccacaggtggagcgggcgctggcggccgtagagcgtcagatggccaagatctcggtggcagaagatggtcgcctgcgcatccgcggagcactgatgggcacctatgtcggccagggtgcctctgcaagatgtgtgctagagcgcagggcttcctctatggccagtggcgcctgtacggctggaccatggagcccgtgtttgtgtgccagcgagcaccctgcccctacctcgtggactgctttgtctctcgccccacggagaagaccatcttcatcatcttcatgcaggtggttggactcatctccctggtgcttaacctgctgggagtgggtgcacctgctgtgtcgctcgctcaggcggggatgacggcacggccagggcctcagacgccaccccggacccgggcaccttcctcagaccttaccggacccaggtcttctgctacctccccgtggggccaggggcccttcatcccc

SEQ ID NO: 99203 - DNA, 828 bp, Homo Sapiens
ggagatgagtccaaccccacatgaagatgatgaagatgtcttctccgtggggcgagagacaaagcagtccacgaggtagggcagggtgctcgctggcacacaacacgggctccatggtccagccgtacaggcgccactggccatagaggaagcctgcctcttagcacacttcttgcagagcacactggcgacataggtgcccatcagtgctccgcggatgcgcaggcgaccatcttctgccaccgagatcttggccatctgacgctctacggccgccagcgcccgctccacctgtgggtccttggccggcagtgcccgcagctccccctccttctgccgcagccgctcttctcgccgagacaggtaaatgacatggcccaggtagaccagggtgggtgtgctgacgaagaggaactgcagcacccagtagcggatgtgggagatggggaaggcctggtcatagcagacgttggtgcagcctggctgggccgtgttacactcgaaatctgattgctcgtcaccccacactgactcgccggccaggcccaggatgaggatgcggaagatgaagagcaccgtcagccagatcttacccaccacggtcgagtgctcctggacctggtccagcaacttctccaggaagccccagtcacccatggctcccgggcctccgtctgcaaggagacagagcacgtcagtgtgtcagcatggcatccttctcgttcgcccagcaacaagcctgcagggagctctgccacgcccgttctaccccctgcctgccgggcggcccaggtggaggtggggacgatggccggagtacgcccgcgg

SEQ ID NO: 99204 - DNA, 736 bp, Homo Sapiens
  misc_feature (282)..(282): n is a, c, g, or t
tgtccctgtgcccaaagctccagccctctaaggatcttgttgcatagctatcagcattctccatgaactcctttgtgaccagctcctgagcacaagattctttaacatttcctgtccataagtgaccatcacaccctgcaggcagccaggctttaggcagtggagagacccggggttccaggaaccctgcttaagcacggcatgctcaggagagactttcttaccatacagctcaacgtagacctcttgaagcgtagtagcacactagcagaacatggttcnagttcactaggtgcgatgcttgtctcgaacgatgacgggccttgtcatagtcagcagtatagttcttcactatatcatacactgcgttcgggaccaggaagttcaccacttcaattctgtcaaagtagatcatcacaccaccactagtcccacaaggtacattcttcacctcatctgtctggagtgtggtctgcacagacttatatgatgtgatgaaagggagcatgagatggaaaccagggccgctggtcgaagtcagcagggcatccgcctctgtaatataccccaatatgtccctcgttcgtatcttgtgcacagctgagaagagagatgcacaaaagaaactggaagccacagccacaactgctcccaactgagccatcagtgagccatgtatccaggctgtccctgcaggcgcgtccgtacgtcgtccgagcccacgagcaagaaaacc

SEQ ID NO: 99205 - DNA, 1108 bp, Homo Sapiens
ggtccggaattcccgggatccggctggcggctgcttccggtaggagagcggtgtagagcgagcaggtctcagctcctcgtcatgtcatacggtcccttagacatgtaccggaacccggggccctcggggccccagctccgggacttcagcagcatcatccagacgtgcagcggcaacatccagcggatcagccaagccactgctcagataaagaatttgatgagccagctaggaactaagcaggactcaagcaagctacaggaaaatctgcaacagttacaacactccacaaatcagctcgccaaggaaacaaatgaattgctgaaagaattagggtccttgccccttcccttatctacttcagaacagcgccagcagagacttcagaaggaacgcctcatgaatgacttctctgcagccttaaacaatttccaggctgtgcagagaagggtatctgaaaaggaaaaaggagagtattgccagagcaagagctggatctcgtctttctgcagaagagaggcaaagagaggagcagctggtctcatttgacagccatgaggagtggaaccagatgcagagccaggaggatgaggtggccatcactgagcaggatttggaacttattaaagaaagagaaacggcaattcggcagctggaggctgacattttgggatgtcaatcagatatttaaagattgggccatgatgatccatgaccagggtgatctgattgatagcatagaagccaatgtggaaagctcagaggtgcacgtcgaaaagagccactgaacagttacagcgagctgcttactatcagaaaaaaatctcgcaagaagatgtgtatcctggtgcttggcctgtcagggattattccaatcttgggacttattatctggctaggttataaaacgaagtgattgccctcgatcgttctcccgctgagctgtttttcagggcaggtgcctgttggagtcttgccagaaacaactgatcaccagaaggacagcctatatcagaacggccctgtaatcctttagttggaaactaactacctacctagcctttgggaattccggacccatggagaacgcaaaatatcatttttttgg

SEQ ID NO: 99206 - DNA, 794 bp, Homo Sapiens
gggttcatttgtctctgtcgtcacccaatccttgaacttgcagtgtaaccaagaaaagccaaagagaagcactgtccctttctatcctcgtcactagtaactggaggttttttccaaaatttacaaatctgtgtctacatcatggtccatatgttagaccctgtcatggaaataagtgctcaggtaaactaatatttgttctttcacccccagaactagagctttcccagctgtaagccttataaaccaagatgcaggtactggcttctctagctcagccagggtgcctgactgcacagctttgggttcaaacagctgactcactctgagcctattatggtcccaggattggctcagaggcagctggactctatttgtcaaatgagtgttgactgatgggtgtggggcatgatgggggcaggaatagatgcctgcccccactccatttgcctagcttcactcagctggaaggcttaagccacatggagcagaagattcctggcctaaaatcaaggccactggagcaggagggcagactgcacatagccttaatggcaggatcacaaaaaaaggcaaagagaaaagcttccagatggcttctactaacagtctaaacactaagccatcttctctccctgcaaaagcttcagaaaccactgtatggaagcacatgtgtaatgtggtgtgactctcacactggaccacagggcccctgggtctgtgatttactgaggcacctgaccacaatctgactcccctccttagcaacctatagctcccaaaaccccatccag

SEQ ID NO: 99207 - DNA, 675 bp, Homo Sapiens
accccccatcatgcctgtcagtactgtgtccaggtcgtagtaggggctgtccacgtcctgagaacagctcttccatgcagctggggtttttagtctccagcgtttcaaatatctgatcaagtgacttgtgaaagcttcctctgttttctcgagggccatccatctcccaggcgcctgctctgcaggtgccttggtgcctgtgctgaggtgactgggcaaaggtcagaaactggaccctgtgtgtggccgtcccccaagccaggagcaggatgtgccccctcttgcccccacgctgcacggcacaggatctccgtggagaccaagcggtcgagcggcgcccgctctgcagcctggggtgccactgtgcgccacgtcccatcctgcgtcatctcctcttggatctgccggaccgtgttggcaatgaggactgagcggcacagattgggctccacaagcatgtggcaaagctgcaacttcaccagagacatgtccaggagcgactgccgctgcaggctgtatgaggacactgtcttcaagccggccagggctccctccacgtcttcctcgtggccaacacatttcctcttcagtcctcgtgcaaacattgtgtcctgacccgcgaggccgcccgccgggtcctctgctcagccaccgccaccgccgctgccgccagct

SEQ ID NO: 99208 - DNA, 896 bp, Homo Sapiens
  misc_feature (701)..(701): n is a, c, g, or t
cagtcttagtgtgcaagggagaagctgttagaaatgaccccaagtttctagcttaagttgactgagctgatggtactgctcttaaggaacacttatttaaatttaatttgtgctattctggatattacacaaatgacccagaaagacttggaccacactctaacagttagaatagagggcaaatggtagttgaagctggctggcgccattagaaatgttgcccttcaatcccccttagtagcttaagagttcgtgagacattggatttatatatggtatggctttaaagtaataagataaatattcccaagctcttttaagaatggagctcataatttttataagcaaacctaatacaattttctttactaagcatagaaaagaagggctgggtatagtatagagtgctgctatagaggaagagagaacatctaggtcagtttttatcttattttaaatgtgagaataatatctgtgataatttcccatattagaatagctaaattattgttattgagtacaatacaataaaatataaaaacgggttcatgccatcattaaaccttctttgagaagtgatggcttggccaacccgatttcaagggtaagtccatttacttaatatctgtggcatttaaagcaggtagactggagtgaaaaaaaataatttaaatcttgaacagttcagcagctgacaacanaagcaactacagggctaatgttttccttctgtgctcaatgctgtgaggtttttctctgagagagtttgttcaaaccttttagatgtgtgtgttcatttaatggttgtttctacactaccctttcatccagctgtcagagaaaataggaataaatggactgagcctgcacaggaacacctcagattccggcgcgat

SEQ ID NO: 99209 - DNA, 686 bp, Homo Sapiens
  misc_feature (358)..(380): n is a, c, g, or t
  misc_feature (405)..(550): n is a, c, g, or t
  misc_feature (580)..(640): n is a, c, g, or t
ccacaccagctgtcccactcaccatggagaagatcctgatcctcctgcttgtcgccctctctgtggcctaatgcagctcctggcccccgggggatcattatcaacctggtaagagggtcttcaggggaggcgcctcctgagtccccagatgaagacttcctaagcttggaccttgacctctgatgtctccacctggactggcaggggctgggaggagtggcatcttgcatccctctgtttacttccatgtcctgtcctatgcctcttcccagaggccacaggaaaggctgatcagcccctctccagctccaactggagcatgctcagagcagcagctcaacctggctatgagggaccnnnnnnnnnnnnnnnnnnnnnnngaaacggagtcttgctctgtcaccnnnnnnnnnnnnnnnnnnnnnnnnnnnnnnnnnnnnnnnnnnnnnnnnnnnnnnnnnnnnnnnnnnnnnnnnnnnnnnnnnnnnnnnnnnnnnnnnnnnnnnnnnnnnnnnnnnnnnnnnnnnnnnnnnnnnnnnnnnnnnnnnnntagggtttcaccatgttgcccaggctagtnnnnnnnnnnnnnnnnnnnnnnnnnnnnnnnnnnnnnnnnnnnnnnnnnnnnnnnnnnnnnatgagccacctcacctggccctacgagggagctttgtaaaaatcca

SEQ ID NO: 99210 - DNA, 986 bp, Homo Sapiens
  misc_feature (400)..(461): n is a, c, g, or t
gtccactaccaacccgccccacaccgtataatataatcttcccccacagaagctgcataacctacctgagtgcagctgatctccccccaatagttgtttactcctcccccccaaaagagtatttgcttctcccacacaaaaaatcttcccacaatccgaatgtatgttctaccaccacagtcacccttgtatcaaaacaccgccacccccctcgccacatttactatgaaaaacatcccccctcaactatggaggccccacccttgcaaaccaaccgcacggatggggaacggagagtaaagatgggcggctccctgcggaagaggagaagattaatgtagtggcgccgccgccccccttattgtttttcatgcttctaattctactggtgttagtttcnnnnnnnnnnnnnnnnnnnnnnnnnnnnnnnnnnnnnnnnnnnnnnnnnnnnnnnnnnnnnnaaggtttgcaggaggcctttaattgtgaagagcgcaatcagaaaacagatatgctggtcaaggaggtggccagcccgggagatgcgctggagcaggggagagatgcccctgcgcctagtggcctacagcattctgggctaggtgtgggagtgggtgggcagtctcactgcttggagcgtccagcgtcatggcagatgccaaagttggtgttggtgatggagcccacgatggtcttgtctccctcacaggtcaggccacgctcacagggacacttgtagtaaatcccatagagcgtcttgacagagcactcgctgttctcgctggccatggatgtgcagcgggccaggcccagcgcacttgaatgctggcagcaattgctcttacactgggcactattcatgcagagctcaccgttctccaggttgataatgatcccccgggggccaggagctgcataggccacagagagggcgacaagcaggaggatcaggatcttctccatggtgagtgggacagctggtgtgg

SEQ ID NO: 99211 - DNA, 743 bp, Homo Sapiens
  misc_feature (35)..(35): n is a, c, g, or t
ggggcctgtcccacactcattgcgctcatggcagncggacagcccctggggcacagcagcagcacgggggacactggcttcagctgctcccaggactcagggacagatatgatgctgcttgaggactacacgtctgatgacaaccctcccttctcactgcacttgcccaccaaagagaaggagctcggtgacatttgaggatgaagtggaacaaatcaaagaagctgccaagaactcgattcttcatgtgaaagctgaagtacacaagtccttggacagttacgcagcaagcttggccaaagccattgaggccgaagccaaaatcaacttatttggggaggaggctttgccaggggtcttggttacagcacggactgtcccggggggcggcttcgggggccgccgaggcagcagaactcttgtgagccagaggctgcagttgcagagcatcgaagaaggagatgttttagctgccgagcagagatgagggcctcagggtgccgtggggctgcagcctgagaggctggcccggggaggagttcccatcaccgcctgtgccgcggccttgggagcatgtcactgtgtacagctggccacacacagggaaggagcagcatctggtatgcagccaccaggacaaggactgaaaataatgtctacagtccacagcttcagcatttccagagaccacatgtgagcttcttttaggtcccagtgatgggaccagaagaaacaaaagcaaa

SEQ ID NO: 99212 - DNA, 705 bp, Homo Sapiens
atgagtcagccatagtcagtgcaatccagatatgctgactttacttgagacacgacgaccaacatttgaaggccatatagagatctgcccaccaggcatgagccattcagcttgttcagtaaacaagagtgttctagaagccatcagaggaagacttggatcttttcatgaactcctgctggagccacccaagaaaagtgtgatgaagaccacatggggtgtgctggatcctcctgtggggaatacccggttgaatgtcattaggttgatatccagcctgcttcaaaccaataccagcagtataaatggggaccttatggagctgaatagcattggagtcatattgaacatgttcttcaagtatacatggaataactttttgcatacacaagtggaaatttgtattgcactgattcttgcaagtccttttgaaaacacagaaaatgccacaattaccgatcaagactccactggtgataatttgttattaaaacatcttttccaaaaatgtcaattaatagaacgaatacttgaagcctgggaaatgaatgagaagaaacaggctgagggaggaagacggcatggttacatgggacacctaacgaggatagctaactgtatcgtgcacagcactgacaagggcaccaacagtgcattagtgcagcagcttatcaaagatcttaccgacgaagtcacggaacgatg

SEQ ID NO: 99213 - DNA, 577 bp, Homo Sapiens
ggatgaaactttttgaagtagaggaaatacattgaggtaacatccttttctctgacagtcaagtagtccatcagaaattggcagtcacttcccagattgtaccagcaaatacaaaaggaattctttttgtttgtttcagttcatactagtcccttcccaatccatcagtaaagaccccatctgccttgtccatgccgtttcccaacagggatgtcacttgatatgagaatctcaaatctcaatgccttataagcattccttcctgtgtccattaagactctgataattgtctcccctccataggaatttctcccaggaaagaaatatatccccatctccgtttcatatcagaactaccgtccccgatattcccttcagagagattaaagaccagaaaaaagtgagcctcttcatctgcacctgtaatagtttcagttcctattttcttccattgacccatatttatacctttcaggtactgaagatttaataataataaatgtaaatactgtgaagtgtgtgtgattttacaatggacttatggttggtgggaaaattcagcatggaaatgcttttc

SEQ ID NO: 99214 - DNA, 967 bp, Homo Sapiens
tcgatgagtaaacttggcaaccatccaataagcagccaggtttagcctttggcttggtcacacaggatattctgctgtgtgcaacccatgtggtgataaggctcacagccctgagctctttacgggagcatcaactcacagttaggggactgggcgtggctgattgagggtttggaactggtggctatgccagctattccatctcaaaacagccttgaggccccttttcaatttgagcagctgctagatatcttatcagagctcagattccagatttcacatcccagcagccggttctgggtagcagatcaatttccaactggaaaataactatataatgtatgcttattggaattctgccacagcaggaagcttgagtcaaaatgtgtttcccctttgaaaggagaaggaattggagcagcttttcctggaggcccaggatatttcttttctgggtatcttggctgaaaatttggttttacatagagaaaaacgatcttttaagggtcccttttgctgcattatctgtccagtttgacctttctttcagtgaaaacaccatgtcatggagtgtaggaaagagcagaccaaaatcagccctagagccaaccagtcagtcccaaagctgtgacctctgtgccactgttgtccatagaagagcatcgactgtgtcacttaaaatatcagtaaaccatgatgcagcaactgctaagagctaaactaaccaaactcgtgtcatcatagctgctgccttggtgtgaactcgcttaaaagcaatggtgaaaggataacctcgatgatgtaaatccacccaaagatactgttctacaaaaagtagggtgtggacgcaaacctgtgacagcagagggggacgacttcacactcactgcctcataagtcccctttgccagtggcagctggtgacactaacgattgctactcggttcacttaccagtttactcaacg

SEQ ID NO: 99215 - DNA, 333 bp, Homo Sapiens
cgatgagtaaatcttggccacccatccaataaaatgcagccaggttttaacctttggctttggtcacacaggatattctgctgtgttgcaacccatgtagtgataaggctcacagccctgagctctttacgggagcatcaactcacagttaggggactgggcgtggctgattgagggtttggaactggtggctatgccagctattccatctcaaaacagccttgaggccccttttcaatttgagcagctgctagatatcttatcagagctcagattccagatttcacatcccagcagccggttctggaagtactgccaagatttactcattcg

SEQ ID NO: 99216 - DNA, 529 bp, Homo Sapiens
cgcccgagctgcagccgccgaagcgctttctctgtctcgctcttcctccgccccccgaccacacccccttaaagggccagcccctctacaggcccctctcccctactccgcccccgggcaggggtaggggagggtctattcggcagggggtggcctagctgtccgtactccccaaacgcaaccttccagtcccaaacccaggcgttctaagcgctcaggacgacgatttgcgctcacgccaggaccctagtcttcattggacccttcctcattctgtcctcattgaggccatctgagaataggggctatctgagaatgcaggggagtggacatcgtgtgcagacagggagtctggtgaggagacgctgcggtccccgatgtccaggtcctccagccctcggccagcgaggagcgaacgggctcctccgcacggaccgacacgtggactgggctcctgggaaaggaagagtggagaaggcgggcaggagctgtccgggtccctagactctccgagtagcaggtcccacgc

SEQ ID NO: 99217 - DNA, 819 bp, Homo Sapiens
ccctgagcagtgttctgggcttgggctccggaaccacactgcagcaatgctttgctcggttaacaagatgacactggaaaaaaggccttggtgttagctacagtgagctggactctggatcgtctgggcagattattcctatgcatcctgccttcctcacccaggactggtctgagagggattcatgatggaagcatgttcattctgtgacctggttctcgcctaaatgtggtcaacagtgtcagcagttcagaggacatcaagcccttaccagggcttcccgggattggaaacatgaactacccatccaccagccccggatctctggttaaacacatctgtgccatctgtggagacagatcctcaggaaagcactacggggtatacagttgtgaaggctgcaaagggttcttcaagaggacgataaggaaggacctcatctacacgtgtcgggataataaagactgcctcattgacaagcgtcagcgcaaccgctgccagtactgtcgctatcagaagtgccttgtcatgggcatgaagagggaagctgtgcaagaagaaagacagaggagccgagagcgagctgagagtgaggcagaatgtgctaccagtggtcatgaagacatgcctgtggagaggattctagaagctgaacttgctgttgaaccaaagacagaatcctatggtgacatgaatatggagaactcgaccaaatgaccctgttaccaacatatgtcatgctgctgacaagcagcttttcaccctcgttgaatgggccaagcgtattccccaattctctgacctcaccttggaggaaca

SEQ ID NO: 99218 - DNA, 809 bp, Homo Sapiens
tgagcaagtgcgggatctggccagtcacagctcggagtgccagcagtgagcaagctctgtgtgggatccgcggccagaccaggcatgagctagcgagtgtgggatccggccagccactctgggagctgccaggagcaaactccatgaagggcccgtggaggcacccagattacaggtccaccaggttgtggaaaaactcagttttgtataatgatgagcattttggctacattacccaccaacatgggaggattagaaggagctgtggtgtacattgacacagagtctgcatttagtgctgaaagactggttgaaatagcagaatcccgttttcccagatattttaacattgaagaaaagttacttttgacaagtagtaaagttcatctttatcgggaactcacctgtgatgaagttctacaaaggattgaatctttggaagaagaaattatctcaaaaggaattaaacttgtgattcttgactctgttgcttctgtggtcagaagaggagtttgatgcacaacttcaaggcaatctcaaagaaagaaacaagttcttggcaagagaggcatcctccttgaagtatttggctgaggagtattcaaatcccagttatcttgaccgaatcagattacaacccatctgagtggagccctggcttctcaggcagacctggtgtctccagctgatgatttgtccctgtctgaaggcacttctggatccagctgtgtgatagcccgaactaggaaatacctggaggtcacagtgtgaatacccggatgaatcctccagaaccttgatcaaagaga

SEQ ID NO: 99219 - DNA, 798 bp, Homo Sapiens
gaaatctcatggacaccagagtgagcgggaagcagcggtggccccgcagcagcagctatgcatcgggaggtggggcttttctgcttctgctcacctttctgctcacattttcccatagtgaacatggattgcctgtgtgtgaacacttttttaagtaaattaaaccttgtggatattttcagtttgtatcttatctgcccctcacagcagaccattgactgttcgatgcttttagaaatctccttcgtgctgagccctgcgtgctctggacccatgcgctctacgcctcctctgggcccctgctcatggcctgcccaccctggctgtccctgtcccctcttgctgatacggttctgctactctggtacctgggctagtgtctgtctctcgtgtgctaaggcagatggccgagagtggtgggtatcccacagtggggtgccaggcatttctacttctatgctttccaaatccacctgcccttccaccacccttagcgtggcccttccagtgccctgtcttagacctggcgccacttcacacgaccagacaggcccagggccccgggcatcctccctggcaagtactcccatccacctgccatatggacttcgtgctcctggtgagcctccgacccaggactgtcccctgactagctgacgtcctggtttgagccccatcctgattctggcacgtccattccaacaagtgagctcacatgaacttgtaggatatgactctggccacatcgcccacatgctggaatgcccgtagctggattcccacaaatcacacctgcag

SEQ ID NO: 99220 - DNA, 522 bp, Homo Sapiens
  misc_feature (12)..(12): n is a, c, g, or t
ggcgtccgtgtngttattgtggtggtagcggcgtctggctgctgcggaccccgccgagtcctagcgcctggcctgcgcgccgctgcccgcgccacaggattaatttatttttggaaatcaagtgcaatattggaagccatttctactaattttatttcacttttaaatttatgatttgatttgaatactatcatgggaggagctgtgagtgctggggaagataatgatgacttaattgataatttaaaagaagctcagtatattcgtactgaaagagtggagcaagccttcagagcgattgatcgtggagattactatttggaaggctacagagacaatgcttacaaagacttagcctggaagcatggaaacatccacttgtcagcaccttgcatttattctgaagttatggaagcattgaaacttcaaccaggattgtcttttcttaacctgggaagtggaaccggatatttaagtacaatggtgggaccaggacccaatgctaataaagactggactgtg

SEQ ID NO: 99221 - DNA, 849 bp, Homo Sapiens
tgccagccgggcactggcagtgcttctgcaagccccacgtgtgcggcaggcctgcgcgtctgcaaggatggcttctttggactggatcaggctgactattttggctgccgcagctgccggtgtgacattggcggtgcactgggccagagctgtgaaccgaggacgggcgtctgccggtgccgccccaacacccaggccccacctgcagcgagtgggcctgcgagggaccactacctcccggacctgcgccacctgcgcctggagctggaggaggctgccacacctgagggtcacgccgtgcgctttggcttcaaccccctcgagttcgagaacttcagctggaggggctacgcgcagatggcacctgtccagcccaggatcgtggccaggctgaacctgacctcccccgaccttttctggctcgtcttccgatacgtcaaccggggggccatgagtgtgagcgggcgggtctctgtgcgagaggagggcaggtcggccgcctgtgccaactgcacagcacagagtcagcccgtggccttcccacccagcacggagcctgccttcatcaccgtgccccagaggggcttcggagagccctttgtgctgaaccctggcacctgggccctgcgtgtggaggccgaaggggtgctcctggactacgtggttctgctgcctagcgcatactacgaggcggcgctcctgcagctgcagggtgactgtaggcctcgcacataccagtccctctgcgccagcaagtctgcgcgacaactgcctcctctacacacacctcccctggatggcttcccctcaggccgccgggctgagagttcgcagacaacacctgcccct

SEQ ID NO: 99222 - DNA, 738 bp, Homo Sapiens
ggtccacatgcagcatgcttccccatgcctgtaccctgggggatttaggtcccagcctcgtgccctcccggctccccctcccgcctgcaggtactaccgcatggcagccttcggccaccacgcctaccgcatgcaggcggctgacgtgctctatgactgcctgcccctgtaccactcggcaggaagacatcatcggcgtggggcagtgtctcatctatgggctgacagtcgtcctccgcaagaaattctcggccagccgcttctgggacgactgcatcaagtacaactgcacggtggttcagtacatcggggagatctgccgctacctgctgaagcagccggtgcgcgaggcggagaggcgacaccgcgtgcgcctggcggtggggaacgggctgcgtcctgccatctgggaggagttcacggagcgcttcggcgtacgccaaatcggggagtactacggcgccaccgagtgcaactgcaggcattgccaacatggacggcaaggtcggatccatgtggtttcaacagccgcatcctgcccccacgtgtaccccatccggctggggaaggtcaatgaggacacaatggagctgctgcgggattggccagggactctggaatcccctgacaaggccggggaagcatggacctcactggaggggtcaagatcacccaaaagtgacccgatgcgcagctcaagatggccatgtcaggaagaagacgccaccgagaaggaag

SEQ ID NO: 99223 - DNA, 598 bp, Homo Sapiens
  misc_feature (396)..(404): n is a, c, g, or t
agagcatagggctttaagatgaatttgcagggttacaggattacaactgcaatgtgggctaataatagtgccccctgcattaagctgcagagattgagcgagtaagtgggaagctgagaaaatgcccccatggggtagacactcaataagcatctgctgttattaccaggactcgtatggtcatgggtgacagcttcagaccacaggcagtccacctacaacctgtgcccctatccaccatgccatcctgcgccacacaccagccagcgtccccacaagccccaaccgacgttatggggatcctaaagcacttgctgggcctcagtaagtgctccccaaagcctcaggctttcttccgcggcaaaaagagacaagagaggaggagaaagaaaaaannnnnnnnnagtccacaaagaagagtaaccacgtgggcgaggagaccgacacgaaagagcaggacagtagccaaagaatatgttgatgtgacaaaagaggagaggcacgaagataggaggagcgcgcgagaagtaaaagaaaggacaagagaagtttgcgggcatgcacgacacagaagaggggggaagaaccagagcgcgag

SEQ ID NO: 99224 - DNA, 1029 bp, Homo Sapiens
acacagtcgtatgcccacgtgtcgagtgaccgcacagctcgctgaactgtagaaccgaagtagatgagatgtgccgccaggcttgacccccttcaaagtgagcttgttctttctgctcgttggcaacagggccacggcctcgctgacctaccattgttgaggtagtccctccacgactcccatggtggttgcaaacttgttcttctgtccatctcggacgcgttgaggtttggaatcatagtccttgatggtgatgcctgtggggatctcagtccagagacgggcaaacttgaccggcgtgaccagctcctggggtcacggtccacgtgcacgtgcagcatcaggtgcagaaggaggcgcgcaggtcaaagggcagcatctcgtctgccatgcacaggaaaatcaggtccacacccagctgctgggagatctcgtcgatggccaagtactgccggtccaagcacatgcgggcaaagagcttcagctggtacctgtagtagctgagcacattctcgtcatgggcgttgccggcccgcgcctcctgggccagctgcctcacactcttctcatgatgctcgttattcttgtcagtccacgtgagccacacttcctcttctgagtactccatgatcaggtactcgtgggattgggccatctccttcacgggccgaagcctgcagaccaccagcaactcggtccggatgagaatgtcactgttcttggggtccagcacacacttgcagatgagctcttgggtgacggggatggcgatgcggttggacacacacaggtcagagaggtagtccaggaacctgggctcccggttcttgcgcacaaggctgacgaaggtctccacctaggtcttggagatgtgcttttccaggagcttgcggttgttgcgcagcagggcagcgatggtgtcctcggccaggatgtcagagccaatctgcgactgcatcatcccaaactgcttgtcaatgtgctcgtgcgtcttgcgtgagtcctcctgggaatgccggaacacgcggt

SEQ ID NO: 99225 - DNA, 716 bp, Homo Sapiens
tctttggaagtcgccggtgctgttgtagttggagtctgttcacgggcctgagcttcgaggccaggctcccgggtgtcgttaatgttcggggccgccgggcgccaaccgatcggagctccagcagccgggaacagctggcatttcagtagaaccatggaggagctggttcatgaccttgtctcagcattggaagagagctcagagcaagctcgaggtggatttgctgaaacaggagaccattctcgaagtatatcttgccctctgaaacgccaggcaaggaaaaggagagggagaaaacggaggtcgtataatgtgcatcacccgtgggagactggtcactgcttaagtgaaggctctgattctagtttagaagaaccaagcaaggactatagagagaatcacaataataataaaaaagatcacagtgactctgatgaccaaatgttagtagcaaagcgcaggccgtcatcaaacttaaataataatgttcgagggaaaagacctctatggcatgagtctgattttgctgtggacaatgttgggaatagaactctgcgcaggaggagaaaggtaaaacgcatggcagtagatctcccacaggacatctctaacaaacggacaatgacccagccacctgagggttgtagagatcaggacatggacagtgatagagcctaccagtatcaagaatttaccaagaacaaagtcaaaaaaaa

SEQ ID NO: 99226 - DNA, 564 bp, Homo Sapiens
  misc_feature (529)..(529): n is a, c, g, or t
gctccagatagggaaggtccttgaactcatcctctccgacagccacatagtaatggccagttaccagctccttccctgctgacagtgggagcccctctagggtgcagagtttgcacacagccccactctgcaacttgaccttctcagtcaggagcttcaacacagtttcccagtcctggctggcagcctgggacagcttcagactaaatgggggacttaccaggtccccattcctgaacacatggatatagctgggagcacctgcaggcagctgccgtccaatggccccatcacacaagtggcgagtcacgggaggaccttgtagtctgcagctcttcccacctgggtccttccctctatggggtaaatagtggagcttgtggaatcgttcaaatccagcggccacatactgccctctgttcttcaagtctgccaggttggtgacagggtggccatgacaaggtgtgtagagggcacgcacagccagtggggcctgcacagctgatgtcacctcgcagaggaaggcctnccatggtggggaagcgcctcgtccgaattcgaatc

SEQ ID NO: 99227 - DNA, 805 bp, Homo Sapiens
gaaaagttctccaagtcctcacctgacccagaagcccagccagcttcacctctcattttgatcaggagccaagacagtggtcctgccaaatacacgggtcctgttttctgtttgaactctttagtgctactcatccttcaagctatttcctatactgccaccagagtgaccctcaaaccccaaagtcgtgtcaaataaaacctctaaatcaattccccaccaatctacttatagaatcctgactccccagggtatgaattcactctctagacagtaatggttacttccagaatcccttccatctctgacccatgacctgtgctttgggccatctctcccagtggtttatatcatctgcctgctttaggaatacacaaactatgaggaaaacaagtgcaaaacaaaggagtaatggcacctgaaattttggtgtcttccgagtgctctcttgacatacactgagatcagcgaattttcctaacagacagcttaggggcagccagaggctctttttccccctcctttcttccactcatcctctgaatatctcctcatctttccagaaaccactcaatgtccatggtattcttctgctgcccaactaggaggaaatttctacttctttctctgagctcctttaagttcttttgcatccttgattctgctcatatctggtccagagtctaccaggtgctccaggtgctcctgggggctgaacccagaaggttgttggggacgtccagggggaccgatttgggcccggtccatttccgtctggctcccatacctcgaagactccgttccc

SEQ ID NO: 99228 - DNA, 938 bp, Homo Sapiens
  misc_feature (463)..(573): n is a, c, g, or t
ggacaggctgcatcagaagaggccatcaagcagatcactgtccttctgccatggccctgtggatgcgcctcctgcccctgctggcgctgctggccctctggggacctgacccagccgcagcctttgtgaaccaacacctgtgcggctcacacctggtggaagctctctacctagtgtgcggggaacgaggcttcttctacacacccaagacccgccgggaggcagaggacctgcaggtggggcaggtggagctgggcgggggccctggtgcaggcagcctgcagcccttggccctggaggggtccctgcagaagcgtggcattgtggaacaatgctgtaccagcatctgctccctctaccagctggagaactactgcaactagacgcagcccgcaggcagccccccacccgccgcctcctgcaccgagagagatggaataaagcccttgaaccagcaaaaatnnnnnnnnnnnnnnnnnnnnnnnnnnnnnnnnnnnnnnnnnnnnnnnnnnnnnnnnnnnnnnnnnnnnnnnnnnnnnnnnnnnnnnnnnnnnnnnnnnnnnnnnnnnnnnngcctgcggcccgctatctcttatctatagctatcaaccaccaagtggagcggtcacagaatcaatacccgtcgacgaccgcgagcgaggcagtactaatactgatgacaagcggcaggaggggggagcgccgcccagactggcgagcgtgggcattgacacaccacggacagagggtgggcagggacaagagaaggtctgcccaactccgaggctgagccgcagcatgagccgaaaccaactagcagccgcgacagcgggcgacccttctaggatgagagagaggagacgaggacccagcacatagcgcaggccgaaggggcggggggcaatccaacgatggggagagcaaaggagagaagactg

SEQ ID NO: 99229 - DNA, 951 bp, Homo Sapiens
cgaggcgctggtgcacgggggcagcgcgcagcaggccggcgggcatggcgggcgggctggctggcaggcaggactgggatcgaggcccagaaaacggagcagcgggcaccaggaggcctggaacggggcgagcgccatgagcaacaaatgcgacgtggtcgtggtggggggcggcatctcagggccccagccgattggattggatggtgcccactacattgagagccggttttcctctcccagtctgccaactcccatgccagtttcttctggaaacaccctcacagggacacccagaaacaatgcttcacctgccatctaggtatcccaccatccagtcaagttgacacctaaaattaaccatcacaatgggtatggcagcagccaaacttctgcatgactctggactgaatgtggttgttctggaagcccgggaccgtgtgggaggcaggacttacactcttaggaaccaaaaggttaaatatgtggaccttggaggatcctatgttggaccaacccagaatcgtatcttgagattagccaaggagctaggattggagacctacaaagtgaatgaggttgagcgtctgatccaccatgtaaagggcaaatcataccccttcagggggccattcccacctgtatggaatccaattacctacttagatcataacaacttttggaggacaatggatgacatggggcgagagattccgagtgatgccccatggaaggctccccttgcagaagagtgggacaacatgacaatgaaggagctactggacaagctctgctggactgaatctggcaaagcagcttgccactctctttgtgaacctgtgtgtcactgcagagacccatgaggtctctcctctctggttcctgtggtatgtgaagcacgtgtggaggcacaacaagaatcatctcgacacaatgaggaacacggaagag

SEQ ID NO: 99230 - DNA, 985 bp, Homo Sapiens
  misc_feature (724)..(724): n is a, c, g, or t
ctggtaccggtccggaactccaaggatcgagccctttgtgagagctgtgacgctgcgcctgacggtggcaccatgagcagctcaggtggggcgcccggggcgtccgccagctctgcgccgcccgcgcaggaagagggcatgacgtggtggtaccgctggctgtgtcgcctgtctggggtgctgggggcagtctcttgcgcgatctctggcctcttcaactgcatcaccatccaccctctgaacatcgcggccggcgtgtggatgatcatgaatgccttcatcttgttgctgtgtgaggcgcccttctgctgccagttcatcgagtttgcaaacacagtggcggagaaggtggaccggctgcgctcctggcagaaggctgtcttctactgcgggatggcggtcgttcccatcgtcatcagcctgaccctgaccacgctgctgggcaacgccatcgcctttgctacgggggtgctgtacggactctctgctctgggcaaaaagggcgatgcgatctcctatgccaggatccatgcagcagaggcagcaggcggatgaggacgacagctcgcggagaccctggagggggagctgcgaagggctgggcgccccgtccctccctgtaccctcttctggcctctgtgctgggtccaagtgaggcctgggactgtcccacgctgaggcacagcctggcacaggggccttagcacgtgtccctacctccggnagaccctctgctccctttctccagactggccttaagcccaggaagccactggccttgctggcggtgaaaggttctgggcttgcctcgaaccttgacggattaatcctttgtccgaccctctttttcggcaaactatccccagctacattagattcctatctgccccgcattggatccccctccacatacacgtacctcacccccattaccatcgcggcgccccccacgcccccgcaaccccgcccggtgactcctcccctc

SEQ ID NO: 99231 - DNA, 1107 bp, Homo Sapiens
agtgtcacctgagaaagttgtgggtccacatgtgaacgagaggtttcactctgcatagaatttgtctcatggcgataacatgcgggatccttctaaagctagttaggatttgcgtaacgcgggtcttggttggcctgtgcccggccttgtggcagtaacaaagtatcggctatcaagggacagctccagggtgggaccggcctcgcactcaaacccagcactcgccaaactgtatgaccgagaatcttcagctgttcgggccgagccgggtccttggtcaccttgagcaagtcgcagcccacggtggacacggcttacagctgcacgtgctgccactctcgcccgagacaaggaaagaagcgggagaaagttaattggcccagatgtccacgagcggccaccacgatgcgattcttgacgcctgtcttcggtggtggtgagagaatccaggtccacctccaagcctcccagcaggtctttcattttccgccgctcattctgggaaatccggatacaggactcggagaaggtgtcccgtaggatctgctcacagaggagcctcaggtagtagggatggctgaagttctcccgtgggtagtacacctccttgcgtaggaacaacttccagggcgtgccggtgtaggagaagcacacgctgccagagggcgcgagtagctgggtggagaccccctggtcctccacgggctgtgtcaagcaacgacgctctgctgaaagggtccctgggtcctcgggcagaggcagtggtggcgctggtggaggtgggggtgtgtgggcaataggcagcttctggccaaacaggtccagaaggggcccctgcttttccttgatggagctagagggcccaagctgtagcggggccttgggtcgaggagccacagctggcggggggccctttcctgggctgggggacagcatcggcggggacgagtgggcaccgttgatacccagcttggccagagcctcgtccttggggtcgattttcctcaggaaagctggatggctgcacgggcacaggcacggggcccgggcggctctggtacatgcggatgatgttgccaatttcctgctgggttgtgccgcttgggc

SEQ ID NO: 99232 - DNA, 686 bp, Homo Sapiens
ctcgcgtactgcctggggccctgtgctgcccaagaggtgcagcagtctccccactgcacgactgtccccgtgggagcctccgtcaacatcacctgctccaccagcgggggcctgcgtgggatctacctgaggcagctcgggccacagccccaagacatcatttactacgaggacggggtggtgcccactacggacagacggttccggggccgcatcgacttctcagggtcccaggacaacctgactatcaccatgcaccgcctgcagctgtcggacactggcacctacacctgccaggccatcacggaggtcaatgtctacggctccggcaccctggtcctggtgacagaggaacagtcccaaggatggcacagatgctcggacgccccaccaagggcctctgccctccctgccccaccgacaggctccgccctccctgacccgcagacagcctctgccctccctgacccgccagcagcctctgccctccctgcggccctggcggtgatctccttcctcctcgggctgggcctgggggtggcgtgtgtgctggcgaggacacagataacgaaactgtgctcgtggcgggataagaattcggcggcatgtgtggtagtacgagggacatgtccgaacagcccgctgcaacacgctgtcctcccccaaacagtaccagtgaccatggg

SEQ ID NO: 99233 - DNA, 990 bp, Homo Sapiens
ctgcagctgaggccagctatgcccgggatgcctgtgccaaggcagtgtaccagcggactgtttgaggtgggtggtgaacaggatcaacagtgtcgatggaaccccggggccgggatcctcggcgtgatggcaaggacacagtcattggcgtgctggacatctatggcttcgaggtgtttcccgtcaacagtttcgagcagttctgcatcaactactgcaacgagaagctgcagcagctattcatccagctcatcctgaagcaggaacaggaagagtacgagcgcgagggcatcacctggcagagcgttgagtatttcaacaacgccaccattgtggatctggtggagcggccccaccgtggcatcctggccgtgctggacgaggcctgcagctctgctggcaccatcactgaccgaatcttcctgcagaccctggacacgcaccaccgccatcacctacactacaccagccgccagctctgccccacagacaagaccatggagtttggccgagacttccggatcaagcactatgcaggggacgtcacgtactccgtggaaggcttcatcgacaagaacagagatttcctcttccaggacttcaagcggctgctgtacaacagcacggaccccactctacgggccatgtggccggacgggcagcaggacatcacagaggtgaccaagcgccccctgacggctggcacactcttcaagaactccatggtggccctggtggagaaccttgcctccaaggagcccttctacgtccgctgcatcaagcccaatgaggacaaggtagctgggaagctggatgagaaccactgtcgccaccaggtcgcatacctgggggctgctggagaaatgtgagggtccgcaggctggcttcgtttccgccagccctactctcgattctgctcgcgtacaagatgaactgttattaaacatgggccaacaacctgctgggtcgaaaggagcggtgagcggtctc

SEQ ID NO: 99234 - DNA, 736 bp, Homo Sapiens
gcagaggcaggtcccttgcctgtggggcctgtggttggtactgagcgcctgatggctgaggccctgtagcgctggggatctgcggctccagaggcagagacaggtggtgacttccaagagtgactccgtcggaggaaaatgactccccagtcgctgctgcagacgacactgttcctgctgagtctgctcttcctggtccaaggtgcccacggcaagggccacagggaatgactttcggcttctgcagccagcggaaccagacacacaggagcagcctccactacaaacccacaccagacctgcgcatctccatcgagaactccgaagaggccctcacagtccatgcccctttccctgcagcccaccctgcttcccgatccttccctgaccccaggggcctctaccacttctgcctctactggaaccgacatgctgggagattacatcttctctatggcaagcgtgacttcttgctgagtgacaaagcctctagcctcctctgcttccagcaccaggaggagagcctggctcagggccccccgctgttagccacttctgtcacctcctggtggagccctcagaacatcagcctgcccaagtgccgccagcttcaccttctccttccacagtcctccccaacggccgctcacaatgcctcggtggacatgtgcgagctcaaaagggacctccagctgctcagcagttcctgaagcatccccagaaggcctccaggagg

SEQ ID NO: 99235 - DNA, 1138 bp, Homo Sapiens
ggtccggaattcccgggatgacgcagggcaaagcgagccatggctgtctacgtcgggatgctgcgcctggggaggctgtgcgccgggagctcgggggtgctgggggcccgggccgccctctctcggagttggcaggaagccaggttgcagggtgtccgcttcctcagttccagagaggtggatcgcatggtctccacgcccatcggaggcctcagctacgttcaggggtgcaccaaaaagcatcttaacagcaagactgtgggccagtgcctggagaccacagcacagagggtcccagaacgagaggccttggtcgtcctccatgaagacgtcaggttgacctttgcccaactcaaggaggaggtggacaaagctgcttctggcctcctgagcattggcctctgcaaaggtgaccggctgggcatgtggggacctaactcctatgcatgggtgctcatgcagttggccaccgcccaggcgggcatcattctggtgtctgtgaacccagcctaccaggctatggaactggagtacgtcctcaagaaggtgggctgcaaggcccttgtgttccccaagcaattcaagacccagcaatactacaacgtcctgaagcagatctgtccagaagtggagaatgcccagccaggggccttgaagagtcagaggctcccagatctgaccacagtcatctcggtggatgcccctttgccggggaccctgctcctggatgaacgtggtggcggctggcagcacacggcagcatctggaccagctccaatacaaccagcagttcctggtcctgccatgaccccatcaacatccaggttcacctcggggacaacaagaagcccccaagggggccacccctctccacttacaaattggtcacaactcccaccattttaagaaagcgccctgaaactgcttgagaaaaaccccctaccagtttgcggatgatcccgtcccaacccccctggaccaatgtcccgggggtttcggggccaggcacaaatgaaaggggtctagagggacccgggcacccccctcaatcccggggacttcttcccatcttaccacgcggaataaaatgcactgtgaagggttacttctatttaagatacagggccacctttctttt

SEQ ID NO: 99236 - DNA, 696 bp, Homo Sapiens
ccggccccctgtaggaatgccatctcctgctactcctggctcattctgctgcttggattcatctcaagccagaaacccaactgcccaatcttcttagaagggtccctcccagagcccctgggaaatcgggagaggggcatcacagccaagggatgcaggaaataacatttttaaagtattttaaacaaaatcctttttctttgaaaccctcctttctgcatcacttgtaccaggtcacttccagtcccactggcccatgtactttaagcatacggctgttccactctgtgtgtctagtgcacgaaaacaggtcatgttcatgaaataacatgcgagggaacagctgtgtgaatgtgtcactgctttctccacgggggatcttaattatctttcaaacgaggatactgtgacctctagagctgaatccccagcagcagagtctttgcagagcacaagccccgcagaggctggttctggccaggagctactccctggattcctgtcaaggccctgctggacaagaaactcagcaggagccataccctggggagaaaaggctcagaggggtgggcagcagggaccctgctgagctgtgctcctgctggaggccagggggacccttccccaaccccgtgaaagggggcagctctcctgcagtgggaagcaaaacatcctatctccattccaccagggggg

SEQ ID NO: 99237 - DNA, 882 bp, Homo Sapiens
  misc_feature (740)..(807): n is a, c, g, or t
tctagcggatgtgacatttggttccgcgtcagtttgggagcttccccgggacctgtcgctgcaagcccttctgttcgggagccacctggcaccgttcgccgtgctctgatttcctatcgcacgaaccttctgttcctagcttatcacccggtgaccaaggggcacccccgttccccggggccgtctagccctgaggacagaactgtccatggtctccccagtgaagttcaaacggccctgacatcgttggcccttgtgcatttcttgtctgaagaatgaagggccatttaactatgctgtgtatgccacacttactgttacacccaacataccttaagaccacagaaaatacttagcacatttaccaatcactctcttggtcttggcatcaaaacaagcacgcaacaacaagcctgttctgatttacactaacttagagtgtccagagacacacacaccattggttcacgttcaaacattttctgagtgcctaacacacgccaggcatattcttcttataacttgcgaagtgcaaagctgcaacacagatatagttcctatgtcttaaaagctactggggaaaaaagattcagaaatgagtttcaaatacaaaatcgcaagggtcatcccgaagtagccagcctgggaatctttctgatgggctagggaacctaactcttagtaaggataatatatagctaagtaaagaagggccacgcggggacatggtggttcacacnnnnnnnnnnnnnnnnnnnnnnnnnnnnnnnnnnnnnnnnnnnnnnnnnnnnnnnnnnnnnnnnnnnngtggaccacatgaggaagtcctgtctatgcaaacaatacataaattagctgggcatggtggctgtgcactctata

SEQ ID NO: 99238 - DNA, 456 bp, Homo Sapiens
  misc_feature (1)..(1): n is a, c, g, or t
ncaatatatagtctttctgggatatcagcttctgcctaaattgtgagaggtggtgtttcaaaagacacacgcaccagtggccccggggagagctgcattccaggttcctgtcctacgtaggcccctacggggtgctggggacaccagtctcctccactcacttggcaggagtcaggactgtccacctcttcaactggcacaaggcccaagcagcatgggggccctgagtgaaatggagggtcccacactgcttccaggacaggactgtcgggggctctcctcacccctgactggcccacagcagcaggctgctcctggcgttggcagcagtcgtgatggggctgcagcagctggtgagtggaggtcgtcgggccagtgtgtataagaaaagagcccctcgtccgggcttagacttgggacccctcgtgatctggtgactttgggggtcatatccat

SEQ ID NO: 99239 - DNA, 988 bp, Homo Sapiens
gagacccccagctctgggcccttggatgaggagggaccgtggccccagtcctggcaaatgggcatgcaccctacagtcggactctgagccacatcagtgaggctagtgtagaatgctgccttggctgaggcttcagtggaggccgttggcccagaaagcctagcctggggacctagcccacctacacacccagctcccacccatggagagcaccccagtcctgttcctcctgcctggacctggccactctgccacaagctctaccctcggtacaacaggctctgtccccacattacagaccctgccccatctgcacacctagactcagttcataagtccacagactctggcccttcagaactgccaggccccactcacaccactacaggctctacctatagtgccattaccactacccacagtgctccaagccccctcactcacactactacaggctccacccacaagcccataatctctacccttactactacaggccctaccctcaatatcataggcccagtccagactaccacaagccccacccacatctatgccaagccctacccataccacagcaagccccactcatacttccacaagccccacccatacccccacaagtcccacctcacaaaaccagtatgtcacgctcccaccactacaagtcctacccccagtggtatggtgccatagtaccagactgccacaagtgccaccgcatcgctaccacaagcctcgcaccatcccatgcaaagccccatccttataaatgtaagcccttaccactgtgcagctaaggaaataagcaaacccactctacccagggcccactcaccaaaaagctgcaaagagcccacacaacctggcccaaaggaagtaagaatgaccacgaagagcgcgagaagaaccagcccaggagatcgcacaatagaacaaatgaatgcgaaggcaaacaccataaagggagacccaagaaaacagcaag

SEQ ID NO: 99240 - DNA, 1005 bp, Homo Sapiens
  misc_feature (458)..(496): n is a, c, g, or t
agggctcctccaagaggtcccgatccctctgctatccacaaatccacaaacttagaatcacttgcatccattttccaccaccatggaccttatgctttgaactgttttgtctacctgattaaatatataacttcttaggcttcttgagatggtgaaaagcagctcaggattcccataagcaactttgtggagccctggaaatacctactcagggctgtttttacaagaggttttgtggtcaggtgctttactacttcagccataacgtttacctttaaaactcagctgacttatggaagctcagcatttccaattcgcttagatgacaggcaacagtctgcagaagggaggttctaacgtcaacccacgtggattccccacaaacgcatcatattggcctaaatccatctatctaccaatgtcagatctaaaatgaggtttcactaataagtgacctnnnnnnnnnnnnnnnnnnnnnnnnnnnnnnnnnnnnnnnttccaagaatttccccgtttcccaattagtctcagaggagtcgtgaaatgggcattgggtagaaaaagtccatgttttcaactgtttcttttgaataaagcctgattcccccactctgcccccaaacttttcccgatgatatacattcttctgaaagcaatttcatgcttttagtctgctttaaaaaacctgacttggttcttctcaggatttaaaaaccactgtaccaaggaagagatgtccacgttaaaaactattattaagagacagagacaaggagagagagactctctccaggccatgttagaaaagaaggaagtgctgggagcacacaaagagagaagaaaggctgggagacagaatggtttgcacctccctgtaaccagagtgaacacaggtcatagcagccttcactcagttttataacagacacacgaatggaggaacatgggattggaaagacgcacactgtcaaacagcctgatgcctttccactaaaatatggcaca

SEQ ID NO: 99241 - DNA, 849 bp, Homo Sapiens
ctgctggcctcctccaggagggctggcttctctgcagagctctgcttcctgcagcctctccccgacctcagagcctctgcagaggaaaggccccctggggccctgccccacagcatcatgatggggaaactccccctgggggtcgtctccccttatgtgaagatgagttcggggggctacacggaccccctgaaattctacgccaccagctactgcacagcctacggtcgggaggatttcaagccccgtgtgggcagtcacgtaggcaccggctacaaatcaaatttccagcccgtggtctcatgccaagccagtctggaggccttagacaacccggccaggggggaacaagcccaggaccatttccagtctgtggccagccagagctaccgccccctggaggtgcctgacggcaagcatcccctgccctggagcatgcgccagaccagctcaggctatgggcgggagaagcccagtgcgggtccccccaccaaggaggtccggaaggtccatttcgacacccaggagcacgggcctcaggccatcacggggctggagcccagggaagtgcctctgctccaccagcagcagggccaggacccgctggagcgggagaacttccgacatggcccacgcttcatgacgtcggagtacaattccaagtatctcagggaccctctagaccagccagatttcttgcagaagaaatcgatcggcgcaaaggaggggagtggcttcaccaaacagtcccaccagaagccccattgtcttccgaaccgacctcacaaggccctccctggggacctgacctcctccagtgccagagtgtcaccaagtcagacttctccc

SEQ ID NO: 99242 - DNA, 634 bp, Homo Sapiens
gtgggtcgtatgttgtcagctgattcattcaacagaaagttcccctgtcagcttttcacctgctgattttagcagttattaatgatcactcattgcctaaatccatcattcagaggggtggtaaagtagcgatattctacatctatcatgccttctacatttattagctggaattgtctaaaaaggactttcccatatcaactgtttagttactcttatgtacaattcatgtagaaaagacaggataaatgcttgtatctttttctttattaattttcagatgagttggtttagctttctccaaatgtaatcaagagccttaaagagattgaaactctttaatgtgatttggcctagcccagcgctaaatgtagcctagtacttaatatgtttgtaattcttctggttgatttttttattgattgatttccaaagagaggtgccattggaccagatcttataaaaataacttggataatctgagaggttcgtcattcttttgtgagtgtgtgtgtgtacaaatattatatgcatatatatttcaaaatatatcttaaacttttatctgtaagactttacctaattcatactaccagtttctatgcttccttaagattttgagtgtatcttggat

SEQ ID NO: 99243 - DNA, 771 bp, Homo Sapiens
ttattcctgtttcacagcagctactctcattagcaccaatgggactacatatggattcaaacggtcactcattaagtgctggggcacatttttacaggcaaggctataaacgttccattccaaaccagaaaaaccaagaacatcacacatctccccacaaatgcaaagaacatcactgttgaattgttagttgtatattctggtaaaattataaatgcatactaactagttttaaaggtgaatattctacaaatcttcaaatattactgttaaaatgcacaatatttgttacctccatgtgcttactttgagtgataaaaacatgttttatgttactccttccttctcccacataaagaaaacgattcagtatcaagttctcagattaacaaagaatatattaaaacattttacattctttccacaactgcataaaaaagcaggcatcctgcatacttacatggaataaagagctttctacattttcaaaattaattacaatcctaaaatatatttacatgaatatcttcactagctaatgagttgcaacaatttaagaccaacttgttttacaccaagtatttgcctactggctgagataaacattcttaaaaaactttactgaataaagtaattaacatatctttcattattttacttcttaacatttaaaatagttacatgagtggacagcatattttttttgaccaccaaaataaactctttcagcctaatgcttttaaagtacagtataaaaagtaatagaaatac

SEQ ID NO: 99244 - DNA, 785 bp, Homo Sapiens
tcctggctagccttgggaataaagtatgcccactgctcccatcagtcccatgctggaagactctaacacaactaagcagaagagccctgacctccagccacatctgccgtctgccctgactcctgcaggtgcccagtccggggaacaaccaacaggtcacataagcgacaagaacttccaagaggaaatggatataaaaccaaggaaagtggtagccccattgttgataatctagatacacaataatgaaaagctagtacaaaactctgtaaacatgcaactctttttaaacaacaatccatactctgaatatgtatcagagcagcttaaagactacactgctacatacccgcagtctgttccctggaaatggcgtgagggtggaggctggcacatgatgtgagagacatggcttctgccagagaagccccggacagctgcgagcgctggctgagaacgtcgctgggggccagtctttccggggtcacagccagcatgctgatgtcatggctgataacatcaccctcaatcacccaccaaaaggaacccatacggtaaaaagcggaggggggagggggaataatggagaaggagatggaaatcacttatatgatttttgtgacatgcttgaaacacatcctcttgaggagggggaaagttgggtggagctgggaacagaagttttatttacaagatctcctgaattattaacagaccttaaaaattccaaatggaaaacttctgttatcaaatcactgaaaatagcatatatatctggttctacc

SEQ ID NO: 99245 - DNA, 875 bp, Homo Sapiens
atatctgaaaaccacagtaattcttaagacactcagccttactatgatactctcatactgtggaatacagaactaatcttgcttccttctctttttaaatagcccattaggctctcgttcccactgtcataaggattccactttgtctcccaggttcatacctacacatgcctcattaaaattcaacgtgttttcaactcccaaagaccttagtatttggatgagaaatacttgttatatccaaaagaaagagagtactagagagagaaaaaagttaaacaaggatctctgagcgttgatggctttgtaatttttaatttttccgcagttgttttggctaccatttggagagcatttcatttccaagaaacacaatttgccaattactccggagatcctgttagaaaggaaatgggtgaaaatgcctcagagcagtggcacaaatgacccattcccttcttatttttagtgttcattagtaatcatttctagattctagcatctctcttatacctgccgcttaaatacataactgaaacccttagtaatgatttgtcctttggtgatcaatttcagcagcagtcacaaggcattttaaatgaacagaggccccatccgcccctaaagcggcccatccgacaagaagggacaactggaagtcttacccttgacaaatgtatctggatgatgtaatagacagcacagtatttccattttttctccattgtcttctgaacaccttacaccagcatttctgtaatgatcacaaagtcaattgatgttttcaagcaaactccagccacccacttcgtgctaaaaaacccgaactctaccacacacgcctgggtctgtttatcactagaaaagcccccagg

SEQ ID NO: 99246 - DNA, 774 bp, Homo Sapiens
  misc_feature (102)..(102): n is a, c, g, or t
ttccaatgcctgatgcttattactcaagtactagaagatttgggtgcagcccagtaattttcctttttattcaagagcagggctggtgcaggactactacanaatgtgtgcttcttggactagtcactcacagcataaaggcctgagtttaagagtttgaaaagaaggaaaagaaagcaaacagaaagaaagttgatgtgtgtttatagtccccgctctacctcaggtgaaggccagacatccacatccacagaaaggaacaactggccttttagacagttggaccagggatccagtgtccattgggatggccgtgtaatgaaaatggctagctccacttgtcctggccattcctaatggaggaggattccaaatgcagtacttagagtagttcttgctttagatctggaaatataggtagccagatacaggtactatcagaaactctggttaaaatacaccataaaaaactcagaatctactgtgtttagggctttcttccatcttaacttagaatgttttagcttataaaaatggaaccttgaaatagtctcttaaaccacagaccaaaacatgtaggtggatgtgtatatacacgaatatgggtgtatctctgttcacacacacccagttttgaccattttgcttcattactacacttatgataaatggtaaagcaaaaatcttactttaaaaaaagctgtagtaaacgacgcaatcagcagccaggtatagactctacatcccaaaccaaacacgatgctatatatttac

SEQ ID NO: 99247 - DNA, 203 bp, Homo Sapiens
ggcctgggccctgggcctgcgtccggctccgactcggacccagattcggattccgcaggcggctgtggtatgggggccacgctctggcccgagggccccggagcggactccgtcgccgtcccggccccaccgccgcccttcttcaccttcatggccttgcggggccgaggctcgcctgctgctgccgccgctgcctgcgccgg

SEQ ID NO: 99248 - DNA, 896 bp, Homo Sapiens
ctgagatcagctgaggaaagctttgccaagcttcagaggatcaaaatgtgcatttgggaggggtaggcgggcagatggcgccagattaaaaagatgctgggctcgctcgctgctctgaggtctctgaattgcctccagcacagcagtgtgcaatcaggaactccatcacacgacctaaaaacttgttgagtctctccaaaaagacttagcctgctacaagatactgagggggattgagatgcacttccagagggcctgagattctagaagcccagcatccaccagatgcctgctgaagtcgatggctgctgcacactctgctgaggaatcagatttctgaaggtccttcataaatacttcagtctgcaaagatgaacaagaggagcccgaagaatgtcgtatgaaatgaagactgagatactgagattctctcaaaacagcctcaggtgaaccaggagaataagcaggttaataatctttagtgaggaggctgggagggagggggccacatgtgtgccgcatacctgtacaagagtacatatttcctgtctcttccatgtcacgttctcttaagccccgaggcgtctacactgacaatttccactgcacagaatgcctttctcctcttctctgcaatgagatcagctgctcctcagtgaagctttctcagaagcctcccagccccagaccgcacacacattgacagacacagaggacagacagccctgtgccaaacctcagcctgtgtctggggtcttctccaggcaggacctgagggttacctttctcttcctccctagtgcttagcacagtgccttggttcaaacatgcactcactgagcctaccctggccaaggtcccggcgctggctggactaggctggcagtgtgaagaga

SEQ ID NO: 99249 - DNA, 1063 bp, Homo Sapiens
tggcggtagtgcgtttgctgctgtaccggtatctggcagaactcggtatgtattgtagctgagacagtggcagtatgcggccccgaccccaagtgcggggacctccggcgaataaaggtcggcctgcgggtaggccggtagggcctgcggtccggcctgcgggagaactgggtcgtcagtcctccgagtggtggggctggggactttgagcggatgttggctctagggcacagtaccctgcctggccaggtctggaggaacaagtgctgttgatctggcgtgtgtgctccaggggctctttccgcggcctttccacctcttttcactttggggacggtaggcctttataaacggactaatgctgggtgatttgttcctgtggttgttgatgccgaggaaagactctggtgccccaggactcacctaaactggagtcgaatactgtccgctcgctgtgtgaccttggcaacacgataacaagcttttctgacagtgagaagctgttctacagccacgacgtcctgtgcaagatcactaattgattacctggcatttctgcgacacaggcaggtccctcagggtatacgtgcacagtttgcgaaccattgtacaaccctgtctcagtaccctcgagagcactggctcacaatccgatagagccctgtcaggccatctcagaaatgaaaggcttgtgcacgaaggaacgggcagcgctcgcactgcatgttgatctccaggtcccaatgtccggacgctctactctgctcggcagtcgacttgccacaagacgattatcaggcagaagacattggccgcactatcgacacacgcccagatgaaacccctagagcatccagctaacaacagcaagggtgcgactatggcagatggttcaaaaaaatagagcacgtgaaaagcttgcgctggtaccctgattcagcgaagcacaaagagagagatagatgcacacaccgttacaagaacgattcgagtataaacagacgacccaagcacgcagcacgtgaatgcaggaggcaagggacccacagcgacgacgcacgaa

SEQ ID NO: 99250 - DNA, 842 bp, Homo Sapiens
catggccataggcccctccgtggttcacctggcataatcagctggtagaaacagcccttggggaactacatcacctgacctgatctccaggttccaggtaccatttcttacttgccccccagcagcactgtgcccctgtccacaggtcatgtgactgggtgtcgggcacggttcccttgcagcaatgaacagtacatctgtggatgaaggtgggcagatagaggtttggcggggggtggagcggggcactgatcatggcagcctgctgtggccagccccaagggcttcccggtgacttctcagagcctgaatgtctcccctggacaggtgggatcgagggaatgccatgaaggtgggcatgagggggaatctcgccaggggtacagtgcgtctacactgcttttcagactagtgccacgcaggcactaggtctcactggctgaggggcagcctctgtccccaggcgccgcgacttgccccatctgctgcagaggaggcccacctgtggtgagcattgtggtcttggggcctgcaggcgcccttgtggagttaccatggtgaccgcagccccttggactggtgctggggattcagacaccaggtcacgtaggccttggctcgtggcatggccaagccctggggtctgtcggggttggcagggcaggcttcctggaggaggggctgaggccgcgtattctccctctcatcctgccatccgctgcggctactcttcagggccacaactgtcacagaacgaggaaaccgggcttgtgcggaagagccttgtgtaagtggcttgagacgagagtccagagggagactgagccctctgtgattgccca

SEQ ID NO: 99251 - DNA, 140 bp, Homo Sapiens
ttcgcactgtggctcctgccgaccgccaggcgctgttacagtggatgcgaactaaccgtaagtatggtcagcagcagccggaacccacagttcaccttggtgcattcctttatgatgaagacttattgattcattatatg

SEQ ID NO: 99252 - DNA, 450 bp, Homo Sapiens
gtactgcagaaaccagctcaactatgcaaaactaccaccaggactggccgacaccaggagggattccagagaccacactgcagggagcatacagaaagaaaattaagagatcagatgcagcagcagccggaacccacagttcaccttggggcattcctttatgatgaagacttattgattcattatatgagaaaggaaaaatgagcagaaactactgtatgatgtgcagctcacaccagaacagcaactgtagggttatctttccagttcagcagtgcaactctatggagtagaattgaaaggagacttttcaccaattgcaggaaatggtcataaaaaaatacctgctcactgacagaataaaggtaccttgtaacttagtcaaatctcttttgcattgttgtccaatctgttcttggttgccattgtatagaaacagattgaattctc

SEQ ID NO: 99253 - DNA, 949 bp, Homo Sapiens
gtggatattatggctaataacacaacaagtttagggagtccatggccagaaaacttttgggaggaccttatcatgtccttcactgtatccatggcaatcgggctggtacttggaggatttatttgggctgtgtcatttgtctgtctcgaagaagaagagccagtgctcccatctcacagtggagttcaagcaggagatctaggtcttcttacacccacggcctcaacagaactggattttaccgccacagtggctgtgaacgtcgaagcaacctcagcctggccagtctcaccttccagcgacaagcttccctggaacaagcaaattcctttccaagaaaatcaagtttcagagcttctactttccatccctttctgcaatgtccaccacttcctgtggaaactgagagtcagctggtgactctcccttcttccaatatctctcccaccatcagcacttcccacagtctgagccgtcctgactactggtccagtaacagtcttcgagtgggcctttcaacaccgcccccacctgcctatgagtccatcatcaaggcattcccagattcctgagtagggtggcttttggtttttgtttctttcttgtcttgtctttttcattgaacaggcaaatcaagaaataggctaaacagaattttgagggcatgggccccaaataactcatgagttccaagttgaaacatggttgtgcaagttggacattacaatgtaaaacacatttttttcaaacacgttttcccttttgtttcaaaaaatgtaatattttcccccaagcgttttatatttatgtattttgtattcaatgtgaggcttattaaaaatagtgattttaatgtaagaatcagctaagatgcattatatatattttaattaaaattaaaacttcagatatttgtggattacaatcctcatttacttccaatgtgact

SEQ ID NO: 99254 - DNA, 881 bp, Homo Sapiens
gaagcacctaaccatgttgggcatcactgtcctcgctgcgctcttggcctgtgcctccagctgtggggtgcccagcttcccgcccaacctatccgcccgagtggtgggaggagaggatgcccggccccacagctggccctggcagatctccctccagtacctcaagaacgacacgtggaggcatacgtgtggcgggactttgattgctagcaacttcgtcctcactgccgcccactgcatcagcaacacccggacctaccgtgtggccgtgggaaagaacaacctggaggtggaagacgaagaaggatccctgtttgtgggtgtggacaccatccacgtccacaagagatggaatgccctcctgttgcgcaatgatattgccctcatcaagcttgcagagcatgtggagctgagtgacaccatccaggtggcctgcctgccagagaaggactccctgctccccaaggactacccctgctatgtcaccggctggggccgcctctggaccaacggccccattgctgataagctgcagcagggcctgcagcccgtggtggatcacgccacgtgctccaggattgactggtggggcttcagggtgaagaaaaccatggtgtgcgctggggcgatggcgtcatctcagcctgcaatggggactccggtggcccactgaactgccagttggagaacggttcctggggaggtgtttggcatcgtcagcttggctcccggcggggctggaaacacccgaaagaaagccggtagtctacacccgggtgtccgcctacatcgactggatcaacgagaaaatgcgctgtgacttgttgctgggagcggcggcagcgatccctggaacagaataaacttccttctcctcgggc

SEQ ID NO: 99255 - DNA, 2057 bp, Homo Sapiens
  misc_feature (120)..(194): n is a, c, g, or t
  misc_feature (1008)..(1008): n is a, c, g, or t
  misc_feature (1803)..(1989): n is a, c, g, or t
cggtcgggtgtgcctgacgttgttgtcgtgtgggttcgtggaaggttgcgtcgcgtctgctctctgtgtgcgtgagttcattgtttgttgttggtgtcctcttgttgtgcttcggtgcgnnnnnnnnnnnnnnnnnnnnnnnnnnnnnnnnnnnnnnnnnnnnnnnnnnnnnnnnnnnnnnnnnnnnnnnnnnnttggagtctgcttgcgtcgttgtggtcgtgttcttctctttactggcgtgagtcgtggctgtgcggcgtgttagtgtctgtatggtgtcgtgtgggactgtgtctgtaggtgtgttgtgtaggtgttcggctctatcttactctctctttgtgctctgctcctctgtacgctgcgtgttgcctacgctgtgtcttgctggttgtctatattgtctcttgttgttcggtagctgggtctctggtgtgccggcggggcaccccggttcgtgtcccttctattcgggcgcggctgcaggcgctctcccggcttgctactttcggttccgtgctgggcgatgtctgtctgtgaggttctgtgtcgtgcttgttgggtccttgtcttttgatttgtgtttttgctggtgtggttgttgtgctgctcgtgtcgtttttgttagttcgtgttctctgtgtttggctgtgtgtgtttgctttgtcttttgtttctgcttttctgttccgttgttcggctcctagctagtgggctaatgtgtctgttccgtgtgtctttctccttgtctgtcattgttggtgggtgtctccggtgtggtattggtgctattctggggtgttgtgcctgtctgtgatggtaatcttctctgttgtgcattgttggtcttgcttcgtctcttttttgtggtgtgtgtatcttttgtgttctagggtatattgttttgcactggatactgttgtgtgccttggtttgtgtgtttgggtgcatcattgtgggggtgtcttcatgaatgctggcttagtgtaccctccgtgttcgtgngacatggtgtgtgatatggacgttgagttgtgtcacaagttttcttgtgatgtgtgtcaatgtgtccaactgattgtctacgcacgtggaatgctggatgcatggccccgtggcttcatgggtgttctcaggtgctccaggagctatgggtgcttggcacttctcccggatagcaatggggagtttcacggagcacgggttcaggtacgggcatggctgcttctagaggtgggtgactctgctcagtccttccgggcggtatagcatggtacacctggtgcaatggcatcagtcgcgctgctctcaggagctatcagttggttccactattggagtcactctagcaggtccaggtccaacatttggaggccgtgcttagggggcgggggtggcagtaggggaccggggcccttggaggtaaaggagtgggcccggggcatgtcagagaaggctggcttcctgggcgtgggcactgggggtggtgggtaagccggtgggtgcatcagggcatcctcaagccttccgggctccggggagtcaggctccaggtaggagtcatcctcatcgtcgtgctcatagtcttcattgtccgtggggtacggggaaaggctgatatccacaggccgctcaactgcgccgtagaagctgtctgtgtccgagctggagtcgctgcaatgcagggtgcgttggggcggacggtgagcaccaggcctgggaggtcccttgatgctcacacaaaggtacacacaggcacacgcggatacatggacagatacacagatgcacacacggatnnnnnnnnnnnnnnnnnnnnnnnnnnnnnnnnnnnnnnnnnnnnnnnnnnnnnnnnnnnnnnnnnnnnnnnnnnnnnnnnnnnnnnnnnnnnnnnnnnnnnnnnnnnnnnnnnnnnnnnnnnnnnnnnnnnnnnnnnnnnnnnnnnnnnnnnnnnnnnnnnnnnnnnnnnnnnnnnnnnnnnnnnnntggatatatatacacaaagacacagggacacgcgcagacatgtagacacacagacacaaggactctgt

SEQ ID NO: 99256 - DNA, 1128 bp, Homo Sapiens
  misc_feature (468)..(468): n is a, c, g, or t
ctgggacacaatgggtgcattcaggttctctgtaagcctttcgggattcttgtctgccctctggtatatcttcccgcacaagttatgcaacctcaaacttaagcttgtaacaaagctaaagttactctcctgagtgtgtccttctgatggatggtgagaatataacttcaaagatgaagcctcacccacactccctgtacaaaacgcttctcacgtaagtgtctctttaagtgcttactgtagtatgacttattgctaaactttcgtccacactcttggcattcataaggcctctctcctgtgtgtattctttcatgcacagtgaggtctgacttactggtatagcctcgcttacactcctggcaaacaaaaggcttctcctttgagtgtatccgccagtggtgtctggtgagacttctcttccagctgaagccttgcccacacacattacacacgaagggcttctcnccctgagtgtgtcctctggtgtgtgaggagatttcccttccagttgaagcctcgcccacactccttgcatacaaaaggctgcttgccagaatgtgcaagctggtgtttcacaagatttgacttccagataaatccttgcccacattcactacagatgaaaggcttctcccctgagtgtgtcttctggtggaagaggagagttgattttaggatgaagcctcgcccgcaatccttgcaattaaatggcctttcccccgagtgtgtccactgatgtctaagaagatttgccttcaaactaaaacttttctcacactgcttgcacatgaagggcttctctcctgagtgtgtcctctgatgtatggtgagatttggcttcaaggtaaagcctcgcccacaatccctgcagaaaaaacgtttctcacccaagtgtgccctcaggtgcttgttataggaggacttatcccgaaaccttcgcccacactcccgacatccataaggcttctcctctgagtgtgtcctctggtgtaaagtgaaggttgacttttggataaagcctcgtccaccagtccttgcacaccaaaaggcttctcctcgtgagtgtgtgatctgatgtttcaccaagggttgacttctgaataaatccttgcccacattctctac

SEQ ID NO: 99257 - DNA, 436 bp, Homo Sapiens
gaccacatcactcccccgagttcccaccaccagcatttcctccaacctttttccatcacaaccagttagaaccctacaggcaacaaggccttctagaatccgcttaacccttggctgataacaggcaaatttcagtctgctacactttgttaggtccagaaggagctgcccatactactttcttatgagcatgctcagtatggcatatggacatgtaatgtcacatctttgtggagtgtgattttcttttttcacatatttgtatgcagtagagagcctgttgtagaaaacgctccctgtatcttgctgtactgttaaagaaagctgaattccacattgccaacaaaagcgtgaaaatgttcatgaaccttcctccaggaaaagccattcaagcctgattatttttctaagctaacttcaattaaattgaagaaaa

SEQ ID NO: 99258 - DNA, 1206 bp, Homo Sapiens
  misc_feature (604)..(686): n is a, c, g, or t
  misc_feature (821)..(937): n is a, c, g, or t
  misc_feature (1012)..(1068): n is a, c, g, or t
tctgtgtggtgccacttgcgcgtggcgtgagaccccgccttgtctgggggtacgccccggcgtactacactgtagtgggttgtccctgcttgattgcgtgactgccctgtgtggggacggcatgtgttgtacgtgctggcttttgttgtggcctgatgttagtgtgggttccatcgtcttcttgccatgcccactggtgttctcgccctcctgcgtggcctgggtgtgctctttcggcaagatgagcccagactcgcagctaatacgttatctggagtgcaggatgtagcctgttgccgcgttgctgttttgctcgctatgtggtggcccgtttgatcagcaggctgtattgacatagggtgcgggcgagcgttgctaagtggtccatgtgtgtgcgtatttcgctgtgtcttgtgtgtgccatcccctgtggctggcttgtggggggtgttgttgagatggtatcgcatgtgctgtgatgccattgcgactgatggttgcggcgtgggctgagagttgcgtggactgtgtgtgtagtgccccagggcggtggaactgatgatgcgtgtgggcgtgcttttggtggtggttctgttcgtgggannnnnnnnnnnnnnnnnnnnnnnnnnnnnnnnnnnnnnnnnnnnnnnnnnnnnnnnnnnnnnnnnnnnnnnnnnnnnnnnnnnctttggggtcctgcgcatagggacatggtgatccatgaggtacgcaagatcatgggccgtggcgttgtgcggatccgtgggttggatcaggacttcctcacataaggtacacaagagctgggcgcagttgctcannnnnnnnnnnnnnnnnnnnnnnnnnnnnnnnnnnnnnnnnnnnnnnnnnnnnnnnnnnnnnnnnnnnnnnnnnnnnnnnnnnnnnnnnnnnnnnnnnnnnnnnnnnnnnnnnnnnngaaccagccgggcgtggtggtacatgcatgcaatcccagctgatcaagggccgaggcagaatcacccgaacccannnnnnnnnnnnnnnnnnnnnnnnnnnnnnnnnnnnnnnnnnnnnnnnnnnnnnnnngggtgagactgtctcaaagagaaaaacaaaacccataagatgcacaggtatctgagaagggtctaaacaccctagaactgcaagcaaaattttgagtgtatacatgttttcctggcgaaggggtcctcattctcaaat

SEQ ID NO: 99259 - DNA, 433 bp, Homo Sapiens
gctgtaggtgaagagttgtgagataaatagttcactcagttgtacaaagcacaactagaactttttgttgggaggcttacatacatcttgaatattcttaatgtaataatgttgactattaagttggctacacagtcactgtatgtactaggaactggtttccttgacattctagaatcaatggctaggagaggcattaatctttgaggggctgaacatatcatgaagctgagtcagtatggaaaattttcaaataaacagggtgctgaagttccatctgtctcatccgcttatgataagttcttattgattagtgaatgtagcttaagcctttgtatgtgtcctcagggggcagaccgactttaagagggaccagataacgtttgaatggagggattatatttcaggtgttttagcttgaaatttatttttt

SEQ ID NO: 99260 - DNA, 826 bp, Homo Sapiens
  misc_feature (199)..(314): n is a, c, g, or t
tagggatgctagaagaactcaaagctaaggagcagtcaggaacccagataagaaagccatcctagttttgatctcaagatgtgtcataccgtctgtaatgaagcaggcatgccctctttaggctaacatattttagtggcttgctttttgctttttaaaaagtttttctctttaagagatgtggtctcgccgtgtcatnnnnnnnnnnnnnnnnnnnnnnnnnnnnnnnnnnnnnnnnnnnnnnnnnnnnnnnnnnnnnnnnnnnnnnnnnnnnnnnnnnnnnnnnnnnnnnnnnnnnnnnnnnnnnnnnnnnncctcagctactagtggccttgctttaaagaaacagtggaatcctaaatttatgactaaaaattcccccaaaagatgaaagatctacaatgtttttgtcagtattatatttgactcaggaactaattattaatggagctttgacacctgcagatggagggctgatcttgtgtcaagttaacaggaagactgcccacagatgacactgcatttgtatccctgtggatgtagagtattgggaaggcatttgttatagtttcatgcctccaaaccatgcattgtctgtgatgtatctgcccagccttctcagaactcaatgttgtacatttttccctctaggacctgaattggtcttggaggcagcttttagaaattcctctatgtagttcctgtccacatgcactatatatttgtgtcttctttctcctctcatgaatctgctcgtttctctacttctgtctacgtagaagcactcagcacctagtttctgctcattaaatgtgttctatatcct

SEQ ID NO: 99261 - DNA, 1406 bp, Homo Sapiens
agggcaggttatcaaaggatcgccagttgagacgcggctaccccgtgtgcattcgtgtgacaggcgcgagatgaatacggtttgtacgtttagtcgtaggagtgggcgcgttagtaataagttgtgttgtgttcactgaggtctatttcattgctgctgagggtgcgcaccatatacacagaaatctctgctcggaggcatgccgcatatctgagcttgtcagcgcatgtatgcaacgataacgccactgagaccagaatcgaaggatcaccaatgaggagggaccgtagagatctgaacagggaagcaattatctcgggccagaatatcagcgaagctaggcttctaacagacaaacgaccagatgtatctcacagtagttcgaagacgcggtcggaacgaggtacgctgaggggaccgacaccggatcacttcagcgcccactatggggtgacggaactacgtgggcggcgcaatgccgacagagaggatatagggaaccgctaaccagatctctgtggctaccctgccacagaatccggcggctcgacaagttggtaggcggacccaaagcgtgatggcggtgagatgccaggccgacgagaaagaagtgctagtagcccaatttgtctcaaagcgaaacaggtgtgggagagggtagggaacccatggggggttcgcatcgtgcatgctagtcgagcatcccgcgaaagagctgggagttggcagagccccgcgtttccgcagttacgtccacggacggaactagccaaactttggggggccgccaggtttcaggtcgcagaagttaggccagggacatcaccttcgaccaggcctcatggggcggggacctttcggcagccatcaggtggggcgacactccagggcagtcaaagcggagtggcaaaggcaaactcctcgggcacgggagcctcggccagttccacagtgcagccttccagcaccaccaggctcagtgggacccggccctcgagactctcaaaggagaatagcaggttgcccatgaggacaaaccagcatcttcggccagtgccacagggggtcggtggggtccctgggcccccccaggtgcgcaggaagacccatgtggtccgctggagagtcgctgagtgcatagagggctacactcctctcgttcagcttcatggctcccacgggaacagcagggctcactgggggagggcagggacctcttgtctggccacacagctcagcccttcgaccacctggttcccagggaacctcccgccgccgatcgcacagaagcccaggagggcgatcccagctcgagatcccgcgcctccgatcccgagaatgattgtagtaacgtagagtctcagatagcgaatgtgggagaggtgtataataaaataaataagata

SEQ ID NO: 99262 - DNA, 926 bp, Homo Sapiens
ctggtctgggcatgtgccccatcacttgttgctcccaagcctgattgagagacaaaagaaggtcaagctattttgtctggaaacattccttagcgatctcattgcccaccagaaaggacagatagagaagcagccaccgtttgagatctacttatgctttggggaagaatggccagatgggaaaccattggaaaggaaactcatcttggttcaggtcattccagtagtggctcggatgatctacgagatgttttctggtgatttcacacgatcctttgatagtggcagtgtccgcctgcagatctcaaccccagacatcaaggataacatcgttgctcagctgaagcagctgtaccgcatccttcaaacccaggagagctggcagcccatgcagcccacccccagcatgcaactgccccctgccctgcctccccagtaattgtgaatgccatcttcttccttctctttttttataatattgtacatatggattttctgcactgtttagatttaaccagcttttaaatctctctttgtctctaacagtgttagaagttcgtgattctccaaatatgcctagatttaaagctgatttaatttatggaaaaatcacccttcagactttgcttttctttttcaaatctcctaatggtagtatgatatagcatagtagaagggagatctggcctgggagtctggacaccaaagttctagctgcagcttagcttccaaatgtgaccttgaacaaagtcccttttacacctcagtgggcttcagcattcacttgctttattaacgtggcaagagaattcgggaagaagtgccttggaaattggcctcccagttataggaacccgcctcccgggaccctcttggtacttgatacaaagctaagcaggctgggaaaccaaattccttcggactcg

SEQ ID NO: 99263 - DNA, 848 bp, Homo Sapiens
cgtgtgcattggctcttcaagcttgcctgtgctgctccgtggagtgaaaaaggcagggtgtgctcgcagactgtgctataaactgcaatttctatttggggtcctcacggagaagaacaccaggaaagacagacaggaccagtgccatgggccagctttgctgctttcctttctcaagagatgaaggaaaaatcagtgaaaagaacggaggggagcccgatgacgctgaactagtaaggctcagtaagaggctggtggagaacgcggtgctcaaggctgtccagcagtatctggaggaaacacagaataaaaacaagccgggggaggggagctctgctgaaaaccgaagcagctgatcagaatggcaatgacaatgagaacaacaggaaatgagcccggaacgcaggcccccatgtctctgtgcaaagcctccctgcttccctctgctgagtctagggactgacttgcagcgtgctgtttaagttaagtttctctggtgcaatctgtgaagattgcctaatacttttcatgatcgatgtgttcgcattgctgaaacacaacagaagaaaaatggagtgctgggactggcagaggaaattaattgatgaaagaagaatggcccaagtttcattcgccctcagccacgcacaagggaaagggaactttgggttatgcctcctggacgcaaattaaaggccgacgaaagaggccttgccatcaatggaatactgccattttatattgcttagcagggcatttgacttactttatctgaggccagaactcatcacaacacagctatcaagtgctaagtttcaaaataatcactgttggaattgtccatctgt

SEQ ID NO: 99264 - DNA, 876 bp, Homo Sapiens
  misc_feature (739)..(739): n is a, c, g, or t
agcccacccgcccgccgctgccagagctgctcggcccgcagccaggggacagcggctggtcggaggctcgcagtgctgtcggcgagaagcagtcgggtttggagcgcttgggtcgcgttggtgcgcggtggaacgcgcccagggaccccagttcccgcgagcagctccgcgccgcgcctgagagactaagctgaaactgctgctcagctcccaagatggtgccacccaaattgcatgtgcttttctgcctctgcggctgcctggctgtggtttatcctttttgactggcaatacataaatcctgttgcccatatgaaatcatcagcatgggtcaacaaaaatacaagtactgatggctgctgcaagctttggccaaactaaaatcccccggggaaatgggccttattccgttggttgtacagacttaatgtttgatcacactaataagggcaccttcttgcgtttatattatccatcccaagataatgatcaccttgacaccctttggatcccaaataaagaatattttcggggtcttagcaaatttcttggaacacactggcttatgggcaacattttgaggttactctttggttcaatgacaactcctgcaaactggaattcccctctgaggcctggtgaaaaatatccacttggttggtttttctcatggctcttggggcattcacgaccactttattctggctattggccattgacctgggcatctcaatgggtntaatagttgctgctgttgaacaccgagattagattctggttctgcggactttcaaatatccaggcccctctgctgccaaatagggcccctctttggtcttaccttagaaccctggaacagaggggggacctttttca

SEQ ID NO: 99265 - DNA, 1265 bp, Homo Sapiens
ggctcttgtcccacctttggtggttgcgccgtgttctatgatgtagcgcttgggctggtgtgctttctcgctctgttggattggccccttcttaatgtttccgtgctgcgtacctgtgtgtgcacctggggcatccagcttgtgcattgatgccatcccgctccccattattctgtcaggatcaagcgtcctcgttttgtttggacggttgaagaagcatctgtagagaatccagaaagagtgttcatgaaggtgttacaagccccagaagaagcacatgagcattgaggctgactactgagccagaggcagcctcaagacagcagtggcatcaacttgtcagtctttggggagtgagcagctagacacttatgataagagtgatgttatcactgcgctaaattacatcttgccttatttctcagcaggaaatctagatgcggaatcaatgttgttaccattcattaaactgcttttttcaaatgtgcaagatggagataagctcctgttttgaaaaacaatacaaagagccccttgtttcaacctgcatccaacaattcaacttatgaaaataaattgagaaaggtgtatttgctagaaaagatgttagatgcagaaatacaagaaaaaaatcgatgaagttaaaagggaagaaaaaactgccatgcttatgcagtccagccttctaggtaacaaatttaaatgccaaatatttgaaaagaaattagaaactgtccaaccacaggaaaacagcctggcaaaggttcaaagtgtaggcaaaaacctgcagagagtgaacagagtcctcatgggcccaaggagcatccagaaaaggcccttcaaagcggtgggaaagcagagtatcaggagggaacagggtgcccaggcatttggggagaatgctgccaaagaaaaaaggctcgggagtccagccccaagggagctggaatagcctcacatagtgcaggggcccgagaacgtagcgggaaacgccgtctacaccaagccttcattcacccaagagcagaagccaacagtctcctctttgctgaaacccttctccatgggcatgccttctgccttccacaactgcaaaagccctacctcaggtcagagacagatcgaaagacttagcctacaccattttaattttagaaaaggcaaaggctagagtgaaaaaatatgaaggctgctaaaccaatcacacattccagaaaaaaatagcgcttttataaaactcactccattgtggcccacagaacacc

SEQ ID NO: 99266 - DNA, 995 bp, Homo Sapiens
cggttctcagggacttcgagcaggtgaccgggaacagctaaaccagctttagagtccgaaccaattgccttcaataaaggcaccagttgtgcagacgtcccggaagacctgtgtaatggagtctcgcagtaggccaggcccttcgtctcatagtgccggtgccccagaatggcttctcacacttggcacagacaaagttgctccaacgtgccactgcttgcccagcgcgttgaccactcggccctcgatgggccgcagtcagcaccgcagatgggacgcccatcttgtcatggcagggcagccagtagagctcacccttcagctcgcgggcctcggctgtcagctccttcccacagtgggtccagttgaagtggtcagggtggtaggcgtcgctcctgaacatgaggggctgctcgtcgatgaccaaggtggcaccgctggcagatgtaccttgccccaggcccttggccttctcacggttgtggcaagcccggcagagatgcctgccggcattcttcacaaagcccaggtcagccagctccacatcacacagctcgcagcggaagcagcccgggtgccagttgttgttcatggccttgatgacgcggccaatgatgaactcaccgcaggatccacagcacggagcaaacagcatttggaagtcgtgttcgcagtacttccggccttcaaactcatagaagagcccctcggggaagggccggaagcactgggcacacacgaagcagtgctcatggtacagctccccattgctgttgacaatgcgctcggcgggggagaagcgggcctggcagcgctggcacacggcgttggccaaggcgtccgacatattgctctgtggctgagatgccgctccgcctcctcgggtgcttccttccctgagcgccgccagcaacttctctgagggaaatagcagctgcctggcccgcttggcacagccacgtgcaagactgagcagccgccaggagtgtccggcc

SEQ ID NO: 99267 - DNA, 793 bp, Homo Sapiens
gaagcaggtgcccgtggaacctgggcctgaccccgagctccggtcctggcggcacctcgtgttgctacctttgcttctacggcttcatggcgcagatacggccagcggagagcttcatcaccccctacctcctggggcccgacaatgaacttcacgcgggagcaggcgaggacagggtcttgccctggctccggctgtcggtggcggggctggggctggagcggcggagccatctccttgacccctcatgaaatgccttctgctcctggccagtccgtccctctccctgccacccactgaccagatggcatctctgctcttagtggagggccactgtccaccgccaaggttatttataggggtgagcattatgtgtggcgtttcccttaaaataacaaaataagaaaagtctctagagcaaaaatgtttaaatcccatctgcctgccctctcatgttgtacattaacggattaaaaagtagattccagaaattaagccattccaccaggccttggatatcatcagagggacgatgggtgcaggtgctctgcgcacctgccacttggtggggcccccgatctcagcccctctggctgcaggagaggcccggggagagcttcatcacgccctccctcctggggcccgacaagaacttcacgcgggagcaggcacgtgggcgccggggtgcaggggcagtccaccagtaggtgggcggggagccagcttcgggggcaagggaggcccagcctgccaggactcgccagccctgttgttgccaggcttgtgtctagga

SEQ ID NO: 99268 - DNA, 909 bp, Homo Sapiens
accataaggggtttgagagggaaccaggactcaagccggaaaggcattttttaaggatccccagggccttattttctgccgccagagtaagcccagtttttgttctggatccggaaatttttagtaacttatacagcggcagctcacatttttcagccagctgttttcatgtctccttgtgctagtaaatcatccagatgtaaactctggcttcatatggtttcccatttaatatgtcaaaatacctgccagctggtggccatatctaggagggcgtggttccaggcacaactccttcatcctctcctgcatttccccaagagtcatccaggtcatagagaggctcaaagttctccaccaggggatctgctcctgctgctttgagaagagctgccagcctggtggaccctctcccagctgctatatgcaggggtgtggttccatcgtaggtagtactgtccacatgggcatcaccctccaggagcaggcagcctgccaatgagatgttgtcgtgctccacagccaggtgcagtgctgtgcgcccggacttctgctcctgagcattgacgtcagccccagcggccaccagcagcagcaaacatggcaggctattgctcatcatggctagatgaatggcattcagaccgtccccgttggggtggtcaagaagtagtgctgcctttttgtgcttgagtaagatactgagaactttatcatgtccttctttggcagctaggtgcaaaacagagttacccaagcggtccagaaggctcaggtcggccccagccctcagcaaatcctccaccacatcttcctgcttagtgatcactgccaagtgcagggcgtctggtacagatcatttctcatgttgataatgtcatcagaaatcaaaccagatgtgacttctag

SEQ ID NO: 99269 - DNA, 1137 bp, Homo Sapiens
cggggtgagcccagccccctgtgccactctgccctggctgcgtgcccttctggctatgtgggcgccatgctgactacacggggctgtctttcgaggcacaggaagtgctgcactcgacagctaaacagccccactgaggcctcggtggagacaagaagcctgcgccttctcaccccggcctccagcaccaggaccacaggcacagagtggctccgtcgcccgccgccctctccccggccacgcaacctctccaggcaggacaagagccacccagcagggacgttctgctggcacctaggaacaggcagtgggcaagcacgccagccctctcgcccagagttccacaaagaggggacaagggagggggcctgagtctcattcataccccggcacagccaggtaccagcagcaatcgcgaaacactcactgccctctgggcctgaggcaggtcacatgaaagacattcataggcggggacagagtcagttgcaggaggacagtcagtcacaggtggggacagagtcagtcacaggtggggacagagtcagtcacaggagagggcagagtcagtcacaggcaggggtagagtcagtaagaggctgagtcacaggcaggacggagtcagtcacaggtgagacagtcacagggcaggggcagagtcagtcacaggcgaggacagagtcacaggcgggatggactcagttgcaggaagggacagactcagtcgcaggcaggggcagagtctgtcacaggcaggaagaagtcagttgcaggtgggacagagtcagtcacaggaaggaatcagtcacaaacgggacagactcagtcacaggcagggccacagtgagtcgcaggcagggaccaagtccgttgcaggcgggagccgagtgagtcacaggcaggaactcagtgagtcgcaggtgggacagagtcacaggcaggatggagtcagtcacaggcagggacagagtcacaggcagacagagtcggtcacaggtgggacagagtcagtcacaggcgggacagagtcagtcacaagcaaggttcttggtaatcacacgggaaaactattctgaatggtaatctgccggctgccagacacatcaaatcgggcttaggacatgtcatacccgagcc

SEQ ID NO: 99270 - DNA, 891 bp, Homo Sapiens
tgaggagcagaccagctcttgagacctcattaccagacaatctgcgtccttcacatatcctttctgagcccttaagctggatgacgattgcccaccagaaggaagattagcccaagtaggaaggctgcaatgccactcagcatctttctccaagaatattcagactgagctctccactccacagaaacagggctcagcaggctggagtgatcgacaaggcaggtgtagacattgtccaagttcaggagtcatttctagcatcaccacagtctgaaaggtccagtctccattcctgatagggccagtggacatgaccccagctctctcctcctgcccattcaggaaccacttgatcttgatatccctggatagaagcctgtcacagagcagtgcagcagattatgctggtgcaggagtggggtcctctctgggtacactgtcacctctggttgcacttttctccccacagtgaagggtgcgcccagcctgtagttgtgtctacagaccccatccacggcctgtctgctcctctccaagagatccagccggctgttccactgctcagcatctggctgccccagcttggtcaatgccacaaacatccccacatcactgtcgaaacgtacatactcctccaagttaaagatgaatctgaccacaaactgcaccttttctgtcccgttggtgaagtaacagtcagcctttgcctgaatcacaaaatcttctggagagtctgtgccttgagtcatggaggaatccagtcgggtcagattcactagcagagccaccacccaggggacccacccagaacccattcctggagaaaggaaaaaaatgagacagtaaaatcgtcagcctcttcagaatgagttcataaaattcagtcagaaa

SEQ ID NO: 99271 - DNA, 836 bp, Homo Sapiens
ttggtttctgggactgtccagatcaagggaaagaataattcatggttgtgaccaagataaacgcagaagtgccccaggctctgtattgagtcagtatagtcctgagtcaggcccagagagtactagaaactaattctcactccactccacagaaacagggctcagcaggctggagtgatcgacaaggcaggtgtagacatgtccaagttcaggagtcatttctagcatcaccacagtctgaaaggtccagtctccattcctgatagggccagtggacatgaccccagctctctcctcctgcccattcaggaaccacttgatcttgatatcccctggatagaagcctgtcacagagcagtgcagcagattatgctggtgcaggagtggggtcctctctgggtacactgtcacctctggttgcacttttctccccacagtgaagggtgcgcccagcctgtagttgtgtctacagaccccatccacggcctgtctgctcctctccaagagatccagccggctgttccactgctcagcatctggctgccccagcttggtcaatgccacaaacatccccacatcactgtcgaaacgtacatactcctccaagttaaagatgaatctgaccacaactgcaccttttctgtcccgttggtgaagtaacagtcagcctttgcctgaatcacaaaatcttctggagagtctgtgccttgagtcatggaggaatccagtcgggtcagattcactagcagagccaccacccaggggacccacccagaacccattctggagaaaggaaaaaaatgagatagtaaaatcgtcagcctcttcagaatccc

SEQ ID NO: 99272 - DNA, 794 bp, Homo Sapiens
catttcgagcccaagtttccagctcgggtttccaggctcagaattttccaggagtaggttcttgggcagtggctgtgggagctggaatggcgcagctggaaggttactatttctcggccgccttgagctgtacctttttagtatcctgcctcctcttctccgcgcttcagccgggcgttgcgagagccctacatggacgagatcttccaccgtgcctcaggcgcagcgctactgtgagggccatttctccctttcccagtgggatcccatgattactacattacctggcttgtacctggtgtcaattggagtgatcaaacctgccatttggatctttggatggtctgaacatgttgtctgctccattgggatgctcagatttgttaatcttctcttcagtgttggcaacttctatttactatatttgcttttctgcaaggtacaacccagaaacaaggctgcctcaagtatccagagagtcttggtcaacattaacactagcagtatttccaacactttattgtatgataacttccttgattatacagaagcaggatctatgttgttgactctgtatattgcgtattgtgatgtgtctttatggaaatcataaaacttcagccttccttggattgcgtggcttcatgtatcggcaaacaaatatcatctgggctgtcttctgtgcaggaacatgtcattgcacaaagagttaacggaggcttggaaaactgagctacaaaagaaggaagacagacttccacctattaaacggacccatttgcagacatccagac

SEQ ID NO: 99273 - DNA, 802 bp, Homo Sapiens
ctggcttgccgcgtccccggataccctcagccagtgggcaggtctgagctcgggctccccgagcagttagagtccccttgcccgctccttcaggtctcagcggcggtggcagccgaggtgcaggatgcaagaaggcgccccccggccgggctcccgctccaggcctcgctcccctgcggccctctgagcccaccatggccgtcccaccgggccatggtcccttctctggcttcccagggccccaggagcacacgcaggtattgcctgatgtgcggctactgcctcggaggctgcccctggccttccgggatgcaacctcagccccgctgcgtaagctctctgtggacctcatcaagacctacaagcacatcaatgaggtatactatgcgaagaagaagcggcgggcccagcaggcgccaccccaggattcgagcaacaagaaggagaagaaggtcctgaaccatggttatgatgacgacaaccatgactacatcgtgcgcagttggcgagcgctggctggagcgctacgaaattgactcgctcattggcaaaggctcctttggccaggttggtgaaagcctatgatcatcagacccaggagcttgtggccatcaagatcatcaagaacaaaaaggctttcctgaaccaaggcccagattgagctgcggcttgctggacgctgatgaaccagcatgacacggagatgaagtactatatagtacacctgaagcggcacttcatgttccggaaccacctgtgcctggtatttgagctgctgtcctacaacctgtacgacctcctg

SEQ ID NO: 99274 - DNA, 507 bp, Homo Sapiens
gtctctgttcagcatttaggtcatgacgtcagccgtctggtgcagggacaggtaccctggcacagcctccatgtcgtccctcggctgaacaagaacgttgtttttgccatagagaagggtggcacgggagttctgatgcagggactccacgtagtcgcgggcagagagggatggccggtcatccatgctgccactggaatgcctcttctggatacagagggcaggacgcttggtgggcgagtcctgccgcacgtgggagctgtggatgcggtgcctctggacaagttcgtcagccgagggatcggtccagaagtgatctgcagtcttcatcttggtgtactctagggcacagggccccaccaacaaagatgcaaggatggggccgtccacagggtccatcaggagagcttccttctcatagtatttactgctgttttccacatcgaatcttattttacattttattgctttcctaaaaaaactttctacaatgaagattttaaccta

SEQ ID NO: 99275 - DNA, 1056 bp, Homo Sapiens
ccgcagccaaggtgggcgcctggtcctagaggcgcacggttgtaagccagacaaaaagaactggggtgcccggagtgccaggtggcgggcaagcggtgggcttttcggcggggctctttaggatttgcagctccaggaagcgagtatgtcgaagccgtgccacccaaaccagtcaaaccagggcaagttaaagtcttcagagccctgtatacgtttgaacccagaactccagatgaattatactttgaggaaggtgatattatctacattactgacatgagcgataccaattggtggaaaggcacctccaaaggcaggactggactaattccaagcaactatgtggctgagcaggcagaatccattgacaatccattgcatgaagcagcaaaaagaggcaacttgagctggttgagagagtgtttggacaacagagtgggtgttaatggcttagacaaagctggaagcactgccttatactgggcttgccacgggggccacaaagatatagtggaaatgctatttactcaaccaaatattgaactgaaccagcagaacaagttgggagatacagctttgcatgctgctgcctggaagggttatgcagatatcgtccagttgcttctggcaaaaggtgctagaacagacttaagaaacattgagaagaagctggccttcgacatggctaccaatgctgcctgtgcatctctcctgaaaaagaaacagggaacagatgcagttcgaacattaagcaatgccgaggactatctcgatgatgaagactcagattaattcccttctggagctttgagatctaaaacttctgttggcttttgccattccaaaactttggctttgccagaaaagtggttggtaactataaagaaaattatatatgaacacggcagtgttgcactgtgtttgagtagaacgtgtaaatgaattgttcccaccctttggtttgccagtaagtgactggattcttggcacatttatgttcccaaagtagaaccagagatattatttctatttatcaagcaaaaggaatttttaaga

SEQ ID NO: 99276 - DNA, 846 bp, Homo Sapiens
cactgctcctccaggccccccagactctttgccaaacccttgtagccatttccacctattccaagccaccagtgaccttgcaattggacaaaatcgccagcagataaatggcactcaaatggaatggaattcagaagtctggagcagggcttctggaggataacagatgggaaggcagcctttcctccagcctcacattcccatgccctcgtggctttggtaaagtcagctgagctcctggaattcaccaagacccaggggaacaatgatgagcaagagttgtcctgggcctcgaggagcctgtagtccagtagagaatctgggaacttagataacctgcagtacaatacagataaacacacatatggaagtgtttaggccatctttcttcaaatgtaagggttttgcttgaaaatacagccttttgatttaaaaggtcatcagaaaaataggtgagaagagctaagaaaattttggaaaagagaaaactgaggaaggatttatactatctgatattggaaaattttgtaaaaactaagaatgagagcactgtgttatcggatgaatggacaatcagtgaaatagacagaaaacccaaagcaggtgcaagcccacttcctcactcatttattatttcactcagctccctgcgtgccaggcactaaattctgagcactgaggggaaagcagtgaacaaaaaagaaacacagaatttctggttccaagtgaggagagagacgaacattgtgaaaattatagtatgtgcaatggtacaggaatgctggtgagggccaggaatgggtggaggtgtaaagaggtagccaggtaagcttttggaagaagatc

SEQ ID NO: 99277 - DNA, 792 bp, Homo Sapiens
ctgtcctttgccacaaacatgaggttcacattccctctcatggctatagtcctggaaattgccatgattgttttatttggattatttgttgagtatgaaacggaccagactgttctcgagcagctcaacatcaccaagccaacagacatgggcatattctttgagttatatcctctgttccaagatgtacatgttatgatatttgttgggtttggcttcctcatgaccttcctgaagaaatatggcttcagcagtgtgggtatcaacctactcgttgctgcttcgggcctccagtggggcactattgtacagggaatcctgcaaagccaggacagaaatttaacattggaatcaaaaacatgataaatgcagacttcagtgcagccacagttctgatatcttttggagctgtcctgggaaaaacgagccccacccaaatgctgatcatgacaattttagaaatgttttctttgcccacaatgaatacctggttagtgaaatatttaaggcctctgacattggagcatcaatgacgatccatgcctttggggcctactttggcttggctgtagcaggcatcttgtatcgatctggactgagaaaggggcatgaaaatgaagagtccgcatactactcagacttgtttgcaatgattgggactctctttctgtggatgtttggcccagctttaactcggccattgctgaacctgtgagacaaacagtgcagggccattgtaaacacgtacttctctctcgctgctgtgtgctcacagcctttgccttctccagc

SEQ ID NO: 99278 - DNA, 1299 bp, Homo Sapiens
ggcgctgtcgtggattgaaccacgaagggacgataccagaaaacaccctcaacccaaaggaaatagactacagccccaatggctgacttggctatagaaaaaagaaaggaacgaaaagagacagttttttttggaaagctaagtcttccctttatcgagtcaagtaacccccccttcttgagctatttacagcttttaacaattgagtaaagtacgctccggtcaccatggtgacagcgcgccctgggtcccgtctgggcagcgctcctgctctttctcctgatgtgtgagatccctatggtggagctcacctttgacagagctgtggccagcggcatgccaacggtgcatgtgacgtctgaggaccccctggatcctgcccatgtatcctcagcctcttcctccggccgcccccacgccctgcctgagatcagaccctacattaatatcaccatcctgaagggtgacaaaggggacccaggcccaatgggcctgccagggtacatgggcagggagggtccccaaggggagcctggccctcagggcagcaagggtgacaagggggagatgggcagccccggcgccccgtgccagaagcgcttcttcgccttctcagtgggccgcaagacggccctgcacagcggcgaggacttccagacactgctcttcgaaagggtctttgtgaaccttgatgggtgctttgacatggcgaccggccagtttgctgctcccctgcgtggcatctacttcttcagcctcaatgtgcacagctggaattacaagggagacgtacgtgcacattatgcataaccagaaagagtgctgtcatcctgtacgcgcagcccaacgagcgcagcatcatgcagagccaaagtgtgatgctggacctggcctacgaggaccgcgtctgggtgcggctcttcaagcgccagcgcgagaacgccatctacagcaacgacttcgacacctacatcaccttcagcggccacctcatcaaggccgaggacgactgagggcctctgggccaccctcccggctggagagctcaggtgctggtcccgtcccctgcagggctcagtttgcactgctgtgaagcaggaaggccaggaggtccccggggacctggcattctggggagaccctgcttctatcttggctgccatcatccctcccagcctatttctgctcctctcttctctcttggacctattttaagaagcttgctaacctaaatattctagaactttcccagcctcgtagcccagcacttctcaaacttggaactgcatgcgaatcacc

SEQ ID NO: 99279 - DNA, 1098 bp, Homo Sapiens
  misc_feature (277)..(285): n is a, c, g, or t
  misc_feature (297)..(377): n is a, c, g, or t
  misc_feature (477)..(492): n is a, c, g, or t
ctctgcgcggtgcgggttgatatctctctgtggtgtggtgttttcgcgtattgtggtgtcctgccccccgctgttgtgtggtttttgtcccccggctttgctgccgctggtgcacgtgctgggtgttttcccttcctcgtccgttgtttttaggggctctcgcttgttgtcgtatattatatgccgctctctatgtggggctcgctcttttctgataacccgtgtgtctctcttcatttgtgtgctccctcccgtgggtgttgcttttgtggcgcgnnnnnnnnnttgttgttttgnnnnnnnnnnnnnnnnnnnnnnnnnnnnnnnnnnnnnnnnnnnnnnnnnnnnnnnnnnnnnnnnnnnnnnnnnnnnnnnnngacaattggaccagcaccgtttatttataattacccttgaaattatttagctcccagccaagacacagagggatgacagatttgataagctacttttaannnnnnnnnnnnnnnngcatattctattgctttgggctctagtactaaaaaaggaatggaatttaaaaggaacaatgaggaaagaacgattacatacaaagaaagaattttacctggcaaaccaacacctctgctgactccattagcgtctcttagtattcttgtggaaatgacatgtccaaagggtttcagcatattctcaagctcctgctcatccatagaaatggggagatttgagatgtataggtttgttgggtcttgctcttgttgcttagccatctgtgcctgcacgccatttgccttgagagatgctaccgctttctgtgcagctgcaggactgtcaaaatctacaaaaccataacccttgcaccggattgtggttttgtcaagaaatgcccttgttagatacaatttttccatacggttggcacaacttgattaagtcctggtcaatggtggctcgtgggaggcccgaatgtacagggtgggttacacaactgttccccgccgctgtttttccgccgtttttctgccccggtgtgccgggccggaagaccaaaggttggaaccggtcaaagaagcctggttgggaaaagaggtatagaattaccgggggcatttg

SEQ ID NO: 99280 - DNA, 1003 bp, Homo Sapiens
  misc_feature (565)..(654): n is a, c, g, or t
tgccctgtgcgtggtgtatgcgcagtatagggagatctctggggtgtgcgtggcgctttctgacgtgtagcgccgggtatagccgcagtgtggtccgggaggtgctatctcccaaccagcagggctcccttctgaggaagtagtctgtagtaagacgatccggctacacggctggtgcaagtgccgtgtgtcagtgaaggtcccaggagctttctgggcaccattgcgtcgatggacggccctgtcctgggtttggcgagggtcgccaggcaggattcagtgcttcgattggggcatggattgccaaggacccccgtccagatgccgaccacggcctgccgcgggggcaggtacgatgattgaggcccgacactgggcctgaaccctgacctgcacctgctttctgaactatggcccaggggacatggctcagggtggactgggccatgtgagcttgagatcgactcgcagttccctgttaactattgccgtgtaacctacactcctccaaagcttagtgccttaaagcacccgcgttatcgcctggcctgtggttgcccagggnnnnnnnnnnnnnnnnnnnnnnnnnnnnnnnnnnnnnnnnnnnnnnnnnnnnnnnnnnnnnnnnnnnnnnnnnnnnnnnnnnnnnnnnnnccgtccaggatggccatcttgcgcgccccgccctcagttgggtgcgctggaacagctagggccggctggcctcccatgtggctggcgtgggcttccctgcagcatggtggttctcggggtatgcttggattctcccgtggcagctggctccctccagagcacgttcaccaggccaggccaagctgccaggctttgtgtgacctggcctcagatgtcatatggtgtcattcctggggcatcctgtgggtcagaaagtcctagggcctccggcagattaccaggggagggacatcacacaggtgggaacgctggggagcacaggtcatgaagccagcatccaagtccagct

SEQ ID NO: 99281 - DNA, 865 bp, Homo Sapiens
tgaatttaggtgtgccttcttcatgtcggacttctggtggaaacgctggccgcagaactggccagggtaggccgcgtgtctgagtggatgagcaggtgggtggacagcgtggacgagcgcttgaaggccttgccgcacatgcggcactcgaaggctgcgctacctgggagtggacgtgcgtgtgctgctccaggctcacagcgtggccgaaggttttgccgcagatgtcacaggcgaagggccgggtcccactatgggagcgtcgcacatgcacttcgagcccgtgaggggtggagaagaccttgttgcacttcacacagtggtacgcatccatgcctggggagtagcggaggctgaagtccaaggcgggctcagtgctgggcacaagaggactgccgtacaggctgacggagtgctccaggaaggctgactgcatggtggagggggcctgccggtagctgtggccataggttgtggccaaggtgtcccaggagaagcttagggccttgttagaaatggcgggttgacgtcaggacacgtggagagtccccatccatggggtcagggacaagcacaatcgcgggccctctggtgccaggggccatcctggccaagttctggtcctgctccagctccggctctcgtttgaggttggtccagtccaggcactggtttgggaatagagtgctaaggacagggctgttgcttggagcctggtctctgggcaccggggtaagggcaggaggccagagcggttcatcttcactgcacacggggctggtggtaggtgtgagccttcttgctcttcaccaggaaggagcgtggcattttcagtgtgcaccccacacctgtccggagctgtccc

SEQ ID NO: 99282 - DNA, 1013 bp, Homo Sapiens
ctgctgccacgaggtggtccaagccttcagggtgggctcctatcaggctgggtgtgcgagtgtccatctgtccacatggatgtcgagggtggtttgtgtggagctgtgctcgtcagctgggtctgccctcttcccccttttctccttcttctctcctcatggactttttctgcaattgcagtcttaagcttcactctccaccacctggatggcatggcgcctgccaccaaacatcttcctggcctgcgctctgccctgccctgcctagcctctgctactcccacttcccaactccaggaatgcattacttttatttcaaaccctctgcctccttccttctttctcttcaaccccctccccaccttcaccttctcaaaaatggaaggaaaaaaaatctgtgaatggggaatgctgactgacaaaccaacacaactttcagaggcttcagtgtctgttctctggacatttcttttcacctcctgagcaccaaagtcgcagggccagttgcaggccgctgattgccatgttgatttttaacctgatattctttttaattgttttaaatttttcataggggagttttggacaaaacagtcactggggagatcactgccatttttacacacttgactttttaaaaaatacaaccaaccaaccaccacaacttcttatacatttgggacatgagccagagtttaaaagggaaccaacaaaacactataacttaaaaggatggggttttgggattttgtataaataattaaaacattacaggcatatgggctaggggaacgacaatgggtgtatactattgtcaacactactgttctaaattattcagggcctatagtttccattactgggagtcctccattgtgtggccacacagtgttcgttgatttacaggagcagtgcttcccctcctccccagttagttggtcgtggtgactctgtgactttgtctaaacctgtgttgtagatcttgggactcctctcttctagttatttttccc

SEQ ID NO: 99283 - DNA, 661 bp, Homo Sapiens
cgcaggcgggcgggagggcgggcacggagaggcgggcgccgaggaggggcaggtagggctgggacgcagggtaactggatcccccgacttcagcccaggccctggtctgaccaccctgggagcagggactttccacagtcagctggacgcacactcagcccagtaaaagaggggacccatcccgggagccccggggagggcacagctgcctcctcccgggctcccctgccacctggtgcctacctgccccctgctccctgccgggtccggtcctcaccccatcttcatctggccttgactctgcccttgaggggcctaggggtgcagccagcctgctccgagctcccctgcagatggaggaggccatcctggtcccctgcgtgctggggctcctgctgctgcccatcctggccatgttgatggcactgtgtgtgcactgccacagactgccaggctcctacgacagcacatcctcagatagtttgtatccaaggggcatccagttcaaacggcctcacacggttgccccctggccacctgcctacccacccgtcacctcctacccacccctgagccagccagaccatgctccccatacccgtgagtagctgctcagagcaactgagaacttccaaaggtagagaaaatgaaaatgaaaatg

SEQ ID NO: 99284 - DNA, 938 bp, Homo Sapiens
gaggcgggcagaggtctgaaaaaatcgaatgccttatggaaaggaactgcaagggttcctttggggtgatcaaagagggagacacagacacagagagacaaaggcaaggaggactgtctgggagccacgcgggcgatacagtttccgaggcacgccgcgtcccgcctagcctgttgaacagtgcggatttgcgaggcgcgccctggagctgctagagatccggaagcacagccccgaggtgtgcgaagccaccaaacatcccagttaccagtgtccttgaattgatagtggcttctgtttgtcagtctcatataagaactacagctcatcaggaggagatcgcagcagggtaagagacaccaacaccatgttctgcacgaagctcaaggatctcaagatcacaggagagtgtcctttctccttactggcaccaggtcaagttcctaacgagtcttcagaggaggcagcaggaagctcagagagctgcaaagcaaccgtgcccatctgtcaagacattcctgagaagaacatacaagaaagtcttcctcaaagaaaaaccagtcggagccgagtctatcttcacactttggcagagagtatttgcaaactgattttcccagagtttgaacggctgaatgttgcacttcagagaacattggcaaagcacaaaataaaagaaagcacggaaatctttggaaagagaagactttgaaaaaaccaattgcagagcaagcagttgcagcaggagttccagtggaggttatcaaagaatctcttggtgaagaggtttcaaaaatatgttacgaggaagatgaaaacatccttggggtggttggaggcacccttaaagatttttaacacagccttcagtacccttctgaaacagagcagccattgccaagaagcaggaaccaggggcacgccttgaggacgcctca

SEQ ID NO: 99285 - DNA, 1242 bp, Homo Sapiens
tgcggccgccaccagacttagacaaaaaaagacatgcagagctgaagatggatcaggctttgctactcatccataatgaacttctctggaccaacttgaccgtctactggaaatctgaatgctgttatcactgcttgtttcaggttctggtaaacgttcctcagagtccaaaagcagggaagcctagtgctgcagctgcctctgtcagcacccagcacggatctatcctgcagctgaacgacaccttggaagagaaagaagtttgtaggttggaatacagatttggagaatttggaaactattctctcttggtaaagaacatccataatggagttagtgaaattgcctgtgacctggctgtgaacgaggatccagttgatagtaaccttcctgtgagcattgcattccttattggtcttgctgtcatcattgtgatatcctttctgaggctcttgttgagtttggatgactttaacaattggatttctaaagccataagttctcgagaaactgatcgcctcatcaattctgagctgggatctcccagcaggacagaccctctcgatggtgatgttcagccagcaacgtggcgtctatctgccctgccgccccgcctccgcagcgtggacaccttcagggggattgctcttatactcatggtctttgtcaattatggaggaggaaaatattggtacttcaaacatgcaagttggaatgggctgacagtggctgacctcgtgttcccgtggtttgtatttattatgggatcttccatttttctatcgatgacttctatactgcaacgggggtgttcaaaattcagattgctggggaagattgcatggaggagtttcctgttaatctgcataggaattatcattgtgaatcccaattattgccttggtccattgtcttgggacaaggtgcgcattcctggtgtgctgcagcgattgggagtgacatactttgtggttgctgtgttggagctcctctttgctaaacctgtgcctgaacatagtgactcggagaagagctgcctttctcttcgagacatcacgtccagctggccccagtggctgctcatccgggtgctggaaggcctgtggctgggcttgacattcctcctgccagtccctgggtgccctactggttatcttggtcctgggggcattggagattttggcaagtatccaaatagcactggaggagctgcaggctacatcgaccgcctgctgctgggag

SEQ ID NO: 99286 - DNA, 1097 bp, Homo Sapiens
agacaaggcagagcagttagattctaagaaagtggaccacaattctgtatccttacagcctcagcaccagtcggtgatcacacaaagacatcctgtcctggctcagtcactttattatggccagtatgtatatgggctctatatggaccagaagtctatgatggccaccagccctgcctatagacagcagtatgagaagtactatgaggaccagaggactggcagagcagaaaatggcccagactgggagaggagactgagaaaggaaaagtgagctccccttgaaagagctgggcaaggaggaaacataaacagaaaaatatgccataggccacaatctcaaaagctccctctactccggagcctaagcaaaaaccattctaaactagggccatcagtgcctaataaaactgaggagacaggtaaatcgcagcttctctccaatcaccagcagcagcttcaggccgacagcttcaaaagctaagcagatggaaaaccaccagcttattaaggaggctgtagaaatgaagtctgtcatggactctatgaagcagacaggtgtagacccaacctcgagatttaaacaagacccagattcaagaacatggcatcattatgtataccagcccaaatatctggatcagcaaaagtcagaagaacttgatagagagaagaaattacaagaggatagtccgaggaaaactcctaataaagagagtggtgtgcccagccttcctgtatcgttaacaagcattaacagaggagcccaaagaggccaagcatcctgatttctcaatcaatggaggagagcaagctgaaaaatgatgatcgaaaagactcctgtgaactgggaaggactctacggggaacaaagagtggcatgtctcctcacccgatgagtcaagcatccgacaataaatacacagtacttgcattgcttatccttaacccacaagattgtactgaaccccaagaaattcctggcataccgggcatggatgattcccggtcctaaatgcacaagtagatccctggggcatatctcaacatccaggaattcatatcctggtaattggaaagatggcaggggacaaaga

SEQ ID NO: 99287 - DNA, 803 bp, Homo Sapiens
  misc_feature (214)..(238): n is a, c, g, or t
  misc_feature (370)..(370): n is a, c, g, or t
  misc_feature (482)..(482): n is a, c, g, or t
ggacggcgcagctctctggtgtgctgctttcccagccaccccaggtcatgacccaacactgtacttgatggctcttgtggcagaatgtctagtggactctgtggccctcatactggctggttactaggctgggcacagcacttcctgaaatgtttgaagagtaggcagtgatccagttaaagtctcttatagccccatgccattctctctctcnnnnnnnnnnnnnnnnnnnnnnnnngggggaaagggggctcaaaagttcccccggggggcgccacaagttataagcgggttccccgggtttcctgggcaactgtggggcgccccatatatgagggagcgcctggattaataacgagctacacggcangcggcgccgcgcagtgtttacaacaaccggtcgaggagcctggggaaaaacgggcgcaccgcggggcgactctgtgggagaaggggaccacctttatcctctccgtgtgggngcggggcgcaccaatatagtgtggcgcgacaaaaaacccacaccctatcacagagagaagatttataaaacgcgcctcatagaggaggggaatactttttatcaacatttttctagacggggtgttaatatacggtgtgtggtacacaccaatcacgacgcgcggaaatattatttgctgtgcgcggacggtgttaacgagaagagctgtgtgggggccatacaccgcagggggcagtatatatagaattatttgcgtggagaacacaacattatttttttattctccacgcgggagagagggcatatagtttttggtgtg

SEQ ID NO: 99288 - DNA, 835 bp, Homo Sapiens
  misc_feature (216)..(216): n is a, c, g, or t
ctggactgaagccggggcagtcccaagccggaagtcccctgcagacgtgttccagactggcaagacaggtgccactacaggagagcttctccaaaggctgagggacatttccacagtcaagagcctcttgccaagcgacaacaggaggccatgcgggagcctcggtccacacattccaggtggaggaagagatagtgtcgtgagctggaggaacantgggaaggaagcccgcggggagagaggaggagagaagtggccagggcttgtggactctctgcctgcttcctggaccggggccttggtcccagacagctggacccatttgccaggattggcacaagctccctggtgagggagcctcgtccaaggcagttctgtgtcctcgcactgcccagggaagccctcggcctccagactgcggagcagcctccagtgctggctgctggcccacagctctgctggaagaactgcatggggagtacattcatctggaggctgcgtcctgaggagtgtcctgtctgctgggctacaaaccaggagcaaccgtgcagccacgaacacgcatgcctcagccagccctggaggctggatggctcccctgaggctggcatcctggctggctgtgtcctctccagctttccctccccagagttcttgcaccctcattccctcgggaccctcccagtgagaagggcctgctctgcttttcctgtctgtatataacttatttgccctaagaactttgagaatcccaattatttattttaagtgtattttttagaaccctctatttacctgcgaacttgtgtttataataaatgaggaaacataaaaa

SEQ ID NO: 99289 - DNA, 916 bp, Homo Sapiens
gcaggcgctgcgggcgcagctccggtgcaagcgaggacacgacacatgcagtggcttctggactgcgcgatgactggacgcaagtaacttctaggtctgcagacaagaggaagagaagatgaaggaagactgtctgccgagttctcacgtgcccatcagtgacagcaagtccattcagaagtcggagctcttaggcctgctgaaaacctacaagctgctaccatgagggcaagagcttccagctgagacaccgtgaggaagaagggactctgatcatcgaggggctcctcaacattgcctgggggctgaggcggcccatccggctgcagatgcaggatgaccgggagcaggtgcacctcccctccacctcatggatgcccagacggcctagctgccctctaaaggagccatcgccccagaacgggaacatcacagcccaggggccaagcattcagccagtgcacaaggctgagagttccacagacagctcggggcccctggaggaggcagaggaggccccccagctgatgcggaccaagagcgacgccagttgcatgagccagaggaggcccaagtgccgcgcccccggtgaggcccagcgcatccggcgacaccggttctctatcaacggccacttctacaatcataagacctccgtgtttactccagcctatggatccgtgaccaatgtgagggtcaacagcaccatgacaaccctgcaggtgctcaccctgctgctgaacaaatttagggtggaagatggccccagtgagttcgcactctacatcgttcacgagtctggggagcggacaaaattaaaagactgcgagtacccgctgatttccagaatcctgcatgggccatgtgagaagatcgccaggatcttcctgatggaagctgacttgggcgtgaagtc

SEQ ID NO: 99290 - DNA, 1362 bp, Homo Sapiens
  misc_feature (612)..(670): n is a, c, g, or t
  misc_feature (906)..(906): n is a, c, g, or t
  misc_feature (908)..(908): n is a, c, g, or t
  misc_feature (910)..(912): n is a, c, g, or t
  misc_feature (923)..(923): n is a, c, g, or t
  misc_feature (927)..(927): n is a, c, g, or t
  misc_feature (1045)..(1045): n is a, c, g, or t
  misc_feature (1057)..(1057): n is a, c, g, or t
ggattcagatactctgatccttacagaatccaagaggaagctttcataaaaacaattcagcaaatatttccaatataatatgaatggctaattttcagtgctaattaattagcagcttgtaatacttgatctgggagcatttacttggaaatcctaaggactataataaaagttttcaacatatttctaaatgtgtgagtttccagctgtagcttttgtctttgtcacattttaaaaaataataagcaagacacatggggacactggcagcagttgccaggttttagctgccaccgcttcagtatgagatatagctgtcccatcttcccccattcagggtaggagatatagtgacccagacttcatgcaaatggaaaaaaagttttaactgaaatatttatttagatttcagggtctagatggatgggaaagtagaaaaacatatgcaaatctcagtgttctcactatgaccactctgagcagagatttggctttgcttccttctgcccccactcgaatccacgttgagaccatgcgccccccccaaccgtcgcaaacacaaccctttccgcgaatccaaactaatcttccatcgcagcccctatccgattnnnnnnnnnnnnnnnnnnnnnnnnnnnnnnnnnnnnnnnnnnnnnnnnnnnnnnnnnnnaatttggcctcgcccaacccgtcattcgcaaaaatgcgaaagattgtccttcccttcccgccgtcccactcacaccaccgtaaaacatgtgacgcaaactgcgtcgtcggctatttccatccgacacttcgcgcatggtagtaaataaataccagccgcccacacagcgcgaccccgagtacctacagcaagcacaccacatctcccgctcaagacagagaatcccttccttttcncncnnngaccacaccancganatcaaagcaatcagaagacataagctaagaaatgatgcaatgtcgcacagatccacacccatagtataagcgtcagcgagaaaccatcgatcagtagcacagctcagatcacatggcncgcctcgccacnaaccagatgatgagcccgccgccccctatcctcccaccaccctacgctttgcccgacgcgtagccgccgcccaccaaggcgtacacggcaacctaacaccacaccgcgcacgaagcaagagggcaacacaccggtatgaccaagagcagcggagatttaaataagagggcaacaaaagcgccgcaccattcgtgcctccgcccacaggccgaccgatatgaacaccacgcacggatatagcgcgcctaccactcccacaagcccctcaacactccgagtacggcacaaacgaaacaacaaacaac

SEQ ID NO: 99291 - DNA, 775 bp, Homo Sapiens
  misc_feature (648)..(719): n is a, c, g, or t
cataaaagtagaatgtatttctgagactaaagcactttgctatttagatgtgctgatttcctaatgaggtcattttccatattctacaagacccagaacgattcacgaaagactccttgctgcttatgagcgcagtgtccacgaatgcacagcacagtttctggaacatagcagaagcacagtaaacatttactcaaggggaactaagtgctctagttgtggcctgctcaagctagagccagctcctctgtgctctgtacttgtcaacagactttccagccatagaggcaaaccagagcagactgatggatttcacccaaagttgttaatccgttaacaattggctgtaaaagtatgcgtatggcacaacaaatggggaaactaaaacaccagatttgcagttgcaggtgtacaaagatataattgccatgcgttagcaaagaagaaaggcccctcacagattgcaacatgttgattttaactacataaggaaatcgtactggatttacatgaatttcgctttgaccatcagcaaaatggcatttcagatttcaagcacaaaactttttggggtcagtattgttatctcattccatcatttgaacaaaacatgggctcctgacaaacttgatcaggcacgttgtgccnnnnnnnnnnnnnnnnnnnnnnnnnnnnnnnnnnnnnnnnnnnnnnnnnnnnnnnnnnnnnnnnnnnnnnnntgtaacacatctatcatttgtcagatgattggctgagatgattgcataacaacata

SEQ ID NO: 99292 - DNA, 328 bp, Homo Sapiens
ctctcacacatttctggctgttggccacacgtcggaagcctgccatctcgcttcgtggatccacggtgcccagaaagattggcttgaactggttcatgcccgcattgacaaaaagcaaactggggtcgccgcggggccgcacggaagcggagggcaccagccggtggccatggcggtcccgaaagaagttcagaaaggcggccctcacggccgaggccttggctgcagggggctccgatgagagcggccgatggctgaggccccgccatgcgggcgaccttcgaatggcccgccgcagcctccgggctgcagctgccactgacgctgc

SEQ ID NO: 99293 - DNA, 841 bp, Homo Sapiens; identical to SEQ ID NO: 1389
  misc_feature (689)..(689): n is a, c, g, or t

SEQ ID NO: 99294 - DNA, 913 bp, Homo Sapiens
cgatgccacctattgtctgcaggctagaacattgggatcatggtttgtttgcattagtatgattctaggaccctaggtcactgagacactacagattgtgtatctgttatgtccactaaaagagtaattgatgggtactttatctacattatccatttcttgggtttaaagccttcattaaccattattgtatgttggaaattcttattttctttattttctgtgtgactttctggaccttagagagtgtcctctcatcatctaggaagtgagtgggcatcaagcattttctggggaatatgacatcccatctgagttgtcctgtcacttaagtatccttgaagggactaaccatcgtcttggtactgatttgatgcaacgtagatgtaaaagagtattattcagttgaacacaagagggcactgtagaaccttgtgtccggtttatttctgaccttgaaggctgacaatcttttagtaacttgtctcatctccacacaagtgtgtgatagcacacctgggtgtgctttgtggcaataacacttgtgttccaggtgtgaagtgctgggacattggcaggcccagtgatggaagcagctagtgaacgattccctttgctaatgcctagtgcattaagttcattgctttgcgaaaggtacggaaagaggccagttgtttgagcggtggggaagattctgtgtctttctagccagcttaggatctcaggattggtttctatccaagctagtgctttgatgaacactatctcttgccaggacaacacgatgagtgataggtcaaagctttacttgagtctcccctagtgtcagagatcaggagaaaagacataacagagaatttaccaaagctattcagaactgctattgaaaaacctgagaagaacttgtctcccg

SEQ ID NO: 99295 - DNA, 1487 bp, Homo Sapiens
ggcctggtgcggcgagccgagcgaggcagctctgagccgcgcggtaaatctggcattttttaaagtttgcgccccacaaagaggaaatattccaaaggtactcaggatgtaaaaggggagatcttcacagatgcctccgtggatggcatggcaatccatccatcaatgagaagaccatgatttcttttaattttctgtgtgtttccacattccccagtgagaattcttccacctttttttgtgccatgggaaaaacctgaagggcaggcagagctgctcccgaacttgtgaccttctctgaggttgcagcggctcttgtagaacatgactctgggacatcacttccttttgttttctttcggagctgaaccaaagaatgtgcaccctctttctctagtgctgtggtgtctgcttatttttgtatttgtgctttccatccatcttctgtgatcacaaggcattcttaaggttttctagcacgacttgcggacatccagactcgtggggggcccacccatggctcggtaagccagcagcccagggcactggcactaccatgaggcactgcattaattgctgcatacagctgttacccgacggcgcacacaagcagcaggtcaactgccaagggggcccccatcacggtcaccaggcgtgccccacgtgcaaaggagaaaacaaaattctgtatcgtgtggaacagtaagcagatgaacttgcttgctgttctcgaagtgaggactgaagggaacgaaaactggggtgggtttttgcgcttcaaaaaggggaagcgatgtagcctcgtttttggactgataataatgaccttggtaatggcttcttacatcctttctggggcccaccaagagcttctgatctcatcacctttccattacggaggcttccccagcaaccccagcttgatggacagcgaaaacccaagtgacacaaaggagcatcaccaccaatcctctgtaaataatatttcatacatgaaggactatccaagcattaaattaattatcaacagcatcacaactaggattgagttcacgaccagacagctcccagacttagaagaccttaagaagcaggagttgcatatgttttcagtcatccccaacaaattccttccaaacagtaagagccccctgttggtacgaggagttcttcggggcagaacacccaccgacccctaccttcaccaactcctaacgtgcttctactcccaagcgctttccgcctccacccttccaacgcccctgcggcaagggcccttcctgggggcccaccttgggcgccacagcgccacgggggaaagcaactttccggccctggcgcttggcccggcccgcaacttttcttaacattcctaagggggccaaaccccaaaggtggcgggggaacccaacaagaaacccttccttatttgaaaccgccccttggccgggtacttggcaccccccccgtgagaaggggtccaaaaa

SEQ ID NO: 99296 - DNA, 822 bp, Homo Sapiens
  misc_feature (442)..(726): n is a, c, g, or t
gcagcttcccagagaggagcccaggtgcatctccaacactcagcctttccctccggacccttttaaaagattcaacagcaccgtctctctccacttccatcctagaatgcagaatctgcaaagtgccttttgtaaagtttcttaagggacccatcccagccaaaatgaatcccagggaagaaaaagtaaaaataattacagaggagttcattgaaaatgatgaggatgcagacatgggaagacagaataagaactcaaaggttcgaagacagccaagaaagaaacagccaccaactgctgtccccaaggaaatggtgtccgaaaaatcccaccttggcaacccccaggagcctgtgcaggaggagcccaagacccgcctcctgagtatgacagtccggagaggcccacggagagagctggttgttaaaaagagcctgggcannnnnnnnnnnnnnnnnnnnnnnnnnnnnnnnnnnnnnnnnnnnnnnnnnnnnnnnnnnnnnnnnnnnnnnnnnnnnnnnnnnnnnnnnnnnnnnnnnnnnnnnnnnnnnnnnnnnnnnnnnnnnnnnnnnnnnnnnnnnnnnnnnnnnnnnnnnnnnnnnnnnnnnnnnnnnnnnnnnnnnnnnnnnnnnnnnnnnnnnnnnnnnnnnnnnnnnnnnnnnnnnnnnnnnnnnnnnnnnnnnnnnnnnnnnnnnnnnnnnnnnnnnnnnnnnnnnnnnnnnnnnnagaaaacaaacaaacacaaaaagagcctggaacctcctcccctctctctggctccctctctcacatgcgacaacctgtttccccttcccctttctg

SEQ ID NO: 99297 - DNA, 733 bp, Homo Sapiens
ctcagaagagtaaacatttctgtaatagttagccctcaaatagtcattcattgaccttccactgggtgtctggcaatgtgcaagctgcttctagatgctacctcatgtaacaaccatcacagtgcacagagcaagtactagtactccactttcatagataaagaagtaaaatcttagaaattagctgcccaatgtcatgtatgtaggaaaggaaagctggattctgattcatatttgctggctccaaagcacttgttgtaaatacttcactatcctgtgcttacatgtaaatgtaccatttctcttaggggtcttgaaatactgaaccaaagaatggtgtaggggaagggcagtttagaaatacctggaaatttggttgtttgaaggaagcccactctcagatggtaggagatcaagctaacagaatagctgagaatattttctgaggccccagaagtataaaaacggtctaggggggaaaatttgggacacagagtgaaaatagcctgcctctgaagaccagcttcatttcttcccctctgggtgttaatgaaagagcctttaactttgccaggcctcagttactaatttctaaaacactgctgctactattactacggatcttactgctactatgaccaccaccaccaccacatcagttactgagaactgaactagatgccaagaaatatggtaaacacttcatatacattatctttttaaacacaaaatg

SEQ ID NO: 99298 - DNA, 414 bp, Homo Sapiens
cgatatttgtggttctggctcggaaactgtactcctgtccttctaccacatcagtaacagttgcagacaggtcttcagctctcacagtcatggcagtatcccacctgatagaagtcttgtctcttaattcaacgacgtagtttgtgatctcagcacctccatcatactctggtggttcccatgtcagtgagacaccaaatcgattcacatcagtgatggttacattcaaaggagggcctggaacatcatattcactccttgcttctacaggattgtcagtttctactggctcaccagtgccaactctgtttcttgcactcacacggaataggtactcaactcctcctttctgtagaccagtgacagtaaactcacaactctctgcacggtctgtggccagaaccacaaatatcg

SEQ ID NO: 99299 - DNA, 811 bp, Homo Sapiens
  misc_feature (640)..(693): n is a, c, g, or t
cccggaactgcttcggatgctgggagaaaacctgctggtggaattcagggctggcctgagggctggtgacaccatccctggggactccccgagtttctctctccatcctgctgatgggactctgggagccgccctgcatgtcttgctttcttgggtttttggattttaatataccttagcacccttggtttatacctttgatttatactttgggtccctcttcacttacactctcatacctctccttgacttaacacctgtgatccccgagcttaaacttctgatgcccctaacccctctcattttcctgccttccactccctctcggcttgtggttttatttttgttaatttatctttgacctctgtggcctcttacctgtctgagaccttgattcctgcatgcgtcttctagactgtcagcccagaaagctaagtggacagagagacatgggcctccctgcctcctggacccatgcttgctcccggacataacattccagagacctaggagataccgggggagtgagagttctggctttcgggcttacagttcaacatcctccccgccaccttccagatttttttgtgtcgctcctgcatgcgttttctctgtgtggttgtgcatcttgagttgtggnnnnnnnnnnnnnnnnnnnnnnnnnnnnnnnnnnnnnnnnnnnnnnnnnnnnnngcgtccatccgtccatccgtgcgtccatccctccgtccattcgtcctcactctctacatcctcctatgccccgagtaacattcggggaaaggaaccgaaggaaactagctcaaaaaag

SEQ ID NO: 99300 - DNA, 516 bp, Homo Sapiens
  misc_feature (28)..(28): n is a, c, g, or t
tcccgtcacagtcacttggacccgtgcncaaaccacacccacctgtggccctgagggttggcactcaggcgcccaggtggctcctttgatccctgaaacatccatgcagacccactacttatattccagtctgtcctggagtcaaaggagatgaaggaggaaaaatatctttttaaagtatccaggcaattttactcatagttctgtttagttccagatagcaacagctgattgttcaaagtgcagggtttttggatattcaagtaccacaggatcggagaaaaggagtacttgaaacctagagttgcgttttcacttgagaagacacactttggaaacacctatccaacagactacaaatataggctattaaattaaaaatctggtttcaaaataatacccacttaggttggaaatatctttctccaaactcagatccaacttttgaattgtttggtatcaaaggcaaagttagagggacttgggtttaaaaactaaaattacaagtgagtgctt

SEQ ID NO: 99301 - DNA, 909 bp, Homo Sapiens
cacaggacccctgccctgcccatgcatatgctcaactctgatcctccagccctgtgccacccttgaccctcttctactgcagccacaggtccccaaagtctctgaccaggctttggtttctgcccactcagagtggcagcggaagctggaggccgctgaggctctgctgactctaagaaactctgcccaggcccctccgtgactccgatctccctgcaccagccttgcaacccaccagctcctgctggaggataaaggattccagcctcccagcccctctctccgccccaggccagccagctccatctcgctgcctattggacatctgggatgcatctccctcttgagctaggaacccagaggaggaggcctcaatagagcactgcctatttggtatccagtttctgaatgtgcaaaatggttaacgtccaaaacgcttaacgtctttttttaaagccttcaggtgttttataagctttttattatatggggcaactccttggctgagggtggatattcttgtacctctgtcccttactcttttggatgctggggcctttttctgtctcataaagacaggattgtgcaatctaagttgatcagtctctcagtggggttctgtgtgagttcatatgccagagtttatattcgtcttgtgattgctgacatacctgtgcactcatgtgtatacccctgcatgtggaaacatgaagatgtgttcaacttgtgtctaggtttatgtacgtgaacaaataataaaccgtggtggtactacacgcccacgagcccacaccaccacccaaccccccacagcacccaaaacagggcggcccaccgaaagagtcccaccggggcccaaaaaaaggatgccggatagggtaagaagggcccttagggaaagaaaagccg

SEQ ID NO: 99302 - DNA, 988 bp, Homo Sapiens
  misc_feature (788)..(788): n is a, c, g, or t
  misc_feature (906)..(906): n is a, c, g, or t
cccccaatggtgctctgtctcgactcgaccagctctccggtgcccagttaacaagttctctgcccagcccttcgccagcaattgcaaaaagtcaagaacaggttcatctcctgaggagcacgtttgcaagaacccagtggcctactccccaggagtacgaccagttagcggccaagactggcctggtccgaactgagattgtgcgttggttcaaggagaacagatgcttgctgaaaacgggaaccgtgaagtggatggagcagtaccagcaccagcccatggcagatgatcacggctacgatgccgtagcaaggaaagcaacaaaacccatggccgagagcccaaagaacgggggtgatgtggttccacaatattacaaggaccccaaaaagctctgcgaagaggacttggagaagttggtgaccagggtaaaagtaggcagcgagccagcaaaagactgtttgccagcaaagccctcagaggccacctcagaccggtcagagggcagcagccgggacggccagggtagcgacgagaacgaggagtcgagcgttgtggattacgtggaggtgacggtcggggaggaggatgccatctcagatagatcagatagctggagtcaggctgcggcagaaggtgtgtcggaactggctgaatcagactccgactgcgtccctgcagaggctggccaggcctagacagggaagtctgttagaactgctgtgctgatcaacgggacgctccgtctttgaagaaagaagagatggtctctccccagccatgggccnaccttgccagtgactccaagtggaactactttagctcgcgtggtgccctggaaggggtgcgggaaagtccagcggactctcagacgcaccttcccagaaggaccgggggggaaattgntccatagtggccaaaggccctacttactgcggttttttcagtgggtccccttggaaccatagttttgcctccctctggcccc

SEQ ID NO: 99303 - DNA, 919 bp, Homo Sapiens
ggtcccaggtcttccgcaatacggcacataggaccagtgcacaggaaccaactcctgggctcccacagccaagggatacctgaccttttgtttgggactcacacctggagaaggcttgtgtcccaatataccattgaagaaagcaggcattcgaatgctaccaccatatcagagcccacaccattaactgagcaggcagctgccaagtgtgcagccctcaccaccagaacttccacctacaatatgctgtaaatcatatgggttgtttgatcggccatagatcttgttactggattcataccacatacacgactcactacagttggttatggccaagaggaatggcaccagctcccttcagtaatgccaccacagtggcatctgttttggcaatggcatcacgacggttcatgagtccagaagaattgggcattccttgtagctggaaagcttccttgactgtcaaaggaaccccaaggaagggccatttattttccagggtggcttcatcttcctgcttctctgcaagcttttgatctacagcatgagcctccttcatcgcttcctcaaacctgtacttgacaattccattgatcattgggttcacgtccttgattctgttgatataagcctgaacaacatctatacatttcacctttctctgtcggatcagcttggccagctgcatccccgaaagcagaagcaatggttcagtcaccggccgaggggtctttgaggcaaactttggaccccctaagactaaagctgctcggcctactaagcctatgagaaagcctagcgcccgcaagaggaacaactgaatgcgggcggtaaatgaaggtgccatcgcagcctggattccgcacggtcctagtgcttgagggttacgtgcaccctggggaaaggacgagaaaagtac

SEQ ID NO: 99304 - DNA, 928 bp, Homo Sapiens
  misc_feature (106)..(198): n is a, c, g, or t
  misc_feature (529)..(766): n is a, c, g, or t
atacatcagagacgactccgtggtgcatcagactgggggcatgtgatgtctgtgtgtcccattattggcgatgttcaattctgtcacttctgttgaggctgcattnnnnnnnnnnnnnnnnnnnnnnnnnnnnnnnnnnnnnnnnnnnnnnnnnnnnnnnnnnnnnnnnnnnnnnnnnnnnnnnnnnnnnnnnnnnnntcccgagtaggccttcatccatggcctcagcatccatgatggttcctgtccggatgctcacttttgaagaaacatttcaaataatagtgattcctttccaattcaaaagtaatcattgctttatagtcttcataaatattttctgtggttatttagttgatgaaagctgttgatgtccatttggatttttttccctccaacacaaacagctgcaggaattggtgccacatagaggctcagcttgcctgtctccatggaagctgtggccacagcagtggctttggaagcctagtaaggaatgacatcactgccaggtgcagtggctcacacnnnnnnnnnnnnnnnnnnnnnnnnnnnnnnnnnnnnnnnnnnnnnnnnnnnnnnnnnnnnnnnnnnnnnnnnnnnnnnnnnnnnnnnnnnnnnnnnnnnnnnnnnnnnnnnnnnnnnnnnnnnnnnnnnnnnnnnnnnnnnnnnnnnnnnnnnnnnnnnnnnnnnnnnnnnnnnnnnnnnnnnnnnnnnnnnnnnnnnnnnnnnnnnnnnnnnnnnnnnnnnnnnnnnnnnnnnnnnntgacagattctgtctcaaaaataaataaagaatgacatcactgaatacactgaatgtgctattgataaccagtgtgccagactccagacaacatgtgccaggcatcacccatgtctttgattttgtaataaataaaaaatggggccaggtgtggtggctcat

SEQ ID NO: 99305 - DNA, 661 bp, Homo Sapiens
caaacaacagctgttgcttatttcgaagatggacagctggaatacggctggcatcggagaaaccctcacagatgaactgcccgcctttagtctcacccctctcgagtacatcagcaacatcgggcagtacatcatgtccctccccctgaatcttgagccatttgtgactcaggaggactctgccttagagttggcattgcacgctggaaagctgccatttcctcctgagcagggggatgaattgcccgagctggacaacatggctgacaactggctgggctcgatcgccagagccacaatgcagacctactgtgatgcgatcctacagatccctgagctgagcccacactctgccaagcagctggccactgacatcgactatctgatcaacgtgatggatgccctgggcctgcagccgtcccgcaccctccagcacatcgtgacgctactgaagaccaggcctgaggactatagacaggtcagcaaaggcctgccccgtcgcctggccaccaccgtggccaccatgcggagtgtgaattactgaccccaccacacaccggaccaccaagagagccagggctgctgtttcgcgactcaccagcacagatttgctcagaaactctgcccaagattgggcagaagttactttaaaaagactggt

SEQ ID NO: 99306 - DNA, 830 bp, Homo Sapiens
  misc_feature (20)..(20): n is a, c, g, or t
gtccaggtgtggattcccanggagggggttcattggctcagcttgggtcagggcagagcctgttacctgaagagaggtgagaccaaggccacagggagctccaccttctctggtcttcagtccagcactgggtgcccatccccatctctaaaaccagtaaatcagccagcgaatacccggaagcaagatgcacaggcgggcggcttcccacacacccgtcacaagacgcggacatgcaggtctcggcgccagctctgccccgtccaagagcctctccgctgtcgcccagtgtgagcctggaagaggacccaagagagtgccgtgctgaggctgcctcgaggtcactgccttccggagctgcgcctattcctccctcgccaaacgcgttccagaatttgtccacaggtgcgccggcacctgctttcccacctcgaggccgcggcctcccccccgatttatagacaactctgacattgtcaccccactgacgaggcccgattccatagggtggatccttgccaggcgtccctgatcctccctgcccaagtcttccttcgtgagctggccttgctccccatcccccaagtgcctcaccagtcccccagactgggtgaaggtacagctggctcctttcgggggtgcagcttcaactctctcggcggtagggcggtgccatccccacccatagggctggctcacatccagtcactcccaacagcgtccagcacacaaataaaagacccttgggccctggaaaaaaagaccacaaagaaacaatacaacaaaacagacaccacacacaaaaagggggggcggcctaaagagttccc

SEQ ID NO: 99307 - DNA, 1523 bp, Homo Sapiens
aggaagccctggaagctgcttcctcagacatgccgctgctgctactgctgcccctgctgtgggcaggtgagtggctgtggggagaggggttgtcgggctgggccgagctgaccctcgtttccccacagggccctggctatggatccaaatttctggctgcaagtgcaggagtcagtgacggtacaggagggtttgtgcgtcctcgtgccctgcactttcttccatcccataccctactacgacaagaactccccagttcatggttactggttccgggaaggagccattatatccaggactctccagtggccacaaacaagctagatcaagaagtacaggaggagactcagggcagattccgcctccttggggatcccagtaggaacaactgctccctgagcatcgtagacgccaggaggagggataatggttcatacttctttcggatggagagaggaagtaccaaatacagttacaaatctccccagctctctgtgcattgtgacagacttgacccacaggcccaaaatcctcatccctggcactctagaacccggccactccaaaaacctgacctgctctgtgtcctgggcctgtgagcagggaacacccccgatcttctcctggttgtcagctgcccccacctccctgggccccaggactactcactcctcggtgctcataatcaccccacggccccaggaccacggcaccaacctgacctgtcaggtgaagttcgctggagctggtgtgactacggagagaaccatccagctcaacgtcacctatgttccacagaacccaacaactggtatctttccaggagatggctccagggaaacaagagaccagagcaggagtggttcatggggccattggagaagctggtgttacagccctgctcgctctttgtctctgcctcatcttcttcatagtgaagacccacaggaggaaagcagccaggacagcagtggggcaggaatgacacccaccctacccacagggtcagcctccccgaaacaccaggaagaagtccaagttacatgggccccactgaaaccctcaagctgttcaaggtgccgccccctactgtgggaaatggatgagggagctgcattatggcttccctcaactttcatgggatgaatccttccaaggacacctccaccgaatactcagaggtcaggacccagtgaggaacccacaagagcatcaggctcagctagaagatccacatcctctacaggtcggggaccaaaggctgattcttggagatttaacaccccacaggcaatgggtttatagacattatgtgagtttcctgctatattaacatcatcttagactttgcaagcagagagtcgtggaatcaaatctgtgctctttcatttgctaagtgtatgatgtcacacaagctccttaaccttccatgtctccattttcttctctgtgaagtaggtataagaagtcctatctcatagggatgctgtgagcattaaataaaggtacacatggaaaacacc

SEQ ID NO: 99308 - DNA, 416 bp, Homo Sapiens
agaaccgttctccgatgcagaattccttgaggtgtcacggaagagcggattgtacagccagcaggggaagtgcagtcatcacagaggagaaggtgtgcatggtgtgtaagaagaagattgggaacagtgcatttgcaagataccccgaatggagtggtcgtccattacttctgttccaaagaggtaaacccagctgacacttgagcccagcatcctggggatccagcggatggacagcttggctctcccagagaggtgaaggagcacctggccttaggaatcctggctgccaccaccacaaggctccccatttggacattactggctatcttgtgccctggaacaactctgaattaattagactcatggtctggcattgccagctttttaatgggaaaagagattagttatacctt

SEQ ID NO: 99309 - DNA, 638 bp, Homo Sapiens
  misc_feature (378)..(378): n is a, c, g, or t
  misc_feature (544)..(554): n is a, c, g, or t
gggaaccttcacatatcaatgatttactgctatttcccaaaagggccagctttgggcttttcagtctttcaaaacaaactgtatcattcagggatacccttaggcatctagggaacttgttaagaagttagattcctagctccacttcatattctgacttcagagacctggtcaggaccacagaatctatattttaaaatgatgctgatgcaggtgattcaaaatccacactctgcggtaccctaaatggttgaagagcatcaccaactttggcatcagataaacctaagttcaaagccccaactcagttgactcctgactgtgtgatatcaagcaggttttcttcatctgtgttcccagtaaaacttcattcaccanaatcagatggcagacatatttgccagtttgcagaaccctgttctagtgaatcttataaatgaccatctcaactttatgtataattcagctgcctccttcagcacactaaaaaagagagctattgtgaccaggtaattttttagagaaaacaagccttgttaaaccnnnnnnnnnnnctataaatacttactgcacaagaacggcatataaattcatgaggcattccatattttcatatgaaggaactttctagagtaatg

SEQ ID NO: 99310 - DNA, 886 bp, Homo Sapiens
  misc_feature (790)..(798): n is a, c, g, or t
tatatgcgtgtccctgtcagccagtgctctcccagttaaaatggccttaaaaacatgtgatcctgagacaccaccttataaagctgtggagaacagaatgctcagatccccccaacttattggactcgaaacaacccgcggccaataagctggccaggctccggagagcttcgcggctccatgcgtgaggcaggaaagtccatctcagtatgatagagctgagaaaaataaatactaagacgtgatgcctggatacagtaatcaggccaaattatacattgtgctgatgcagcagtggttagcttcattacaaggggaattgttggaatacagaatgatatgcctgatgctgtcacttattgtatatggctgagtcaagataaccattcatttcaaagagcattgattctggatggatataattcccagtgcaactgctagcatggcccttttgcaccaggctaccagaagaactttttagttcataaaatgtgaggtgttttgtttgaggaaatgttgtcccataagggaatcccaaaatctgacgaaaattctgtgagggaaactcttgcttcttcacctgttcgaatatggtaaggacaattagagcaatcgagagagaagctctagccagtaatatggtctattactacttgtgtccatgatttgctaggtactcctcatatatgggctccattgctagactttactgtcttctacgctgcaaaccatcaatttgtctccaggcttggatcacattccaggtgttagaagagatggtccatttccnnnnnnnnnctcctcttaagtcaccatgtccttgtttcaagtagcttcagaaggcaatttgtgctgtaaagattcacctcgtaatggggtacagaca

SEQ ID NO: 99311 - DNA, 895 bp, Homo Sapiens
tagaaagataacgacgggaagagcggggcccgctttggggtccaggcaggttttggggcctcctgtctggtgggaggaggccgcagcgcagcaccctgctcgtcacttgggatggagaccggctttcccgcaatcatgtaccctggatcttttattgggggctggggagaagagtatctcagctgggaaggaccggggctcccagatttcgtcttccagcagcagcccgtggagtctgaagcaatgcactgcagcaaccccaagagtggagttgtgctggctacagtggcccgaggtcccgatgcttgtcagatactcaccagagccccgctgggccaggatcccccgcagaggacagtgctagggctgctaactgcaaatgggcagtacaggaggacctgtggccaggggatcacaagaatcaggtgttattctggatcagaaaatgccttccctccagctggaaagaaagcactccctgactgtggggtccaagagccccccaagcaagggtttgacatctacatggatgaactagagcagggggacagagacagctgctcggtcagagaggggatggcatttgagggatgtgtatgaagtagacaccggcacactcaagtcagacctgcacttcctgctggatttcaacacagtttcccctatgctggtagattcatctctcctctcccagtctgaagatatatccagtcttggcacagatgtgataaatgttgactgaagtatgctgaaagaacatttatcagtaccttagggaaagctgaaataaggccccagaaccaaaagcaacactactgaacgaagcagcaggacattcccggaaggcatgcgcacgaattctggtggacctggctggtgtaaggtggggagaata

SEQ ID NO: 99312 - DNA, 689 bp, Homo Sapiens
ggacatgatgcatacagaacggaaggtggacgtgtatggctttgtgagccggatccgggcgcagcgctgccagatggtgcaaaccgatatgcaggtatgtctgcatatacctagagcccttctggagcattatctctatggagatacagaactggaagtgacctctctagaaacccacctggcagaacatttacaacaaaatcccatgcggaccagcaacgatggattagaggaggagtttacacgcaagcttaaccgtcaatcaacaattccaggaatgacaacgtatgcgtgcactggaacgaccttccagccaacatgaacgaagaaccgtgtcttacagatcattccatactgaatacaacagagtgatcattccagcttacagcggggcgaacgagaatacatgactatgtgaacgcactccttgattgactggctaccggcagaaggactcctatatcgccagccagggccctcttctccactacaagttgaggacttctggcgaatgatctgggagtggaaatcctgctctatcgtgatgctaacagaactggaggagagaggccaggagaagtgtgcccagtactggccactctgatggactggtgtcctatggagatattagcagtggaactgactgacaggaggaggaatgtgagagctacaccgtccgagaccttcct

SEQ ID NO: 99313 - DNA, 595 bp, Homo Sapiens
attgcacccatactgtgaacgcccccaggatctgctgcgagacccccaaggaccagcttctgcagtcctggaagggctctcctgacccccaagtccgccatcttctgatggtggcaggtgggcacagtcactggctgagcgaccaagggtcagtgagattactaggccggcgctgcacccaactgaaatgaactcacgtgtcctcacaactcctagcagcagatgctgtcggcctcgcatcctacaggaaaggaaccatcgccaaaagacgctgaggaacatcccgagggtcacagggacagtgcagagccaggaccagcccggcccatggtcccccagcgtgcaccacctggcccggcactgtgtgctcagccatgaggactgggaagagtcctgcccacagctcaagtgtctacaccgcactgccatccaggctgtgagccgctgctgagcatggggaatgtggctgctgcagagacgttatgaaacacttctaaaagaatgtaaaagatctcattaataattttgagtacctgttaaaatgatagtaattttggatctagtagattaaataaaacatattattaaaattaaa

SEQ ID NO: 99314 - DNA, 722 bp, Homo Sapiens
acgccatactggacgccaagtgggaggaacttcaaggctgtcccctgcgggcctcccgcgctgcattctgcgaaggtttcattgaatacagatcctgcaaaagttccaggtgcccacactggaaacttgtgagatcctgcttcccagaccacagctgtggggaacttggggtggagcagagaagtttctgtattcagctgcccaggcagaggagaatggggtctccacagcctgaagaatgaagacacgacagaataaagactcgatgtcaatgaggagtggacggaagaaagaggcccctgggccccgggaagaactgagatcgaggtggccgggcctcccctggaggggtcagcacgtccagcagtgatggcaaagctgagaagtccaggcagacagccaagaaggcccgagtagaggaagcctccaccccaaaggtcaacaagcagggtcggagtgaggagatctcagagagtgaaagtgaggagaccaatgcaccaaaaaagaccaaaactgagcaggaactccctcggccacagtctccctccgatctggatagcttggacgggcggagccttaatgatgatggcagcagcgaccctagggatatcgacccaggacaaccgaaagcacgtcccccaggtatctacagacgctggaagtgtggaagaatgactctgactcatcttctggcctgtcccagggcccattccgtactcccc

SEQ ID NO: 99315 - DNA, 1060 bp, Homo Sapiens
  misc_feature (180)..(180): n is a, c, g, or t
  misc_feature (816)..(816): n is a, c, g, or t
caagtattcgccttccatgaagagccttggcaataagttcatgcacctgaccaactacagtgtcaataaaaagaatgccgagtaccaggccaatgcagatgaaatggcttgccaggccacaaatgggcactgaaggctttgtggaactacctgagccagaagggagtcaatagcgacgcncatctgggagaagataaaggatgttgttgtcaaaactatcatctcgtcagagccctatgtgaccagcctgctcaagatgtatgtgcgacggccctatagctgccatgaactctttggttttgacatcatgctagacgaaaacctcaagccctgggtcctggaagtcaacatttccccaagcctccactccagctctccactggatatcagcatcaaaggccagatgattcgtgaccttctgaatctggcaggtttagtcctgcccaatgcagaggatatcatttccagccccagcagctgcagcagctccaccaccagcctgcccacctcccctggggacaaatgtcgaatggctccagagcatgtcactgcacagaagatgaagaaagcctattatctgacccagaaaattcctgatcaggacttctatgcatctgtgctggatgtcctgacaccagatgatgttcggattctggttgagatggacacgatgagtattctcgccgtggtcagtttgaacgaatttttccttctcatatctcctctcgctatctccgattataatgagcagccacgatatttcaaacattctacaccaacccaatgggaacagaaataccatggcaacaagcttanaggagtagatctgctccggagttggtgctacaaagggttccacatgggagttgtctctgattctgctccagtgtggtctctcccgacatcacttctgactatctcaaaggatgacgtgatactcaatgccttcagcaaatcagagactagcaagctgggaaaaacaagctccttgtgagttaacctactactctctgaaaacgggaccacgccccaaatcccagaagactcaagctgggccttt

SEQ ID NO: 99316 - DNA, 1253 bp, Homo Sapiens
ccgggaccctatgccgggacccggagcgaagattccggtaccgatattccccgccggagcccggaccggggagccccggagccgaaggacatgcttgtaaaggcgtgtgtaagcccctttgggacgacaatcggaagcgggctttccaagaaggctgcaagccccagtgatatcttctaaccatgggagcgatttatggcatccttataggatatttttaatttgcttttgggcaggtcaggattttggcatagctgctggtgtcttgcagcctctgtgcggcgcggccatctatgaaccccttccggatggcttcttcggtgcttatcctcccatgcacttccgggtcaacaagacctcccgtgaggtactggaactccaggaagcgctggccagcctcatacgggagccatttttctttcactgcctctgctgctgacatcttcttctttcccttcacaccctcgaagcctatgaaggctttctgagcaggcttcagcctggtggccatgtcttggtcaatcacaccctgggagactgcgtcctgaagtgacagcttctggcccgtggttgggtggatgatgccacctgtgcaggcctgagcctccagaagcctctgacccgtgatgctgtcaacgatgccccgctctataccttctgtaatggagattttctccaggttttctgtgtcaaagatggctgcaatggggctcgattcttccagggtgtctgaaaaagagctgctccttatggttaaattcctgacgctggatatggtggaaatcttacttactgattcatgtcgggagctgctaaaaacatcatcgctgacaccactgcccatgctgctgctggtgccgacaccatttttcaaggagatcatgtcagcaaattgagtgaggctgaggctgccggatcggtactgatcaaagaacttcctgtcaacaaggcccttgtcaatagcatcttgaatatcatactgactgcctgtctttctatctaccaggaccaccctggtggagccatctgatcccgtgatggttatttcttcccattcacattcctgctcacacagttctttgaaggtttcataatcaattaggcccttcttgtaggcctcctgaacagacatttctttattggtttctgggtcaactatgaccactctacgcttcctgagggtattcttttgtgatgtctgcacctgtttcttcttttctttcagaggcagaagacagagccctgttcctcat

SEQ ID NO: 99317 - DNA, 771 bp, Homo Sapiens
gggcatataagctatgcgaccttgtcatcacttaacctatgtcctataaagatgaaaatcaggctaataccaaagtatttttagaaattaggctgaaaacctctaagtttggtaaaagacataaaactgcaaatttatgaattggagcaaattccaaagggaataaacacaaggaaactcatccccaacataatgaaatggctgaaaaactaaagataaataccttgaaatctgacagaaaaatgacacactacatacagggaaacaacaatttgaatgactgcagatttctcatcaggtaaatacggaagctaaaaggaaactgctgaacagaaaacaatgtcaactaaaaatactacaagcaaaaaacatcactgagaatgaaggtgagaaaaagatgtcctcagaggaagccaaaaaataagagaatctgtacctatcagaaccactctaaaagaactaaaaaacgtctatcagaagaagtggaaatttgcagaacgaaatttggaaaataatgaaggaagagcaacagaaatggtaaatatctggaaaaacataacagattactcttctcatgagttttttaaatcttctgagtgatttaaaagttagaaaatatataataatttattgatgggttttaagatacagaaagattatgtagaagataactatatcctagatgagaaaaggtaataggatctaaatggtgataaagtgcctagattccactttaagtggtacaaatgtgataacagtagaatagaaaag

SEQ ID NO: 99318 - DNA, 920 bp, Homo Sapiens
gacttggagggaccggggcctgggaaggggcccgccagggagcttcccctgggtgggtgaagttagaaggaggaaccaggggcgtagaagggccgagggctgaccggaggcggttgtagatgagggtcacatagaggtagccgctgcggacattgaagtcccccgtcgtggtatttgccaaatgcctggaggatgatggtggtgacggccatgacgggcttcaccaggcagaactgcagagtggcctgcttacagaagcgcaggaacccgatggagtaggtcatgccccggaggcagcaggtgccgtacaagcagctggacttgatgggctttccacgaatctcagccatgatggcgccctcgcctcccaggtactggaaacacaggctcaggaagctgtaaatgacaaaggcttcgtagcagtcccgcacagagtcgaagtagacgtagtactggtggtctccgaggaggaggaggctgagccaggagtcgaaggcgtagatgggcacgatgaggagcaggcggatgatgtaacgttgctcctgtggcacggtgtaggagcgcaggtgcagatagatctggtggcaggtgagcaccagggcagtccacacgaagatccccgagacgcctcgggccagtgcggaggtgaggaagagccagggggccccctgggagctgttccccatgtggtccatctgcggcccagctggcacagccggtggggggctgggctgcggccagttcactgacaccagggggacgccggctgtctccaggatccctgagacattactcatctttgctggcaggaagcacctggcccagtccagggaggcctggcctccagggaagcctagctggtcattctcatggccacgtggccccagctggaggccccactgtgggtcggcaaggccagg

SEQ ID NO: 99319 - DNA, 919 bp, Homo Sapiens
cagtaaaccagtatttcacactgagattgtcggctgcgggtatattccaattccccgtctcctcatgaatatgaagtgaagggctctgaccctggaagtggttctaagcagggcaaaatggggtctcggaagtgtggaggctgcctaagttgtttgctgattccgcttgcactttggagtataatcgtgaacatattattgtatttcccgaatgggcaaacttcctatgcatccagcaataaactcaccaactacgtgtggtattttgaaggaatctgtttctcaggcatcatgatgcttatagtaacaacagttcttctggtactggagaataataacaactataaatgttgccagagtgaaaactgcagcaaaaaatatgtgacactgctgtcaattatcttttcttccctcggaattgctttttctggatactgcctggtcatctctgccttgggtcttgtccaagggccatattgccgcacccttgatggctgggagtatgcttttgaaggcactgctggacgtttccttacagattctagcatatggattcagtgcctggaacctgcacatgttgtggagtggaacatcattttattttccattctcataaccctcagtgggcttcaagtgatcatctgcctcatcagagtagtcatgcaactatccaagatactgtgtggaagctattcagtgatcttccagcctggaatcatttgaataaggacaaaatgttttccattatcaagacatggccatctatctaaatattatatcaactgtgtagacttgagggcaatattgaaaatgatggtgctttctgcatttggtgtttatttgtaaaaaatttgcagtcctcactgcacatgcaagtataccacccttccattttagtatggttttttaagtaatatga

SEQ ID NO: 99320 - DNA, 1026 bp, Homo Sapiens
agcgcgggcgtcggaagcggcggaggtggcagtgtctgccctgggatggccttccctgcacgcgcgcgtttgtatctaaatcgcaggggaccgtctcttcctcagcttgccggcgcgaggagccagagcctcgagttagggccacacgggggaatttggggcgggttgacttttcccgcaacatatttgtcagagaccttggagaaagtcctactgctggcgccttttagtttcctcagatgataacattcccaactccgctcgaagcgtccagtcttaatcccctccagcagaatggtgctgactaactcagatgtctgagatccgcagctgtgtcaataatagggctttctggcaaacttgtgaacgtaggctcgaaattgtttttctggacgcttgaatatcagtatattcagttgaaaacatgtgattttgttgccagtttatcagttcctacctggcctcccgaggtcagtccttcaggactgacgctgcaactccaactcccatgtttcctttaaatcacaaaggaaaatatcttttaaaaatcaggatacactgattaattatgttagtaactaattggcatttgttgaatcaaaaagttttggaagcgttaaatagttttagcctctaattttacaataaagtgaagctcaaagttgggaatttgaccggatgagggctacaagcctatcctttcctcctccctcttcatctttcccaacctgtcaccctggctcgtttatgtctctgtatagttgtaggctttcatcattatacagagaaaataacaaagtaagtagtgtcttctaaacatctagccattaattccaccaatccattccattttcattcaagaaataccagagatgctgagtaaagattaattagctgcctggttccacagatacatgggaacaaatccagaatagtagtagctcaaatccaaatatagtaacaaatagaagttatatattttaaacgaacatagtagattttcccatgatctcttgaaagaaaatt

SEQ ID NO: 99321 - DNA, 857 bp, Homo Sapiens
ggattcttaaaggatcgcaccaaatttgaagaaaaggtgcgggaggcatccgtgggaccccagcggaaaaggatgaggagcgctctttatgatgacattgataaggctgtttttgcttggtttcaagaaatccatgccaaaaacattcttgtgactggttctgtcattcggaaaaaagcactaaacttggccaacatgcttggctatgacaattttcaagcaagtgtgggctggctgaacagatttagagatcgccacggaattgctttgaaagcagtctgtagagaagatagtgacaggttaatgaatggtctaggaatagataagattaatgagtggcatgcaggggaaattataaaactgattgctgactacagcccagatgatatctttaatgctgatgagacaggagtgtttttccagttgcttccccagcacacacttgctgctaaaggagaccactgtagagggggcaagaaagcaaagcagcggttgacagcactcttttgttgcaatgcctcggggactgaaaaaatgagaccattgattgttggtaggtcagccaccccacactgcctcaagaacattcattccctccccttgggattacccgagccaaccagtggggcttgaatggacaagggatcttgtttaaatgagtgggcttgatgcaagggggatggcccaggaatgaaataggggcggggaacccccccggaatccctctttggcctccttaagaacaaacatgggctcctggccttcaataaaaccattgccttttccccaccacctttgtgggaaaaagagggacatttcaacgggttctggggggctaacatcctgtgcccccccta

SEQ ID NO: 99322 - DNA, 882 bp, Homo Sapiens
atccttcctccaacccacccatacccttcttatttaaaaatcattttaaaaaacatgaacagggagatcaaaattaatatgcaggtcagccatgaatgggaaagaatctcatagcctgcaatgggaaggaagcaaaatgggaagctccacacctgagagttgggggagagcaggagcagggaggctcccagctgacagattgtgtgtgcacacagtggcatgccctctcccgtgaagagcaggctaaatattatgaattagcacggaaagaaagacagctacatatgcagctttatccaggctggtctgcaagagacaattatggtaagaaaaacgaagaggaagagagagaaactacaggaatctgcatcaggtacaggtccaagaatgacagctgcctacatctgaaacatggtggaaaacgaagctcattcccaacgtgcaaagccaaggcagcgaccccaggacctcttctggagatggaagcttgttgaaaacccagactgtctccacggcctgcccagtcgaccccaaaggaacactgacatcaattttaccctgaggtcactgctagagacgctgatccataaagacaatcactgccaacccctctttcgtctactgcaagagccaagttccaaaataaagcataaaaaggttttttaaaaggaaatgtaaaagcacatgagaatgctagcaggctgtggggcagctgagcagcttttctccccccatatctgcgtgcacttcccagagcatcttgcatccaaacctgtaacctttcggcaaggacggtaacttggctgcatttgcctgtcatgcgcaactggagccagcaaccagcacatccatcagcaccccagtggaggagttcatggaaga

SEQ ID NO: 99323 - DNA, 677 bp, Homo Sapiens
ccaggaaacactccgaccaactgccacgccctcctttgctccaaaatgacaagctcttttcatctgggagcaaaagctgaagtccccacatttgaactaaattagtttagtgtaaaagtagtacaagattatctcagacaattgtattttaatagtatttttttctagtgataaatgtaatatatgtctactatggtcatttggaaaattctgagacgtatagagcagaaaagaaattctccataaccctaacccacaaaaaataacttttgaaatgcttgtgtattttttaattcttttttaatgcatattgtaggacaacttactgaacatttggatttttagaaatatttttaataaaacgtgttgaagtacagcatacaaaaaagtgtacaaattacaaatacagttcagtaaactttcaaagattaacacaaacatgtccgggcaaccacaactcagctcaagaaattaactaatagtagcattcttcatccccctgttagttttgtctattctgacatttcacatgaaatgaattacttggtaaatattttatagtatttggtttatttccctttatattatatttgaattcatccgtgtcgttgcatgtaacaagtcttttttacaattttattctatgctgtatgaaattcagttatatgagtatacac

SEQ ID NO: 99324 - DNA, 737 bp, Homo Sapiens
tgggctataaaaattagggggataaataaaatcgttactggaattactctgcttttcttattccccgcagatgttatactttattagaattataattgatagaactttaaaatcatcaacagtttgtatcctttgacattttaggtgatattgccctttgagatcattacatagcataatggcagcatattttaagagtgactcatggctattagtagcgaaataagatcagttactatcctgtattctgtattgctggctattaaacagtaagataattaacaaattgaactacagtttacacacaatggggcaacatggggctagtaagagcaaggaagaaagtttaccaaactaaatatttaggttattgtatgataatattgagactacatttctacaattattatgagaatttcaactttattattctaccaaagttaatctgaaacttggacatgtacaccagcattacttgctttgaaagattggtataaaaacattgagctgcaagtatatttacaaaatatataagtatatttaaggatgtagacacctaataattacatgctaaacgcaaacgattaatgtaatcttttaaaccgggcgtttgaacaaacaaattttcaaggtcatttcatgataaccaatcatgaatggatttacatggagctttttgagcacaaccagcaatgtttcgtgcttctaagagtcactgacttgagaggaacgaaaac

SEQ ID NO: 99325 - DNA, 795 bp, Homo Sapiens
ccgtggcctgggcgctggcgtctccaaggtgcggagcctgaagatggacaggaaggtgtggacagaaacacttatcgaggccctgtgtgctgcagtcaccaccacagacctggctgagacccaggcgctcctgggctgtggggctgggatcaactgcttctcgggggaccctgaggcccccacgcccctggctcttgcagagcaggcggggcagacgctgcagatggaattccttcggaacaaccggaccacagaggtgcctcggctggactcgatgaagcccctggaaaagcactactcagttgtcctgccgaccgtgagccacagtggcttcctctacaagactgcctctgccggcaagctgctacaggaccgccgggcccgggaagagttcagccggcgctggtgtgtccttggtgacggggtcctgagctactttgagaatgagcgggcagtgacccccaatggagagattcgggccagcgagattgtgtgcctggcagtgccccctcctgacacccatggctttgagcacacctttgaggtgtacacggagggagaacggctgtacctgtttgggctggagagtgcggagcaggctcatgagtgggtcaagtgtattgctaaggcattcgtgcctcccctagccgaggatctgctggcccgggattttgagcggctgggacgcctaccctacaaagctggcctgagcctacagcgggcccaggagggctggttctctctcagtggctcggagctccgtgctgtcttcccggaggggccctggaaaagcct

SEQ ID NO: 99326 - DNA, 341 bp, Homo Sapiens
aggaacagaggagtagggcctggggctggcttggggaagcctggcaggttgagacctcatcacagctgtgctcctttctttccgttgatactcaatgggcgattgcagtgctgtgggataagagcaggtggttactctaagctttgggaatcccacaaggatttggaggcctcttaggtccaaggctttgtgttaggcatcgctgtggataagtgagaaaaacactacccttgtttttaaggcaatgggagaactaagacatctacctaaataatgaaaactacaaaaaacaaaacggtgccatatgtgaggtgccagggttgtgcaaagagagagaaggc

SEQ ID NO: 99327 - DNA, 727 bp, Homo Sapiens
ttgtctcaccaggtatggattgtctgatgttgactaggttgatagccacggactgataggccgtcccacagtccgttacattcagaaggaattctcctgtatgatgtctctgatgtgttctaggaggggtgccttctctagtagcaggccttttgacataattgatgatcatctgattgacatacctccctctggagcgctgtggtcgtgtcaagcgtaccttcacatatccagttacggccaagggatttacttcttcctatctgaagttccttttggaagcccttatttcagtgaatgtttttttctgtaggtaaactcttattgttcatatgctgactccaagagtccagtgagaccaagttactgtagttctccagcatcacgtcccagtacaggtccctctgagcagagttcagacaggcccactcctcctgagaaaagtctatggctacgtcggcgaacgtcaccaaagccctgggccattgttttagaactgaagaactgatcagtcttctcggggtttccactgaagaagacaaattccgagaggctagagctgacctaagatgtttaacgattcgtcttcctcctcggggatgctttttctgaaggatgctggcctgaccctttcagatgtttaacgattcgtcttcctcctcggggatgctttttctgaaggatgctggcctggggaaaacagaaccagaagggtaacacctgcctt

SEQ ID NO: 99328 - DNA, 937 bp, Homo Sapiens
aatcaatacatgttaactataatcaccctattgatctattgaagaacaccaggttttatttcttctatctaactgtatatctgaatgcttcgtcaatctctctttatccctcctctctcaatgtgcagtttcttctagaaccccccacaccaagcttcccttttagcgtcggagaaagctcaagtgaaaaagtgaagcaaagcagttggcaaaagagggagacagatgccaccccgaaaggtgccccattaggtgccactctgccatcctgccctctgtcccctcagtcaatgcctggaaatggggagatgaggcctaaaatttgagagtttgttttaacacaacatcaaagcaatatgaagtggaaatctcccttcaaaacatcaggaggaaaatcattgtgtgataggtggatatgaccaaccagcttgaaacgttgacgatcctaccacatgccaggatgttgtgtcactatgttagagggtggaatgcaggagcaaccagtatctacgagctatctaatgtgccatgacacagaaggactttgaaatgtaactgattcatggcgggacaatacctccaatacacttctcgaattataaacagcacagctctcaagcacaggctgccgagggcacaatgcacagttgtaacaagctagcatgcgccatcgcgaaacaaaacaatgctatcctatgacaggctcccagaatttccacaaaagatgaaaacatatcaacttacaacacaagtctgaaactttcccagtgaacctgctggcagagagagacacgcacactcctactatacaagaacgccgaaagaccaaccacacaacgcagcaagacacaaccgcagcaccaccccaaacacacatcctcaagaccgcaccaaaactaactaccaaccaacgcaatcagcaccaaccagctaaaag

SEQ ID NO: 99329 - DNA, 836 bp, Homo Sapiens
atgcctcccaaatagaaaaatctttagttatcttcaacataaactgccaaggagcacaggtacggtccagacatcacggtaaatatgcataaaatattgtctagctggataataaacaccagcagtaggaaaaaggaggggatgaaaatgtctcacacccagtaacttttaggaacatagcaaaattagcaggccactgtcaactctaaaatgggaacagcaggcgcctctgagggagataggaagtagctaaatgatggaaaatattaaacaagatagcttagaagattcatatttattccaaatgggaggctgaatctctcagatgtcgattttgacacattggcactatttttgtttctgatttattgccttggccgtaagttcaaaggcaacaataaagtgtactttcattaataccaccatggactttcgagtattaatatgacaagaaaagacaactattcattttttttaaggggactggacacacaaacttcaggagggaagaatcccctctcccattagaatccctctatcttgataaaatggttgctttattggtcagattttggacttggatcgtctgttataatattaatagtacacagcatgtaagattttctgcattcatttgaaattcctaataccaaccatcttttaatttataaaaaaagagggaaacttacaataaaacaaaaaatactaccctcacagatgattaatagcatgcaatctatgaaatattacatacattaaaagtctccaattactgtgtgcctgacccatcacacagtatccttccaagacaatctatagaattcaaaactgtacaa

SEQ ID NO: 99330 - DNA, 1063 bp, Homo Sapiens
  misc_feature (982)..(982): n is a, c, g, or t
gggacctcagcgggaagcggagacgcaagcagctggatctccggtaactgagacatagggtataactgttgtcgcggcggaggaagtgaggacggcgccaagggccttccgggccagtgttggatccctgttagtttgtgaagatggtgttgctaacaatgatcgcccgagtggcggacgggctcccgctggccgcctcgatgcaggaggacgaacagtctggccgggaccttcaacaatatcagagtcaggctaagcaactctttcgaaagttgaatgaacagtcccctaccagatgtaccttggaagcaggagccatgacttttcactacattattgagcagggggtgtgttatttggttttatgtgaagctgccttccctaagaagttggcttttgcctacctagaagatttgcactcagaatttgatgaacagcatggaaagaaggtgcccactgtgtcccgaccctattcctttattgaatttgatactttcattcagaaaaccaagaagctctacattgacagtcgtgctcgaagaaatctaggctccatcaacactgaattgcaagatgtgcagaggatcatggtggccaatattgaagaagtgttacaacgaggagaagcactctcagcattggattcaaaggctaacaatttgtccagtctgtccaagaaataccgccaggatgcgaagtacttgaacatgcgttccacttatgccaaacttgcagcagtagctgtatttatcatcatgttaatagtgtatgtccgattctggtggctgtgaacataatgaatacagtcaactggtaagggagaaacctagaacccagtaggtgtatattttcaggaaactgagctcacagagatgtgtattagaatccaagtggaacttctgcctctaaagaccttgcaagaaaagagatgccctgaaaaatgaaaggtgcacctcatttaatgaagcttacccctatgtanaaagtctcttttcgggggcagaagcttttctctggggtgcccagccatatatattaggggaaatagtagaatggttaaatt

SEQ ID NO: 99331 - DNA, 920 bp, Homo Sapiens
  misc_feature (206)..(214): n is a, c, g, or t
cacttcccaaaaacacgatgtgaaggtttaaacaaaacacctcaccccttccccacgcccaaacccaaaaactatgtagcaagcacactcctcgaccacccaaaccccagcaggagccgggcattgtggaagcagcgagtctcagcctccctggagccctcatttgaagcccagagcacctctccccatctaaaatgacacatacnnnnnnnnncaagagtactgccttttgttctagcatctttccacaagaattttatgatcctctctgcccccacccccacagttccacaggggcaccctttgtccagaagggcgagggtcccagcattagggagagtctggacacagccctcagcctcctcctctctccgatttcctcctcccagagcccccagccggcttcgaagggcttcaggcggaggagtgcggcatcctgaacggctgtgagaatggccgctgtgtgcgcgtgcgggagggctacacctgtgactgttttgagggcttccagctggatgcggcccacatggcctgcgtagatgtgaatgagtgtgatgacttgaacgggcctgctgtgctctgtgtccatggttactgcgagaacacagagggctcctaccgctgccactgctccccgggatatgtggctgaggcagggcccccccactgcactgccaaggagtagcagtcaggggtcagtgtggcaactacctggaaatggcctccagtcacaggcagggggccttgaggatgaattcctagctgggaagacaccgtgacatcaggccagagggtttccaatcagccttgccctgctttcatctctcccagcttagcctctggctgtaagcttcggtcattgcctccatgcccttgcttggctcaagcaccaccaaccgcatcacccgttcgggtaccga

SEQ ID NO: 99332 - DNA, 799 bp, Homo Sapiens
atataattaaataatatgcttaacatatagtgaatctctaattctaatgtcagtgcaatggaagacatttatttggacagtaatactagcaaagttggtagatatttgattcttcatttttgttttttcattagtgaagtgggttttagttatgtttaaaattataaccagcgtattttcacatcattctgtaagttaaatgatatcaaacatgaaagagatgttctcatttttctttttctgattaaacgtctgatgcatatcatttttctataagtaatcagttgcttttaaaatcagaaggctatattattctaatgaccctattcgatctaaatgggtttgagaatccatatcagcaacatacgtgttttttgacagaaagtgaaaacaaattccgtaaaactgttagtatcaaaaagaataggaatacagttttcttttccacattatgatcaaataaaaatcttgtgagattgtttatgttttgaagcaggaggatttcttgagatttgatggaagtgggagttgggaaggattcaccatacttgtgttctcctccctttataaattttattcataggacttttaaaaggcttgtgctatctttccagtgaaaactgaaagtgcattattatggaagaatgtatttgcaggtagtaatagcattaaaaaatatactcgtgtgtaaacacatactaattttgaccttgaaagatgaattccttcaagaaaaataaaataatgcttaagataatgtgtacgaaattaaataaaggactttatttacatactaaaa

SEQ ID NO: 99333 - DNA, 763 bp, Homo Sapiens
  misc_feature (241)..(253): n is a, c, g, or t
  misc_feature (287)..(296): n is a, c, g, or t
cggtgagcttacacctgaagctggtgccaaggtaacccctgttaccctcttggacactgtaccaggatggcacttgcagaacacccgatttaaaggtttgcaaataaggccttttgaaaccccctaccaaggctttctttatgttctcatcttagcctgtttccgtcacgtcccgggtcactttatagacttcgggtatcttaaaattcacacaagcatcacttcaaggtccttccccggnnnnnnnnnnnnnttgaggcctaaaattgtgtggttacttaagctgnnnnnnnnnntgggaaattgatgaatagcgaaaggaaagtacagaggaatcataatactgatgcattgtagtgcgagcacattaaattaaaaaggaataacaataataataataaaaatactgatgtatggtagtgcgggcacctttttaaaatgtattaatataaattagacatagttttttaaagtttgtagtgatacataagtagagtgcaattcttacaattttctagttgtgcttaaagtataaatgctattaaacacaggaattagtctctgaaccacacagtttttaggccttaacactgtacaaatttttgcataatgcagtttttaacatacccagctccaactccgtctacatctgtcttggctgaaccgccccttctgtccctctctacagcttcctggaagcgtcaggcacgtgcatgaacagcttaacacagcagtgttttcaagcaggtaacaatactactgg

SEQ ID NO: 99334 - DNA, 865 bp, Homo Sapiens
  misc_feature (240)..(252): n is a, c, g, or t
aatttcttttaaatgcatcacaacaactgtggccacgtgaaaaggagaaccaaaactggcacagtttgtccactttgaaatatcagacctagtttcttcttaaatttccacactaatttctcccatatgtccttaaaactttcttggcatccttcaatgccttacagctacccagaatgccataaagtcacttgtacacgtatttcttaccaaaataagttataagccaagttcagcaannnnnnnnnnnnncacagcactagagaccctgttaaataggggatatgagtcagaatggcttattcacagatggggtccagattcagtggttggaacacagacaccacagtgagctcctttgcaaagtggcaaacataattttgctttctgccttcaaaaacatatatccatcgcgtttaggcttcatgatactgctcctgcaaaaatgcaagtcgaaagggactgcagggactctcgctgggggccctgtgagcatcgagcagggctctaacccatggcggtgaccatgctggaggggtggtgtggtccaaaggacaggctggatggcgggtgcatcggcgtgggcgtggtcagcatgtggctggagtggctgaagggcgagatgtggctcagggaggacatgtgtctggagagggcggccgggttaaacgagctgttcttggggaagtcctccagtgagtcatgcacttttttgcactttttggatttgctagacatttttcggtttctggtctggatgccttccttcttcatagtcaggggtctgttaatattgtgaagcttgtagtagagcccacaggcattgcagacagggtccccattggcattcctcctccagagtgcc

SEQ ID NO: 99335 - DNA, 907 bp, Homo Sapiens
tttgctgtagtccacgcccccttgccgctccggtgacagtctctgcggaaagtcacgtttgtgatttcgggagagcacagaacgggacgacggcgctcttgctgggtcatctgggccaggtgacgaagaaacagtttcctggtgaagcagtccctcacccctagtcagcccacacccctagggcctaaagatgctgaggtctgtatggaattttctgaaacgccacaaaaagaaatgcatcttcctgggcacggtccttggaggagtatatattctggggaaatatggacagaagaaaatcagagaaatacaggaaagggaggctgcagaatacattgcccaagcacgacgacaatatcattttgaaagtaaccagaggacttgcaatatgacagtgctgtccatgcttccaacactgagagaggccttaatgcagcaactgaattccgagagcctcacagctctgctaaaaaacaggccttcaaacaagctagaaatatgggaggatctgaagataataagtttcacaagaagtactgtggctgtatacagtacctgtatgctggttgttcttttgcgggtccagttaaacataattggtggatatatttacctggataatgcagcagttggcaaaaatggcactacaattcttgctcccccagatgtccaacagcagtatttatcaagtattcagcacctacttggagatggcctgacagaaatgatcactgtcattaaacacagctgtgcaaaaggttttaggaagtgtttctcttaaacattctttgtccctttttggacttggagcaaaaacctaaagaaaatcggaaatctcggttgagcagccataagatctccctcccttggatttattaaaggatggaattccaaaacctttttattt

SEQ ID NO: 99336 - DNA, 992 bp, Homo Sapiens
  misc_feature (517)..(517): n is a, c, g, or t
  misc_feature (521)..(524): n is a, c, g, or t
  misc_feature (529)..(529): n is a, c, g, or t
  misc_feature (531)..(531): n is a, c, g, or t
  misc_feature (533)..(533): n is a, c, g, or t
  misc_feature (540)..(540): n is a, c, g, or t
  misc_feature (542)..(542): n is a, c, g, or t
  misc_feature (547)..(548): n is a, c, g, or t
  misc_feature (553)..(553): n is a, c, g, or t
  misc_feature (555)..(557): n is a, c, g, or t
  misc_feature (562)..(562): n is a, c, g, or t
  misc_feature (577)..(890): n is a, c, g, or t
cctgagcagccaacacaccagcccagacagctgcaagtcaccatggacgctgaaggcctggcgctgctgctgccgcccgtcaccctggcagccctggtggacagctggctccgagaggactgcccagggctcaactacgcagccttggtcagcggggcaggcccctcgcaggcggcgctgtgggccaaatcccctggggtactggcagggcagcctttcttcgatgccatatttacccaactcaactgccaagtctcctggttcctccccgagggatcgaagctggtgccggtggccagagtggccgaggtccggggccctgcccactgcctgctgctgggggaacgggtggccctcaacacgctggcccgctgcagtggcattgccagtgctgccgccgctgcagtggaggccgccaggggggccggctggactgggcacgtggcaggcacgaggaagaccacgccaggcttccggctggtggagaagtatgggctctgggtgggggcggggccgnctcnnnncgctncnanctgggangnctgcnngaggngnnngctcnccccgcgggggccgnnnnnnnnnnnnnnnnnnnnnnnnnnnnnnnnnnnnnnnnnnnnnnnnnnnnnnnnnnnnnnnnnnnnnnnnnnnnnnnnnnnnnnnnnnnnnnnnnnnnnnnnnnnnnnnnnnnnnnnnnnnnnnnnnnnnnnnnnnnnnnnnnnnnnnnnnnnnnnnnnnnnnnnnnnnnnnnnnnnnnnnnnnnnnnnnnnnnnnnnnnnnnnnnnnnnnnnnnnnnnnnnnnnnnnnnnnnnnnnnnnnnnnnnnnnnnnnnnnnnnnnnnnnnnnnnnnnnnnnnnnnnnnnnnnnnnnnnnnnnnnnnnnnnnnnnnntgtctcctccgccctccggcgccttgcgtcttttcttcctcgtccccctgtgcgggcgtcccgcgctgtccctccggttgctcgcccttgtttggctgcgtc

SEQ ID NO: 99337 - DNA, 756 bp, Homo Sapiens
ggatctgccggtaggcgtctgtgtgcgccgccaagtcggtggggcggggacgcgaggtgtggatggggggtcgccttgacctctgcctcagccagtagcgcagtctcggcctcgccgttacggagatggtgccctgggtgcggacgatggggcagaagctgaagcagcggctgcgactggacgtgggacgcgagatctgccgccagtacccgctgttctgcttcctgctgctctgtctcagcgccgcctccctgcttcttaacaggtatattcatattttaatgatcttctggtcatttgttgctggagttgtcacattctactgctcactaggacctgattctctcttaccaaatatattcttcacaataaaatacaaacccaagcagttaggacttcaggaattatttcctcaaggtcatagctgtgctgtttgtggtaaagtgaaatgtaaacgacataggccttctttgctacttgaaaactaccagccatggctagacctgaaaatttcttccaaggttgatgcatctctctcagaggttcttgaattagtgttggaaaactttgtttatccgtggtacagggcatgtgacagatgatgaatcctttgttgatgaactgagaataacattacgttttattgcatctgtcttaataagaaggattcacaaggtggatattccatctattataaccaagaaactattaaaagcagcaatgaagcaatatagaagtgatcggttcaacgccaga

SEQ ID NO: 99338 - DNA, 705 bp, Homo Sapiens
cagagtcccagatcctggtgggcatagtgcgaagggcccagctggtgcaggccctgaaggctgagcctccttcctgggctcctggacaccagcagtgtctccaggacatcttggctgcaggctgccccacagaaccagtgaccctgaagctgtccccagagacttccctgcatgaggcacaaaacctctttaagctgttgaaccttcagtccctcttcgtgacatcgcggggcagagctgtgggctgcgtgtcctgggtggagatgaagaaagcaatttccaacctgacaaatccgccagctccaaagtgagccggcccagcaagatgaaacagggcaccccagctgacctggtactgaggttgggctgagaccctgcttctcttcccccatcaccacctgcccctccctccagcccagctccattctttggcataacaggcaactctaacctagcccagaagaggatggctcatcctgggtgggacgatggctcctgccttgaaagacaaaaatcccaccttgggcagagctgagtgtgagaagatggaaaaccagtatctgccaggtgctcagtgactggccatcacattaatgaatgacgagattggagtacactgtcaccaagggcaggcaaagatggcttctggggttgtctggttcccagtgagaggctcctgagaaaaataaagctggttcccagaac

SEQ ID NO: 99339 - DNA, 884 bp, Homo Sapiens
  misc_feature (485)..(485): n is a, c, g, or t
aaaaacccggatgagctgggcagcaggtgttggcagtcgcggctgcgagattggggcacttttgggggtgccggtggcccgggccgatggcgcaaggttgggcaggcttctctgaggaggaactgaggagactaaagcagactaaagatccatttgaaccacagcgacgtctccccgcgaagaaaagtcgacaacaacttcagcgagaaaaagcccttgtagagcaaagccaaaaacttgggcttcaagatggatcaacctcattacttccagagcagctgctttcagcaccaaaacagagagttaacgttcaaaaaccacctttttcttcccctactcttccgagtcatttcactctcacctcccccgttggtggatggacaaccacagggcattgaaagtcagccaaaggaactgggacttgagaattcccatgatggtcacaacaatgttgagattctacctccaaagccagattgcaaatnggagaaaaagaaagtggaattgttagcaagaaaaatctcgttgggaagtcctccaacaagaacaacggctaatggaagagaacaaataaacgtaaaaaagctcttttggctaaagctattgcagaaagatccaaaagaactcaggcagagaccatgaaactaaagcggatccagaaggagttgcaggctttagatgacatggtgtcagctgacattggaattctcaggaaccggatcgatccaggccagcttagactattcatacgctcggaagcggttagacagggctgaagcagagtacattgcagcaaagctagaatatcagcgcaagactgagatacaagagcactcactgaaccaccttggtacgaacatcagcaaaaggagcccgaaggccag

SEQ ID NO: 99340 - DNA, 1665 bp, Homo Sapiens
  misc_feature (1088)..(1128): n is a, c, g, or t
  misc_feature (1203)..(1260): n is a, c, g, or t
  misc_feature (1306)..(1306): n is a, c, g, or t
caggagcctgcagaaaaacctagtgcggggccccacgggagcagggtggccggtagtcattgctgcttcttgttaggctgctcaggagagccctggtctccacctccgtgaaatagggtgggaccagccacctctgtgggtgagagagccaggccctgggcaggcacagagctatgcaggtggccccctctcagtgcctgccctaggctctgcttgtgactctcttctcctcacctgtgccccacgcttgcagccccagctgtgtgggttccacttctggtgctctggagtcttgggggaagaggcactgtggtggcccttgagactccttcctgcctccctccggagcagagagtaaagaggagccggcagtgtctggcctgcatctttccatgtggacaggagccctcccgggaggcctggaggcagagggaagaggcggagggtgccatggtccacagggagctgtgggaaggtgggagccctcctgctgcaccccaggcaccgtcagggagaaccctggtgacctgggcgagagctgggcccgagttgggatctttgatggggaggggagtgagagcagggatgtgctctggtggtggggagcctcaggtcaggtcccagaggacccaggagagctcatgaacacagggctggcaggttgtcagggaagagccgaaggagctgtggtagcctccaggcagggagctcttcctgggctggagggaggtgtgggattgttggagtgctgctctcacacaggagcacggcctgttctgggggtcggagggctggagcaccaccatgaagggcctgcaggtgggtggaggcagagggcttctgggagtgtgaccggcctgggccagacagatgcctggtgcttctgcccccacccctgggctctggtgtgcctcctgccatcggcaccactgtcttccttgtccttccctgggtcctgggccgaagcacagttgacaggacctgaccaggggcaggaccctgtcctcacctcgccacctttttgcagtccgccagttccttgggagtggggccagcccctgaacttgggcaacgaagaacggcctgannnnnnnnnnnnnnnnnnnnnnnnnnnnnnnnnnnnnnnnngtcgttatccccacctccctagaccgccgctactccgccctctctatcccgtcgcccacctcgccggcctacacnnnnnnnnnnnnnnnnnnnnnnnnnnnnnnnnnnnnnnnnnnnnnnnnnnnnnnnnnnacagccgaagggcgcgcagccctgctgggagcccgacataccagantgatcagtaagggcggcaggggagacccgttcgtctggaggaaggcacgcagaccacacagccctgctcccttcacacgcatcgtgtatggatcgtctctacggcttcgattgcacctccaccggcctcatataacccagactgggcaacctataccctgcgccacaccctacttgtgctatcccttcccgtggggtggtatgccgttccctatcctcaacagttgtccgcccacagccatcagagagtagcgggcgggaggttgctatgcgatcgcgtttaagactctcacatccttgctcatcccagtgtattggtacgcgccctccgttgctgtgcgcatctagctagcgtcgagt

SEQ ID NO: 99341 - DNA, 1061 bp, Homo Sapiens
gctctgggggcaggccagcaagctatatggacaggcctctggatgactgtgatgcctgcgcaccttgagaaccatcggcctggatagcatctgaacactgatggctcctggtgcgtctagagaagacacaggccatgtctgggacgcgggggagatggactagcacgctcccccagccacagggcagcatgatgcccagttccctcagaaggatgtccttcatcttttccttgccgtgtgtgttcaaccccaccctctcagcagcccgggaagggcaggacactgcacacacaagagggccgttcccagtcccattccagattcatctgtcaccagacccacgggaggaggcagactggttccaggaggatgacagcccttgttctgacacctgtgtctgataccagggcctacaaatccgcactggactacaccaaacgaagtctggggattttcattgacctccagaagaaagagaaggaggcgcatgcctggctgcaagcagggaagatctattacatcttgcggcagagcgagctggtggacctctacatccaggtggcacagaacgtggccctgtacacaggcgaacccaacctggggctggagctgtttgaggcggctggagacatcttcttcgacggggcctgggagcgggagaaagctgtgtccttctaccgggaccgggccctgcccctggcagtgactacgggcaaccgcaaagcggagctgcggctgtgcaacaagctggtggcactgctggccacgctggaggagccccaggagggcttggagtttgcccacatggccctagcactcagcatcaccctggggggaaccggctgaacgagcgcgtgggcctaccaccggctggccgccctgcaacaccgactgggccatggcgagctggcagagcacttctacctcaaggccctgtcgctctgcaactcgccgctggagtttgacgaggagaccctctactacgtgaaggtgtacctggtgctcggtgacatcatcttctacgacctgaaggacccgtttgatgcagccgggtactacca

SEQ ID NO: 99342 - DNA, 442 bp, Homo Sapiens
  misc_feature (410)..(410): n is a, c, g, or t
gcggccgccagcgccagctggtagtacccggctgcatcaaacgggtccttcaggtcgtagaagatgatgtcaccgagcaccaggtacaccttcacgtagtagagggtctcctcgtcaaactccagcggcgagttgcagagcgacagggccttgaggtagaagtgctctgccagctcgccatggcccagtcggtgttgcagggcggccagccggtggtaggccacgcgctcgttcagccggtcccccggtagaaggacacagctttctcccgttcccaggccccgtcgaagaagatgtctccagccgcctcaaacagctccagccccaggttggggtcgcctgtgtacagggccacgttctgtgccaccctggatgtaaggtccaccagctcgctctgccgcaagatgtantagatcttccctgcttgcagccaggcatgcgc

SEQ ID NO: 99343 - DNA, 873 bp, Homo Sapiens
gggtgaaatgccattatggtccggccatcgctggctcactctcctttacaccttgtagatgtccatgcacacttccaccctcgatccccgtacgcgacgcaaacctaccctggccagcagctgtgctttgctgcgggttccttgctgtagcagggacaggacccccaccccctgtcccgtctggccaccgacttcagcagaggctcggctgccgtgagggataccagtcatgggaaaagtggcctccctgcaggattcacagagcaaggtggttctcacagagaagtcagtggctttctttctacgttaatgctgtacgcaaagcgccaccgtttatcgtttcaccaccaatttatatttcttaacacccatggagcaaagtgtggtgatgtttgaactgtagcctggggctctcgctcccatggtgactcctcggggaatttcccatgcagcaggatcgcctctgtgtccttgcagggggtggcgtctgctgggggcatcatcccgatcgtgcagggggaacggctgaggtcacaggctttgcctgacaagtgccactcacggctgctgtccacgtgccagccctgggacacagccctctgccatccttccacccactcggaggccagggagggcacctccgtgccacactgcaggcaggcagggccgcgcttgggatctgccgccttcttgtcagtgctgctttgactaattgcctgaggcacggccggagtgacttgctatttttagaagctaattcaggcttcagatgccatctaggtaatgaggagagagttcaggaaagctgtatctaagctccagcaaagtgcggcctcttccgtaccagctgtcgctgcgtgtacactgacggca

SEQ ID NO: 99344 - DNA, 711 bp, Homo Sapiens
ccccggcgtccccggaccatggcgctctccgggctcttctctagctctcagcggctgcgaaggtctgtaaacctggtggccaagtgattgtaagtcaggagactttccttcggtttctgcctttgatggcaagaggtggagattgtggcggcgattacagaaaacgtctgggaagacaagttgctgtttttatgggaatcgcaggcttggaagagacagaagcaattccagaaataaattggaaattgaagatttaaacaatgttgttttaaaatattctaacttcaaagaatgatgccagaaacttaaaaaggggctgcgcagagtagcaggggccctggagggcgcggcctgaatcctgattgcccttctgctgagaggacacacgcagctgaagatgaatttgggaaaagtagccgcttgctactttaactatggaagagcagggccacagtgagatggaaataatcccatcagagtctcacccccacattcaattactgaaaagcaatcgggaacttctggtcactcacatccgcaatactcagtgtctggtggacaacttgctgaagaatgactacttctcggcggaagatgcggagattgtgtgtgcctgccccacccagcctgacaaggtgccccggggacagggacgggcatgggcattgtgtggaccccgggagctagaagaagcctctccctgctgatctg

SEQ ID NO: 99345 - DNA, 767 bp, Homo Sapiens
gggttcacctctcataagttgaaactcttcaagacgttttttcattatcatctcttggtaaaaactttccaggttgttcatgggatcacctttgttcttcttttggggttcatcttttgtgcctaattgttatcttcctcttcattgaggtcatgtacttgtctgcacttgtctttttgtggtatgcttggtaataaagagccttaaggaaggagtgacgatcagctccctgaaataaagacttttctatttgccatttctcgccgggtcagctgtttgctcttggcaaatctctgtgggcaggcaaagaatgcgctgacgctccgagatcctttcgttcaatatcgttgaagacggttctgtattgcttcaggagttgccctcagttttgtcgttcttttcaccagaaacatggctcttccagatcaagatttctgtttcattaagccctaattccctgagagaagcagtttcctggtccttctcatgcagtgtctggaattgggacaaagtcatagtcccagctgcttccttcccaaagggctcgcacatagtaccaggagcaaagctctctttcttagacatacattcctcaatggagacagaagtatcaagttgatgctgaaggaggcttttcagctgcctctccccattctgtttccaagctcctccaggacatgctcatcactcttcaccacagctgtttaccctcattcatgtttgccacaggcccctacactccaacttgggtaaataggccatccaca

SEQ ID NO: 99346 - DNA, 536 bp, Homo Sapiens
  misc_feature (410)..(420): n is a, c, g, or t
aaacccatggtctctttagtaagtgttcttattttccacatgattaaggaaactgctatttaggagttaactcagaaatatctcatgtagaatttccaacctcttgaatattgggtcactacctccaaccctgctatttcttggtagggaggaggagggtgctgtctatcaggaaaaagttggatctgacttggggctcacagatcactgcacacggggtgactgaattccctttgcagcacctgaggccaggtctggcccacaactggctcacagtaatcagcccatcacagtgttccttcagggactctccacatataaagtatacagagtaagaaaaatataaaccttagtctctgacctggaaatcagagtcatggggtttgggaaacttgcaggaaagaagaggnnnnnnnnnnntagctttcctgatagaagccaatgaagttaattttctcccttgtgtgacttggaggagttctttggtgtgtcctgcagaccttgagggtgggagcgcgcggtggtggagcccccga

SEQ ID NO: 99347 - DNA, 1023 bp, Homo Sapiens
  misc_feature (755)..(819): n is a, c, g, or t
  misc_feature (838)..(914): n is a, c, g, or t
gcggcgggcagctagcagctggctggacgcgaaccggaggcggtggtgggtgcggctgagccatgcccggtgtgctgcggtctgagcccctccacctgctgcaatcatgaaggacagcggggactccaaggaccatgcaactcatggatggcgcttctgaggtcctggcccatcagcgtggcagagctggaggaaggagctaccctcatcgcccataaagtggatgagcagatggtggttctcatggacccaatggaggatcccgacgacatcctgcgggcgcatcgatcccgggagaagtccgtacctgttcagacgtggcctttgacttcaccgccacccaggagatggtgtatcaggccaccaacaagagcctcatcgagggcgtcatctacaggcatacaatgccacatgtcatatgcctatggccccaaaggctgtgggggaaaaactagcaccatgctgggacacagagcagagagaactggacatcataatgtacagaaacctacagagaacatactatcacgtgaacatcgaaggaagaagcaggaaaaggacatggaggtatgaggaacatgcaaatgagatcatagacatgagaagaatttaaaaaaagagaatggattacgggtggaacacattaatggaaagaaaaataagaatggagacatacgaatgggaagacatagaagtgaagagaataataaaaaaagagaggagatagaaatccaagagtgaaggtacggagaatnnnnnnnnnnnnnnnnnnnnnnnnnnnnnnnnnnnnnnnnnnnnnnnnnnnnnnnnnnnnnnnnngacaaggcaaggatgcaannnnnnnnnnnnnnnnnnnnnnnnnnnnnnnnnnnnnnnnnnnnnnnnnnnnnnnnnnnnnnnnnnnnnnnnnnnnncgatccagaagaccaggcgacacacagatagagaaaagaggagcaaaaggtcaagagaagaggagacgacagagacaaagaacagaaagcaaagaataacaaaaaacaa

SEQ ID NO: 99348 - DNA, 645 bp, Homo Sapiens
ctgtgaataaataaaagtttatcattccgtacaaacgcactcattttccacaacagtttttacacgagccgcggcggcccggtggtggcacgtggggagcggccccgcggcggcgttctcgcgggcggcgtcacagcggctccaggtcctcgtccccgcacgcgtactcgtacaggtccacggcgcccagcggtgagggcgcctcgaagaagggcctctgggccagcggggagcgcagcgcactcagcttctgctccacagggctgagctcggcctcgaacccgtcctcccagggctctcccaccgtctccaaggccaccagaatgtcgtactcctcggccgcgtacttctcccagtccgagagctcggggccgccgctgtcaccgtccctgagcagggagatctgctctttctgctcgtggtcgaggtacttctcgatgttgaagaaggtgtcgaagaagacgttggccagcttgcagcgcttcaggtcctgcagcgtgatcttcccttcagtcctcggcttgaccaggtccagcatctggcagaggcagtccttgtatggcagggccctgatggccatgctgtccagccttcggcactggtcctcgtaaaagtctctagcatatacatggacagggcgctgtc

SEQ ID NO: 99349 - DNA, 326 bp, Homo Sapiens
ttcttgggctcatgggggcagacgcaggcaggagctcaggaaattccgagaggactttggggtgtccaggagcactttgaggccacgggcccaggcaacttcctcaccagtacggaacaggggatgcacagggccgaactttccatctgctggcccctgctggtgtccaggagagagctgtgaccctcctttttccttaagtcctggagctgagagtgagaagccatggggtgcacgtactcgtctccacctgaggagcccgctctgagaaggtcagttcctgacactgtccctggcggcagactgccctcatgcccctttggcca

SEQ ID NO: 99350 - DNA, 634 bp, Homo Sapiens
tctgtaacacgtcatgccctaatggggcaaacagcacccacttaagaaggcaagcgcataaccatattttctggacatgagatacccaggaattcctaagttgtatgattttggaagtgaatactgcttttgtccttcttaccacaactttcagcttgttaagagtaacatattaaagtaaacatgtggatgtatatacacattttcctttgacgttttcattgctttcagacttatgttatttgaaggaaagagagtacacagctagaaactttggaaaaatgacatttccaatgaaatgtagcatccacccctccaaaaaaagataatttattaaatgcctacaaattttgaaacatatgaaatttaaactaggacactttcctaaaattaagttttactaagattaaaaaactttaagtaatttagatgatcatggttactttttaagtcccttttcattaaaaaatatttaaaataaacaacagaaggatgctatatttggcacccccttaaataaactgctaaacactaatattaataaaaaataatccaaggaactctgcctctgaaatgtattctactatgtgttacatgtgttatccagttaataaaaactcactgaaagagctga

SEQ ID NO: 99351 - DNA, 741 bp, Homo Sapiens
atggtgacatttccgtctaataattcttggggtgtcctctagaggtgacctgtctcataaaaaggctatggtcccttggactttgctggcagaagaggtactgcatatgcgagagcatttaccgacacagtataaataaacacttctgaagtctatagcaaaactgaaaagttaccagtgttctgaagatgtcctcaacttctcgtgtttgatacaaatgtcaagaaatcgtaaaatgacaattcatgttcagaagagatataagaatataagaaacctgtgaaaagccatcatctcaaggtcaagagttatcgtgaatcactgacagtcgagcaaaggaaatttacaccatcaaaagtatgaacagtttttaaattcactgttaagactgtcagtagttcaaaacctctatcatttctgtaaaccaacgaacacttccaaatgtgtagagacagtaagatctgccatgtataaatccatgagtactatttcagaggcttcattccttacctgctgtgttcctttaaatattggatatttagtgcctaggaagtctatactggagaacagtttagacaggacagtataagaatgtccccttttagcacaataataaagttgattgactaacattttctacacagctcctgaactttcacaattcacaaatacataaatcatcaaccaagaatccaatctctccagtaattaaatgccagcattataaaacatcgacactag

SEQ ID NO: 99352 - DNA, 247 bp, Homo Sapiens
  misc_feature (186)..(196): n is a, c, g, or t
ggtgcatgacatcaaatactctaacgagacatttttaatgaaagacttaaaccagataggccacaatgaaccaaattagaaatctgaacatgtcaccacttgcagcataaaggaatataaaagggcagagcaaagtcttttttcctaaggtgaatatttctaaggtaagtattcatttgtaaaagnnnnnnnnnnncatcatgtctgaaaacccattatcacgcggttagtattacaaaagacatcc

SEQ ID NO: 99353 - DNA, 1191 bp, Homo Sapiens
ggtacgctccggagtaacgggatgatggattcagaaagtaggttccagtggcgtcactaccttcttgtaagccagtatacactggctatttgtggaaatctctttgggagatcaaatagagtattatgccactgtgagtgtttataaactggaaggaacaagtacctgtgtttcttgggacacaaagcactcagatcctgagtggatgcagacatgagagtaaatgtcagcccaaattaggcccctcgacctacagacatttcatgggttttatttaatcacaccccatggttggggctacatgaggaagtggtaatgagctgaatttcttattcagtggaaaaaactgaaactgtctaaaaacacgggatatattttagaggcaatgtggaagcggagagaatgagatgatggtgttcagagggaccagcttctttttcagttgtctttagaactcaagaataatcaataatttagtgccccttcaacagccatactcagcaagaagaatcagaagcttgatcctctaacagaaatagaagagggtagctttgcccatggccactgtctttactgccccttctgcccctccaaccacatccacattcagcatcactccaaggatgtgtcagcatcttgcccatgcaggtagaaatttgtgagtaggcctccatacttcctcgggggaagaaagagaaactagtgctggttttaagaatgtagctggcttttcatcagaacccttacgctaacctgaccacacttgctctcggggaagttcaagcctgtgatgtgcataaactccaacaagcctggctttggtgttcagcatgcacattccataaatatctcttgcaggcataccccacagctagactgcaggattaaaataacttccaaaaggtgctggattggagtttgttcaaatttctcattaaccactaatgttaattcataccaaatgcaaagtattctaaaccagctgatgctgtcagtgttcaagttttaagtgacttcaaacacaatggaagtgtttcaatgggagccagatctcatgagtaaaaatccattttataatagctctgtgatatatcagtgggagatgattcataggggagagatttgaacaagcagaattaagtgttagcaaaaatgctgcattgctttgattcatgtttaaagacctaaatg

SEQ ID NO: 99354 - DNA, 902 bp, Homo Sapiens
gatttccttctcctggaggcagatgttgcctctctctctcgctcggattggttcagtgcactctagaaacactgctgtggtggagaaactggaccccaggtctggagcgaattccagcctgcagggctgataagcgaggcattagtgagattgagagagactttaccccgccgtggtggttggagggcgcgcagtagagcagcagcacaggcgcgggtcccgggaggccggctctgctcgcgccgagatgtggaatctccttcacgaaaccgactcggctgtggccaccgcgcgccgcccgcgctggctgtgcgctggggcgctggtgctggcgggtggcttctttctcctcggcttcctcttcgggtggtttataaaatcctccaatgaagctactaacattactccaaagcataatatgaaagcatttttggatgaattgaaagctgagaacatcaagaagttcttatataattttacacagataccacatttagcaggaacagaacaaaactttcagcttgcaaagcaaattcaatcccagtggaaagaatttggcctggattctgttgagctagcacattatgatgtcctgttgtcctacccaaataagactcatcccaactacatctcaataattaatgaagatggaaatgagattttcaacacatcattatttgaaccacctcctccaggatatgaaaatgtttcggatattgtaccaccttttcagtgctttctctcctcaagggaatgccagagggcgatctagtggtatgttaactatgcacgaaactggaagacttcttttaaattggaaacgggacatgaaaaatccaatggcctctggggaaaattgtaatttgccagaattatggggaaagtttttccagaaggaaaaa

SEQ ID NO: 99355 - DNA, 628 bp, Homo Sapiens
ggctctatagtgttggttcctcgctcatgaatgcacattgagtcacgtgcccatatggatgtactgttcttggatgaaagatggatttggtttggtaattgtgctgcactccctctaacatgatgccacagtggcatggaaggatcgttcactgtgtcccttgtgtcgctcgaacacggagtgacaccagcgatgagagtagtctcggtcctgatacttcgtagcagctggtggtgcaggtacactccgcccttctcaaacgaccaaaacatgtatgcaggctcacttccatagtcgccgtccgaaggccccatctgccccgcctcctccttttcctagtcagcgtgttgtcacttccggagaaaacagttcccctccgggccggacagtggtagcggcccgacccgttctagagaaggagcgggtgaaaccatttttcagaagggggttattccactggaacctcgagggtggatcggagtcacgtggcgcagacgctgaaggtggatccggctacggagagtgcgcaggcgcagtgttcgccctctcgccacgaagtaaacaagtgggagggtctgagagctgcaccacctggggcaagcacgccttgaaacgcccacttaaaaaa

SEQ ID NO: 99356 - DNA, 1069 bp, Homo Sapiens
cggtccggaattcccgggatgtttcccatgctgaactcaatgcctgggcttaagcaatcctcccacctcagcctctggagtagctgggactacaggggcatgcaccaccaggcctggcttcctaggagggtctttaaagagaaaatatttgttcaattgaaaacaggattcttgtcatctacaactccaacacagcctgaaaatatccacattataacctggaccttagacctactttctccactatcctgcaaagctacatctgtaactacctattgactatctatatgagtcctcaagcatctcagacttgacatgaataaaactcaacttccttcccattcaaatctgtttattttcttctgtaagagaaagataccatttgagactccagaatctgcctctaactctcaacaagactctgcaatgactcaagtatcctttccatcctcattgccctgctgttattacataggccctggttcaagtccttgttacttgttcccattattgcaataacttctaattccaatgccgttgtgtgatcccattttaaacacggccagagcagtcgtccaacaacatagctctaatctagtttcatccccacttttacatgcctcagtggctttcccagtgacttggcatggaacacgtcctcagttgccatacattccagctaactcttacccaacctttctttgttcacacagtttccttttccttcctcattgacccatccgcatctctgtttatccaagacttctctgtgatagctgacccttagtctttctctcccctattcctccagactagatcctgtctccttcctgcagcccccgaccagccttcagttcatatcttttgcatgatgcttagcaccttctatccctaaggacaacttactcatttggagatttctggcagggtaccttgcatgcagtggacactccatatttgctgaattaaattcctcccatggaaccctcctgatttttttaagggcctctaaaccctatcattctagggttcagccactttaaggccatttcccaaaggaaaaactatt

SEQ ID NO: 99357 - DNA, 1121 bp, Homo Sapiens
  misc_feature (980)..(980): n is a, c, g, or t
  misc_feature (1036)..(1036): n is a, c, g, or t
gggtccggaattcccgggatcgttcgtcctcagtgcagggcaacaggactttaggttcaagatggtgactgcagccatgctgctacagtgctgcccagtgcttgcccggggccccacaagcctcctaggcaaggtggttaagactcaccagttcctgtttggtattggacgctgtcccatcctggctacccaaggaccaaactgttctcaaatccaccttaaggcaacaaaggctggaggagattctccatcttgggcgaagggccactgtcccttcatgctgtcggaactccaggatgggaagagcaagattgtgcagaaggcagccccagaagtccaggaagatgtgaaggctttcaagacaggaaactatgtcttcagttatgaccagtttttcagggacaagatcatggagaagaaacaggatcacacctaccgtgtgttcaagactgtgaaccgctgggctgatgcatatccctttgcccaacatttctctgaggcatctgtggcctcaaaggatgtgtccgtctggtgtagtaatgattacctgggcatgagccgacaccctcaggtcttgcaagccacacaggagaccctgcagcgtcatggtgctggagctggtggcacccgcaacatctcaggcaccagtaagtttcatgtggagcttgagcaagagctggctgagctgcaccagaaagactcagccctgctcttctcctcctgctttgttgccaatgactctactctcttcaccttgggccaagatcctgccagggtgcgagatttactcagacgcaagcaaccatgcttccatgatccaagggaatccgtaacaggggaacagccaagtttgtcttcaggcacaatgaccctgaccacctaaagaaacttctagagaagtctaaccctaagataccaaaattgtggcctttgagactgtccactccatggatggtgccatctgtccccctcgaggaatntgtgtgatgtgtcccaacagtatggggcctgacccttctggatgagtccatgctgnaaggactgtatgggtcccggggcccttgggtattggggaaacctgatggaattatgcctaagaatgacatcttctcctggactct

SEQ ID NO: 99358 - DNA, 1118 bp, Homo Sapiens
  misc_feature (966)..(966): n is a, c, g, or t
cagctgacagcacagagctcaacagacacatggaggggctgcccaggaccaggccgccaggacgcagccaacctcaaacctcatccttccccaccagctggagccagagggaccgcctcctgcccttgaggccatgtctgaacgggcagaatccttacagcctatcctgcttgtggactagcagagccagggctatagtgaccacagtgtgagctcattgacagcggttatgggatggggagcggagggtcagaaaacctcaccccacccagctcagccgatcagccttacggagccccgccctaggccacgagcctccagaggccactcagcccagtgtggagtcaccgagtctgtgtcctgggagagggaatatgttgtcaccagcattggatgcggaggatgagggggcagctgattccttagcacgaccaatctttttctaggttttcctctcaccgcatggggccaaaacagtacagagcatgagtttggtaccccaagcctgagcagcaggtctacgctgatgccagggaggatccggaccgtgcttccgggggcccccaaccagcatggccttctcagcctggattctgtatgggttagaggcaaatgcttcatttttctgcacagtgtacacgttccttaataagcgaagtgtggggtgatttctaaaaggatttaaatggccctcatcagccacgtcctgctgagcttgctgggtaagccctttgaggtacctgatgtattgcagggagcagggaaaggaaaaaggattttttttcagaaatgcctgtaaagtgaatggagactagacaccgtccagcttcaagaaggctcaggactttcaacaaagggagcatacctgacctgagagctgtccccatcctctctggaagcataaagaacagtgagcactggctaatcccattgtctctggtcccctgcaggcaaactgtccttggnagaattcatcagaggtgcccagagcgaccccctcatcgtccgcctgctgcagtgcgaccccagcatgccagtcagttctgaacgagcggccccctggacagtgccgagaaacccaggctggcctggccttttgcctttgcctgtcaaaaggg

SEQ ID NO: 99359 - DNA, 1194 bp, Homo Sapiens
cgccatcagccagtggattttaaatacatcattccgtcgttttcgaaggatatgaatccagatggtcccagaaagaaagaagaaaaaggccattgagatgtataatttggggagaggaatttctcctgctgagaggtagctgtcaggattcttctctgtgatctcaatatcaaggctgaatgtaaacttgtcacttggcaattcttttccaaggcatttatgaaaataaagactgtaaaggccttcttggtcatcagtgctgatgttaaagaaaaactgaaatgacactgccccaccattattatgaacagaaaaggatttctctcccatggcctttgaatccactgtacttcttttagactttccaccatcttgtgtcttctgggtctggttgcctgctgaagcagggttaacattaggctcctggctctgaccaaggactttctcatccctgctgaagatgatctttggtaactgggtaccagcttctggtggagactttactcttacctcacttctggagatgtctaggattaaaagggtgacagagacagactgtttctttaaaatacagtaattcacatctttcatccagggtaagaagaaagccatcattctttgtccggtctaggctaaatccaatagtcacatccttgtcttcaggctcattcagtgagaggctactgacattcaccaccatgtacccatccttgaagaagccaaaggtgttcagatgaactttatgcctcacatcatccttgagtgccaggtgatggacgcggcccaggccaggctcggccagcaactgcagcaaacccagcattgggagcagccggaggcccgcggccagcctaggaccgcgggaggcgggggagccgacgggcgccagagcggccatgtttgttccagcatcaccagccgcttcctctcccgcccacgtccggggtgaaagggcgcagccgccggaagggcccggggagcggggctcggcggctagctccgctgaccctgtggtcgttttcctggagattgcgacctaggaagtcgtcgaggagcctgtgctgcccacctcggggcccttcgatcggccgctcctgtgcagactttcagttagagatgaagccaatcccgggaattccggaccggtaccaccgttttttatctagcatttgatggtggaaggagaaaaagagt

SEQ ID NO: 99360 - DNA, 1079 bp, Homo Sapiens
  misc_feature (964)..(976): n is a, c, g, or t
tgctggaggcgcgcaggccggctccgctccggccccggacgatgcggcgcgcccaggatgctgccgtgcctcgtagtgctgctggcggcgctcctcagcctccgtcttggctcagacgctcatgggacagagctgcccagccctccgtctgtgtggtttgaagcagaatttttccaccacatcctccactggacacccatcccaaatcagtctgaaagtacctgctatgaagtggcactcctgagtgactctgacagttggcagtgtgaacctagagatccacaatggcttcatcctcgggaagattcagctacccaggcccaagatggcccccgcaaatgacacatatgaaagcatcttcagtcacttccgagagtatgagattgccattcgcaaggtgccgggaaacttcacgttcacacacaagaaagtaaaacatgaaaacttcagcctcctaacctctggagaagtgggagagttctgtgtccaggtgaaaccatctgtcgcttcccgaagtaacaaggggatgtggtctaaagaggagtgcatctccctcaccaggcagtatttcaccgtgaccaacgtcatcatcttctttgcctttgtcctgctgctctccggagccctcgcctactgcctggccctccagctgtatgtgcggcgccgaaagaagctacccagtgtcctgctcttcaagaagcccagcccccttcatcttcatcagccagcgtccctccccagagacccaagacaccatccaccccgcttgatgaggaaggcttttttgaaagtggcccccaaaactgaaaaactttggaacctgcacgggcagcaaagacagtgggcttttgtgcggcaccaaggcattccctgggagaactggaaaaaccccaagttcctccctccctggacccttcacccccaagtttgaaaaaaaccctggggaaacaggggaagccccccnnnnnnnnnnnnnaaaccttgccacacagggggaccacccattagccccggaacacggggggaatcggcctggacgggaaccccacctttaagccccccgaaaaggggggcccccc

SEQ ID NO: 99361 - DNA, 953 bp, Homo Sapiens
tcccgggatgggagaggagccgacacccccagagccagtgccccatcttaagcatcagcgtgacgtgacctctctgtttctgcttgctggtgctgaagaccaagggtcccccttgttacctgcccaaacttgtgactgcatccctctggagtctacccagagacagagaatgtgtctttatgtgggagtggtgactctgaaagacagagagggctcctgtggctgccaggagggcttgactcagaccccctgcagctcaagcatgtctgcaggacaccctggtcccctctccactggcatccagacatctgctttgggtcatccacatctgtgggtgggccgtgggtagagggacccacaggcgtggacagggcatctctctccatcaagcaaagcagcatgggggcctgcccgcaacgggaggcggacgtggccccgctgggcctctgagtgccagcgcagtctgctgggacatgcacatatcaggggttgtttgcaggatcctcagccatgttcaagtgaagtaagcctgagccagtgcgtggactggtgccacgggagtgccttgtccactgtccccctgtgtccaccagctattctcctggcgccggaactgcctctggtcttgatagcattaagccctgatggcgccggtggcgcggtgggcatggttcttcactgagagccggctctccttttcttaaagtgtgtaaatagtttatttataggggtaagaatgttctcacaccatttcacttcctcttcctctcctccagcattctcctctgagcagccttagatagtgtccatggctggagccgaccctttgagtccccttgagtgtcttatagaaccagcccacatacagcctctcttgctcctccacatatctgtcagcctccctccatgctcccacatacaagcactgccccactccccatgcgtgataaagg

SEQ ID NO: 99362 - DNA, 1338 bp, Homo Sapiens
  misc_feature (720)..(720): n is a, c, g, or t
  misc_feature (920)..(920): n is a, c, g, or t
  misc_feature (1135)..(1135): n is a, c, g, or t
gcctgacccgaacccgcaagactgaaaccacctgttcattacaatggcccctcaaaagcagggtatgttgactttgaaaatggccagtgggccacagatgacatcccagatgacttgaatagtatccgcgcagcaccaggtgagtttcgagccatcatggagatgccctccttctacagtcatggcttgccacggtgttcaccctacaagaaactgacagagtgccagctgaagaaccccatcagcgggctgttagaatatgcccagttcgctagtcaaacctgtgagttcaacatgatagagcagagtggaccaccccatgaacctcgatttaaattccaggttgtcatcaatggccgagagtttcccccagctgaagctggaagcaagaaagtggccaagcaggatgcagctatgaaagccatgacaattctgctagaggaagccaaagccaaggacagtggaaaatcagaagaatcatcccactattccacagagaaagaatcagagaagactgcagagtcccagacccccaccccttcagccacatccttcttttctgggaagagccccgtcaccacactgcttgagtgtatgcacaaattggggaactcctgcgaattccgtctcctgtccaaagaaggccctgcccatgaacccaagttccaatactgtgttgcagtgggagcccaaactttccccagtgtgagtgctcccagncaagaaaatggcaaaacaagatggccgcagaggaaagccatgaaggcccctgcatgggggaggcgaaccaactccatgggcttctgataacccagcctgaaggtatgatctcagagtcacttgataacttggaatccatgatgcccaacaaggtcaggaagattggcgagctcgtgagatacctgaacaccaaccctgtngggtggccttttggagtacgcccgctcccatggctttgctgctgaattcaagttggtcgaccagtccggacctcctcacgagcccaagttcgtttaccaagcaaaagttgggggtcgctggttcccagccgtctgcgcacacagcaagaggcatggcaagcaggaaacagcagatgcggctctccgtgtcttgattggggagaacgagaaggcanacgcatgggtttcacaaaggtaaccccagtgacaagggccactctcagaagaactatgctcctcttctcaaggtccccaaaagcacacgcaagaaactcctctcactgggaacacctccaaggacagataccatgctgagccacggtgcttaccaccggataaaacttcaacctccttgccggcccaaatttgggcgcacatt

SEQ ID NO: 99363 - DNA, 1205 bp, Homo Sapiens
  misc_feature (860)..(860): n is a, c, g, or t
  misc_feature (973)..(973): n is a, c, g, or t
  misc_feature (992)..(992): n is a, c, g, or t
agttctggaagaggggaatgagaagagcagaggaatccagccagccgtgggagaccagcaccagttggcattgctgcagtctgaggtgcggcggctggaaggagagctggatacagctcggagacagagagatgccctggcagctggaaatgagcttggtgcacggcccggtatgaaagccagcggatccagctggagtcggagctggctgtgcagctggagcagcgggtgacagagcggctggcgcaggctcaggagagcagcctacggcaagcagcctccctcagggaacatcacaggaagcagctgcaggacctgagtggacagcaccagcaggagctggccagtcagctagctcagttcaaggtggaaatggcagaacgagaggaacggcaacagcaggtggctgaggactacgagctcaggtcctggtccccagagtgcccctttcaggccccagcccctttcccatgggtagagcccaaactgggaacggtgaagagctgctcccttgattgatctgtcctcctctacatgggccccagctcctttcagaatatcagatgtccaacatttcccttctggctctttttagctcccaagtatctgcttccttaaaggccctgagtcacttcttctctctttgcttcagactggcccgggagcaagcgcgagtgtgcgaactgcagagtgggaaccagcagctggaggagcagcgggtggagctggtggaaagactgcaggccatgctgcaggcccactgggatgaggccaaccagctgctcagcaccactctcccgccgcccaaccctccagctcctcctgctggaccctccagccccgggcctcaggagcccganaaggaggagaggagggtctggactatgcctcccatggccgtggccctgaagcctgtattgcagcagagccggggaagcaagggacgagctacctggagcgcctcctggtcttngcagttcctcctcagatcnttagcctcctgttggggcccctcttttcagagccagcattcttttcagcccctggagcccaaaccagaactcacttcatccacagctgggggccttctctgcacttgggggcttccatcccgatcataggccagaaggcccattcccctgaggaagatcctgggacccgggacgggggaggggccttcctaaaagcaagggctggccgccccc

SEQ ID NO: 99364 - DNA, 1214 bp, Homo Sapiens
  misc_feature (572)..(572): n is a, c, g, or t
  misc_feature (987)..(987): n is a, c, g, or t
  misc_feature (1028)..(1046): n is a, c, g, or t
  misc_feature (1121)..(1130): n is a, c, g, or t
tgggaccggtccggaattcccgggattcaggcccgtggattggtgagtgaatcctaaccacgtcttccctggcctgtcttcactcttctccccagaatcaccacttctgcactggtgtctgaaggtgtattgagtgattttgtggagggcagaagtaggaagtctttgggacaaaactgtatttaccttgggatctgtgaacaagaggaacctcagcagccaggacaggcaggagcagtggaatagctactatggcttctggaatcctggttaatgtaaaggaggaggtgacctgccccatctgcctggaactcctgacacaacccctgagcctggactgcggccacagcttctgccaagcatgcctcactgcaaaccacaagaagtccatgctagacaaaggagagagtagctgccctgtgtgccggatcagttaccagcctgagaacatacggcctaatcggcatgtagccaacatagtggagaagctcagggaggtcaagttgagcccagaggggcagaaagttgatcattgtgcacgccatggagagaaacttctactcttctgtcangaggacgggaaggtcatttgctggctttgtgagcggtcttcaggagcaccgtggtcaccacacgttcctcacagaggaggttgcccgggagtaccaagtgaaactccaggcagctctggaaatgctgaggcagaagcagcagggaagctggaaaagttggaaagctgacatcaggagaaaaagaaaagcttccctggaaagactccaaatacaggtatggaccaaaacccaaccggtcttgggcagaatttgtggagccaaactgaagaagacatttccttgggaactggggaaaggagcaaccaaatggagcctggccaaaaaacccttgtagaacaaaggggagggggagggaaaaaacactttttcttgtggaaaaagggccccttatacagaaaaactttcctttggaaanacactttggggaaaatggggggttggcccacccaagaaaannnnnnnnnnnnnnnnnnntgtggaaaaagaaaagccttccctttctttcacaaaaaattcttgggggaaacacatttccggggttttgttgannnnnnnnnntcccaaactggatatttgcggaacactttgggctttttttccagggaaatatgttgtgggaatatgtggggcgcttcccttttt

SEQ ID NO: 99365 - DNA, 1424 bp, Homo Sapiens
  misc_feature (941)..(941): n is a, c, g, or t
ggaattcccgggatccagacactcattcccattgaccatctggtcccaggagctcaggaggaggaccccaggggagaggagagctgtgagagcaccggcacccccagaagactctgcttcttagcccacattcctccgggccttatggagaatgaggattcagccttgacttcttgcccaaggcctgctactggggtagcaactgacagctcagaaaggagctgagctccctctgccctgccagttgtcagtcaggcagggagggagtggctgtgttggtttggggaactaatttccaaggacggctgcccgtggacaccaggtggactggttcactaatcaagtcagccatattgttctctggctaagtttggttccagccaacgtcatctgctcttcagttcctcactgccttcttgggatactaagacttgaattttttggggactattaagggtgttagtcttggagaagacacagcctcaccttctcacttgctgtgggtgaggggccatttaagtggactgggagacagtgcgcagtttgtatataattccctttcttgtggaacagaagactgaggcctgcaggttccgatgtgtctccatgggctgtgctcccctcttcctactgtcagtttctgaaacttctgactggcctcccagttatgcctcctcctcaagttcctggcccgtggatgttaaagctgctcgattcccaggatctcggctgccttttcctctatcttgagccctataaatgcccacgggacccccaccaccagcctcttgaagtggctccacagctcctgtccctggaacatcctgtcaggttggtcataaaccctgagccagatgaaatgagccaccgtgaacagacatctgccatgccccccaggtgggctttcggtggcccctacccggtaccaggtctctctgaanaaactggaagatgtcttggtagcataagtggtcttccttcccaccctggaagggttcttgggcataaggaacccaagccgggtgggaaacttagttaactgaagcttaccaaaaacttcgaaataagtcccgtcctggaattgggaaggccccccccgttgaacaaaaaccggcggccccacaggaggtgcttggccctcccctccacggccgattccgcctgggccccgagccgccgccctctaacgcgccggagctccccgaagtggcgttttgggaaccacttcgggtgttgcgataacacccctccacccacgtggggcataaccctggggctacatgccaacccccagtggaaacacttctcgaacgtttccggggagacacattacatcagagaaagcccctactgtcgcggtgtgagggccccccccaccgtaaaaatctttttggtgggggcgtggtgggacctctataatcacc

SEQ ID NO: 99366 - DNA, 1213 bp, Homo Sapiens
  misc_feature (455)..(509): n is a, c, g, or t
  misc_feature (1078)..(1133): n is a, c, g, or t
tctcgggatacttctgaagaaaccaccgctcaggatctgagaagtctgataaaggcacctttgttcagctttgaaaggattagactaacagtgatctcggtttttgaaaactggcaactttatttctacttactgttttctgtttttcacggaaaactgaagttaatctttacttttgtttagcaaaaagtagcaagaggataatctttttcttttatagctggaaggggtctgtgtacatcagcaactttcaaacccattttatttggagaaaatgtactctctggatgcctgttagaagtcgggattaatgaaaattgtactcagctcagggagaatgctgttgaaagacttgattcattaatacaagcgactcacgttgcaatgagaggcaactccgattacgctgatcttagtgatggctggctcgaaataatacggtttcattctgtcannnnnnnnnnnnnnnnnnnnnnnnnnnnnnnnnnnnnnnnnnnnnnnnnnnnnnngctcaagggatcctcccgcctcagccttccaagtagctggaaccacaggtgtagatgcccctgatccaggtgcagacccgctggctagcagtgtgaacggcatgtgcctggatattcctgctcacctgagcatccgcatcctcatctcggatgctggcgcggtggaagggattactcagcaggagatactcggtgtagagacaaggttctcctcagtgaactggcagtaccagtgtgggcttacctgtgagcacaaggccgaccttctccctatcagtgcatccgtccagtttattaaaattcctgcacagttaccccaccccctgacaagattccagatcaattatacagagtatgactgcaacagaaatgaggtgtgttggccgcagcttctatatccatggactcagtattatcaaggggagctgcattctcagtgtgttgctaagggcttactgttgctgttgtacctcacatatggccttgttcctcagcaaaccctggaccagaatatgcaaagcctatagttagacaaccacctggcttttatttttttgagatggagtttnnnnnnnnnnnnnnnnnnnnnnnnnnnnnnnnnnnnnnnnnnnnnnnnnnnnnnnnattcaagcgattctcatgactcagcctcccacataggtaggattacaggcaagcaccaccacgcccagctagtttttgta

SEQ ID NO: 99367 - DNA, 761 bp, Homo Sapiens
taataatcatcatcatcatcttgagacctatgttaatcacagaaaagccctaacaaattctgtcatctctgctagtgagttcatgctattgatttgcttccaatgatctgttctacagtttctctatgaattttgtttggatattgctggatattgctggagaaatatgagttctcgtcttcctcttttacaattctatgaggattatttttatatttcttacatttatcactttgaaattatttattttcattccagtggaatttacatacattatactttccaaactgttgatttttgtctttctgtccgtctgccatttatcattgattctcagtgtaggctggccacttcctgcctcaatatgggaatgcctatatctgtgcctgtgtccaggccatatgtataggatggtgttagttctggaaaagacttccgtgcacagttcttcctactcatgtcctcagacctgggagctcagccctctgtgggcctccttcatctcccttctccttctgagtgtacttctggttcttttagactatagtttttgtgctctgattactgtgaatggaagaggacccagaatgccattttaaggttgttttataggacacagcaggaaaaattcactaataggttttttaggccctttttggggaaaagcccccggaacaaagaaccaacctcttttttgccaccatttgggtaagaactttttagggttttaaaccaagggaaacaatgggggaaataatttt

SEQ ID NO: 99368 - DNA, 376 bp, Homo Sapiens
  misc_feature (90)..(136): n is a, c, g, or t
tgtgacttctatcaaaacacagaaatacagcacacgcacaaaccagcacaaaagcgcagcgctctatttacagctccggctggcacctgnnnnnnnnnnnnnnnnnnnnnnnnnnnnnnnnnnnnnnnnnnnnnnnacatcagcagggaaaggatacgaagcaggtaaagacagaaggaaaatgggcgggtgcggagaaaccaagagggaggtggagctccagcaatgcggacacgaggagacaggagcagaaggggctgggggagacctgacctgtccttcctctctccccccagattcccatccaggactccaaaagcatagctgaagggggtgtggcgggtgcagggatgcacggaaagaggtaaaatagaga

SEQ ID NO: 99369 - DNA, 1195 bp, Homo Sapiens
  misc_feature (12)..(12): n is a, c, g, or t
aaggcccccagncacacccgggcgccaggcacaccagctggtacggtccgggattcccgggatgccgagaggagcaggacggcgggaacaggagtgcggaacccgcgggagagtccccagggagacacttaagggaaattaaactgcagagtgcaagagatgcctcagtcaagtcagccaaaaacacgcgggtcatccccaagccccacagagtgacagagccccgatgacacggacacctcggctgctgtcacttccctggttcgggcctcccacaggctttgaattgaaggcgagtgcctcagaatttgcatccattgttctgtctttcctgggaagttattcatcctggtggccagcccaccgacaaaatggatttggatctactggacctgaatcccagaattattgctgcaattaagaaagccaaactgaaatcggtaaaggaggttttacacttttctggaccagacttgaagagactgaccaacctctccagccccgaggtctggcacttgctgagaacggcctccttacacttgcggggaagcagcatccttacagcactgcagctgcaccagccagaaggagcggttccccacgcagcaacaacgccctgagcctgggctgcccggtgctggacgcgctgctccccggtggcctgcccctggacggcatcactgaagctggcccggaaccagcttcggcagggaagacccaacttggcgctgcaacctctgcctggacggtgcaaattcccgccggcaacaccggaggccctggaaggctggaaccgatcttaaattctgcccgggaaagaggcctttccccgaaaaaggcgccctggcagcaagtattaatgggccccaacaaccccgccggccttgccccatggaacgttgcccacgaaacagcttgccttttaaaaaagcctccgaattttgggcaacccaagaatccttccatatcaaccccgcgtcgccccgcatttcgggacacaactctctttttggcaagtgcggctgtaataaaagaaaggggccccccccgaccgggccggacctacgagggggcatggggccttccccatcgggaaggggtctaccgaactccggttgagcacgaccccccgtttctggtggggagaacttttaacacggcgaaaggcttctcactgccccaggcgcaagatgtt

SEQ ID NO: 99370 - DNA, 662 bp, Homo Sapiens
agtcctcacggtgagtccacggatacagcctctgactttgaaggtcacctcacggaggacagcagtgaggctgacactagagaagctgcagtgacaaagggatcttcggtggacaaggatgagaaacccaattggaaccaatctgccccactgtccaaggtgaatggtgacatgcgtctggttacaaggacagatgggatggttgctcctcagagctgggtgtctcgagtatgtgcggtccgccaaaagatcccagattccctactgctggccagtactgagtaccagccaagagccgtgtgcctgtccatgcctgggtcctcagtggaggccactaacccacttgtgatgcagttgctgcagggtagcttgcccctagagaaggttcttccaccagcccacgatgacagcatgtcagaatccccacaagtaccacttacaaaagaccagagccatggctcgctacgcatgggatctttacatggtcttggaaaaaacagtgcatggttgaatggaagcagccccagttctttaagggctttgaaggagcctcttctgccagatagctgtgaaacagcactgtcttgcccggattgagccacacaggctcctgagcaccccaaagattcaagcagtcccaagttatactccctccatccagt

SEQ ID NO: 99371 - DNA, 1219 bp, Homo Sapiens
  misc_feature (1202)..(1202): n is a, c, g, or t
caccgaccaccttatcagttcagtcagcacgcgtcgctgcgagctctcagtctccatctctctcgagggcgcactaggcagtcgagccgtagacacatctgattggtgtggctgcgccggcgtagttgacaacgaactctgtgctgtggcgaggcttggttggggatagggtagatacacctgttaggtcggcagcgcacatccaggtgctgtcagggcgccgctctctctcgtaatattcggcagagggcaccgtgagataatgctcttctttcgccccaccttttgtcggagaagactagttaggccatgttcggtccctgttcagactagtcaagtagatttcaacaggcctttccttcagcaccttccttacccttggacacgccgcttaaaaatcgggactcccaggggcccaggcccgtttggcttcaagagtcccgccgcctgggcttcttaggccccatgggtgccgggcccggccccggcgaaccaggcctcgggccggggggagcgttcgtcccaggagcggcgggagccactggatgattcgccgtcatagccccgggccctggtccacttcctccaccggtgggggcccatcgtcttcatccgagtcctggcgccctgggctggaggggctggctttggtggcgggcaggtggatcctccggggacgtttcactgtgatgttggccatcttggtgcaggtcttgagtatctgaatggcaaacgcggaggtggcattctccatggaaaccccgttcaccatgacaatgtggtcgcctgtctgtagcctgccctccgccggccctccaggtaccacgtcagatacaaccatggatccaccgggccggtctcagcctccagagatcgcaatgccaaagccccggcgggggtccttggacagtgtggccgtgtgctgttcccagatggtcagctcctccatgtcagccacctgtctaggaggctgggtggcctctgggcaggcagcaggtgccagggcccgggtgcctgcctggcacgggtggtggggagggaacccgaggcttgtagctctggcctccccacctgtttgaccaacttttcctctcttgtggtggcaacagggaggcaggtcgcctgccagtggaactgacgaccacatcccgggaattccggaccggtaccagcttgttataattgtttattttttgtttttnattatattatataaaat

SEQ ID NO: 99372 - DNA, 1079 bp, Homo Sapiens
gggtccggaattcccgggattctgcacaaagcagaggctgtgggctgtcacagatgctgtgtcaaccagggccctagggctaagggcctgcaccttgcgtgcatgcagcaggcaacaactgccccttctttatgcagaggtgcagaaccagggactcctgggcccatccaggctgctccctggggtggagaagggaccagggattgcaggccccatctccaggctaaggggaggagagcatcatcactttccattagctgtattggcttgcaggtcacatttttactaccagctttagacaaaaccccaatccccgcaggtttgtagataaatttttatcaaggagtgataacaagacaagttattgcagagtcagggtgcttttatatataagagcagcagccgcctttgtaaagtgtgatctatgagaattggagacaacttcttttactgttcaccaaagaaatgggtaatctgtgctgatctccttatttttacctttttacagggtttctaggacattgtcattattcttcctccatctatctgattccattccttccacacccagctaaagttagaggagatacatatagaatctattttagattattgttaactatttgcatcaaattaagatacacaaatggccatggatgttgccttagccttaaacattactaatagtttcacatcacctcactgcacgcatcgaaagatctgatttgaatttgtaaaaggcaattcctttgaaagcaggattctccaggctaaatcaaaggcagctaatcctgtccctgaaaggacagctaaggggaacctgaaggcttgttccttgagtgggcaagcctggccaaaaatattggaaccccccggaaccaaacccggtgtgttcctacccttgcatgaagtgaaagattttcccccgtaaacaccctagggaagagacccccatgcccctaaaatcccttcccaaagaaaggattggatttgccaccccgaaaaagggagcttgaaaacccccggaagctccctgggcctccttccttccaaaaggggagaattaatgaattccccgt

SEQ ID NO: 99373 - DNA, 1028 bp, Homo Sapiens
  misc_feature (839)..(861): n is a, c, g, or t
  misc_feature (967)..(976): n is a, c, g, or t
cagtcgacggtaccggacatatgcccgggaattcggccattacggccggggaaaaaaagaagatattgcaatgtgggaagtaaatgaagcctttagtctggttgtactagcaaacattaaaatgttggagattgatccccaaaaagtgaatatcaatggaggagctgtttctctgggacatccaattgggatgtctggagccaggattgttggtcatttgactcatgccttgaagcaaggagaatacggtcttgccagtatttgcaatggaggaggaggtgcttctgccatgctaattcagaagctgtagacaacctctgctatttaaggagacaaccctatgtgaccagaaggcctgctgtaatcagtgtgactactgtgggtcagcttatattcagataagctgtttcattttttattattttctatgctaacttttaaaaatcaaaatgatgaaatcccaaaacattttgaaattaaaaataaatttcttcctctgcttttttcttgaccacccccaaacacccctcccttaacccccacctgtcggcccgcctcggccctctaagaaactttctaaaccattccctctggcacgccggcgcccaccccggataggcgaacatgggcccctaacctgtttccccacggaaatccctgggttatgccctaagtggctcgggatttccccaccaaataaaacaaacgcccggggcggcgaaaccgcagccgtttttgaaaacacctccccaaagggaatttctttggggcttattcatctggcatttattcccccccgggaattccaaaaccgagtttttacatactcaaatttaacnnnnnnnnnnnnnnnnnnnnnnnattcccaatacccgggtttggcaatatcatttcaagccattttttgtcctaccactgggacaatcccttcctccaaatgcggattcaatgccaccttcgaaatttnnnnnnnnnnggatcaccgccaccccccttttcgccctcttcgccgctataccattctctct

SEQ ID NO: 99374 - DNA, 877 bp, Homo Sapiens
  misc_feature (386)..(507): n is a, c, g, or t
  misc_feature (598)..(606): n is a, c, g, or t
  misc_feature (639)..(651): n is a, c, g, or t
ggaagcgtcatgagatgcctccacacatctatgctatatctgaatctgcttacagatgcatgcttcaagatcgtgaggaccagtcaattctttgcacgggtgagtcaggtgctgggaagacagaaaatacaaagaaagttattcagtaccttgcccatgttgcttcttcacataaaggaagaaaggaccataatattcctggggaacttgaacggcagcttttgcaagcaaatccaattctggaatcatttggaaatgcgaagactgtgaaaaatgataactcatctcgttttggcaaatttattcggatcaactttgatgtaactggctatatcgttggggccaacattgaaacatgtatcctttttcataaatgtataatcccnnnnnnnnnnnnnnnnnnnnnnnnnnnnnnnnnnnnnnnnnnnnnnnnnnnnnnnnnnnnnnnnnnnnnnnnnnnnnnnnnnnnnnnnnnnnnnnnnnnnnnnnnnnnnnnnnnnnnnnnnnaaaacactccctccgtcttccccgcgtcgggcccggcgcggcccgggcggcggcccaccccccaccgcgtcccggcggctgcgctgttgcnnnnnnnnnccgcgcgcggccccccttgagaggcattccttnnnnnnnnnnnnnttcttgtggcggggcgcgggccccaacaccgggggaacagtccaggccgtcgctcgcggaccggcggctcctaccggaaactatctctccgccacacccaacatcgcgcgggcggggctctccgcccgaggacgaaaaaaaccagcggccccgaggcaccccgtccgcggcgcgctcctaggtaaatgcccccgagcgaggggggtcgcgcccgccgcgccccact

SEQ ID NO: 99375 - DNA, 557 bp, Homo Sapiens; identical to SEQ ID NO: 2893
  misc_feature (391)..(391): n is a, c, g, or t
  misc_feature (393)..(394): n is a, c, g, or t

SEQ ID NO: 99376 - DNA, 417 bp, Homo Sapiens
  misc_feature (289)..(304): n is a, c, g, or t
gggctacatgcagtacagcatcgtggactattgctggctctcaccccataatgctccggtcctctttttactgtggagtcaacgatgacaccatctcattgattatggcaccaggaagtctgaaggtttccacattcgatgatgtcaacctaaaccagcagccatcccgcttgtccctcttaggcatttcaggcttcctttgggatttcaggtgtcccatgatcttgatgtgctgctaggctggagcacacactggccattactgaacacagccatattagggaaagcnnnnnnnnnnnnnnnntcctctattgtatatttattcaacaactgtttatgtttccaggacaactgcaaagaaaacaagctgaggtggttatctgttgctgttaaaaggtggtatcagttagaaaaaaa

SEQ ID NO: 99377 - DNA, 444 bp, Homo Sapiens
tttgcaattcagaagaactttaatgcatataccatcattgccactataatagagatagaagatacattaagaaaattcagtttgtatcaataaaacagatcaacacagaacaaggaaacaccatagatatttgtaaatgagatcttctcttttgctactgtgtatatatattcctttatatttatacaaactcacaacacatgacatttcatatttcatatgccactgagaagaggtgtcagtatacagaacataggaagaagaaaaaagcatgagaacatctgcttagttagaatctgatgaggagagacgtgagagctattgttcctctctctgctcaggcctatcgagaggcaactgcagtttttgctaattgttcctcctgaggaattctgctcatactgctatggtacatctcctaggttggcatgagaccagcctgcc

SEQ ID NO: 99378 - DNA, 1266 bp, Homo Sapiens
  misc_feature (1054)..(1064): n is a, c, g, or t
atgatcagctcatggaggcattgggagaaaaaagtggacagaatagaaaataatcctcggaggaaagctaaagaaagcaaaacaagggaatactatgaaaagcagtttccagaaattcgaaaacgaagagaacagcaagaaagatttcagcgagtggggcagaggggagctggtctttcagccaccatggctaggagtgagcatgagatttctgaaattatggatgggctctctgagcaggagaataatgagaaacaaatgcggcagctctctgtgattccacctatgatgttggatgcagaacaaagacgagtcaagctcattaacatgaatgggcttatggaggaccctatgaaagtgtataaagataggcagcttatgaatgtttggactgaccatgaaaaggagatctttaacgacaagtttatccagccatccaaaaaacttgggactaatggcatcatactgggagaggaacagtgttcctgacggtggtttgtatcactatttaaccaacaaaaacgacactcacacagccctcctccgatacgcttcatcggcacacgccgaggcagcacaccctccgctccgttccgactcgcctcccgacttctttagttataatactcccggaaccgtgccgcttctcctcaacgatcctcgtacccgaaccgcagtaacgacagatcacaccccgcgatcacgccacctgccgcccccttttcccatcgcctagccaccctccgcccccttcctttgcactccgccctcttgcccgaccccgtaccccaacagtttctttccccctcccgcttccatccctgtaacttccgctagcactatacgccccgccccttaccgctattattccgcgctatcgccgcctattccccccgcccatccgcccctaacatttccccgctttccccccaaggcgctaaccaccgcagtccgccactgtttctactccactctatcgttccccccggggcccctattcttaccgctaccgcacgcatccaccgccacttcccccgcgcggccgtattagtannnnnnnnnnngtgtttccttcccccccattttacaccgctccgcatccacaatccacacgccaccatctattcggaatcccgccagaggcgcgtacgggctgcccattgccgccgattcttgcactgtcgtccttcccagacccgccattccccccgcacttatccgtcttcgcgtattcggtcccaacgtcccgacccgccacgcgtatcg

SEQ ID NO: 99379 - DNA, 471 bp, Homo Sapiens
ggagactttcgaagcagccatcctcacacagctgcacccacgctcccagattgatatctatgtgcaggtgctacaggcagatggtgggacctatgcagcttgtgtgaatgcagccacgctggcagtgctggatgccgggatacccatgagagactttgtgtgtgcgtgctcagctggcttcgtggacggcacagccctggcggacctcagccatgtggaggaagcagctggtggcccccagctggccctggccctgctgccagcctcaggacagattgcgctgcttgagatggatgcccggctgcacgaggaccacctggagcgggtgttggaggctgctgcccaggctgcccgagatgtgcacaccctcttagatcgagtggtccggcagcatgtgcgtgaggcctctatcttgctgggggactgaccacccagccacccatgtccagaataaaaccctcctctgccccc

SEQ ID NO: 99380 - DNA, 188 bp, Homo Sapiens
gcctactactactatacggctgcgagaagacgacagaagggggtgttggaggctgctgcccaggctgcccgagatgtgcacaccctcttagatcgagtggtccggcagcatgtgcgtgaggcctctatcttgctgggggactgaccacccagccacccatgtccagaataaaaccctcctctgcccgc

SEQ ID NO: 99381 - DNA, 637 bp, Homo Sapiens
  misc_feature (324)..(345): n is a, c, g, or t
  misc_feature (367)..(463): n is a, c, g, or t
  misc_feature (499)..(512): n is a, c, g, or t
  misc_feature (585)..(587): n is a, c, g, or t
  misc_feature (595)..(595): n is a, c, g, or t
gttggctgataggggttcaggtgcagagattaccagtgaggcattattcctcccttccccccaaaactgacacctttgttagccacctccccacccacatacatttctgccagtgttcacaatgacactcagcggtcatgtctggacatgagtgcccagggaatatgcccaagctatgccttgtcctcttgtcctgtttgcatttcactgggagcttgcactatgcagctccagtttcctgcagtgatcagggtcctgcaagcagtggggaagggggccaaggtattggaggactccctcccagctttggaagcctcatccgcnnnnnnnnnnnnnnnnnnnnnnagacaagctctcgctctgtcannnnnnnnnnnnnnnnnnnnnnnnnnnnnnnnnnnnnnnnnnnnnnnnnnnnnnnnnnnnnnnnnnnnnnnnnnnnnnnnnnnnnnnnnnnnnnnnnccataggctcacaacaccacacctggcaaatttgannnnnnnnnnnnnnccagagacggggtctcgcaacattgcccagacttcctttgtgttagttaataaagctttctcaactgcaaaannnaaaaaaanaacggaaaaacagaccaacaacaagacaagaaaaccctgtcg

SEQ ID NO: 99382 - DNA, 1162 bp, Homo Sapiens
  misc_feature (976)..(976): n is a, c, g, or t
agagaggaagaacttacaaagacacttaaaagttattcttaaatggtggttgggcatttaaaacagtgaactaacatatatataatttttgattagttggagctttctttgtattatgagagtaatatatctcattacagaaaatttggaaactataaatttagaaacgtatcacccatacgtccaacatcgaaagaaaaccagtgttatgactttgttccatttgaagactaattgggagtccatctctctattggcactgggttcgattgcccctggctaatagagttcaattagttctatccctgggtttcctttcttagctatggggtggaagataggagggggagatctacaatttgaatatgtgttacttaataaggctaggctggccatcagttgcttatttcagatgtgtcactaaattttccttctagatggtccttgagcaaaacttaataattactgttttttatttccactgcctttataaaatcaaaattttctccttttgataaaaactgttgaatactattgatgtagagaatgtgtatatgtgtatatttgcattgattaaattattggaaaacttccaaaaaaggagctctgacccaaatataaaaacatgtgtggccgccctcggctcctccgagaagcctttctaggaccatctcgtttggccgtgcggggcccccgcaaggtaacgtgaacctgggtcctagcctggttccctaaggaaaccccctggttcaatgactagggcgcttggcattctccacccatataaaataccgcgccccttgtggtgcaacccgcacccgtctctggacacaaaccccccaggattgtgaggttccccgcaggcgccttttacctcggggattctccacccccccagggaggttccatacgccgcagccctgcggattttcctccaattcaccggtactcctgtgcccgggggacaatttgcatngcgcaggtagcgcggcgggggacagcttccatgtgagagccgactccctggccccgatatgtgtgccaacttctttcccccacacaggggtgatgtgggttggaaaacccttgaaaattcggcgccgaccgcggctctctctaatcgacccccttggtatcagcctctcgtgacgcgccagtacac

SEQ ID NO: 99383 - DNA, 398 bp, Homo Sapiens
ggacaaagcgttgggtgagactcctcttgctcgtcatgtctggccgcggcaaaggcgggaagggtcttggcaaaggcggcgctaagcgccaccgtaaagtactgcgcgacaatatccagggcatcaccaagccggccatccggcgccttgctcgccgcggcggcgtgaagcgcatctccggcctcatctacaaggagactcgcggggtgctgaaggtgttcctggagaacgtgatccgggacgccgtgacctatacagagcacgccaagcgcaagacggtcaccgccatggatgtggtctacgcgctcaagcgccagggccgcaccctctacggtttcggtggttgagcgtccctttctaccaataaaaggcccttttcagggccaccctactttctc

SEQ ID NO: 99384 - DNA, 368 bp, Homo Sapiens
ataggatattatgccttggtttgactccttttcattcaaattaatgtaagtatgttgttcaagactttgaagcattgaacaatgttctcgacgaattttatttaattactgacattttgtgatatttgaatgttattaagttaaacacttagagttgagtatattcaggggagaaaagtgaatgaaatgactcataataagaaagcttgctcccttgggacagttaccttcctggtgtcattgccatcctgggttgacaagctgagagtagaggatacaagtgatgtgaataaaatggaaattgcattgagttaatgaaacagacacttttagatcaagaaaacacttcaacagcctttttagaaatt

SEQ ID NO: 99385 - DNA, 544 bp, Homo Sapiens
  misc_feature (507)..(507): n is a, c, g, or t
  misc_feature (515)..(515): n is a, c, g, or t
agtttgtgcaaaaccatctgtgactgaagaaaaaaacatggaacctgagcaaccaagtacctccaaaaatgttaccgaggaagagctggaagactggttggacagcatgatttcctaaaaaggggaaaaaaacggcctgaagcaaatcttggttgccttctaacggcaggtgggcataaggctgtccttcaggaccagccagtttacaagcatgtctcaagctagtgtgttccattatgctcacagcagtaaatgcctacctctgtgtttgacatctgaaagaatacattgaagcagcttgttgcatttgtttttctggcttagtaatctaatagatttccttaacggcaggagatagactctggcccttgtttctagcctccttccttgcagtgtttacaacatagccagtgtttacagcatagcagatgctgctgctgattaagagaatagatgcaaacaaggcatgcatttggccaaaataaacaaatgctggtctgtcccganccccccanacacagagaacatacaaaacctgtcggag

SEQ ID NO: 99386 - DNA, 684 bp, Homo Sapiens
gggggcttgagagctgggttctattttccctcctcaaactgactttgcagccacggagaggcaggggaaatggaaggtgatgcagtcgaagccattgtggaggagtccgaaacttttattaaaggaaaggagagaaagacttaccagagacgccgggaagggggccaggaagaagatgcctgccacttaccccagaaccagacggatgggggtgaggtggtccaggatgtcaacagcagtgtacagatggtgatgatggaacagctggaccccacccttcttcagatgaagactgaagtaatggagggcacagtggctccagaagcagaggctgctgtggacgatacccagattataactttacaggttgtaaatatggaggaacagcccataaacataggagaacttcagcttgttcaagtacctgttcctgtgactgtacctgttgctaccacttcagtagaagaacttcagggggcttatgaaaatgaagtgtctaaagagggccttgcggaaagtgaacccatgatatgccacaccctacctttgcctgaaggggttcaggtggttaaagtgggggccaatggagaggtggagacactagaacaagggggaacttccaccccaggaagatcctagttggcaaaaagacccagactatcagccaccagccaaaaagaccaa

SEQ ID NO: 99387 - DNA, 240 bp, Homo Sapiens; identical to SEQ ID NO: 6105

SEQ ID NO: 99388 - DNA, 870 bp, Homo Sapiens
ggggccttttgctggctgagcagggaaagacctatagacacagggcattgggcaggagctagaacagccctccctagagcactacataaagcagccaatattttgcaaagcatagggaagagtgaaagtcatccggggcatttgcagacacagcactaagaacttggtgacaacagccctgaagcaaaacagcagcatgtactgggcagggcttgggagataagacaggacatctgaagctaaacatggatcccctctgaaagctacaatcaaagtgtcatccacaaaatcttatctcaagccttgactagagaaggacccacttccaagaccacagagttgaatgaattcagtccttgcagcccgttgaactgagggcctccccaacatgctcacctgcttcatcaaagcctgcgagagagagagtccactagcaagaggacattgcagtcttatctaatgcaatcactgaagtgacatcctgtcaccttggtcaccttttctattctattcattataaatgagtcccaagtcctgccacactcaagtggaggggattacacagggctggagtaccagcggtggggataatttggggtcatcttagagttcttccatcacacgggaattctcagctcaccaaatctgggattccgcatctggccattccttaagctgaaggcctggcatatttttgagtgtccatttggatcagctaataaacccagggtttgtctactggctggaggagtaagaactataaggctaattgaaatgaatctacttaaaatagtgacctgatttttctaataattactggaaggtaagggttgattgagactttaaaataaaaccaaaaattattctaaa

SEQ ID NO: 99389 - DNA, 835 bp, Homo Sapiens
ggcaagaatgcgattgcatctgattcagaagcggatagtgacactgaggtgccaaaagataatagtggaaccatggatttatttggaggtgcagatgatatctcttcagggagtgatggagaagacaaaccacctactccaggacagcctgttgatgaaaatggattgcctcaggatcaacaggaagaggagccaattcctgagaccagaatagaagtagaaatacccaaagtaaacactgatttaggaaacgacttatattttgttaaactgcccaactttctcagtgtagagcccagaccttttgatcctcagtattatgaagatgaatttgaagatgaagaaatgctggatgaagaaggtagaaccaggttaaaattaaaggtagaaaatactataagatggaggatacgccgagatgaagaaggaaatgaaattaaagaaagcaatgctcggatagtcaagtggtcagatggaagcatgtccctgcatttaggcaatgaagtgtttgatgtgtacaaagccccactgcagggcgaccacaatcatctttttataagacaaggtactggtctacagggacaagcagtctttaaaacgaaactcaccttcagacctcactctacggacagtgccacacataaaaaagatggactctgtcacttgcagatagggggtccaagaacccgaggatagaaatcttgcccatggctggtcctgatccctgaatggccacgccccggaaatggtttaggaaagaaagagcaaacgtttgaagggccttccctacgttaggggaatctccaccaaccgcccaattgagaagagaaaccgc

SEQ ID NO: 99390 - DNA, 496 bp, Homo Sapiens
gttgcccaacctgtttagccatgataccatctggatccaattcctccacgtcttcaatatcaatatctttcaatgctttggcacccagttctgtcttcttgatctgctccaaacgctctcggacagttttctttttgatttgttcatgttcctgtaagatacgctccttctctctctcctttgcttcctggcgcagcctctcttcctcagccttccgcactttctggagttcagcttccctctgttccaattcttctttctcacgctgaatattcagactctcaaggcgctcttttctctcctcaattgtctggcggcgagccaggatccgctggtgctcttttcgtgaatttttaaggtatgcagtgacagccaactgatgctgttcttctttctcttgcagtatatgagctggtttaatgacttcaagtgcttttgcaagtactgaggacatggctgtcagctggtttcttatctgctctgaaggcatgctttg

SEQ ID NO: 99391 - DNA, 1182 bp, Homo Sapiens
  misc_feature (41)..(41): n is a, c, g, or t
  misc_feature (117)..(117): n is a, c, g, or t
  misc_feature (491)..(514): n is a, c, g, or t
  misc_feature (666)..(722): n is a, c, g, or t
  misc_feature (779)..(789): n is a, c, g, or t
tttcaaaaccagacaatcgcttgggaggagagttgttctcncccacaagtgtgtggatttttataaacgcgtggggcctccatgaatggaagccagcagtgttttgttgacgacccncccgtgtttttcccccacctagggcggaaagaatatttatgtatggccagagagggcaaacaaggggtgggctggaatgctccgcgcgggcggagttcaagggtgtcaatccacttggcgggttttgtggaagggggttttccccattttcggcgcaaggaatgggcgtctaaaggggagttacgccagcccagttctgtgtgcgattaaagagtggccaccgggccggggggcgctaaaatttgatatattgggaagcctcggccttggagaactccccgttttgaataagtatcccacgtgaagaggcccctccggagaacgtcccatttgggaaatttgtttcagaaaaccccttcgggttgcccgccgcnnnnnnnnnnnnnnnnnnnnnnnnagattccaaacgccttagtcactgggccagggttcttccttgggaaaccaaggtaagggccatgtgttcccgttccctacgtggggcccggggggccaaaaagaaagggtttagaaaaagttttcagaagggccggaggcggccgaccatgnnnnnnnnnnnnnnnnnnnnnnnnnnnnnnnnnnnnnnnnnnnnnnnnnnnnnnnnnggggttttgttttctttgttaagacaaaaggtttttcatcaaaaaacgccaagtatnnnnnnnnnnntaagatctcttttattcccctgtacagtatttcactcagataaaacccagcaggctacctgctgctcaaaacacagccccagagaggatctggaaggcacaccatccagaactgcttttcataattatcctatatacacagtcagcaatgcccctccccatcacccacagagccgggacccacctgggtaagtaggtgaggggccccacagaagccagggagctgcagcactgtcccacctgagtcccgtcaccccacaaacagagcaagcgtcgcagccctcccccaaaaggtccccaagtcagaggaggaaaggaggaaagaaaactagggcagcagctatggaagcttggaataggaagggaaccaaataaataaataaataaatacata

SEQ ID NO: 99392 - DNA, 727 bp, Homo Sapiens
  misc_feature (512)..(573): n is a, c, g, or t
gatactatgggaactcaaaaagagagtgaacacaaatgtgaaaattccaagagtgaagaaaagtatcataactaaattaagagcatgagaaaaagtatacaattttgagtaataagaacagaaatcaaaagtaactattgtatgctatattttagtagagcaacactgaagaagaaagaaaacaagaaataatattaaatatgaacatatggagaacagaataatatttttaaaatttttagtttctaagcttatctgaaattttaattttcttttcttatgtaataccagagttattaggaaggtattatctaataacactattttcagtgatattttaagtagttgtcctagaaaaatttctattttttaaaaatgtatatttaaaaatacattaaatgtgtatatacatcaatcatatgtatcgatttatgtttttcttgaattgcaaatgaaatttgtatttttgtgttcctggaataaaataaacttgaatcgattgtccccaacannnnnnnnnnnnnnnnnnnnnnnnnnnnnnnnnnnnnnnnnnnnnnnnnnnnnnnnnnnnnntgttggcccccctccgcccctccaaaaactttttaaaccctttcccttgggcgcccggggccccctaagggaaaggagaacctggcccatacctggtttcccaaaggaaaaccccgggaccagaacacaaagggcttggaatttcccccccaat

SEQ ID NO: 99393 - DNA, 743 bp, Homo Sapiens
tgatgagggtgtgaaaaagaatcctcagtttatttttccactattaatctttcttttgataaatcctctattgactgggtagaggtatgtttgtgaaagacatgtaacttggggatttgttactttaggtttgttcccttgaatttcatctcatcagggaaattgtactagttgtagttacgagttttccctcagtgaagtagcaataggctgtaatcaagaaaatatgccatttatagagataagataaatgaaataatacttcagccaccaggtttttctgtctcacatacataagcagcatttcattgcagatatgggactgattctgtggcttaccttgattaacatcttttggaagttttgctagtgtgctttcctttctttactatgtttctcagattcctttgtatcagggttttgggtgtcacttaggttttgtccatcagattctgtgagacaccaggcatcgttttgaggatgtgggttatacacatggagtgcttctggaactatcagcccacttgaccacccagtttgtggaagcacaggcaagagtgttcttttctggtgattctccaggccatttaataccctgcaatgtaattgtccctctgtggctcacatttcattagtgagccatgaaatcaactcagtgggacatagccagcatttttgcataccaggttgggctataaaatatttctgttgtcaataaattttaaatgatttccaactaaaaa

SEQ ID NO: 99394 - DNA, 483 bp, Homo Sapiens
  misc_feature (410)..(423): n is a, c, g, or t
cgcgtgcctgtgtggcgggactggagggcacagttgaggaaggagggtggttaagaaatacagtggggccctctcgctgtcccttgcccagggcacttgcattccagcctcgctgcatttgctctctcgattcccctttccacctcactgcctcccaagcccaccctactccaaaataatgtgtcacttgatttggaactattcaagcagtaaaagtaaatgaatcccacctttactaaaacactttctctgaaccccccttgcccctcactgatcttgcttttccctggtctcatgcagttgtggtcaatattgtggtaatcgctaattgtactgattgtttaagtgtgcattagttgtgtctccccagctagattgtaagctcctggaggacagggaccacctctacnnnnnnnnnnnnnngtacctcccctgtctcgcacagtgtcccaggaccctgcggtgcagtagaggcgcaccaaa

SEQ ID NO: 99395 - DNA, 376 bp, Homo Sapiens
ggcggcggtggctgtaggttgtgcggctgcagcggctcttccctgggcggacgatggacagccagggcaggaaggtggtggtgtgcgacaacggcaccgggtttgtgaagtgtggatatgcaggctctaactttccagaacacatcttcccagctttggttggaagacctattatcagatcaaccaccaaagtggggaaacattgaaatcaaggatcttatggttggtgatgaggcaagtgaattacgatcaatgttagaagttaaactaccctatggaaaatggcatagtacgaaattgggatgacatgaaacacctgtgggactacacatttggaccagagaaacttaatatagataaccaccgaccaaaaacg

SEQ ID NO: 99396 - DNA, 539 bp, Homo Sapiens
ggatcacaaccatcacaagggactcacatataaacaagcgtcagattatggaatcaatcatgcacagctcccacttggaaattttgtgaagatgaatagtcgaaaagttttggcagttaatcatgtgtttgaaattattctggaatacctggaaacaagagactggcaagaagcattttttactatcttgccccaacggaaaggagctgttcccacagacaaagcctgtgaaagtgcttctcatgacaatcagtctgtcaggatggaggaaggtggatcggacagtgattccagtgaggaggaatatagcagaaatgaactagattcaccacatgaagaaaagcaggataaggaaaatcacactgaatctacagtgaactctctgccacactaatgttacctggtttccttttagtttaaggaaaaattaggagaaagtgaggtgctatatagaatattgaaattggaagaacattttattttctcttatttctgttgtgatttttaaaaacttttttttggacctaaataataataaa

SEQ ID NO: 99397 - DNA, 771 bp, Homo Sapiens
gtgtattcctgggtggttaagggagacagggggaaaaatttttttgggtgggaggccccaaggggtactgtggctttttctttatccccaaagctagggtttctcaaaaatttcccttgggctttccaaaggtttattcccttccaaggcccttggggagccttcccccaaaaaggtggctttgggaatttaacaaggatggctgaagtccccttggcccccctggcgcctggggctatgttcctttaaaaatgacttggggtgggtaccgtcttagtttctctgttctccccgtttttctgcccggggggatgatgagaacctggagcgggtcatcctgagcttacaaggggaagcccttgtgttgaggagggctgattaactggacttggaccacctgcctacctcgaccgttgtgagaaaaattaactgcattgtggtaaatcctttgcatgttggactctttcttacagcagcttagcctgtacctcacctccacttatgagcctactcattctgcaaatatttcaccagcctagaaagagcttctccatcctctgaatccaaagccctttgacctgcctcttgtgtgtggcctcactatttacctggtactacatttgtctgtgcatgaatcttacctgctctttgcaggccaaagaggacaggggtaaaagcttaatcgctttctattacacaatgcctagcatattgccttggacaatgattggttcccaataaatgtgttgaatgaagaaagatgattcttcc

SEQ ID NO: 99398 - DNA, 436 bp, Homo Sapiens
gggggctgccctgagagcttcatgttggagctgaagttcaaggttcacttcctttgggtttgtacttgacccttcttcatgtgtctctcccgttccctccaaaacaagtgtgtttcccctcatttttgaggctgtcaatggtgtgagagccaggatcatcacggggcctgaggttttactccagaaaagcagaggagtggcaaccttggcttggggtttggcagcccaggaaaggcagggaggagagctcaaagccggtttcatgtttcacccaaggtctaattgtgggagaggacaaatccagatcccctgtttgacagaattagttcacaaatgtctcttggcaaaaacatgtgacacctaaccatgataattgacttaatccaagaaagagctctgtagggcagagcaataggaaatctctctttcgttatgg

SEQ ID NO: 99399 - DNA, 360 bp, Homo Sapiens
ggcagaaatttgggaaaacctgccttataacaataaaagtgacatctggtccttgggttgcatcctgtatgaactctgtacccttaagcatccatttcaggcaaatagttggaaaaatcttatcctcaaagtatgtcaagggtgcatcagtccactgccgtctcattactcctatgaacttcagttcctagtcaagcagatgtttaaaaggaatccctcacatcgcccctcggctacaacgcttctctctcgaggcatcgtagctcggcttgtccagaagtgcttaccccccgagatcatcatggaatatggtgaggaagtattagaagaaataaaaaattcgaagcataacacaccaag

SEQ ID NO: 99400 - DNA, 949 bp, Homo Sapiens
  misc_feature (537)..(537): n is a, c, g, or t
  misc_feature (739)..(821): n is a, c, g, or t
ggtggacagcatgattcaaagactacaacaggagcaagacctgagacgttctggtgaagcaggtatcagtaataccagccgtttaagtagaggctccataagttctacctcagaggttcattcaccaccaaacgtaggactaagacgtagtggacaaattgaaggtgtacggcaaatgcacagcaacgcaccaagaagtgaaatagccacagagcgggatctgagtagcttggagtcgaagggtggtagtacccgagctatcagctggtgtagccagtaggcaagaagaatggagaactgcaaagggagaagaagaaataaagacttacaggtcagaagagaaaagaaaacacttaactgttccaaaagagaaaaaaatacccactgtctcaaagaatcatgctcatgagcatttcctggatcttggagaatccaaaaagcaacagacaaatcaacacaattatcgtacaagatctgcattggaagagactcctagaccctcagaagagatagaaaatggcagtagttcttcagatngaagcgaagtagttgctgtcagtggtggaacatccgaagaagaagagagagcatggcacagtgatggcagttctagtgactactccagtgattactctgactggacagcagatgcaggaattaatctgcacccgccaaagaaagttcctaagaataaaaccaagaaagcagaaagcagttcagatgaagaagaagaatctgnnnnnnnnnnnnnnnnnnnnnnnnnnnnnnnnnnnnnnnnnnnnnnnnnnnnnnnnnnnnnnnnnnnnnnnnnnnnnnnnnnnaagcccaaagaaagaaaacataagagattggctgtgggagaactaactgaaaatggtttgacattagaagaatggtgcctcaacatggattacatataccattccccgaagaagtcaattaggtgccg

SEQ ID NO: 99401 - DNA, 453 bp, Homo Sapiens
aactatgtttattgtgcacttagtaggccagatactcttctgatatttgagaatacagtggtgaataacacaaactccatgctttcaagattcccacacccagatactaagacatattaaaatttacagcaattaaaacagtgtagtttggtacaataacacatatagcaatgatacaaattaggggaaaaaaccctggcttctataacaagtgagtatacattaaagacagtattgcagaatggcttcaggattaatttgattaatttagagagagcctatttcaggtcttcctagctcatccacacacatcacctttcagtgttctttataggtacttaaaacttaaaaaaaggcccaggcgcggtggctcctgcctgtaatcccagcatgagccattgtgtctggcctgggtcattctttatctgacatagaggttgggaaacagaacaa

SEQ ID NO: 99402 - DNA, 389 bp, Homo Sapiens
gggggatttggctagaaggctgggccggcagcggttgtgaggagttagctcgcggcattgcaggctctgagaggaggggacccggttcccgggtgagtgtccaggcatgccagcggaacggcccgcgggcagcggcggctcggaggctccagcaatggttgaacaactggacactgctgtgattaccccggccatgctagaagaggaagaacagcttgaaggctgctggactagagagagagcggaagatgctggaaaaggctcgcatgtcttgggatagagagtcgacagaaattcggtaccgtagacttcaacatttgcttgaaaaaagcaatatatactccaaatttttattgacgaaaatggaacagcaacaattagaggaacag

SEQ ID NO: 99403 - DNA, 449 bp, Homo Sapiens
ggggtcaccctggttctgtagtctcggttctccgactccctctttttctcgcttgtggactccgatatattgcccttcttcccttagaagaactgctgaaccgactctgagaaatttggaactcccgaaaactgaagaccgccgggtcgcagaaggggagaagatggggcaggggcagaaaccctcttctttcctgaagtaaagattcgcaaaacttcagacattttcatccaggaagtaggaggccgcattaaaagaagtatttgtggaagatttcgcagcctcaagtgctgagtgtgatattatttgtaggcacatagatgctgtattaggctatcggaatttatatggaagatgtgtagaagatgatattttctgaaataactcgttaaatgttttgaggcctaaataaacctgctcagtttttcgttggggaaaaaattaattat

SEQ ID NO: 99404 - DNA, 502 bp, Homo Sapiens
aatcctgctgggtaaggacagaagtgcaaagtcctattgccttaaggacatgccccacggcacccagtgctgggaaaactgtgagccatggaaggaaaacaaggtttgaaatgcgtggagccagaacctcgtctgtggaaaattcttccaaatttcatagttcctatatgaaagaaggctgatgacagtttctcaaattttacaacaatccagaacatttgtatggcaccgtcaacaacagattaggaagtttaactttcctaaactaccaataattaaaacacaaatttcaaccatgttaggaggaagactgaagtatcttttctctgtatggaaaatatctcccccaaaaatcacaaaatccttgtcctctgtagaggccttcagagtaagaagccagaccatgtaggggaccaaggtattagaaatatgtcaggaagttgccacaagttatgttatttttctggatttagtattgtagtatttgtcaatttaaaaaaaa

SEQ ID NO: 99405 - DNA, 750 bp, Homo Sapiens
cagtcgacggtaccggacatatgcccgggaattcggccattacggccgggtagataaacttcggcatggcgggttacctctcccctgctgcttacctgtacgtggaggagcaggagtatctccaggcctacgaggatgtcctggagaggtacaaagatgaacgggacaaagttcagaagaaaacatttacaaaatggataaatcagcatctcatgaaggttcgaaaacatgtgaatgatctctatgaagacttaagggatggacacaatttgatttctcttttagaggttctttcaggagataccttgcccagagaaaaaggtcggatgcgttttcacagactacagaatgtacaaattgcacttgactatttgaaaagacgccaggtgaaattagtgaatattagaaatgatgacataacagatggaaatcccaaattgactttgggattaatcctggacaataattttgcactttcagatatctgatatccatgttactggagagtcagaggatatgtctgcaaaagagaagattgctactctggacgcagcaggcaacaagaagggttatgctgggaaattccggtgtgaaaatttccctaccctgctggaagagatgggaaaattatttaatggccatccttcctaaaatacaggcccggaaccctgatagaataatcaaatacctggtggctggttcaaagccacccttgccaaatttagaagcttggctttttttaccctaacc

SEQ ID NO: 99406 - DNA, 619 bp, Homo Sapiens
cagtcgacggtaccggacatatgcccgggaattcggccattacggccggggtccaaaggcttttatttagagaaacgggtaattaaaacagcagctttagaatagcttcttactgaatatgcaaaagaataattccttgttatttcctaattgatccaagtctcataaatttagcttttgtcataattccttaccgaaaacaactgaaattgagagtcataaatactgtgggttagaataaaaaccatttgccaaagcaacactctacttagaagcacatgtacatacatggacctcattcagaagtccatgttgtagcagttagaatttgagtatcagccatttcattgtagtaacaaaaattgaattgcattttgtgctcagttgtttattgtaattttatttttgttacattaatattagttaagatatggtcacttgaattttttgtatttaagaattttctgttttaatgcatgttatacttttatgtaggattcccaaccttccctctaaatgggatttaacccacatctgcgagatcagcgttatgctaagaggaaatcactgaggccatatctttttacaatctgaaaaaaaagtagcaaaaaggtagtta

SEQ ID NO: 99407 - DNA, 1792 bp, Homo Sapiens
  misc_feature (29)..(29): n is a, c, g, or t
  misc_feature (59)..(110): n is a, c, g, or t
  misc_feature (114)..(148): n is a, c, g, or t
tatacctctaccttccccctgagaacggncctaatcaacctactactatagggcgctannnnnnnnnnnnnnnnnnnnnnnnnnnnnnnnnnnnnnnnnnnnnnnnnnnnccgnnnnnnnnnnnnnnnnnnnnnnnnnnnnnnnnnnncagtcgacggtaccggacatatgcccgggaattcggccattacggccgggtgggaaaaggactcttgaaacgagaatcagtgttgatgtcagggtgaactttgtgggtacattacttggcgttaacattgttggcagtggtagccccttttcagaaagcaacttgctgtaagtcagggtgtccgttccaaccttcagctagtgaaaaggtagtaacaaatggtaaacaagagaatgattgtttaaacctatctgtggacacttaatgcaactgtttaaaaatgataatcacgagttatgtagcaacgtggaaatatctttacagaacattaagtggagaaagcaggacacgaaagtatatttatactacagttataactcaacagttcatttatatgctgttcatttaacagttcatttaaacagctcattataactgcttaaaaatatatatgcttataatcaaaagctgttgtggcgttgttgttgtacgcttatagttgagcattattttcttaaaatttcttgaatgccctttatggtactgttactaaaaagtttatgaccacattttcattgtgaacataatttgaactcattatcacacacttggaaaatacagaaaagtggaggaaaaaaaatcatatccccaccatccaaagacatatactctcctcttatcttgttcattcttgtttctgtgcacaggtttatgattataactgtgtcaaaatgtatattcaaaatagctgttacattacctttgtggaattatggttaaatactttcactttaattttttcaaatgtcccctataataatgtcctgataacagtgtattatgtgtgtctccattggtgtgcataatacatacccagaggaaaaattagaaaataaagtaaattattttaaaaaattacctatattcccaacacctaacaactactgctaacatcttgatctgtttcctctatcttgtttcagtgcacacgcttgtgataacagtgtttaaatatgtgtgcataaagtcttaaatgaaaagatgtggaaaataacctaaaatagtgttgtccatggtgggaaattggttataatattttgtctcaaattccttaaataatctttggtgttttggtaataaattttatgtatgtattttccattacaaatataatacatactcatacaaaactttggaaattcagtaaagaaaattcacacatattcccaacacccaacaacaattaactgttaacatcttgatctgtgcactagtctgtgattattagggtgttagtgataagtatgcataaatgtcaaagatgggaagaaagatgaaaaacaagaaatagttgtgtggttgttgtggggattatggttattttggtttcggtttcccttgaaaagtcatcattctagtgttttggtagtccacctttactacatatatttccattatatatgaaatgtgttcattatagaaactttgaagttacagaaatgtagaagagaaactcacccatgttttcaccatccaaagagtgtggttaacatcttgatatattttcttcatcttgtttctgtgcacaggtttttggtttgttaatatggttgtggtcattctatctgtaatagtgtcaacaat

SEQ ID NO: 99408 - DNA, 1014 bp, Homo Sapiens
  misc_feature (737)..(737): n is a, c, g, or t
  misc_feature (899)..(899): n is a, c, g, or t
  misc_feature (945)..(945): n is a, c, g, or t
  misc_feature (955)..(964): n is a, c, g, or t
cagtcgacggtaccggacatatgcccgggaattcggccattacggccggggtaagccaagtacaatctaactcagaatgggattaaaaattttagaagcagaagctaatatataaatgaagtttgggatttggaactttctgtatctcttaggaggaacaagtaaaaaccaaatggttacattgtgctgctagaaataatgtcattctcaattaaaagggttacacctgtagccacttgacactaacaccatcgagggcaattaatcaggagaaaagtaaatataaaaactttgctcttaacgtcacacactacagggtaattatgtaattctctagcactcaattaagaagcttgtaggttagcaaaatttcagtttctctagttcagccagtgtcttgtccttagtaattatttgctttccctgcagttcaatttctccttggaactctaacaggactaactggaaaaatactttgaccatagctctagtacttccaaataaattcatatctagattttcaaacaaagccccaagatgaagtctaattctgaaaatatctcacaatttttgaatgttctttttatcttaccgacctaacttctcttttccctcccaacttggcctcccacacgttccatttcattttggccattatagtcacatccgtttgactttgggtgtgacatcttccctttcaggatgatgggaattagatgcacgtctgtcttttgagntgagactggtcacccatccagaggagttttttttctaagttgacgtgaactaagaagtttgaaaatctactttccctggcttaaggggcaccagggggtgggtggtaccaaagaaaaagcctacctttctcccagagacaagcaaggcttggcaattttaancctattgggaaagtggaccctgcctggtggaaaccctggggccttncccccttccnnnnnnnnnnccttaaaagtgggtttcccccttttgggccaaatggaaaaggtgggggca

SEQ ID NO: 99409 - DNA, 963 bp, Homo Sapiens
gaagccccaggattatgttaggctggcccatgggccaccttttaactaagaagggggggcatcccggttcggttttagttgggtattggtggcagttggttcccagtggacggatcccaaggatgtctgagcacaaggagcagccagtcagtctctgatgagggtctaccatgaagcatctttgacaccaggtccttttgctgtgtctgaaacagaattccagtaaccaccactgagtgagaattttccgctacctattcgtgccaatattccctctggtgtatcatcaggaccattggcaaatggagtgtaaccggtaagcattgtatagagtaggacaccaagactccatatatcacaagcagcatcatagccttgtctttttaaaacctctggtgcaacaaaatttgcagtgtaacaaggagtcatgagaagaccattttccgctctcagctgttttgcaaagccaaaatcacaaattcgaatagattccggattaccagattcatccacataaagaatgttgctaggtttcaagtctctatgaaccaccccttgtgcgtgaagatattcaacggttttagttatagtgaacaggacagcactggcctctcgttcagagaaaaatttttgtctaagaattttatccagcaattcacctcctttcataagttctgttactacatacacatactttccatcatcatatacatcctttagagtgataatgtttggatgctgtccataacgaagaagaatttcaatttcttctgttgggtctctcttgcttttatcaataatcttcactgcaaactccatgtttgtagctttatgtatacatctcttgcaaacagagtaggagccaactccaatatcttcttttacttcatatccatcagtaaactgaatactgcccggccgtaatggccgaattcccgggcatatgtccggtaccgtcgactg

SEQ ID NO: 99410 - DNA, 736 bp, Homo Sapiens; identical to SEQ ID NO: 1637
  misc_feature (45)..(84): n is a, c, g, or t

SEQ ID NO: 99411 - DNA, 784 bp, Homo Sapiens
gggctgttttgcaacatacgaagttgatggggaggaaggacccttaaatcctgagtgggtatcgagtattccaagcaactggagagaggctttgtgcctcaacaggtcttcaacgccaaggagatgacccatcttttgcagtgcatgccttcctacttttggggcaaaagacaaaaatctggaaagcttagaggaagctaaggacaggatttccctcatttttttgtggcagtgcctcaggtgacaaaatgataaaaccactgctgctttacaaagactctaacaccccacttgtcttttagagataaacgccttcctgttttcttgtaatcacacccagaatcaccactgccactttttggattagttttacaatttttttatccatcaaatccgaagtcatttaacaaaaaaaatctggaaatcagaatgttgctaactgtggacagaggtcccaatcacccagattcattattctttgttcattctaatgttgatactgtgtttctccctcaggaaggccctagctttcttcagcccttgggtcagggtataactgaagcatttgaacataatcaagcatatgtttgaccactttgctgactgtattgaaaaaaccctcaccttactctgaaagaagcatggcaacagtacaatattgccgatgctttggtagtgataaaagaggtgatgggtgatataaaatcagccactcttaagcttgctggaaactgtgggaggatgtgtgaatgatgcatatttccctagagctaatgaaagaagt

SEQ ID NO: 99412 - DNA, 905 bp, Homo Sapiens
  misc_feature (747)..(747): n is a, c, g, or t
gggagccccaagcttaccacctgcacccggagagctgtgtcaccatgtgggtcccggttgtcttcctcaccctgtccgtgacgtggattggtgctgcacccctcatcctgtctcggattgtgggaggctgggagtgcgagaagcattcccaaccctggcaggtgcttgtggcctctcgtggcagggcagtctgcggcggtgttctggtgcacccccagtgggtcctcacagctgcccactgcatcaggaacaaaagcgtgatcttgctgggtcggcacagcctgtttcatcctgaagacacaggccaggtatttcaggtcagccacagcttcacacacccgctctacgatatgagcctcctgaagaatcgattcctcaggccaggtgatgactccagccacgacctcatgctgctccgcctgtcagagcctgccgagctcacggatgctatgaaggtcatggacctgcccacccaggagccagcactggggaccacctgctacgcctcaggctggggcagcattgaaccagaggagttcttgaccccaaagaaacttcagtgtgtggacctccatgttatttccaatgacgtgtgtgcgcaagttcaccctcagaaggtgaccaagttcatgctgtgtgctggaccctggacagggggcaaaagcacctgctcgtgggtcattctgatcaccgaaccgaccatgccaaccctgccgatggtcctccatggctccctagtgccctggnagaggaagtgtctagtcagagagtagtcctggaaagtgggctctgtgaggagccacggggaaagcatcctgcagatgggcctggccctttgtcccaccgacctgtctaccaggaatgtcctcgttggaacctcccctctgcaaaggaactgggaccct

SEQ ID NO: 99413 - DNA, 943 bp, Homo Sapiens
aggctggaccggtccggattcccgggatcacccggagagctgtgtcaccatgtgggtcccggttgtcttcctcaccctgtccgtgacgtggattggtgctgcacccctcatcctgtctcggattgtgggaggctgggagtgcgagaagcattcccaaccctggcaggtgcttgtggcctctcgtggcagggcagtctgcggcggtgttctggtgcacccccagtgggtcctcacagctgcccactgcatcaggaacaaaagcgtgatcttgctgggtcggcacagcctgtttcatcctgaagacacaggccaggtatttcaggtcagccacagcttcacacacccgctctacgatatgagcctcctgaagaatcgattcctcaggccaggtgatgactccagccacgacctcatgctgctccgcctgtcagagcctgccgagctcacggatgctatgaaggtcatggacctgcccacccaggagccagcactggggaccacctgctacgcctcaggctggggcagcattgaaccagaggagttcttgaccccaaagaaacttcagtgtgtggacctccatgttatttccaatgacgtgtgtgcgcaagttcaccctcagaaggtgaccaagttcatgctgtgtgctggacgctggacagggggcaaaagcacctgctcgggtgattctgggggcccacttgtctgtaatggtgtgcttcaaggtatcacgtcatggggcagtgaaccatgtgccctgcccgaaaggccttccctgtacaccaaggtggtgcattaccggaagtggatcaaggaacaccatcgtggccaaccccctgagcaccccctatcaacctcccctaattgtaagtaaacttggaaaccttggaaatgacccaggcccaaggactcagggccctcccccaggttcctactgaaccctttg

SEQ ID NO: 99414 - DNA, 1187 bp, Homo Sapiens
  misc_feature (835)..(835): n is a, c, g, or t
  misc_feature (1070)..(1078): n is a, c, g, or t
  misc_feature (1086)..(1087): n is a, c, g, or t
  misc_feature (1092)..(1092): n is a, c, g, or t
  misc_feature (1094)..(1094): n is a, c, g, or t
ttcctcaccctgtccgtgacgtggattggtgctgcacccctcatcctgtctcggattgtgggaggctgggagtgcgagaagcattcccaaccctggcaggtgcttgtggcctctcgtggcagggcagtctgcggcggtgttctggtgcacccccagtgggtcctcacagctgcccactgcatcaggaacaaaagcgtgatcttgctgggtcggcacagcctgtttcatcctgaagacacaggccaggtatttcaggtcagccacagcttcacacacccgctctacgatatgagcctcctgaagaatcgattcctcaggccaggtgatgactccagccacgacctcatgctgctccgcctgtcagagcctgccgagctcacggatgctatgaaggtcatggacctgcccacccaggagccagcactggggaccacctgctacgcctcaggctggggcagcattgaaccagaggagttcttgaccccaaagaaacttcagtgtgtggacctccatgttatttccaatgacgtgtgtgcgcaagttcaccctcagaaggtgaccaagttcatgctgtgtgctggacgctggacagggggcaaaagcacctgctcgggtgattctgggggcccacttgtctgtaatggtgtgcttcaaggtatcacgtcatggggcagtgaaccatgtgccctgcccgaaaggccttccctgtacaccaaggtggtgcattaccggaagtggatcaaggacaccatcgtggccaacccctgagcacccctatcaactccctattgtagtaaacttggaaccttggaaaatgaccaggccaagactcagngcctccccagttctactgacctttgtccttaggtgtgaaggtcaagggttgctaggaaaagaaatcagcagacacaggtggtagaaccagagtgtttcttaaatggtgtaattttgtcctctctgtgtcctggggaatactggccatgcctggagacatatcactcaatttctctgaggaacagattaggaatggggtgtctgtgttattttgtggggtacagagatgaaaaaannnnnnnnnatccacannctgananagtggagaagtgacatgtggctgggacactggtccatgaaagcactgaagcagaaagctggagggaccaacgccaccagacacttcaccagca

SEQ ID NO: 99415 - DNA, 913 bp, Homo Sapiens
tgcacccggagagctgtgtcaccatgtgggtcccggttgtcttcctcaccctgtccgtgacgtggattggtgctgcacccctcatcctgtctcggattgtgggaggctgggagtgcgagaagcattcccaaccctggcaggtgcttgtggcctctcgtggcagggcagtctgcggcggtgttctggtgcacccccagtgggtcctcacagctgcccactgcatcaggaacaaaagcgtgatcttgctgggtcggcacagcctgtttcatcctgaagacacaggccaggtatttcaggtcagccacagcttcacacacccgctctacgatatgagcctcctgaagaatcgattcctcaggccaggtgatgactccagccacgacctcatgctgctccgcctgtcagagcctgccgagctcacggatgctatgaaggtcatggacctgcccacccaggagccagcactggggaccacctgctacgcctcaggctggggcagcattgaaccagaggagttcttgaccccaaagaaacttcagtgtgtggacctccatgttatttccaatgacgtgtgtgcgcaagttcaccctcagaaggtgaccaagttcatgctgtgtgctggacgctggacagggggcaaaagcacctgctcgggtgattctgggggcccacttgtctgtaatggtgtgcttcaaggtatcacgtcatggggcagtgaaccatgtgccctgcccgaaaggccttccctgtacaccaaggtggtgccattaccggaaatggatcaaggacaccatcgtggccaaccccctgaccacccctatcaacctccctattggtagtaaacttgggaacccttggaaaatggacaaggccaaaactcaaggcctcccccagtttctactggaccttttga

SEQ ID NO: 99416 - DNA, 948 bp, Homo Sapiens
tcaccatgtgggtcccggttgtcttcctcaccctgtccgtgacgtggattggtgctgcacccctcatcctgtctcggattgtgggaggctgggagtgcgagaagcattcccaaccctggcaggtgcttgtggcctctcgtggcagggcagtctgcggcggtgttctggtgcacccccagtgggtcctcacagctgcccactgcatcaggaacaaaagcgtgatcttgctgggtcggcacagcctgtttcatcctgaagacacaggccaggtatttcaggtcagccacagcttcacacacccgctctacgatatgagcctcctgaagaatcgattcctcaggccaggtgatgactccagccacgacctcatgctgctccgcctgtcagagcctgccgagctcacggatgctatgaaggtcatggacctgcccacccaggagccagcactggggaccacctgctacgcctcaggctggggcagcattgaaccagaggagttcttgaccccaaagaaacttcagtgtgtggacctccatgttatttccaatgacgtgtgtgcgcaagttcaccctcagaaggtgaccaagttcatgctgtgtgctggacgctggacagggggcaaaagcacctgctcgggtgattctgggggcccacttgtctgtaatggtgtgcttcaaggtatcacgttcatgggggcagtgaaccatgtgcccctgcccgaaaagccttccctgtacaccaaagtggtgcatttaccggaaagtggatcaagggacaccatcgtgggcccaccccctgaagcaccccctatcaaactcccctattggtagtaaaacttggaaaccttggaaaaatgaccagggccaaagactcaggccctccccaagttcctacttgacctttgtccctttaaggggggaaaggcccagggtttgcttaagaaaaaga

SEQ ID NO: 99417 - DNA, 905 bp, Homo Sapiens
cggagagctgtgtcaccatgtgggtcccggttgtcttcctcaccctgtccgtgacgtggattggtgctgcacccctcatcctgtctcggattgtgggaggctgggagtgcgagaagcattcccaaccctggcaggtgcttgtggcctctcgtggcagggcagtctgcggcggtgttctggtgcacccccagtgggtcctcacagctgcccactgcatcaggaacaaaaacgtgatcttgctgggtccgcacaggcctgtttcatcctgaagacacaggccaggtatttcaggtcagccacagcttcacacacccgctctacgatatgagcctcctgaagaatcgattcctcaggccaggtgatgactccagccacgacctcatgctgctccgcctgtcagagcctgccgagctcacggatgctatgaaggtcatggacctgcccacccaggagccagcactggggaccacctgctacgcctcaggctggggcagcattgaaccagaggagttcttgaccccaaagaaacttcagtgtgtggacctccatgttatttccaatgacgtgtgtgcgcaagttcaccctcagaaggtgaccaagttcatgctgtgtgctggacgctggacagggggcaaaagcacctgctcgggggattctgggggcccacttgtctgtaatggtgggcttcaaggtatcacgtctgggggcagtgaaccatgtgccctggcccgaaaaggcctttccctgtacacccaaggtggggcattttacggaaagggatccagggacacccatcctgggcccaaccccttggaccaccccctaatcaaactcccctaattgggaattaaaactttgggaaaccttgtgaaatgggaccccgtttccaaaaacttcagggccct

SEQ ID NO: 99418 - DNA, 865 bp, Homo Sapiens
gacacctgtgtcagcatgtgggacctggttctctccatcgccttgtctgtggggtgcactggtgccgtgcccctcatccagtctcggattgtgggaggctgggagtgtgagaagcattcccaaccctggcaggtggctgtgtacagtcatggatgggcacactgtgggggtgtcctggtgcacccccagtgggtgctcacagctgcccattgcctaaagaagaatagccaggtctggctgggtcggcacaacctgtttgagcctgaagacacaggccagagggtccctgtcagccacagcttcccacacccgctctacaatatgagccttctgaagcatcaaagccttagaccagatgaagactccagccatgacctcatgctgctccgcctgtcagagcctgccaagatcacagatgttgtgaaggtcctgggcctgcccacccaggagccagcactggggaccacctgctacgcctcaggctggggcagcatcgaaccagaggagttcttgcgccccaggagtcttcagtgtgtgagcctccatctcctgtccaatgacatgtgtgctagagcttactctgagaaggtgacagagttcatgttgtgtgctgggctctggacaggtggtaaagacacttgtgggggtgattctgggggtccacttgtctgtaatggtgtgcttccaggtatcacatcatgggggccctgaacccatgtgcccctgcctgaaaaagcctgcctgtgtacacccaaggtgggtgcaattacccgggaaagtggaatcaaggacaaccatcccaagcccaaccccctgaagtgccccctggtccccagcccctacccctctaggaaaatttaaagct

SEQ ID NO: 99419 - DNA, 716 bp, Homo Sapiens; identical to SEQ ID NO: 2151

SEQ ID NO: 99420 - DNA, 843 bp, Homo Sapiens
ggatgagccaccgtgcctggctgggtatttatattatcattctagtttcagagtatacagaagtttcatcccatcatttggaaaaataaaggcatctgaagtacaatattacttatagaaatagtttatattcctattaaatcttaatcttgtggcatcagggaaatatttgttacatagtaggcaatttttatccagtactttatagattcaactctaagttgcaagcgaagtcaaaactgatgaaaatttatttagaaaaatctaaaaattctggttttaaatatgagaatcagtggaaaataagggtataattttgtaggtcatatgattgaagaaaatattattttaacaatgtaaagcaatatgatttgttactataattaacctgtataaaagatacattttatggtggtttcagtaggtcattttaaaaaccaatgtgcattagttttcaagtataaggtttaagtaatttgggtttaataatcagaaaatattcaatacagtgttggatattctgtcatgcactatttttcagttgacaatttctgtattttaattgaatactgtttcttcagtcatggttattgccactttatccctgaataataattcaaaaattgggttttgggtcagtgattcctcaagaaaaagatctcctgcccattaagaagtggtatcaaaatctcataaggaatgagggagagaagggggctgtagagtttgaaaaagcatattcaatattaaaatagttttatatttgggaaggcaaaaatgaatctattgttttgcaatataggttataaacaggcaaaatgcaataaaatatatatctggttg

SEQ ID NO: 99421 - DNA, 1109 bp, Homo Sapiens; identical to SEQ ID NO: 2278

SEQ ID NO: 99422 - DNA, 762 bp, Homo Sapiens
  misc_feature (611)..(611): n is a, c, g, or t
  misc_feature (712)..(712): n is a, c, g, or t
  misc_feature (714)..(714): n is a, c, g, or t
ggaactctcagatgatgtctccaaagtaattgcctatttgaaaaggttagtaaatgctgcaggaagtgggaggttacagaatgggcaaaatggggaaagggccaccaggctttttgagaaacctcttgattctcagtctatttaccagctgattgaaatctcaaggaatttacagatacccccagaagacttaattgagatgctcaaaactggggagaagccgaatggatcagtggaaccggagcgggagcttgaccttcctgttgacctagatgacaccacaaaggctgacttagaccaaaaagaactgttccaaaataggatgctctccaagagtggctaccctaaaacacctggtcgtgctgggactgaggccctaccagacgggctcagtgttgaggacattttaaatcttttagggatggagagggcagcaaatcagaaaacgtcgtattttcccaatccatataaccaggagaaagttctgccaaggctcccttatggtgctggaagatctagatcgaaccagcttcccaaagctgcctggattccacatgttgaaaacagacagatggcatatgaaaacctgaacgacaaggatcaagaattangtgagtacttggccaggatgctagttaaataccctgagatcattaattcaaaccaattgaagcgagttcctggtcaaggctcatctgaagatgacctgcangnaagaggaacaaattgagcaggccatcaaagagcatttgaatcaaggca

SEQ ID NO: 99423 - DNA, 836 bp, Homo Sapiens
  misc_feature (781)..(781): n is a, c, g, or t
cagccaacactagtcatttttattttttcactgaacattgatcaatactctaaaatgtttgtcatcctttagaataatgggaattaaagttgagcagttttccatctctaccaaatccttcaccacaagcagcattctattacagtatgaagaattgtctcatatgttaaaactgtacttttctctaacctttctctcactcctacaaggcccttttctcaaatcatatttctgagagaaatgtatggttctttctcacaggcctgctgatttgtaactgtgccatcgaatagagcaattagatccatcagacctttttcccctcattaggttcagtggaaccattctggttaaaacagcatgaactgaactcagtttacattcatattctatgggcaataccatttggtttttggaactgtttatctgctgttccctatcaagtattaatgtagggatgtcactcaggctgcgttgcactgggctgagttcaactgcgacgctctcactgacgcgtgcttacatgtgcttctcacttccggagcacaggcaggtggctgcggggtcacagctctgaatggatgcccatgatgcaactggggcagcccttgctttttgcttgctctccccacagaaacctttgtccttgcaactttatcctttgtcccgattgggtccccgatacacaaaatgtacaaatgtaaacttgctcattttattaaaattctttagttctttggtctttctggaattttttaaataaaaaatgcccttgatgganggatggttttcactcgcaccatacttagtctaaataagaagtctaggatctacaa

SEQ ID NO: 99424 - DNA, 1127 bp, Homo Sapiens
ggggaagcggggtaagtggggctgcagggtggaggtggagaaatagaagcgctgcgggctctaagctagtgaggtcaccaaaagtgtgaggctaacgcaaggcaaggtggtgaaaaggtggcttctgttttcgcgtttgtttttgtggggagaatgtctgtctctctgctctgctgtagtgagggcttgaaggctcaagcgggtgatgggcttagaactttgagcctatgatcagcttaggcatcagagattttggtttccaggccatctgctttatctgaagattttcagctgatgaagaactaggaggctcaaacactatcttacctgagtccaggacaagtgacttggagagtgtgctcttctgtggcaggatcaggtctgtctagggcaggatggcccaggatctcagcgagaaggacctgttgaagatggaggtggagcagctgaagaaagaagtgaaaaacacaagaattccgatttccaaagcgggaaaggaaatcaaggagtacgtggaggcccaagcaggaaacgatccttttctcaaaggcatccctgaggacaagaatcccttcaaggagaaaggtggctgtctgataagctgatggcatggagccctgccctgagtgtctgtccctcttcagccaagcccaagtctcctagacccccagggagccagtgaactgtcaccttctcttcatcacagaatgagtaaagatccctggaacaaatgcattgtgaacccatttccccactcccaccttcaactcttttctcccattatttcctccacctgctgggtctctgctgaccttgctgggaacactctgaggacagtgtggctggccgagcggttggccccatgggtggtggggtgtgagaagcctgcaataccccaagaccccagagggcagtccttaggaagcacttacaccacctgggaacccctccgtcttttccctctactctcatcctaggaataaagcatttccacgccagagtagtttgggctgggggccagggttgggtggtcctgtccctccatatcatgtcctaccctatggtcctgttcctagtcatttagatcaccccagatggcctgatgacaacaagagtttgtgaagtta

SEQ ID NO: 99425 - DNA, 503 bp, Homo Sapiens
  misc_feature (185)..(185): n is a, c, g, or t
  misc_feature (346)..(346): n is a, c, g, or t
tttttttgtagtggggagattcccaagcccttatgttcattgtcccagggattttcctttgggaaaaccaaactataggccccatttttcccttatccgtgaggggaaccccggcgcgccacaaacagagatatttttggaaaagcttttttcgaggggccagaggcggggccggccattttaanatatgtaaatgtgggggggtggtaaataaacgaagggccgggggcgaagtggcacggtttatttaacttttagtaaaagtcaaggagaaaatgcgggggaaacttctttgcttgtccacaaatcattcaaatggggtttgggcaaggtagcgggaggctgngggcaggccaaaggcctgcgaagaggagacaggctccagcacccacgctctcacaccccacatctatgcttttcttgctctgctgagactctaatgacaaagccagatttcatcttaacctcaagcttctactttttaaaaaaattttgttttggag

SEQ ID NO: 99426 - DNA, 706 bp, Homo Sapiens; identical to SEQ ID NO: 2918

SEQ ID NO: 99427 - DNA, 828 bp, Homo Sapiens
gggggaagcagcctgggccgctgcgcagaggcgcggcggctgtacaactcggccgttgtcaccatgccggtcgtccggaagattttccgtcgccgccggggcgactcggagtcagaggaagatgagcaggactcagaggaggttcgattaaaactggaagagaccagagaagtacagaacttgaggaagaggcccaacggggtgagtgctgtggccttgctggtgggagagaaggtacaagaggagaccactctagtggatgatccctttcagatgaagacaggtggtatggtggatatgaagaaactgaaggaaaggggcaaagataagatcagtgaggaggaggacctgcacctggggacatcgttttctgcagaaaccaaccgaagggatgaggatgcagacatgatgaagtacattgagacagagctaaagaagaggaaagggatcgtggaacatgaggaacagaaagttaagccaaagaatgcagaggactgtctttatgaacttccagaaaacatccgtgtttcctcagcaaagaagaccgaggagatgcctttccaccagatgctgagtggcattcctgaagtggacctgggcatccatgctaaaataaaaatatcatttccaccgaggatgccaaggcccgtctgctggcagagcacccaaaccagaagaaagaccgcgagacctccttccggcctaccaacatgggctggggatttatgggcagcacaacagaatttttcttggggagctcaacgcgccccatacgggggaattatcaagataaccaaactatcttcaaacttgttcgcgccccctccg

SEQ ID NO: 99428 - DNA, 738 bp, Homo Sapiens
  misc_feature (169)..(177): n is a, c, g, or t
aatcttctggcaggtctcttctagccattacaattactttgattcttttcatgtgaaatattaaaaacaaaaattaattcttaaccccggaactggtcccagtgtttattgcaatacaaacaagtgaccctctaattgacacaacaaaatgttacaaacattattgttnnnnnnnnntaccccttcagacgggtctgttggagtataatgatgaaagctaaacataattgcccgaaaataaatcatgtagtttttactttaagtggtcagaccagaagattctttaaacaagtagaaacaaactacttaaaaccagaggactcaagctgcagaaccactcatcacaccccattttcacaaaagtgcattcggctggttgtaggatatatcattaggtggggaaacaaaaccccacttttctctctgatcattttttcataagagattccaagagggagtgataaagtaccaactggactccattccaggtctcacctctagaagacagccagctctcatttaagaatttcagaacttggaaggaaggaggaaatccacattaaattctagggcccaacagacagagtgtcatcaatgccacccccagtagtggggacgacagtgcacctgtagtcccagtagatgctcgacatcagagagcttcctgcttaccagacccacctatgcatgtcaccagcaaaacgaaagccgcaagtctagtgggctgagcggggaaca

SEQ ID NO: 99429 - DNA, 497 bp, Homo Sapiens
ttttttgacaaaatacactattggccatgtccatcacgagagtgtttgtagtaattaattaccttgtacaggacctggcacttagtagcattcttcaaatgttccctcagtgatccttttactctccttgtcacttatttgggagaaataggggcacgtgagataagaagaagaataattttgatgttggtatgcttgccctgttacttatagacagtctttgtcataggcaaacttgaatttgatttaaaatagggctgggaaaaatattcaataactgtaagcccccttttggatgccaaacttagaattttgtacattctctgatgaacaagcatttagatcataacatggtaaagcctattaccagccaatgttgttagcatctttgtatgcacatcactgtttgtgcaatatatgaatattttgttgcattgtattcttatataaaaataagtagaaaacataaaattgaaattgctgatgagaaaaaaata

SEQ ID NO: 99430 - DNA, 807 bp, Homo Sapiens
  misc_feature (1)..(1): n is a, c, g, or t
  misc_feature (293)..(293): n is a, c, g, or t
  misc_feature (445)..(445): n is a, c, g, or t
  misc_feature (600)..(600): n is a, c, g, or t
  misc_feature (693)..(702): n is a, c, g, or t
nggctaagccattgtgctgagccagtttgccaggtttaatatctgtgacgtatgaagcgacccattgagtcaggtggcccaggatgtctaggaggcagagtaacaatccaccctgaacagccctcattcacagagcacttactacgtgccaggctggaattcctatgatggtttggggagatcagtagtcttattctcgttccaatggggcaactgtggtacagggacagaaaccagcctccaaattgcagacccagcattttaaaaaacgagtctttgggctcatccattcnccaggaacccacctccaggtcaagggggtcatgtccagctgctcatggggatgttacaatcccagcctctgagacttatgggcaacttggaacagggaagagagagaggaaagcaggaaagttgtgaaaggaaggtgcaggggctggcaggnaccatactgggagtttgcacggaagctttgaacttatgttctccaactgacaggctgccagcagcagcccgggatttccaggaaatgtacatctggggttggcagaagtccctcctggggtccctccagtatcccctgctccagggtttcttatnccctcccgtctcttctggctgagatggtgcacttgggggtccccgggtccctgaaagggggaacatcagggggaatgctctttccccctcccnnnnnnnnnnaaaaggggcctttccttttccacattcattgggaatttgtgggatcttcccattttccttaaccccccagaaatattggaaagggtctccttctcccctgggggt

SEQ ID NO: 99431 - DNA, 515 bp, Homo Sapiens
gagaaaacaaaaaggaaaacaaatgatgaaggtctgcagaaactgaaacccagacatgtgtctgccccctctatgtgggcatggttttgccggtgcttctaagtgcaggagaacatgtcacctgaggctagttttgcattcaggtccctggcttcgtttcttgttggtatgcctccccagatcgtccttcctgtatccatgtgaccagactgtatttgttgggactgtcgcagatcttggcttcttacagttcttcctgtccaaactccatcctgtccctcaggaacggggggaaaattctccgaatgtttttggttttttggctgcttggaatttacttctgccacctgctggtcatcactgtcctcactaagtggattctggctcccccgtacctcatggctcaaactaccactcctcagtcgctatattaaagcttatattttgctggattactgctaaatacaaaagaaagtttcaatatgttttcatttcctggaggggaaaatggggat

SEQ ID NO: 99432 - DNA, 802 bp, Homo Sapiens; identical to SEQ ID NO: 4066
  misc_feature (30)..(31): n is a, c, g, or t
  misc_feature (668)..(678): n is a, c, g, or t

SEQ ID NO: 99433 - DNA, 1017 bp, Homo Sapiens
  misc_feature (45)..(73): n is a, c, g, or t
  misc_feature (722)..(722): n is a, c, g, or t
aaccctcaactaaagggaataagcttgcggccgcatacgcggtcnnnnnnnnnnnnnnnnnnnnnnnnnnnnnaagaatttccacccacaattttattattactgaaagcatttggaatgaagcaaaggatttaacaatatatataaaaatatacattttttaaaaaatcgcaagtagacaatagatttatggaattatttttctgatcatccagaaaagatagcaatagtaaactgcagttgggtgagaccagccactggggccatgagacctaagcagccctaaacgctgcctgagctctcaagagtagaagaaatgctcgacaaacagaaggaggctgtgggagggcagcaggacagccccaccagaaaaccagagcccgaatgggctgggcagggccagggctgaggtatcgggatgcaggaacaaccaggaaccccatgtgggttgaggagacacgccaattattctggcctggagaggaattaccaggacacaagaactcagaccatctgcaagcaagctcccttgtgtgtgttcactttaaatcaattcgtgtttaactcactgaatgaatacgtgggtttgggtgggaatcatccctgtgtctacgatcatctcaaggagaccagagaagggaaggcacaaacaatcaaagcagtttccccaattaagcttaagtgcccactaggatgggcgccagctactagggcttcagggnaaagcaaaagccatgaggcccaagccctgccccaaggagctggcgctctaatacagtgagagcactcgctcagaagactgtgccttgtggcccatgattggacgtgggacagagtaacaggattgtttccacgtatgtggacaattaggatagggttagagaaatccttgtgatttgagatgggcctggagggacaggtaggatattgacaggcagagatggaaagtgttgtcgtccttccctcggcagcagcagcagtagatgatgatgccaatgataatgagggctgcaaccc

SEQ ID NO: 99434 - DNA, 775 bp, Homo Sapiens
ggaaggaaggcaacttggaagtggtgggtgcccaggacggtgcctccagcctcaacagtgggcatggacagggttaatgtctccagagtgtacactgcaggcagccacatttacacgcctgcagttgttttccggagtctgtcccacggcccacacgctcacttgactcatgctgctaagatgcacaaccgcacacccatacacaactacaagggccacaaagcaactgctgggttagctttccacagacataaatatagtccatctgcaatcacaagcacatagccaggtaacccaccaactcccctggatctgcagcccacacgtgggagtctggctgtcaccttcacaagccacagaaacggccacacatgttcacagctcacacgccctctccattcatcgaacttctcagtgtccctgtccctggtgcctggcacagggaacagcatgcccccctccggggtcatgccacccagagactgtcgctgtctatggccccaactcatgatccctctcttggctacaccactctcccagcctgtgaccaccgatgtccacacaccccccaaccaattgtccacacagcctacccacgtacgacatcgtccctggctccccagagtatctttcccacttgagacacggccgcccccccacagaaggcacagtcccccagccaccctctggaaactgcaagcccctcagtccaccccccttttttaaagcacccctggatttcctacccaaatggcaaaccccctcctgggggtcc

SEQ ID NO: 99435 - DNA, 793 bp, Homo Sapiens; identical to SEQ ID NO: 765

SEQ ID NO: 99436 - DNA, 504 bp, Homo Sapiens
  misc_feature (395)..(440): n is a, c, g, or t
cacaccctcacccgcacccgcatccgcaccaaataccgcacccacacccacagccgcactcgcagccgcacgggcaccggcttctccgcagcacctccaactctgcctgaaaggggcagctcccgggcaagacaaggttttgaggacttgaggaagtgggacgagcacatttctattgtcttcacttggatcaaaagcaaaacagtctctccgccccgcaccagatcaagtagtttggacatcaccctactgaaaacttgcgattcttcttagttttctgcatacttttcatcacgatgcaggaaacgatttcgagtcaagaagacttttatttatgaacctttgaaaggatcgtcttgtatggtgaattttctaggagcgatgatgtactgtannnnnnnnnnnnnnnnnnnnnnnnnnnnnnnnnnnnnnnnnnnnnnttaaatgcttgttctaagacatttctgaatgtaaaaaaaactaataaataatcataaatcaaaa

SEQ ID NO: 99437 - DNA, 313 bp, Homo Sapiens
ggatttcaagaaacacatgtgttgaccacctctgtgtgccaagcactgggtgaggagtggtcgtatattaccataattcatcctcactcaattgggaggtggcattcttgtccctgttgcccccatctctacccccttttgttaatggttgagagaaatgtggaccagtgattctcagtttggtgcccagtgtccccaaaggaagtgatggagagccttgagctaagttcaggcagcagcatgtggacagcagcagtgtgctgggagcagaggttggaatcagggctcaggggccttcacttcaagggccctc

SEQ ID NO: 99438 - DNA, 1416 bp, Homo Sapiens
  misc_feature (46)..(54): n is a, c, g, or t
  misc_feature (72)..(87): n is a, c, g, or t
ccccccaaacccaccgaggaagagagggtgtattctcctttttttnnnnnnnnngaggtttttctttaaaannnnnnnnnnnnnnnnaaaatttttttaagtgggggccccctctttttgtcccaaaaaaggttgggggaaaggaccccgtaaaaccccaatttcggaaaatattccaggggtccttatccaaaaagggcctgggttcaatggaaccccaggttttcaccccttacgccattggaatttcagtctttaaagttggtaatattacatcgtgtacccagctctgggtctctctacctgctagcgcatgccaaggatctgcctgcttttcagtggggtaattttcctcaatatctgacagggctgaaccccgcagctgggcagcggaaagccttttcttcaggtccttgcactgggacttagatgtgagctgactctcagaattctcactcctcatgatgttctctttactttcccccactgaaatgaactttcttcttaattactgaggatggaagattaagaagttctggattacttgccagagacaggaacttccgttcctttagcaagctgtagttcttcaacagattttctgctctagccagtttgtcctctgctagtctctcacgaacacaaagctcctgttctttctgctccaatctttcttctcttgctttgagagctcgctctcgctcctgtaactgaatttccttcagtttcagctcactcaatacagggctggaatcctgcgatttttctggctctcctaattgtcgccctcttctctcaagatttcttctttgctcgtctgcaaccaaatctgctattaaagggttctcaagaatttcttcaacagaaggtcgatggtaatcctttaagtttaacatcctcgtaataatttcattcaattcatcagagtaacggtatggaattcgcctgaatttgccttctctgattttcccagcgagttctttctggctaaaagctgtaaatggaggcattaatgcacataactcatacagcaagcagcccaatgaccagatatctgatttctcattgtaggacatgcgattcatttgttcaggagacatgtaataaggtgtgccaacaaatgtttttgcaaaactcgtgtcatggtttaatattctagctagcccaaagtctccaagcttgacgttttgcttgccatccaggaaaacattggctggtttcagatcccgatgcaatacggtatgaccaccatcacttcgtctgtggcattccttcagggccagagtcaactgagtcatcactcgaagaacaaactcttcatctaagtattgcctttccttggttccctttgtaattacactagccagatcccctccttcacaatattccattacaatgtacagtgttgtatggtcc

SEQ ID NO: 99439 - DNA, 401 bp, Homo Sapiens
acaaacaaatagaaaatagaaaaatgtatttacaagtagtacgttactatgatgagaaagcacaaagacacctgctgctataatacatgcattggctcgagaagaaactacggaacaccctgcgagggagaagcctagaaaagaaagaaagggccaaaaggtttgaactcttcatccctaatttgctacactgatcaaaaccaagtaagggctcctgaagtccatgagtctatcatcaatcagcacaaatgctatactagtttgtaactgcggggtcagttgtgaaggggaaggacagcagtcttatccatatacaaggaagccacagtaaactgctcgacatgctcaaaacgacagcaagcccctgtcagctacacagcgtgatcttagcaggatttcat

SEQ ID NO: 99440 - DNA, 919 bp, Homo Sapiens
gggacccacgaagcaggcgaagttcattgttctcaacattctagctgctcttgctgcatttgctccggaattcttgtagagatattacttgtccttccaggctgttctttctgtagctcccttgttttctttttgtgatcatgttgcagatggctgggcagtgctcccaaaatgaatattttgacagtttgttgcatgcttgcataccttgtcaacttcgatgttcttctaatactcctcctctaacatgtcagcgttattgtaatgcaagtgtgaccaattcagtgaaaggaacgaatgcgattctcgggacctgtttgggactgagctaaataatttcttgggcagttttcgggctaatgtttttgctaaggaagataagctctgaaccattaaaggacgagtttaaaaacacaggatcaggtctcctgggcatggctaacattgacctggaaaagagcaggactggtgatgaaattattcttccgagaggcctcgagtacacggtggaagaatgcacctgtgaagactgcatcaagagcaaaccgaaggtcgactctgaccattgctttccactcccagctatggaggaaggcgcaaccattcttgtcaccacgaaaacgaatgactattgcaagagcctgccagctgctttgagtgctacggagatagagaaatcaatttctgctaggtaattaaccatttcgactcgagcagtgccactttaaaaatcttttgtcagaatagatgatgtgtcagatctctttaggatgactgtatttttcagttgccgatacagctttttgtcctctaactgtggaaactctttatgttagatatatttctctaggctactgccgggagcttaatggtagaaacttccttggtttcatgattaaactcttttttttcctgaaaa

SEQ ID NO: 99441 - DNA, 421 bp, Homo Sapiens
tgagccactgcgcccggcctcccctctcatttatgatgccctctgtgcaggcagacggctcttgggctcttttccccaactgtctctaacacaggccccacggttgatggccacaggcagtagaaggagaaatgaggatgggttggggagcggggagtcgcggcttggctcttcctggtttctgagagggacatcttcatccctactccccttggtccccaaccacagtcctggtgaagatgtggatgataatggtgccttgatttccaaatgaagacagctttattgcttaactctattgtacataggatacacgttcagtgtaaaataaagtgtaaaggggaattcaggcttaatgctgcacctagatataaatgctaatgatacttgggtttatagccttctgatcctttatttctgc

SEQ ID NO: 99442 - DNA, 502 bp, Homo Sapiens
tttaaacattaactaggctgtataaagaacatttattccttcaaaagaaaaaaatttacttctggttgaaattacaatttacaatatacaacactatatgctacgaccataaaaggtgagaatatacactgaatgcacagggctggctaattctcttttcttaccaaaaaacgtgtttatgttgattcaaacttctccacatttacattacaggtatacaaatgtacaattgtacaatcaaaagtatgttcgactactagggtacattatagatacagattagacatcaaaacaagaaaatactacaaatttgtatatatgcaaagtctacaccaagtatacactatatatttatagaagcaagaccaaaagcagagttggatttttgtttctcatgctaaataatcagattttacctttcaatgttaatagaaaaaaatccagtaggcagtaaacaatcacacccgcccagcctcaaaagacgttctgggtgctcgcatct

SEQ ID NO: 99443 - DNA, 451 bp, Homo Sapiens
gggtgaaatgatgattcagtttatccattcgctgagtgcgctgcactgaccttcttccaagcctcagttcctgttctaggaacttgaggctatgtagcctgaaaatgccctgcagtctgcagtgttctactgtgaactgcttgtgtgttggcaggctaccggtaagaatggttggtgtcagcagggacggggccctctgagacccatctcacaaagatgagtggtgaaaatctgatcacttgctgcagccctttagttttttattaagccgatgcctgagtagctttaatagctattagctatgttagtagactgagatcttctgttagaagtctttagttctgttttccttgggggactaagaaattatattgcaggcctgaattacaggaaggggagaaccaatggctagggaatgagagccaatacctgtaaaagcagagttgggctg

SEQ ID NO: 99444 - DNA, 794 bp, Homo Sapiens
  misc_feature (577)..(577): n is a, c, g, or t
ggcaataggtggaaagaagaaacgaagaaacttactgaaagtgcagaaattagaatcaataatctaaagagtgagctgagtcgacagaaacttcatacccaagagctgctttctcagctggaaatggcaaatgaaaaggtagctgagaatgaaaagctaattctagagcatcaagaaaaagccaacagacttcaaaggcgtctaagtcaggcagaagagagagctgcttcagcttcccagcagctcagtgtgattacagtgcagagaagaaaagcagcctccctgatgaatctggaaaatatttaaaaatattcatagttcactcacagaactttagagttgggaaagcagttggactagaagtgtattgaaatggtaaagcctgcaaagtataatagttaaggcttgtgttatttcgcgtaagcattgttgttctgttttgagggttattggaaaacagagcagtgaccacttcctgtaagtaaagaaaatataatcctatattgagcttcagtggagaataaaccagctgagaagaactcattgccttcatcaatgtgtctgttttttaattccntcctttttcccttgaaaggacataataattttcaaactatgcaaatttctctttcataagaaagagtttttaaagaaaattctaagaatttaatatttcagtttccaagatttgagaattttacatctaattgttacttctaactcatttttaaagttcctaagtatccattttattatgaactcataaatgtaataaattgtgcggctttctaaaa

SEQ ID NO: 99445 - DNA, 592 bp, Homo Sapiens
ggtgctcaaaaagatcaacaaattaatattgttgctgatatttgcataattggctgcaattatttaatgtttaattgggttgatcaaatgagattcagcaattcacaagtgcattaatataaacagaactggtggcacttaaaatgataatgattaacttatattgcatgttctcttcctttcacttttttcagtttctacatttcagaccgagcttgtcagcttttttgaaaacacatcagtagaaaccaagattttaaaatgaagtgtcaagacaaaggcaaaacctgagcagttcctaaaaagatttgctgttagaaattttctttgtggcagtcatttattaaggattcaactcgtgatacaccaaaagaagagttgacttcagagatgtgttccatgctctctagcacaggaatgaataaatttataacacctgctttagcctttgttttcaaaagcacaaaggaaaagtgaaagggaaagagaaacaagtgactgagaagtcttgttaaggaatcaggttttttctacctggtaaacattctctattcttttctcaaaagattgctgtaagaaaaaatgtaagccc

SEQ ID NO: 99446 - DNA, 279 bp, Homo Sapiens
gtctacccaccctcccttctagcagattttgattttgtttcaatttataacttacactttgaaccatgggtttacttataatggagtctgtagcttcacagcatatttcatgtaatcataaagaccagtatattccctcctgctgaatgacatgcgactgtaaagcctctttataaaccatttccaatgttagtatataggattatttgggaagcatatcaatacctttatagacaaatacgaacaatgtatgcacacaagacattttaactatggtat

SEQ ID NO: 99447 - DNA, 1158 bp, Homo Sapiens
  misc_feature (220)..(492): n is a, c, g, or t
ttttccattataaagggattatttaattgaggaaaccaccaaattctttttttccaggtgaaggctttaatatggtggaggaaccttccaataaaagtaaaatttctggcttaatcacaggatcaagcccaagttttataataaaagggaaaaaattatcacttataattagcatactcagcatcagaaatgataataataggtgagtaacctaccctgnnnnnnnnnnnnnnnnnnnnnnnnnnnnnnnnnnnnnnnnnnnnnnnnnnnnnnnnnnnnnnnnnnnnnnnnnnnnnnnnnnnnnnnnnnnnnnnnnnnnnnnnnnnnnnnnnnnnnnnnnnnnnnnnnnnnnnnnnnnnnnnnnnnnnnnnnnnnnnnnnnnnnnnnnnnnnnnnnnnnnnnnnnnnnnnnnnnnnnnnnnnnnnnnnnnnnnnnnnnnnnnnnnnnnnnnnnnnnnnnnnnnnnnnnnnnnnnnnnnnnnnnnnnnnnnnnctttatgtttaccctaccaagagcagacctgagcattttgctggccgtagaggtatataaaagaactctaagcttaggcatgcagaataggcactggatgaatgtagtgaggctattaggagtcttgttggctccctgatgtccttatcatgtcttcttcgcagactgtggatgcacacaagacagctaaaaccttgggcatcatttgaaaatgtttggctgcctgctacaatctcaggagagagaatccttcatacttatattggactggatatattgtcaatcaaattcttttttaaaaaaagatgcttcactttaggaaataagacaccagaccagcaacatcaagtaggtatggaatacttgctggtgaaacacttaaaactaggaaacttctaaatcttctaaaggtgcttaagagaatggagaagttaatcaacaggaatccaagtgttgtggctgtaaagcaatacgacataagatccctagtaaagagcaggcctaagagttggttttggaaagaacttgggccaagaacagcagaaaaagctaaatgagctacttacgtcgatgtgttttaatactggtgcattagcagtatcttatggaagttgtgaacactaagaaccaatttcaaaaaatataaaaatgtttatagggcatatt

SEQ ID NO: 99448 - DNA, 564 bp, Homo Sapiens
  misc_feature (489)..(501): n is a, c, g, or t
ggaatggggtgggatgaggagtgagttgccagacctttgattagtttgctggtttagaaacagccagtggctgaattagtgagtaaatgaatgaaagtataaaggacttgttttttatgatagattttctgtaagaatcttaaatgttccttttcaaattagatgtgttgatgcacacatgactattctgtttttctcactgactatataacattaaaaaagggttaaagaaaaacaaaactctggccttttgtgctatgaaatatttttagtccagaggtttttaacctgggtgtccattccctactctgaaaaatgcattagctttggttcctggatggccttcctcttgaaaagtaaaaaaactccctaagggggttaattccacatttggcaggggccttttccttaagggaattttcccgggccagaactttggccccaaaatcttttaaaaaatggcgttgggggttaataaaaggaattggnnnnnnnnnnnnnaaaaataagggggattcttggaaaattaaattccttccccccttatttgggataagggggggg

SEQ ID NO: 99449 - DNA, 747 bp, Homo Sapiens
  misc_feature (312)..(312): n is a, c, g, or t
  misc_feature (625)..(625): n is a, c, g, or t
gggaccaaagacatctaggcttgctgtcaaggcttctgatcaacatgagatgaccgccgtgtggtaaactgatgaaccccgacgctgatcaacatgagatgaccgccgtgtggtaaactgatgaaccctgaccctgatcaacatgagatgaccgccgtgtggtaaactgatgaaccccgaccctgatgaacgtgagatgaccgccgtgtggtaaactgatgaaccccgaccctcatgaacatgagatgaccgccgtgtggtaaactgatgaaccccgaccctgatcaacatgagatgaccgccgtgtggtanactgatgaaccccgaccctgatgaacatgagatgaccgccgtgtggtaaactgatgaaccccgaccctgatcaacatgagatgaccgccgtgtggtaaactgatgaaccccgaccctgatcaacatgagatgaccgccgtgtggtaaactgatgaaccctgacccattaggctttggctacagaatgtggaaataaattgtgttactacatgtgtgtaatcctagggtgcaagacacccgccggggaggttccatagaagtgaggggttctgcaggtaacctcatcctctagttcctctggaaagctccctanaagggaggaaattatgtccctttaaaacctaataaaaattcccttccaaaaccaaaattaccggcaaccctaactggtgaaaggacccccaaaggattacttttttttagaaataaggtaaa

SEQ ID NO: 99450 - DNA, 758 bp, Homo Sapiens
  misc_feature (619)..(619): n is a, c, g, or t
  misc_feature (652)..(652): n is a, c, g, or t
ggggctgctgtcttggagaggctggtggacataaagaaagggaatactctgctattgcagcatctgaagaggatcatctccgacctgtgtaaactctataacctccctcagcatccagatgtggagatgctggatcaacccttgccagcagagcagtgcacacaggaagacgtgtcttcagaagatgaagatgaggagatgcctgaggacacagaagacttagatcactatgaaatgaaagaggaagagccagctgagggcaagaaatctgaagatgatggcattggaaaagaaaacttcggccatgccctagagaaaattaaaaagaaccagaggcaagattacttaaatggtgcagtgtctggctcggtgcaggccactgaccggctgatgaaggagctcagggatatataccgatcacagagtttcaaaggcggaaactatgcagtcgaactcgtgaatgacagtctgtatgattggaatgtcaaactcctcaaagttgaccaggacagcgctttgcacaacgatctccagatcctcaaagagaaagaaagaaccgacttcattctacttaacttttcccttaagataactttccccttgacccaccatttgtcanggttgtgtctccagtcctctctggagggtatgntctgggcggaggggccatctgcatggaacctctcacaaacagggctggagcagtgcctactccataaagtcagtgatcatgccagatccgtggccccacctggtgc

SEQ ID NO: 99451 - DNA, 536 bp, Homo Sapiens
  misc_feature (381)..(394): n is a, c, g, or t
aagttgaggaggagtgtgagtggggctactgtggtgggatctccagggcagccccatccagcattttcattcagggtcccggagcgggtgtggacagtgctttcgtggtctgctgccagccagggcaggggagcccttatgaagctcctgaggtggaaccaggcatctgagcccaggcttgttgcttcttagagttgaccaggacagcgctttgcacaacgatctccagatcctcaaagagaaagaaggagccgacttcattctacttaacttttcctttaaagtaagacttttcttttccagtctctccctctggcctaggctgcccagtctgcctgacagtcctgtggaggatgctggcctccctcccctgattgtcgnnnnnnnnnnnnnnaggataactttccctttgacccaccatttgtcagggttgtgtctccagtcctctctggagggtatgttctgggcggaggggccatctgcatggaacttctcaccacaacaggtgagcctgtctctcccccttttccaagagc

SEQ ID NO: 99452 - DNA, 895 bp, Homo Sapiens
tggttcgaaggatatggactattgcaatacatttcttccttcaaatcctgccactgttttgttggcccacaactaataggacctcaaaataagccatgctgctttgcacacacactagccttcttttgtacttttcattctggatgggcttggccaaaacaggctcaggccaaagacctcccaagctgtatgtacttccagtatcctgaaacagtgtttggtgacataatgccaagggtaaacaagcctgatttaggcactgctttatccaggggcttcacccatgaaattaataaaacttatctgagtcacttgaaacttggttcccagaaaacacatttctggtttataatctccttttatgctcacctgacattaattatctgtccttgatgatgtgtttaaactgagtagcagaaaacagaggccacactttctgggaaattttaaaggaagaaaccatttttaatgagatgaaaatatttaacgaatttaaaaagctaatgacaattttgagaaaaggtttgggatgtatattgctatgtaatttaataaactgattttatggatataaatatgactgctttccttagagaataattattacctgaagcgcatccagacaacgtggctacctttatcatttcattaaaccctgagtggcccaaacaaaggcctcaggccggccacttccttccacttcttggtctgacctctccatgatctgttactaggcaaaactcagatgtttggctaccttgggctgcaactgtcccactcttgcccaggcttgctggagttggggttatccacagtcagaggttcagagttgtcaaattctccaattagagcaagagatgaggaaaggaaagggagacgaaagaaagaggctgtg

SEQ ID NO: 99453 - DNA, 475 bp, Homo Sapiens
aaggtttagttgcatgcccgaggtcatacactgataaacatgaggccaatgattagatatgtctgacttcacattccacatatttccttacactgttttgcagtgtaaataggtggttaagaagataccaaagtagatctctggttcatcttctgagaagcagaactagaattctcctggctagcagttatccatctagtgcatatgtatctagagctggccaggcctttagtttacaaaataaatagaaagccttgtccccactctggaggagcttgctgccttgttagaaggtgagatatgttcgaatagaacatttggggaaaccatttgagacctggtataatgaagtgctaagattgtgggcaaggtggggaggaggtaggccttcctgactagtttaggctacaatagttgggaagactgcaagaagccagcaggcttcagtcatgccctaaaagagcgattggtttag

SEQ ID NO: 99454 - DNA, 477 bp, Homo Sapiens
caagttgattgggattcaaagcaaaccctttgcttaactcaggaagctctaatatttgaaggaactgcttaacaggctgcagaacctgttctgagtgctattttggcaccaattcctttttgtttgtggagtaaagttacgcagtgaagacggtgtaacaccaaataattgtagactctcacaataggtaaaatagctccattttacagttaaggaagctgaggttcaactgaggccccaaagctagttaatgtactagttcttagaacattctttgaacacaaagactatgatgaactcccttctgagccactcacaaatactagccaaccactatcctgcagatctttgggaaagggaaattagaagttcttttggagaggcagaggttggggaaaactcatcacccacagagtgaactcccatgtggggctgcaaggaaaccgagcaaacccagtccaggcaggactcaccttt

SEQ ID NO: 99455 - DNA, 442 bp, Homo Sapiens
ttgcagttttctaagccaagctagtagaagggatcccaatttccaagtattgtctctccttaaaaattttccatagacacatggtcttctttctgttgtcaaatggcattcttgtatttcagatttatcattagctaagctaatgatgggtacttggcaagagttaggaccatctttatgtttttggtaaagtttaggcttctgatatattattagtattcagttgtaggtagtgacacttaaccaagcagaaaaggatctatgccactgagtgtgaccttgggcaggtcatttaaccgtaatccacagttctccctctgtaaaatgaagaggtttgctaaaatgatctttaagataacttctcatctatagttctatgattccatgacaaaacccctttaaatattttgtgtgttctctgtctcttaagaatataagtaaa

SEQ ID NO: 99456 - DNA, 665 bp, Homo Sapiens
ttcccatccatgaccctcatacgctacctgtcagtaccaacggagtctactatagatatcatccatcacgtactgtccagttagtccatacgtttgtgtccatgattcgagtatgtgcgtgcggatcacattacgataactcgtgtagtaggtcaatgtgatatgtcacaggtacctttcatccagggccctcgatccagggtcttcgtgcacagcaccctggaggaagcgctcctgttgcagtcggagtgaacacccgtcttgtttaaccaccagcagggggattcctttctggagagtccatgtagtcatcatctctttgacctctgcattttcccccagaaaggcgagcatgttacttgtcatcttgggatccgaatgacaaactccaccagatgtaaaatcactttctaaacaactatttgacagactgctccacaagtcatcattcttagcatttctatagctgaacttctttaagtactgaattattcctttctggaatttctcctcacccagaaaatccttgagcatattcaaaatacaagctcccttgttataggaaacttcatcaaacatttcctgtatttgagtcggggtttccgctggtttggagatagggcgggatgaattcaatgaatcttttgtaattacttcaaaacaca

SEQ ID NO: 99457 - DNA, 560 bp, Homo Sapiens
  misc_feature (58)..(58): n is a, c, g, or t
tgcatgccagactccaaagaaccagagcttcatggaaaaactgatgaaatccaaatanagcctgtaattcagttaatcgtattgttctcatgttacttagtttgaattactgtcctatgtttgtattagacgttagttaacattagaagaaattgactgaagtatacaaaaggaactctaggctattttttcaacatttctggaagtctaaaacattttaaaaagtatcaaagcaagtgttagaacactgaagccaactgcagcattctcaatctgagatatacttagtttttgaaggatatatttagttgtcaaatagcaagtgggaaagtttaggaaaatagaataattatttcaaattacttatacttatttcaatctatatatttataatttctttgtgtggtccttggaaataatcaaggaaaactgttcaaaagtacactgactcttgtaacacaaagtcatgttaattatgatcgacttagctcagagctagtcctgtaagattttagagatttacatttctaaaattttaggacaaccaagtctatttaggc

SEQ ID NO: 99458 - DNA, 516 bp, Homo Sapiens
ttgggggtctctgcaggggctgggacgcttgcaggttccttgcagctcccccagcgggctgagttgcagactttgtcatgggagccacgaaggtgcgggacccttgctcccaatccgagggagtcttgcacaaatcttgcgccacgccgccgtcaccagcgtaggaaggggctttgctatcagtattcttgtgtacgacctttggaccccttccctcgcccgggacgttcccgggagacttaggcggtgagggaggtgcagctccacggctggctttcgcagagcggcgaagctgatcttgccttctggttatcaaagaggtcatctacgtcaacccttgggtgtcaccaaggagaaatcttatacccacccacagccactcttgaagcccaagtcttctgactcctaacttgggtctctttttcccttaaaacgaagtcttctgatgtgcttatcgccctaggtgataatataatattaataattcaaccaattatccctgaattattgctgact

SEQ ID NO: 99459 - DNA, 413 bp, Homo Sapiens
aagggtggaggtagggaaattcaaagctacttactagctgtgtgaccttgcctaaactacctccttggatttgcagtctgtttatttgaaaatgtcataagggataaatgagattccttatgtaaagtactttataaatattaagcacttaccaaatgttagtctgttttcacattattcttcttggattaccagaaattggtttgaccatgaataaacaggagataatttcttgggtaatctgagtttgaatcccctttctctctcttactaattgtatgactttgattaggttatttaatatttaattgttctgggtctcagttttctcatttgtgaaattaaaatgtgttcttcagaattgtgagggttaaatgtgataaaaggcctgactcatatgagaaaatgctcaa

SEQ ID NO: 99460 - DNA, 619 bp, Homo Sapiens
agttactatcaatatatttatgcgttaaacagctagttctctcaagtgtagaggacaagaacttgtgtcagttatcttttgaatccatacatcttagctggcattagttttctatgtaatcacctacctagagagagttgtaaattatatgttaacatgttatctggttggcagcaaacactaaagccaataaaggaaaaacagtaaatgttccgaaagcagagaaaagcaaccaaacatattgttatgaactaaaagctttccctttaagatgcatacttgtcttactggatgaagaaaattgagggtacatgtaccttatactgtcaaggttgtttaaacatgataaggttaatcgccatctacttcaagttttagaaaaggaaacaagaagctaaaaacagctgctctgactttaatatctgactatatctttgatctgtttgcaggtcatccaagtgttttctaggaatatatttattttaggttgtctgaaactactattttttagactcctgaaagttgttcacatcaatgtgaagacaaattttaaatgaaaatgaagaatgaaattatgtcttgaatcatatattaagaagtaaaaataatagtgatcagg

SEQ ID NO: 99461 - DNA, 506 bp, Homo Sapiens
aggggaaggtgttctcaagcggttagcagctgtcagggcccaggcagggtgtctgcttcagggaggttctgcagctcctgtggggagtcagagggctgatcaggcaactcaaggcagatgcctcattgagactgggcactatgggcctgcggaagacatggccttgggagactctatcagggtggctctggcctgggtaccaccaggctgagtccatcagcagcagagaggatggcactgtgtagagaattggatggggcatggacagggcagggcgagagccgcagctgtgtgtagagatttaggaacaggcttagctctgaatctgtaaccctggaagcttgggagcctgctcagtttcttttccctgggtcctctgcctgttacttgaggagctgctgagacccatggtacctggctttgtggcctaaacagttaaactccctacaggggtagattatgaagatcagaattaaaaagctttcaggaaaataatactttataaa

SEQ ID NO: 99462 - DNA, 534 bp, Homo Sapiens
ctggaaagcagagaccagcagggctgactgcttgggagcaccaaatatccggacagcgcctctcgggaggtccgagaagagaaccgcgatctgtttcagcaccggggctcaggacagttcccagcgggctccgtttcgtctccagaaccctggacagctcctccagcttggaatgcactccctccacctccaaccagagctccccacaactgaccctgccttcttctgcaagctccatttcatcaagggaaacgatccttattgcctcaccatttcccacgtgaagtctgtattgacattctcatagacctgggatattgtgtctgcagcacatagtccaattattttcatgttatctactgacaggtctatttgtctccctgttacactgtgagctccgtgagggcagaaacaatgttagtattttcactgctgtgtccccagcgcctggtccggggcccggcacacagcaggcatataataagcatgtgttgaatcaataaaggcatcaaagaataaaccaatacatcaatc

SEQ ID NO: 99463 - DNA, 500 bp, Homo Sapiens
caggacatgggtgttactgtgcccatgtgacatttggggaacccaaggccctgagaaaggcagaaaaataacccacgcagggactctcagcccacaagtgaagctcttggaatgcactccctccacctccaaccagagctccccacaactgaccctgccttcttctgcaagctccatttcatcaagggaaacgatccttattgcctcaccatttcccacgtgaagtctgtattgacattctcatagacctgggatattgtgtctgcagcacatagtccaattattttcatgttatctactgacaggtctatttgtctccctgttacactgtgagctccgtgagggcagaaacaatgttagtattttcactgctgtgtctccagcgcctggtctggggcccggcacacagcaggcatataataagcatgtgttgaatcaataaaggcatcaaagaataaaccaatacatcaatcaataaatgaatgaatggcctcagcaaa

SEQ ID NO: 99464 - DNA, 615 bp, Homo Sapiens
cctccgcctccaaagtgctaggattacaggcgtgagtcactgcgcctggcccaagtccggaattttcaacaggacatgggtgttactgtgcccatgtgacatttggggaacccaaggccctgagaaaggcagaaaaataacccacgcagggactctcagcccacaagtgaagctgagaaccgggaatggaaaacagggaggcagcacagaggcaggaaactcaggtgtcatagcttggctcagcttggaatgcactccctccacctccaaccagagctccccacaactgaccctgccttcttctgcaagctccatttcatcaagggaaacgatccttattgcctcaccatttcccacgtgaagtctgtattgacattctcatagacctgggatattgtgtctgcagcacatagtccaattattttcatgttatctactgacaggtctatttgtctccctgttacactgtgagctccgtgagggcagaaacaatgttagtattttcactgctgtgtccccagcgcctggtccggggcccggcacacagcaggcatataataagcatgtgttgaatcaataaaggcatcaaagaataaaccaatacatccatccaaa

SEQ ID NO: 99465 - DNA, 392 bp, Homo Sapiens
cagatgtaagtaagtgaaggatcttaagatgagatcatcctggactacacccaatgataagtgtccttaaagagacagaagagaagacacacagagaacgccatgtgaaaatggaggcagagattggagggatataggcacctggaatgcagagggagtgaattcctgccaacacataaatttcagacttctgggccccagattgtgaagaataaatttctattgttttaagccactcagtttgtggacatttgttacagaagccctaggaagctaatacaaccctcaccacctgctttcccaagttgtgttaacaaatatctaatatttatttagcacttgttatattcagctttaaatagataattacattaaactttcacagcaatctt

SEQ ID NO: 99466 - DNA, 474 bp, Homo Sapiens
  misc_feature (62)..(76): n is a, c, g, or t
  misc_feature (325)..(353): n is a, c, g, or t
aaaccgtatttcaaaatgcatattccagcaattacctttgagatagttactgggactgagcnnnnnnnnnnnnnnngtgcagcaactgaaaaacacctgcaagttacagtttaaggtatacacaagctagagctctataccaagcatgcttgcccctgaagtggacaatgttagaaaaacttaatcttgctctttttcatattgtcttttggtaatgcatttacaatgaaccaatagtataactagaaagcaaaagtgtttttctggttctaactatcatgtggaatagaggtcacacctaaagtatcacagtactatttatttnnnnnnnnnnnnnnnnnnnnnnnnnnnnncaagatttaccctctttgcattgctttccattgctatgttgattgtattttcaactccttacactgtcttcagttgaagcaaagtttagacaatacaaaacaaatagcaaaagtaaataaa

SEQ ID NO: 99467 - DNA, 485 bp, Homo Sapiens
  misc_feature (102)..(102): n is a, c, g, or t
tgagtgaagagttagcagatgatttaaagtgtaaagtagaaagaattcatgctggttagcccattaaatacccgttaattaagctctccaaaaacgccattncaaaaatgtatatgataatcaaatatttattgcaatgtttcttaaaatagtgaaaaattagaaaacattatagggggctagtgttaaatcatggtgtaaccagaaatgaaacattatgcaaccataaaaaggagttctgaagagtagttcccggcatgatataatgtgaaaaaaagcaaaatacgaaattgtgcaattctaattttgcaaaaactttcagcgtacacgactatcactgtataaagtcacaaagtaggaatggtgattgtatcttggagtgatgagattataagtgatttttaattttcttcactatgctttactgcaattaaacatttacaattcaattttatttaacaaaaatatataaaacttctcaaatg

SEQ ID NO: 99468 - DNA, 704 bp, Homo Sapiens
ttgctctgaacaaaaatattagagttacaatattactatattccaggccttgctagaaactggggataaatctatgaatatggtcgcttccctggaagacctcacagtccagggaagccaaaccctgcagacatgcagtagacttagtggtctctcttaaggttgcttgttgagttttgacattggagattatgtacagacttgaatgactagttagcctcaggcacagcattctgttgctgggggaatcagctgccctcctcaggcctgggccaagtacacttagagatcgccctcgtcacctctcccatcctttgctgatgcctctgttctagtaacctctgactcagcttcgcctttagagatactcatgctttctggcaacagaggtccttcaaacccaattcctattaaactccatcacttaccagcctctttcagggacagcagttatccgcatttccagtactgtcctggccagatgtgtgagttttggcaattccttttcctctctctggactcagcttctttgtcaaccagcatcataatctctgcccagccttccttctatcctgggctgatgtgaagattggataagaattgttcaagaggtcgtgtactgtgcatattgaatgtgattatattgccaaatagcactgtttgttatagtttttcattaaagagtaaactttgcctctgaaaaa

SEQ ID NO: 99469 - DNA, 382 bp, Homo Sapiens
cattgagaaagtaggtggaaagggtgcgtttgcggctctgggcttgccgcacttcctttttttctcggcgtccttgcagccctgaccccgtccagtcatctgccccctctcccactgggcaggaccatcatgttggccaacccacctcccccagaccagccaccctgtggccactgggctccttcccttcctctccccagacacctgtctcgaggacccgggttgtaaaatcaagtgtctgggagggccagcccgcagggaaaatgagcggggctgcagtggacagctgagaggaggggacactggtcgactggatggcacatgcttcgtctgaaggggcgagtccccacgccacacattctgtgcacccagaatgacaaga

SEQ ID NO: 99470 - DNA, 305 bp, Homo Sapiens
ccctcacactcctctaccctccacctcaaatcagctcaaggcttcagggagcttttttaacaagggccactacactagcatgttctagttacacacagtcagtggatacagaaattctcttagccaatttgagataaaggtaacaggttcattttcactactgcttgtcacctctaccactataccccatcacctgaaccagctgatctggtgacggcaaagagagagtttaaaacaagcatctgatgagaattctatagttaattttatactttgcggggaagctaccaatttattttatcaat

SEQ ID NO: 99471 - DNA, 515 bp, Homo Sapiens
tacacatctaaattggatagtcacaactttttagacagatgtcagcaattctgttaccttggcaatcattacatacaagtatactttatatgcttgccagactaataagataattcagtcttagtgtagccattctttactatctaatgtaaattaacacatgactggtgaaaatccaaaatctaaagctagaaccaaaacagtcataagctactctgagacaaataccacaaacagcagtgcccagaatttctagtgatgtctcggtctaatgaaagacctatacagttaattgaactgtttcttagcccttctcagaaggctgattttacccagattaaatccaaatccaatattgtttttttctttatatcagcccagaatttagagttattgatttgcttttgtcagtaacagagttagcagtgtgagtcagcagcctctgaacccctcaggtaggaagactgtagaaggtacttaaaaaagcatttattactagaagactgaatgagatt

SEQ ID NO: 99472 - DNA, 547 bp, Homo Sapiens
  misc_feature (22)..(22): n is a, c, g, or t
ccagtactccacccttccaganagccgattatcttcattgcttttaatgttctattctgtggcatatggttttctgttactttcgttgtcaaaatgccatacccaaatacacagcaatgaatggcacacaagtaatccacataatgcataagccacaccaaaaccagactcaatttaaatctgctccaaatgagtccatacccatcttcatcattggcatttgaacaaaagacttacttacaaagttgctggcagatgtatttgatggttactcttttgtaattcttgtccacttgtaaattgtttttactctttatacatacttttcagactgcctttcttttgtaatttatggacggtttataaatgaatgacaaagctttccccattgtgtcttcaaaaacgctattataaattgtaatataatagtatgtggtagatttattattaaaggaaatccatgtgtggttaagctctgtgtgggtgtgtgcatgtgcacagttagtgtaaaatattttctagaaataaaatttgttattttatacaa

SEQ ID NO: 99473 - DNA, 473 bp, Homo Sapiens
  misc_feature (15)..(15): n is a, c, g, or t
gagccgaacatcagnacccctctcaggcagcccagcactttctgagaggtcaaagtctggaccatcagcctctttgatttgaaaaacccctgtaggagcagctcaggcctggcactggtcccctacagagggcctctgccctgccactaatgccaaatcaagccatcaacccgagctttcaaaggccaggaaggcctcacctcagcttaaagacgtgcttcttcttcttgtagttggcagcaatctcacagatggcatgtctcagggccaggggttcctccccatggtagggcatccccagggccaggttcttggcatccttgtagaaggttagctcactgttcctgagcacacagtacaggttgttccaggacctgcaaagatgcagacaggcaggtcacccacatcctgatatggtatctctagagtcaattcctatagcttcaccattaaaaaaaattacaccatgaaaa

SEQ ID NO: 99474 - DNA, 481 bp, Homo Sapiens
  misc_feature (442)..(442): n is a, c, g, or t
ttcctgcttccagtttaagaagttcttcctaaagggagtaggatcaggaagataatcacattttctaaatatgtttcaatcacattttaatctataattccacatatagtttctacatcaagtcgtcatcctgttgcattaattttaaagagcatgcttctagtgtataaggttgaaaagcattcttccccttatagattactaaagatttattattaatgggtatactaattttctttagtcttactttttatttatcctttttaagtcatcaacaaactttttctgagtatttgattacctttctttcaaaccgtacagtatctcctggatttgtttctctttttatttaggtactttctccaaaagtgattcggagcttggatggaaaatcttctgaagctttgatggggcatatgcttatgggtgcgcgtcgcattgnaataactattttcagaacataaaattgtaggttcaaagt

SEQ ID NO: 99475 - DNA, 448 bp, Homo Sapiens
cctcgtgcagcggcgatgggaccagggtccagagcaatggaggctccgtgcctgggagcgggttctgccggctgcggaaggataggggtggcacagtcagccgccttggggacacaggacataggggacccaccaccgccactgccgctcccgcagcagctcgtgccgccaccacccacgcctccttgctgcagccagcgtgacgacagcggctgctccggaccacccgcaagcggccatcacggcaagggactaaccgtcgtgtaactactgtctgccacaaaaatctctattattatctttaaagggaaacttcttcttaaactaaaaatgcttttgttcctaatatattgggacatcgggacatttcctgggtctgttgtttcctgggtctgtttggtaaaccttgttaacctgttcccttcactataaacatcctgtgacttag

SEQ ID NO: 99476 - DNA, 635 bp, Homo Sapiens
tttgttgttgttgttgtttttaatcaggagtcttcctaagttgagatgctgacattcatggccacttattgtctggttgtaattcaaatccaatgtccagattctacccattaaagaaggtaataactggaaataacttcattaatatcatgttccagtatctgcgggctctggttgtatgggagaaggctgtctaccattttgctatgaattctaataacctatgccagatatatagtcatggggtaacccccattataaagcttctagtctacaaaaccaagagaaagcttgtcaaaataaatcttaacttctgaccacggtagaagacctactacggggtattaacagtcagaactgccaatcactgcctggtctaaatgtttgtattaaaaattccaactctggtggcatgaactttggataaaatcatcataagctgtgtgagtccaaaaaatataaacccagaatgaaatatatttggggctaaaatgacgttactaatgtctgagatgggtctccctctccccctttgaaacgtgatgcttttattagattatttctactgccaaaagacacagctactgtctggctacattttctggttttctcttcaattaaaacaaataaataaa

SEQ ID NO: 99477 - DNA, 694 bp, Homo Sapiens
tgcggccgcaggggcagcggcgacggcagcaccggcggcagcaccagcgcgaacagcagcggcggcgtcccgagtgcccgcggcgcgcggcgcagcgatgcgttccccacggacgcgcggccggtccgggcgccccctaagcctcctgctcgccctgctctgtgccctgcgagccaaggtgtgtggggcctcgggtcagttcgagttggagatcctgtccatgcagaacgtgaacggggagctgcagaacgggaactgctgcggcggcgcccggaacccgggagaccgcaagtgcacccgcgacgagtgtgacacatacttcaaagtgtgcctcaaggagtatcagtcccgcgtcacggccggggggccctgcagcttcggctcagggtccacgcctgtcatcgggggcaacaccttcaacctcaaggccagccgcggcaacgaccgcaaccgcatcgtgctgcctttcagtttcgcctggccgaggtcctatacgttgcttgtggaggcgtgggattccagtaatgacaccgttcaacctgacagtattattgaaaaggcttctcactcgggcatgatcaaccccagccggcagtggcagacgctgaagcagaacacgggcgttgcccactttgagtatcagatccgcgtgacctgtgatgactactactatggctttgggctgcataagttc

SEQ ID NO: 99478 - DNA, 542 bp, Homo Sapiens
  misc_feature (367)..(381): n is a, c, g, or t
agaatggacgagattattaactcttcatattacatgctataatatttaggagataatataaatttttccttttcctgtgaatagattaaaagctgccttatatcagtattattaaattcatttgctcttaattcctgctttgctttttatatatctgctacataaagtgcccaaagtcttaaattgttgtgcttttttggacatcaggtacataataataagggcaagtacactaagtgtctgtggctagaatggtttgttatataacttacttgttaatgtaggttgcatctgtaagataacgcatttcagctgctgtgcatcgtattaaattttctagcaccacacgtgagtatgttaatggacnnnnnnnnnnnnnnncttattttaaatcttgagttttggtgccaagttttctgtgtgtgaggctctgtttctggcttatatgttggtcattattatttgccattgtttacatctaaaaattaaaacgcacaggattaaatctaacttgtgaccaaactaaatgtttgtgtacttta

SEQ ID NO: 99479 - DNA, 483 bp, Homo Sapiens
tcgaagctgcctcagaatcaaggtccctctaaccttctctcccaagaatagggaggcactctctctagaatttcctaatctgatcgagaaaacgtctttccaaaagaaacaaaattgccttcctcccctctccgaaatctcatctagctcagaaaagaagactgaggaaggcaactacgcctggatggatttttcacaagatgatgcctgtttctcgggctcattcaaattctaaagagaatcatttacaagttaatttctgtccattttttcgccctaagaatcacttgctgccctcagaagaattgtctatattctccatctctccccttcccctatgaaaaagagtgtatacgcttctgtaccccattgggttattgggtaatcattctcctgtgacccttcccttcccaccccctcgcctccccgccccgtgctatgcacgttaaaataaaattttgtatgtcttttctcctattaaaa

SEQ ID NO: 99480 - DNA, 516 bp, Homo Sapiens
  misc_feature (149)..(189): n is a, c, g, or t
gcggccgccactagcgctggggcgcggggagagccgtcgccggcgctggtgctgggacgcagcgtgccccaggcggctgtccccgtgaggcccctggcgctgcacctggcgcacaaggcgcgtgggcccgggggccctttcggcggggnnnnnnnnnnnnnnnnnnnnnnnnnnnnnnnnnnnnnnnnnttgctgcgggatccgccggccgaagacgcccgggaagaggtggcagctggccctgcggaaaagcggcagccgccgctgctgccgcctaagggaaatccctggaccaaaaagcctccccagcacctgtccccagacacgacaggtccgccaccgcccccgctggaaaccctggaggcagaattcggttccctcaaaattataaaagcaggaaagctcaagacaaagaaatccaacaaggctagtgatttcagtgatatggagaattggccaacaccaagtgaattagtgaacactggatttcagagcgtcctcagccaaggaaataaa

SEQ ID NO: 99481 - DNA, 485 bp, Homo Sapiens
catggaccacgtgtggattagttcactgaaccttttacccagccttatcccagccttattcccgcttgtaattcttctgaggcacagttcagccaagtcaaagaaacatgttattaaaggtgagctgaaaggcatttaaaaaataaacaaactgtttaagatcctaaatcagtaacagaatctatatgcacagacttgaaaagtacaagaaaatgtgtttcaatgccttttggttccaggctggattctcctctttccttctttgaacatctccccaaagtcttttttggtagttggtgggacaggcagccccaaggctaactttggcttgtagcttttttgtaactaatgacttgcctccactgaggtaggtgagaccccaatcttatacctacaattctccaactactattgaggggaaaaaataagtactttgattttattttagcactatgttcttaagaagtttaaaatctgatatacat

SEQ ID NO: 99482 - DNA, 583 bp, Homo Sapiens
  misc_feature (360)..(387): n is a, c, g, or t
  misc_feature (390)..(390): n is a, c, g, or t
tctccatgggtgtttcagcttcaattgaccaatcacataacagttatatgtttggggggaaaaagaaaagtttctaaaaaatgtagcccattacatatatgggtatgaaagcagaaaagtggaggaggcagggatatcattgacaaacacctttgccagtttctttgtattcgtgattttttgtgctattaaatgcagtattaaaacaagaaaagcccacctgggctagtgaaaggagaggaaataagggggcttgtaaaaggggagccgtcgctccaaaagtagagaagacaagaaatgctgtaagataagcaaccaacgcagacaggcctcagctaagagtatagtgtgtgtgtgttnnnnnnnnnnnnnnnnnnnnnnnnnnnntangctgtatgatatacttgagcaaatcaatgaacctctttgcgattgttttatcatctgtaaaatgcagataattcctaccttaaagggttattgttaaagataaaatgatataaaaatgtgtcaaagtataaagtaaaaggcttggaactttgtagggactcagtaaacgtttgttggatccaaacctgaaaaa

SEQ ID NO: 99483 - DNA, 406 bp, Homo Sapiens
aaaggcagaaatactactatttgcagatatgatggcccacgtggaaaacccaaatagtcacctaagacgttctcagaatccataatcgcagcaagtagctatgtgtatgatgaatagggaaaaaaacactttctgttattccaacaataattggtagtaacctgagcaggggtggtgatgggaaaatcgccttatgatagtcataatacatttcttagaaataagaatttctaacaatttgagcaggacccatataaggaaaactacagctctaccatgattgaggattggggaactgaacaagtgcagtaccaaagaaaattccatgagatctggtaaaatgtgtcaaaatcctaaactttttcatccgtatgaataaactaataaaaataactaagatgtatta

SEQ ID NO: 99484 - DNA, 926 bp, Homo Sapiens
  misc_feature (719)..(753): n is a, c, g, or t
gatgcattttggtgggctgtggtgaccatgacaactgtgggctatgggaccatgaagcccatcactgtagggggcaagattgtcggggtccctgtgtgccattgcgggtgtcttaaccattgctttgccagtgccagtgattgtctctaactttaactatttctaccacagagagactgaaaatgaggaacagacacagctaacgcagaatgcagtcagttgtccatacctcccctctaatttgctcaagaaatttcggagctctacttcttcttccctgggggacaagtcagagtatctagagatggaagaaggagttaaggaatctctgtgtgcaaaggaggagaagtgtcagggaaagggggatgacagtgagacagataaaaacaactgttctaatgcaaaggctgtggagactgatgtgtgaatctttttccacctgccactgctcccccctcagcatctccaaatatatttatgcatagagagtgcagttatgaaaatgaaatatgcaaatgatccaatgcatacagtagtacactatttaatggttatacatggcataattgttactaaacttgtattacatatcaaataaatgatacatcttggagaagagggaggaataggagcaaatctatctttatatttttattagaatgcaagaattttgcacattaactggaaaagatgttaacagtaaagatggagagagagannnnnnnnnnnnnnnnnnnnnnnnnnnnnnnnnnnaagtaaattgtcaatgttagtaattgtgcagtgaagggaaaagttggcattttgaagtatttactatgtaagaactaatgaatctgagcagtcatttatcagtgctttaacagcatatcgtatgtctttggattctgtagttgttttttaaaaattgtaagaaatactgtgta

SEQ ID NO: 99485 - DNA, 426 bp, Homo Sapiens
  misc_feature (273)..(290): n is a, c, g, or t
ttaggagggggagagccaaagggaaggaggagaaagaggaggcagccccctcccacgctcccacccccacacattcaggcaccttctgagtaactgatcagagcaaagaactcatcacccacgtttgaaaacccagtttgggactaagtcccgatgcacacacgctcgagtctatttatagacagatcctaatgatatgtattgcattctgaacgtaaatgtgaaatgtgtgtgtgtgcacggattacatacggttcctttgacaggtatgannnnnnnnnnnnnnnnnngcactgcagtgcgtctgattatatctgtttggattttcttctttctttttttgcatctagaaagcatgcatcaattttgaaggtgttcgggaaaaatggtgggggtctcaatgcttacaaaaccctggctttttcc

SEQ ID NO: 99486 - DNA, 411 bp, Homo Sapiens
ggtaacacaaaattacccaaggtatagtaaacaaagaagacacagacaataaaaactaacagatgccacattttgcaaacatagcatttggctagaggcagaattataaggtatacatattaaaacatacatccaagactctcctcctcaatttgaaaccatgtttatcaagtttttacttcattgtatataagccaaaaaattaagagaaccttgatttgttcctgaaatacaagatttccttgtattattactggaccaggtagactggatatgtgaatgtttaattcatagttagctagctttaccatcatctcctgaatcagctgctgaggatgcctgtgcctctgccaataactatatatagagtatgctttcaaaacaatataggccgggtgtggtggctcacac

SEQ ID NO: 99487 - DNA, 485 bp, Homo Sapiens
atgcaaaccaaaatcacaatgagatgccacattacccctactaggatggctaagttaaaagatagataataaaaagcactgagggatgtggagtcatcagaaccctcatgccctgttgatgggatataaaattgtgtcaccacattggaaaacagtttgggagtccctcaagggttaaatagagtttcatatgatccagcaaatctgctcccaggcatataccaaagagaaatgaaaacatatgtccacacaaaaactcatacacaaaagttcctagcagcattatgtataatagtcaagaagtagaaacgatccaaatgtccaccaatcgatgcatgataaataaaatgtagtactaccattccatacaatggaatattacccgatgaaaaaataaagttgaacacatgctacaacatggatgaactttgcttataagaacattgaaaagaaaatgccaaaagaaaaatgagttttagctcaaa

SEQ ID NO: 99488 - DNA, 446 bp, Homo Sapiens
atgtgctttattacccaggggtacagaattatagctgctgcataaacagtgtatctttctgatccttatacttccaacacaccttagccatgcctacattgtgtttctctgaaaatggatataggatttgcaggaagtgggcagatgagtcccttctgactgctaaaagccctgatggagtagcaaggcatctgaccaggactttctgataatcctttatttactcgttcaaatgccatagttccactgtcctctccccatattccacagtaggaagaaaatatgtgaatgcttattcagtaactatgggttaaaatcataagtttctagctatatttaataccaatttagatgcattccttttatgtgtatgacaatattctatcatgtgttgttagatttaccgtcacacactaatgaaataaaaacacagttttctaaattgc

SEQ ID NO: 99489 - DNA, 516 bp, Homo Sapiens
  misc_feature (12)..(12): n is a, c, g, or t
  misc_feature (81)..(121): n is a, c, g, or t
catgagctgccntgagctttggtcgttggggaggtggctcaaatggagccagcggctgtggttgacctgccttggggagcnnnnnnnnnnnnnnnnnnnnnnnnnnnnnnnnnnnnnnnnnatgccctctctccagaggacacacagctctggatttctacccccttgctatcctctctggccattttgaacctgtaccacctaatgtagaaaaggcccgcctccagtgcccttctttccaaaacagctacacaaatgcttctgaatgccctggatacgcagaccgagtggcagtctggctaaaggcccatccagcactattgtgcccaagagccttaccgggcattccctgaagccccctcataggcagtgatcctagaccaaactcttaaatagaatcacttttgtttcctagaagagatcaaagagtggttgcttcttactttgaagatgaaattataccaagttaggttttttgctatctattgatccaaaaaatatattcgtgcaattaaa

SEQ ID NO: 99490 - DNA, 558 bp, Homo Sapiens
tagcttaaattccctcctcccttttgataaatccacagggatcccttcactctgtcaggaaatggtgtggtttccaagcattagcccttcatgatctgtctggtgcatttctgtgctcctgggatcgccaagtgcaggcacggcatcgcatccccaggtgtcatcctgtgacccaggaggggaagatgacacacccaatttaggtaatgctgcacttcttgttataattggttattggaaaatgtgcctttattatcagaacagtggtgtgcgcatttctgattatggagctaacttttggatatctgacttagatactaaaaacatttgggtgttgcagttttgcacttgtagatacaacttaaaagcatgaaactggtgatttaattagatgttttctataaaatgcaccttgttacatttctgtgaaagggtcttaccagcgtggaataactggctcaagggttgagagaaacaaccattttctaaacagttaattgtttaaaggactatacatgtaagtctgcaggcaataaaggctgttgtgaaaagtaaaaa

SEQ ID NO: 99491 - DNA, 462 bp, Homo Sapiens
  misc_feature (143)..(173): n is a, c, g, or t
  misc_feature (402)..(402): n is a, c, g, or t
tcatgtaaaattgagtgtgtgaaggtagtatttgaagaagtactggagctctagtattagaacttgaaaattaacagaagcccaagagaagcaacattatcttctcttagccctaaactaagttgttacttttaaaacgatannnnnnnnnnnnnnnnnnnnnnnnnnnnnnnagtctcatggtcagctctaaattgttacagaatttatttggaaaggagttcaattgagtcatgttaatttctgtttactcttctagcaagggaaataatttgctaccagattttgctagacatgcttcacaaaatttacctggatgaaaagcatcaaagacacctgactatgctggcattacagactgacaaaagacagaaacttatcagtatctatggtgaagagganagaagtagctaataatttcatcattcaggtactaccacagaaatacttaacagttaaaat

SEQ ID NO: 99492 - DNA, 575 bp, Homo Sapiens
  misc_feature (540)..(540): n is a, c, g, or t
taaaaatactcaagacttcaacatttccttacaaaagtatacttggccataaaataaaaatctataaaaccccaaatattacaaaagtaaaatgcaaaaaaattttgtatacaaatgtaatacaatctttacatggtaaggattatttaaaaacacacagaacacttcctaagtgtggatgtgcttgggagctgaactcatcacacacctctgctctgaccattgcacagacctagcaggtggcagagcgggtgcacggcccctggcatcaagtctcagtgttggcaggttttaagctccccccgtacccattcatacttgcatcatctcttgtgctggagaagcttgctcaggcatatggggtgtcacaggagctgcggcacctgccttccaggagcctgtatataacctatatcctcgtgttactgctttaaaatcaagccctggagctgggaggactctcaagagacgaccctgtcctctgggccagtcctgacccactctggcagcgagtctaccgcagcctgctggagcactatntcaccctggcagtcagagggttccactgcagccat

SEQ ID NO: 99493 - DNA, 382 bp, Homo Sapiens
aaagtaaactgccttaagaagagccaaatcattgtgataatgacacatggcaggaaggatcattttgagggttatttgacataatatgtgctgtcagcacagtgcctcacacagggtaagccctcaataatgtccttgttattgatcagtagtagccaagatgtcacagcttactccctgtgatctcaaatcaggactcaatcctgagaatctggcaattgcttaaattgtagccttcgtctgccccatgtaaatagttgctgtgtatgttattctgttggtactttgcacaaaaatattttctcaattttttaaaaaattgttttccaaactgagaatggtattaatatggatttatgtaaataaagggctcagagataaa

SEQ ID NO: 99494 - DNA, 558 bp, Homo Sapiens
  misc_feature (38)..(38): n is a, c, g, or t
ccatggccaactttaagctaccaaggtgaaatcactanacatggagttgggaagagaggcacatcatcagctcctgggaacctgcagcgcacagtgtcagagatgacccagtctaagtgaatcagaccatttatccctctgggcctaggactcaagccagaccagctccttaggtccaattcctttgatttttttaaagaactgttgtggaagaggcaccatctttcactgcgttcgttgaaaggaaggaattggaaccaattctggtgatctactttccatgtggtctgtttggaaagagcctggctgagaatgcagaccctcagagaagtgactagcagagctgagagatggagacagaccaaattctgggatcactgttggagtccttggatcttgtccagcctgaacctctggacattgctgttacatgagccaataaatccccttcgtttctctgtctctcattctgtttctcttcatctccctcttatccattatttgtttattaatttttcttctatcaaagctgtttggtttttatttcaatgaaaaaaa

SEQ ID NO: 99495 - DNA, 634 bp, Homo Sapiens
  misc_feature (244)..(253): n is a, c, g, or t
ttaccattctgaggtttaggagaatggaactagaataggtgattagactattcataatgctacaaacttttggagaaaatcttagagaaaaaagtttttaacttagtcaatctcccaaaatagaaaagaatgagaaaaaacagtaacaaaacttcagttaaagattacaggaaaaaagtacaaagaatgcaagtgggtggttgggtagttttaacttaccagaagatactatcagagcatattnnnnnnnnnncagaagtattacttaggcttaaaaatgaaggaaattctgacataatgctacatgggtgaaccttgaggacattatgctaagtgaaataaggcaatctcaaaaagacaaataagtgctgtatgattatatgagatgcttggagtggtcgaaattatagagacaaagcttccagaggcgaagggaagggagcaatggggagtcagagtttaatggatacagaatttgttttacacaatggaaggagttttggaaacgggtggtggtgatggttacacaatatgaatgtattcggtaccactgaactgtatacttaaaaatggttaacgtggtaaattttgtgttccgtgtattttgccacaataaaaaaataccccactaaaa

SEQ ID NO: 99496 - DNA, 444 bp, Homo Sapiens
ccatgcttgccaactgcagtagaatttttctaaatttttcttaaaaggtgcacggtttgatggacccttggcttgatacagttttgatttctaaaaatgatgattgtgctgggtttgaatttcacaagaaactgtttggctgtagtggagtgactatagaatgagagaactcctagagttacatagtagaattctagatcgtcaagactatagcattcccctgcccccaccaaatacggaataagttatttcttgcttgtgtgcatactgtccccatattctttaggaagcaatactgcaacaaggatatttgtgtccttttgtgacatttgaggatgtgtcatgctcactaggtgccctctactgtcatgttcaccatggttgagggcatttttaacctctgcctaaggcagtaacaaatgggttgttggcttctgaaacagg

SEQ ID NO: 99497 - DNA, 448 bp, Homo Sapiens
agtaagttgctacacctctattagcctcagtttcttatctgtaaaatgggacggctaagtacctatttcattgggctgttgaataatgatggtctcatctatgcaagggcttagtaccagctgggtgaaactcagtgaatggcaggcaaccctattatgactaggcttctgccaatgatcagacttgaaccctgtgctcatccccccatcactttgtggaactagatgtcctacgttgcacatggcttgattcatggtttggagttgttttctggttgtttcctgtgtgcaggtttaatctcaacctgtgatcccttgaaagctgcaattttatccctccccgtcctcctccctctcaccccaaggccaagtttaatactgtgcattctgaaatcttgcaatgttgatgatgtaaaataaatcttctctcctgtgtttaagaagaata

SEQ ID NO: 99498 - DNA, 439 bp, Homo Sapiens
gcggccgccaccagccggaatagcaaccggcggagcccgtgcgcaccgcagcgcagcgcagcggccggggggtgcgggcgccctcgccgcccggctacctaccgccgcctgggcgccgccgctgcctcccttccccgcttctaccctccagcagacgcccgccggagcgacccctcccagggtgaccgggggaaggtgttccacgtggccatagcgtttgcgtcacaatgacctggcggacaggtgggagccacagcgtacaccccaggattccctctgtgctgtgcgtagtgcctactgcttgcttccaggttaaatttctgtagctttagaggacaggagacttcatgacttcactgccaagaaaagttacagaggcctgctgtacctggaaatcaagtttgagcttcgagaataaaggtcatgttttaaaaacaaa

SEQ ID NO: 99499 - DNA, 542 bp, Homo Sapiens
taaatgtttatgtaactttgaaaaaaaagcctttgaagaaaataattgaatgctgtctgggagacagaattctttcagcacttaaagtacataacacactacttttacttttcccacttgattttaaattatcagggttattaagaccttaaaattattttaccaggtttttacatgtgagctgtgacatgactggcattttctttgatttcagcgtatgttggtctctacacatgaaatttgtgtgacttaaaactttctctaaaactgtacttttagttatgatatgcatagaaagcagtatcaaatattgcgtcaaatgactaataacacttaatttctagagttgtggttttattgagccaaaagttgatatgaaaaaaagtcagtaaggaaagtcagtgaagtgcttgcttttttgataattgcactcccaataattttgatattccaacgtacttggtttgcttgttttcacgttaatgttttctgtttattggagtgggaaggcattaaaattgtcattgaagactttgtctttg

SEQ ID NO: 99500 - DNA, 205 bp, Homo Sapiens
ggcaaagtgatctcaacatgtaagtagttgcagtaaaacacaggggcaaaggaagacaggcctgatgtgcccactcatctatggactcagagctgtgtgctttgctcctgcatcttgttgaggtgctgttccagctttgcatttctgtcaagtagaggcgaatatataaacagtgtggttgaatacatttaatgccagccattgg

SEQ ID NO: 99501 - DNA, 447 bp, Homo Sapiens
gaggaaggaaagactagttgcagttaccattctctggtgagctctgactggctttttacaaacagggcttctctttggttgaagtcagccactaagttcatctttaaacatgctatctcaaattccccgaagccacccaaaatgtggtatgaatgaggatagagttacacagaattcagactgctttgccctctcagaacttctagggaacttcccttggtgtttccttccctaacgagctcagccacttgtaaccagcttattgaaagggctgtgaatgtattatgttgattccttttctgttccaggttattatcttgggaataacccatgttttgttttgttttaccctcagtcgctcataactatttaaaacagtatctcactttcaagtacagatgctcctctacttatggggctatgtctcaataaactcacgtaagtaaa

SEQ ID NO: 99502 - DNA, 654 bp, Homo Sapiens
  misc_feature (262)..(271): n is a, c, g, or t
tcagccttttgtacgtaaaatgagaaattaaaagtatctgcaggtggatgtcacagtcactattgttagtttctgttcctagcacttttaaattgaagcacttcacaaaataagaagcaaggactaggatgcagtataggtttctgcttttttattagtactgtaaacttgcacacatttcaatgtgaaacaaatctcaaactgagttcaatgtttatttgctttcaatagtaatgccttatcattgaaagaggcttaaagnnnnnnnnnntcagctgatactcttggcattgcttgaatccaatgtttccacctagtctttttattcagtaatcatcagtcttttccaatgtttgtttacacagatagatcttattgacccatatggcactagaactgtatcagatataatatgggatcccagctttttttcctctcccacaaaaccaggtagtgaagttatattaccagttacagcaaaatactttgtgtttcacaagcaacaataaatgtagattctttatactgaagctattgacttgtagtgtgttggtgaaatgcatgcaggaaaatgctgttaccataaagaacggtaaaccacattacaatcaagccaaaagaataaaggtttcgcttttgtttttgtatttaaaa

SEQ ID NO: 99503 - DNA, 474 bp, Homo Sapiens
agatgttggttctcagtggtgctggacaattgtttgcaggtatcgtgctctctcctcatagaagttttgatacaatggaatcagagatttcagagcacggcttgcacttatagctgttgctctaaccacaatgggtagaacctttccattcacaatagcaccatcaaaaaggggaccaaagaagggaacctctggttttttcattatctgaatactgaacatgtgatttttcattggatatatcacaataaggacatcaccaaattctgtgggaataattcctctcctgtagtctctagtatgctctgaccaaacaatgtgcacttcatcatttcccaaatgtctcaactggaaagacaagaaaacaatttatactgctttaaaagctctttgagtacagtcatacagtcacatacaacataaaaaggggaaaaacgaaattaaaaaattgttaaattgcacttgatcagtttt

SEQ ID NO: 99504 - DNA, 345 bp, Homo Sapiens
gcacttaggtcagcagtcataaagtgacttgcactagggccacaaaaaggatttacatgtcttaacagtcaaattttttagtagcttcaaaaaaactggcttttttgtttcttaaggaaaaaactgaacaatttgtaaattggtgatttaaattggtatagaaatcagaaatttggattatggtagtcatgtttttgaacaaatgtccaaacattcctagaaggcactcttgaggtaaatcagttaatttaaaaaaagaaacgagagatttttattaacaaatattaatatttggaaactctagtacaaattattggaatagttaaataaagttataggtcttgc

SEQ ID NO: 99505 - DNA, 437 bp, Homo Sapiens
tgggctgggccgtgggagtgctggccaacgtgccaggcagggaggacctgaattcctgaaggtggtggtggcagctgttagggtccacaggttaatgatctccaacgtcacacagaagagaatgtgctgaggtgtgacctccctcaccctgccttggctgcgtggggcaccgtctctccaggactcaccctgccccccaatagactgaagtctgaagatcagcccagtcttccttcaggcctcaatgccctctcacttccccagcccgagggactcctggctcttctcggaggctgctctgtggggtccctcccttgggcctttgctaatgctgtgccctctgcctgtgccaaaggtgggcctgggcccgtttctcagggagctcctgaacaccaagaaattgaattgctttgtaaataaacaaaaagtgccaaaaa

SEQ ID NO: 99506 - DNA, 522 bp, Homo Sapiens
agtttcagattttgtctgaccgtatgattttcgtagaggtagacagaattacagatacctatttaggaatgtctctgaaatccaaaaaacatggttagaccttataggattgtataatgagtttcatcacgaagatctgtccttgacttggggccagaacaaaaatgttgcccaatcaaacggacaaaactaagccgacagcttcatattgggaacatttataagtctttaaaaattaagacaaaaattatttgtataagtatctatgcattaggtggctttatctgatttccatttagtttttagtctgatttctagttagttgtcttgctaacttttccaggagctttctcctatccaagtactaaccaggcctgatcctgcttagcttctgagaacagatgagctccaatctgaaatataacagcacttgtattcccatgagtttctcatatttgaaacatctgcattattttgactcctactttgtatagttttaaaagaagtcatgtaagtctcaaa

SEQ ID NO: 99507 - DNA, 587 bp, Homo Sapiens
  misc_feature (435)..(449): n is a, c, g, or t
tttttcaattaaaagagatattttataaattattcacggaaaaagataaacagaccacaagtaaacccaatctgcataaggggcccaatatctttgtttttactatacaacagtaaccacgacccaaatctagggtagaggagagctgctaatttctaccccaatgctcgaaatcttgtcaggttttgtgtcagggtagaacacatttatgctacaactaggttatcagagcaatacacacacaaaaaaacataatggtgggttgatttggactattttatttttgtccttccccaaaccatctggcgtgttagtgtaggggtattgatcagggatctgtgagctgcagaccccatgccaatccatagcgtttctggcaatcagcgtcgcccatgaattgcagctgtctgtgcagctcctcaacagaaatcttcnnnnnnnnnnnnnnntttccctcccttatcaaacacatcatccgttcgggggtaagtcaatatcatttctttgtcattctgagggcgaggattatgcggtagaaagtttttgttatctgttatagctgctgctgcgcctgccttttttttaaa

SEQ ID NO: 99508 - DNA, 565 bp, Homo Sapiens
gcggccgccactcccgtcctgagcaagccacatctgggggctcctgggctcttcatgggtcacagagccactaagtgggctccctgggggcgagggctcagaatgtgcgggaacctgctgggttccagatagccacaagaagccctctccttccccagggactcactgaggaaaaggcagctactaacccagcatgccaaagagctggatgaggggtcagcattagaagaaaatgtcaaaatccagtagtgaaaaacagggtaaagcaaacaattctcctctggcccctctcctagaaaactgtcaccattagctcactgcagcctgatagccggtgggcccctcattcacacattcacagtctcacagccctcccctcagtcctcctgccttggaggagaaagcaggtgccctcaggaagaaatccactcttcctcctaccaccaactctagcaggcactatcaggctcagaagagtgaaaggcctgcagaagtgcaggaagcaatacaacaaaacatcctgtaattccgctccaggtgataacctaagcagcaagcaaggaag

SEQ ID NO: 99509 - DNA, 393 bp, Homo Sapiens
cagcacctggcctacatattacatttaagtctgtgatgcattttgaatttttatgtcaagtgtgagatttaacttgaggttcctttttgtggggtggatagtatgttcgggtgttctggcacctatcttttctcattgaattgcttttgcacctttcttaaaaatcagttgagcatatttgtgtgagtctatttctaagttccccattgtgttagattgagctgtatgtgatctatatgtatgttcctctgtcagtcccactgtcttaagctgtagctgtttaagtctgaaattgggcagactcattcctcctactttatcctttattttcacaattgtttttagatattctaactcatttgtctttcccatgtaaattttagaataaagtga

SEQ ID NO: 99510 - DNA, 633 bp, Homo Sapiens
ttgaatatttactgtcttgtccagtgtcctgcagagtgtgctcctcggctgccatacgcgccagcttcctctttaaaatgatttgtactgttagcttggcaatacctgcatcagcagctcaaccatttataaagaaacaacatacaaggaaggctgagctgaggaatgcagatgtttatggtaagaaggaacaaaaaatgtaattcatcattcctaaggcaaacaattaataagaaaaatacatttactgttagtgaaaaatacaaatggtaatccatacttcatggaactacgggcttcttccatggggaaaatggacttaacattcagatgttgacaatttcggaaggcagcttatattgtcatctacaatctgaactgaaactcagaaatccaggggatgcatggtcaggaaataaaattcttcaacttattttttcttggagaatttaatgagattttataatgcaaactgtatgaagactgcttgatggcttgagcagtgttcagatcacagcatacatattcaaatgattttaatatttggaaagactgtcagagggttgtgtccgtgtaaaaaaaattgttaatatgagacaataaaagcaaatgcaagagggaaatcttagctat

SEQ ID NO: 99511 - DNA, 375 bp, Homo Sapiens
cacttgcaaatatttcacagagccaatgtgtaacttgagtggtgcaaggacatgaagtttacccaaggcttaacagttgatagataatggctaaatatggtgatcttcaaagactaaagaaatatagttagtattcctcaccttcacaaatacaacatcaaaaccgtaatcattttctgtgaccttcctccctcccatatagtcctatattctcccccttctttatgtgtgcgtatgccagcttttctgatgttctgttagtctgggttcttattgcctccccactcaccttctttgtggttacatatttgtagaatggaggttgtcacatggtctggacgtaacggaatgctaaagaataggagtctagaactg

SEQ ID NO: 99512 - DNA, 699 bp, Homo Sapiens
  misc_feature (332)..(346): n is a, c, g, or t
atactaaaacccacgacgcgcaaatatggaaccagccatccattctgaattagagttcgcttccaataccaacaactatacattttactttactatccaggataagaaaaatttggttaagcgcctctatttactttgcttttgtgaatgtgtacaatccacgtgactctaaatctcctaagatgggcactacttatgcttgatgaatatattctcatcttaaatgccagcaaatgtaccccaagcaaataaatgatggggacaacaaggttatctaatatctctatttcagataattctacctaaaaattaaagccaattttaaagtattnnnnnnnnnnnnnnngacaagagaaacctaaataagcttaaataaactgcttcttataaatgtaatacagacatgccggaacacacaaggctaaaagaatgttaactttatttatgaacatgtgatttgtgtttatacacatgctaataaacaaaaaggaaataactgttttcaagaaataaaacttcatctgaattagtttaaatactatataaactgtactttatacaaaatgtgttacattaactactacagtcaccaggatagtcaatctaatttatgctagcatttggatacataaaaatcagttttaaaccaatcaccagcaaaacataagcttggacagtttttacagaaaaatgcttaaa

SEQ ID NO: 99513 - DNA, 554 bp, Homo Sapiens
attcggcacgaggggaatattcatacatgaggtattctaattagctaaagtacagccagaaaaccttggttgaatacctttcataaacaattctgttttcttatttttgaaattcaggatctggtctcaggcatcacatgattacaggaacttaagaaatagacctggatggttaaggagactggactgaatgaacagcgactctaagagccttgaaagtctggtagaaaagggacatttccagtctttgatagtaatcctttctaaaatttgagagcattaaatgcctagtcatttgaagagtaaggttaattttgctcaactttggaagggattgttgaaagcccttgttttatagttagaaaatcccctcaaattgtaacttatccaaaggtttgatgggaccaaaaagccctctgattccatgttgtcaagtaaagtgaaataataaagatcttgtatttaaaaatcttactgttagtaggcaattgtgagttcaatttaaatcaaacatttgcaattggaaataaccaaaaatcatcaaaatggctaca

SEQ ID NO: 99514 - DNA, 421 bp, Homo Sapiens
aagaccacaaaagggagtaagtacaggacaaaaactgcttcagttatatcagtaagtgcctctggttgacaattaggaagacctagtgtcaacttgtgacaagctttcttttagcctatgtcccaccctctaaatatgtatatttccattccacagagctacttaaaaactgctatggtgaagaaaaagctgacagagaaaagaaatcatagggcacatacttcatgtatctgacacactgacccaacccagatgttgaaggaatgatttcgggtagaaaaagatactcatcaatcacccaacaaggaagaaatgtttcctctaatcaaatgtcaatttcctattctaacagaaaatcaattatcccacaattacttgtgaagctttgaatatttataaagcagaatttttaaaaatcaaa

SEQ ID NO: 99515 - DNA, 370 bp, Homo Sapiens
ccacacccccgctcccccacagctgtcggggggccgcgctctagtctccctcaaagtcacccttggtggtggtggtcctcttcccaccccaaccaccagtccccgggctgtaggaacaattccaaagtcaaccccaggggaaggctttggaggtccagttaccaactcgcttaccccaattcgggtacctgacagcgcccggggccacgagtgcactccaggcgggggcgtgccaacgcggggcaggggctctcgggtgagcagtgtgattttggcttcctccccaaggtggtccctacctaggctcagcatttgttcccctctccaaacttactggggctgtggcctgcaggggggctgggggctgcag

SEQ ID NO: 99516 - DNA, 728 bp, Homo Sapiens
  misc_feature (637)..(669): n is a, c, g, or t
gggttatgacccaacaagctaagtaccattaatgtaattaacttatttaaattagttcctagtacataaatgtataggatttgggtaattatttaatcatccttccttagtttgattctactccttgtacttatttatcaaaacctagaccaatggtgcatcagagatgcaaaattctacttggaatactcttgaagtttagtttgctttataaagcagtgaaattctgttacagacagggaagaaatacaggttacaaaaagagaatttgggatattcttccctcttaaattaacttttaaaatagtctaagtaacaatttttaaattatttaacttaagttcgcagccccacctggtaccaggcgaacttcacctcttaattattgtggccctcggagccttcatattgtaacttatttatttaacttattcagcatctgtgaaaggtgcactgtatagtttatatttttaatttaaaacaacagagagcactgcagtttgtttgctgtcagaacaacagagcaaattttatggacaagcaatgactattcagcctgaacctgtgcattcagaaaacataagctgagaccctgcttcaccagcctggatttcggggcttctatacagaaactggnnnnnnnnnnnnnnnnnnnnnnnnnnnnnnnnngagagaaacccttacactagctgcttccaagaatgaactctgtgtgtatgtaaagcaac

SEQ ID NO: 99517 - DNA, 372 bp, Homo Sapiens
aggctcgatctgggtgttacatcctgttaagtccacaggaagaatgaacttggctttgctctaggatatcctaacactcttttgtttaaaaacgtatctctagaatagagcttatcatatatattctagtggttgaaatctgtcctttccacaagacggggagcttttcaagggcagagcctgtgtcccacaagtcactgaattgcagtcattcagcagaagctgtagcacagagtaggcacaggtaagtgtttggatacacaatggaagattatacacaatggaagttggcaaatatcattaatagatcagaactgggggaaggttttttgttctgttttaaactaaggttgtttctgttcttgtttatgg

SEQ ID NO: 99518 - DNA, 549 bp, Homo Sapiens
tgccacagtacatagcagattcttatcccatgtgtattgatcccttaggggaaaaaactctgggaagcaaaattagatatatcttctaactaaatatggtacttaaaactttaaaaaatgtctttgaaaacttgtgtatgttaaagaggtcctctgagagggaaccttggtgatgcctctgccacgttcactacattctcacatcagcctgttttttgttactgatttgtattgtacatttgtataggccccagggaatccagtgatttgatggccttaccctgccctctgttaatatgcattgatggtgtcttttgtcttggttgttggcaggtacaggtgctgacaaagctcaggtttgatgctcctttgggttattgtcttgaggtagtttgacagctactcagccttgggctggacaaataacccagatctattttggttctctttagtcaagcataacatagagacaatactaagagcaggaatcaaagagaccccatgtcacccattctgctctgccctctatagaattagaacccctcatca

SEQ ID NO: 99519 - DNA, 173 bp, Homo Sapiens
aaatgaagttcaagaactttggtactagcagaacagactggtttaaataaatcaaatacagttatttagccaattcaagactttctatcaccttcctggcctttacactttagtttacctcctatatcccacctacatactcttttgaaaagattctgctaagtccagatatc

SEQ ID NO: 99520 - DNA, 444 bp, Homo Sapiens
cactggtctaaggcaccgagcgcccagtaggaaaccaaatggacaaccccctgcccttgtggattgtatatttttgcttcaatggtcttgtctctactcagctaaaatggactttgtaccccgctatttatgtcctccctcatgcaaaggggttcaaataaagcaattgggaaaaaaaggtgggagggatgaggggacgggaagaagcttggtgtagcaggaagacctggaaagacctcaaccttggggctggactccaatcatagcaatttaccagctgtgtggccctgggcaaagcccttgacgtctctgaacttcagttctctcatctgtaaaatggaactaataccagcatcctgaagaggatccctgagataacatacatcactttgggcccagcgaggggcatagggagagctcaataaatagaagctggaactcaaa

SEQ ID NO: 99521 - DNA, 537 bp, Homo Sapiens
ccagaagcatctgcaacagcccagccaattaaaggagccagaagagctccggattcttcatcggaatttgggaaggtgactcgaatgtgttttgctgtgttcctctgctttgccctgagctacatccccttcttgctgctcaacattctggatgccagagtccaggctccccgggtggtccacatgcttgctgccaacctcacctggctcaatggttgcatcaaccctgtgctctatgcagccatgaaccgccaattccgccaagcatatggctccattttaaaaagagggccccggagtttccataggctccattagaactgtgaccctagtcaccagaattcaggactgtctcctccaggaccaaagtggccaggtaataggagaataggtgaaataacacatgtgggcattttcacaacaatctctccccagcctcccaaatcaagtctctccatcacttgatcaatgtttcagccctagactgcccaaggagtattattaattattaataaatgaattctgtgcttttaaaaa

SEQ ID NO: 99522 - DNA, 551 bp, Homo Sapiens
ctgactcctaagtatttacccaagagcaataaaaacttacagttacacacagaaacctgcatgccaatatttataacaacattatttcatagtcacccaaacctgaaaacaatctgaatgctcctcaaatggtaaatgcatacaaaatggggggtccataaaaacagtgagttacgagtcagcaattaaagggaacaaactatagattcatacactcaaccacatgattgaacctcagaggcactgcaccaagtaaatgaagccagactttggaggcaacattttgtatgattccatttatacgacattctgtgaaaaggcaatacagtagggatggaaaacatatcagcattttttcatggactaagtgtggagggagggttgactacccagagacaggaggaaggaacgtttggttaatgacactcttcagtgtcttcacagtggttgtgggtatataattatatacaactctcaaaccatatcaaaattgcatatgataaagagttaattcaactgtatctaactttaaataaattaaaaaatttaaa

SEQ ID NO: 99523 - DNA, 562 bp, Homo Sapiens
agaacactgaacaaggaaagaatggcatagatctatctttacagtctggagttaattcctgttaactcattttatccattccttacataatcttctttcctgttagtccagtttgatggtgtgaatggtgaatttcaggcccagttgctaaattttgtggcatcttcctctagtccttcccacctccagtcatcagccccactctgtcttggagacaggcaggaggtgggggaagagctgaatctctttattttccctggtagagacatcttcaaggcatgaaatagcttaaagagcagagtagaaatggaagaggctttgcaaaaggctagataactaacaacacctgggttggggcggcggcctcttctcttcagctcccttagcttggctccgtaagtggatcacttgccaaatgctttagatgattgcctctcaataattgaaaggtggtggtagttgtattctaaatgatgtagaaggtttaaaaataattacattatgcttctattctatcatctaaaacaaatcattaaaactaatttctagctaattgttaaaa

SEQ ID NO: 99524 - DNA, 234 bp, Homo Sapiens
  misc_feature (117)..(125): n is a, c, g, or t
ctttgcactactttatatgctggagattgagagagacttcaaactgtgaatgtttactaatgtaacagttcaatgacaatcattggaagaatgatttctttagtcttattttattgnnnnnnnnncattgtgtgagactaatgatcatgcagataacatcacaggattctctcctcttttaaaatctaaataactgattgacaaaggaattatgaagtaaaatttagcaactga

SEQ ID NO: 99525 - DNA, 185 bp, Homo Sapiens
gaaagaagtcagtttggagtctccatacagttcccaatttccaggtaagagttcctcctgagctcaggctcccgggctgctgctgtctgctgagtgagatctcggtcctgcagcctcagtggcagtggtgctggactcctgagtgtcctggagggcactagggaagttggcggccgccagcttat

SEQ ID NO: 99526 - DNA, 395 bp, Homo Sapiens
aacaggggcctctgcctcagtttgcccgggagccagccagggcccatcctaatttggagcacagtcttcccggtgcctagacatgccaaggcccctcccacgtggtacaccctctccgtttagtacctgaccacctgtttcaaaacgcaggtgtttctggtttagaaacttggaaggcggaatgtgttttcgtgtcttctaggaagggtctgctgaggaccagaccacgtaagcctgagtggatcctgactcagctgcagcccttacctgcctcgtgctgatgatctatgcatggcgttatgtagatcacgtgcggcagagacagccactgtcctgtgtgcgggtttttaaaacagctgccctggatgaaacggaataaaccagtgatgctaaaa

SEQ ID NO: 99527 - DNA, 507 bp, Homo Sapiens
acaaaatccaaaatccagggctttgggttttgtgcatgggtagacagctgaatgggcagagaaaccagaaggatgctacacccaccatctcatcccatggggatcaggggaccaggattccctgatgcgaagctgctcctctgtccagggacgtcttgatcattacacaaaggcagcccctggagttccattcatggagcctgccgtggagtggagaggggtgggaggactcaggtgtgtgaaatgtatatgttttcaaaggaagcagtgggaggccagttggttttgagttggtctccgcaggcaacatcacttctgggatttggtttactggagccttttttcccatggtgaaggcaggggacatagacaaggagggaggaagctggcagatcccatcaaaggccagagcagacagacctactgcttgaagtaaacattgcaaggaagccaatttgtgcgttcatctcttattaaaacatgtcagtgatggacattgcaaaaaaa

SEQ ID NO: 99528 - DNA, 508 bp, Homo Sapiens
ggcacgaggttaccattctggcattcgtcgcataggtactgggccaagaaaatgagcagttctcgtccaacagcctcattcccatgcatattcccaatgtatttaaattcaggctcaccaggctcatggacgccagggttgtcggacagctcgatgaccaggagctcccggccctcgaagctgcgccccaccgtgtaaatcctgctgatggcggtgcactgcagccacacggacacgagcgcctcgcgcagctcggggtagcggtggtactcgaaggagatgccgtcctcttgctgcagccgccggcgccgcctcatgcccgccgcgggcgccccgggctcctgggcttcggcgcccaggagccacccgcaggcagccagtgccccgcacagagccagcagcgcgctgccccctcgcccggccatcgctgcgctccgccgccgccggccgtgccttcctacgcgggcggcctcttttgtctgcccggccctgggcttagcccgccggc

SEQ ID NO: 99529 - DNA, 529 bp, Homo Sapiens
  misc_feature (419)..(477): n is a, c, g, or t
ttttaaagagatgagggtctcactgtgttgcccagactgaagtacagtggctattcacaaaagtgatcacagttcactgcagcctccaactcctgagctcaagtgatctgactacttacatttcttgtgtgagccgcatgttttaatcttttgtctatttttctaataggttgttggtctttcctgtactgatttgaaagatttcagttgtctagattttaatctgttgtctgttatagaggttgtggaacctatctatgacatgtcttttaactttgtttatggcagctttcactagacacactcagagttttgacacaggaagatgtctaactcctttcctttatggtttttgggttttgtggcttacttgggaattccctcaccaccctatcattataaaacactgtccttttgcnnnnnnnnnnnnnnnnnnnnnnnnnnnnnnnnnnnnnnnnnnnnnnnnnnnnnnnnnnngtatatagaatgtggtatgaactcaactttccccccatatgaatacccaact

SEQ ID NO: 99530 - DNA, 157 bp, Homo Sapiens
gcaagcgtaagggcgttcgtgggggggcgtcttgctgggccggttggggtacttgcgcatgcggctgggtttgatgagctgggactggtagctggtattgaggccagtgccctgccccaccctggagcttcaaataaagagctttttacccccaaaa

SEQ ID NO: 99531 - DNA, 1253 bp, Homo Sapiens
  misc_feature (292)..(292): n is a, c, g, or t
ggggaccgttccagcagctgaagcaggtggtggaggagccgtgagaggagaaggaggtgggcacaggtgatgggtatgagtgtggtgtgctgggtgatggatacagagtgtagtaacctggggacgtggtaagatggtagcaacctggggacggtgtaggaaagagagagagtgaggtgggctgaagagggcacaacacgttttgtcttgctttcttggtccttcttgcctgcaagtggatcgttgggtatgcctcgttgctgttcatctgctcctgtgcgaaactttcttnccacatgatgtctgcaggcgaacgggcttttctgcctgtgttggtgcggatgtgtggtggttgaggtggtcgcttgcggcttgaagttgcgcatgcagatgcggcactggaagggcttctggcctgtgtggatgcggatgtggcgggtgagctcgtcggagcgggagaagcggcgatcacaggactccactgggcaagcgtaagggcgttcgtgggggggcgtcttgctgggccggttggggtacttgcgcatgcggctgggtttgatgagctgggactggtagctggtattgagggccttcaggtcctgggagcccgactgagtggcaaaggccttaatagtagacagaggggttagcgaaggctgctgggtgcggctctccaggccctggaagggcttctggtctggggtgcccaggcccagatccccctgctgctgtggaaacaggtagtcggggatcatgggaacctggaagccacccttggcggcagggtaggcaggaggcgggtactggagcgctgtccctgccgagcccgggaaggcctggctttgtggctcagggaaaatgtcagtgttcggcgtggggaaggtgggtgccgctgagtaaatgggactgctgtcgttggatggcactgcgcagcccaggggtgggctctgggaggcggaggcggaggaggccgctggagatggtgctgaggacgaggaggccggtgggttggtcatgctcactaggccactgaccaagctgaagaggggctcgggccacaaggtgttgccactgttgggtgcaggctccagggaaaagcggccagtataggtgatggggggcagtcgagtggtttggctggggtaactggtctccaccagcaccttctcgttgttcagagagatgtcaggaaaagactctgcggtcaggtgctcgtagggctgctcgcccgtgtccgcctgagagtacaatct

SEQ ID NO: 99532 - DNA, 735 bp, Homo Sapiens
ctactcatgcactttccagaaaacctgtagacaacaaaatgatgagtcaaaattcaaaacctagaaatgaagaagctatggtaaaagcattcatggtgagtacagtaatgattttgttttcgtattggattaaaactaaacaactctgcttatggaacagaaaccttgacaatgtggtagtaatataaataaccaaaaccagtacttgggaggaagtgtgagtactgatttctttactttcataatggggaatagatttgtcagtagctaaagtctgaaattgaaatatatagttgaaaaaataatgatttcagcatcctaatgtttttcattacttttttcttaactttagagagatcttttagaaactattctctctttgtgaagacccattcatctgaagttctacaattccttcagtttcacctcaatttctgtttctttgttaagttcaagcaaagtttatacttaatgctttttcactacaataacatgtatggtatgattccatttatatgtatccatttacctgccctccctcctgcccttctgttctttcattcttctatcttttcctctgaacatctgcagaaatatgtctggaatgatgttgaccacatattatgatgtttatttctgggtggtgggatcctggataatttttttaaaatcttctttgtactttattatattgcctggcttttaaaaaataataaatatatcattttttcaaaa

SEQ ID NO: 99533 - DNA, 532 bp, Homo Sapiens
gacagtgtaacgtcttgaattgtatagattagagttcttgttaagatgactaatgttaaaagagtgcaagcagaggaggaatcgaagtcaggagggctcacagagctgaggggcctggggtgtgatgtagacatgcatgcagggtttgggagtcaggctgcctgggtttggatccagcctagataaagtactcagctttattgagctacagattcctcttctgtaaaagaacgtccacctcataggtagcttaaaattaaatgtgataatgagtgtcaagtgctctgcactgtgcttgatacgttttatgaagtcagtaaagattaaccactaattaattctgaactttgcttgagattgtaggctcctgtgggaaggactccatcgcattgatcactgggttttcccgtgccatccatagaactttgtgcttaataatgactcaataaatatgattagatggatggatgtaaaatatggacttgggagaaagaaaaattagaagaataaaaaataaatggaatgaataatg

SEQ ID NO: 99534 - DNA, 890 bp, Homo Sapiens
  misc_feature (714)..(714): n is a, c, g, or t
tgcggccgccagcttttcaacatacctcagattgcttactcagcaaccatcatggatctgagtgacaagactctgttcaaatatttcatgagggttgtgccttcagatgctcagcaggcaaggtccatggtggacatagtgaagaggtacaactggacctatgtatcagccgtacacacagaaggcaactatggagaaagtgggatggaagccttcaaagatatgtcagcgaaggaagggatttgcatcgcccactcttacaaaatctacagtaatgcaggggagcagagctttgataagctgctgaagaagctcacaagtcacttgcccaaggcccgggtggtggcctacttctgtgagggcatgacggtgagaggtctgctgatggccatgaggcgcctgggtctagtgggagaatttctgcttctgggcagggaaccagatgccatctttattgagatctcaaagaacagcatcctatgggaagacagaagaaaatgccaaggtcgcttccttcagggttttggagacatattacacagaagtgagtccgtgctgctgcacatgccccagcctctgaatctagagctcagttcagggcccatcactggactgagggacaggctcatctaattctgagtggatattactctgcattataatgaagccaacagtcatatcttctgatgtggagatttgagaagcatttgtatnggatgtgaccgtcaaaatgcgccccatatcactgcaacacctacaagttttcttgcatggggtgctcagactttcacctctggcaagtattactgggaggtccatgtgggggactcttggaattgggctttcggtgtttgtaataagtactggaaagggaagaatcagaatggtaa

SEQ ID NO: 99535 - DNA, 1021 bp, Homo Sapiens
tcttccccaatacaggaaatcatggtgcaatgagctaagtggccagtgttagctttcaaattattcgggcctctagactaatattggcctgcaggcaaataggtaaaatgaaactgtgcgtcaaagtttgtggctgtgaagtttaccaccattggctgaacgatcagtgtaatgatggaaagttcaaagaagaatggtaaaaacatttgtctcatggcaacacttcttgtttatcatggcttgtttctcataggtaaagtgcccacctcttgaaatatcatgaacttcttcatatttgcatagaaagtgaactggagtgatgattcattaaaccgtattctactgtcatattaaattgtgtgcgtttgttggctcatggccagtgtatttgcaaacgtgtgcatagaaacatagtaaatattaagtaagatcacatgatgtttcattcttggacacgttgcttctgaaaacgtagactggtttggccttttacccttttaaccgggaagctttgggtcttgtttaattgggatgaaacagaaatggctatttttaaaaagctagcaaaggactctgtggtgagctgttttataacaaagagatttttctccctccagacgtgccgggcctgcagtgcgtgaagtacattcagggactccagtggggaactcagcaaatactcagtgaacacaccaggatgacgcaccaagggccccatgacagattcatcgaacttaatagtacccttttcctgctgagattcatcaatgccaatgtcattgctgaactgttcttcaggcccatcatcggcacagtcagcatggatgatatgatgctggaaatgctctgtacaaagatataaagtcatgtgggccacacaagtgcagtagtgcagttcaccatgagggaagaataaagagctgtgggcaaaagagtgtaaaatattttaaaataaactttcttaatatttttacatgcagagtatttttgtattcaattaaagaaataattttattccaaa

SEQ ID NO: 99536 - DNA, 541 bp, Homo Sapiens
gcggtcgaaggccggaaggtgccttcggcatccaaggtccagccatcaagttgctttctttccaaatgctggagtctgaacatcagtaccaaggagtacgcctacctcaaggggaccgtgctctttaaaccggacgtgccgggcctgcagtgcgtgaagtacattcagggactccagtggggaactcagcaaatactcagtgaacacaccaggatgacgcaccaagggccccatgacagattcatcgaacttaatagtacccttttcctgctgagattcatcaatgccaatgtcattgctgaactgttcttcaggcccatcatcggcacagtcagcatggatgatatgatgctggaaatgctctgtacaaagatataaagtcatgtgggccacacaagtgcagtagtgcagttcaccatgagggaagaataaagagctgtgggcaaaagagtgtaaaatattttaaaataaactttcttaatatttttacatgcagagtatttttgtattcaattaaagaaataattttattccaaaaaaa

SEQ ID NO: 99537 - DNA, 495 bp, Homo Sapiens
  misc_feature (72)..(85): n is a, c, g, or t
ataaaatatttcccttgccttctcaagtttgctcaaggtcaagttatgccttttgcctggaatgacttgacnnnnnnnnnnnnnnacttagctggctgcttttcatcttgtaggttaggtcaaggactccaggaagtcttccctggacaagtaatgaagagggcataatccaagggccaactcccatgtttggaacctgactccattttcaggcacgtaatattgtcaaattccttttaaaagcacctgtctgtctgttaacgttggtgcagatactgctattcccctcctccataccattgctgatggttactgagggtatgggaagggccgactagtccagctgttcacaaacagcccttaatgtcaaactgaatactgccaacgtagttccagtttctgtatctaaagactcagcttggagtcacttgtctggactaaaagtaacccctccttgtctggtttgtgactttctgtactctgatgccaccaact

SEQ ID NO: 99538 - DNA, 479 bp, Homo Sapiens
  misc_feature (43)..(84): n is a, c, g, or t
ggtgaagtgattctccatggcctgttcaagtgctgccattacnnnnnnnnnnnnnnnnnnnnnnnnnnnnnnnnnnnnnnnnnnaaaagagaaaacaacttcccataacttccacagttcagtgcattagataccaacacctgcgtgtctgtcttaacctgcgagctctgtcactcctcccactgctgttacagagagagaatgggacgggtatgagaaaaatggctcagaccctagacagagttctattttgtaaaccagcccttcatgaaaatttttttattctttgatcacattataatataaagaatattattaaaggttttcttgaataatggtgaatgtcaataatatacagcatttgagcttgattttgaaaccttaaaaaactcattaaatggcactgcatcactgtatcttttagcctttttggaggaattagatacttaaatgtctaaatgaatctgccctttataaaa

SEQ ID NO: 99539 - DNA, 587 bp, Homo Sapiens
  misc_feature (144)..(163): n is a, c, g, or t
aactttttttaaattcaagtacatgaaattcagtaatagcattgccttgagctaactaggaagtaccgggaaaaaagttaaatctacatcaagtttcttttgaactttgaagtgttttctgacccactgctaactgtagcaacnnnnnnnnnnnnnnnnnnnncatactttatctggctattataacataaactgtcacgtaggtttgctgccttcagaataccgcaatttaattgcgggaatataataatattgggactgtttcacagcacaaactcatctttacagtgttgatcaatgcatcagttaagaaataatgccacctcaggaattaactggcattgggaacatttgcctcattctcctgctatcctcttcattcacccctgccactgtaatatctataagtacttaagagacttgtgagcaaaacatactatttataacagtatatgattgatttatgcttatgtggttgttcagtttgttcccatgtaactcgtttgttttaaatattttgccagatttcttgtatttattccacatcattatgcctataatgtgccgctttgtgattgggcattaga

SEQ ID NO: 99540 - DNA, 602 bp, Homo Sapiens
  misc_feature (150)..(469): n is a, c, g, or t
catagtgtgtggtgcacagtaggcatggaataatgataataaatggattaaatggatgcatgaaggtatacaggagactttaagctatcatagacggttccaggcaggagaatatgaagatgtaatttcaagtacagttgttattgtcannnnnnnnnnnnnnnnnnnnnnnnnnnnnnnnnnnnnnnnnnnnnnnnnnnnnnnnnnnnnnnnnnnnnnnnnnnnnnnnnnnnnnnnnnnnnnnnnnnnnnnnnnnnnnnnnnnnnnnnnnnnnnnnnnnnnnnnnnnnnnnnnnnnnnnnnnnnnnnnnnnnnnnnnnnnnnnnnnnnnnnnnnnnnnnnnnnnnnnnnnnnnnnnnnnnnnnnnnnnnnnnnnnnnnnnnnnnnnnnnnnnnnnnnnnnnnnnnnnnnnnnnnnnnnnnnnnnnnnnnnnnnnnnnnnnnnnnnnnnnnnnnnnnnnnnnnnnnnnntgtataatctggtaaaatggatgaattattcataaataatgtcagaaccagctatttcaaacaagattagattctctagcctcatatcatatgcaaagataaattatatatggattaaggatttaaatgtaaa

SEQ ID NO: 99541 - DNA, 518 bp, Homo Sapiens
  misc_feature (101)..(147): n is a, c, g, or t
tatatttatccagtcttattattttctgctgcagggttcttgtgaccatttcagtctgctggcattttcgttagtgggcttcctcatacttatttttgaannnnnnnnnnnnnnnnnnnnnnnnnnnnnnnnnnnnnnnnnnnnnnnaaaatagtagaataaatatatatggtgcagtgagttgtatgtggtttgtccccaccacaactcatggtgaaatttaattgccagtttaacggtattgaaaggtggtggggcctttaagaggtgtttggttgtggcatctctgccctctcgaatggcttatgcagactgggttagttcttttggactgggttggttctcgtgagatcaagttgttataaaacaaggcttcctctgatgtttggcctctttgcatgcacttgctttcccttcctctttctgctgtgatttgaagcagcatgagaccatcaccaaatgggctaccatccaacctccagaattgtgagccaaataaacttttttgtaaattaaaa

SEQ ID NO: 99542 - DNA, 1115 bp, Homo Sapiens
  misc_feature (896)..(908): n is a, c, g, or t
gcggccgccaaccccttcgacctgctcatcttcggctctggctctgaggagctgatcgggctgctgaagactgcgcggctgctgcggctggtgcgcgtggcgcggaagctggatcgctactcagagtacggcgcggccgtgctgttcttgctcatgtgcacctttgcgctcatcgcgcactggctagcctgcatctggtacgccatcggcaacatggagcagccacacatggactcacgcatcggctggctgcacaacctgggcgaccagataggcaaaccctacaacagcagcggcctgggcggcccctccatcaaggacaagtatgtgacggcgctctacttcaccttcagcagcctcaccagtgtgggcttcggcaacgtctctcccaacaccaactcagagaagatcttctccatctgcgtcatgctcattggctccctcatgtatgctagcatcttcggcaacgtgtcggccatcatccagcggctgtactcgggcacagcccgctaccacacacagatgctgcgggtgcgggagttcatccgcttccaccagatccccaatcccctgcgccagcgcctcgaggagtacttccagcacgcctggtcctacaccaacggcatcgacatgaacgcggtgctgaagggcttccctgagtgcctgcaggctgacatctgcctgcacctgaaccgctcactgctgcagcactgcaaacccttccgaggggccaccaagggctgccttcgggccctggccatgaagttcaagaccacacatgcaccgccaggggacacactggtgcatgctggggacctgctcaccgccctgtacttcatctcccggggctccatcgagatcctgcggggcgacgtcgtcgtggccatcctggtatnnnnnnnnnnnnncgggcactggactggaaatgccctctgcagcctcaagaggtgcgagccttctgaatatgcagtcactgggggctgtggacctgggaactgcctgcagggtcactggggctcctttaattcaccctaaactcaggcccctccaagcggggggcccatggagaggaagccccaccgtggggttgaggctgctggaaactctggggggtt

SEQ ID NO: 99543 - DNA, 495 bp, Homo Sapiens
cattgtttctacttttgtgggacttcagtcatgctgataatagaatcttctgttcatacaattctgtaatatttatttgtacagttagtattctaatgaaaggatgaagagtctgaactagaaggtaggtttaagccatcaccaggcctttgcaaatggcctaaatggtgttccctttgaaataacgcttgccacaagtatataataagctatattaattgtgttttgcataaaattgccaaaacacagtaatgtgtatatagtggtataagatcttgaaaaaaatctctataattgtgctctttatctgtgaatgggaaaagccatttttagtaggtgactaccatttgaaaaactcaattggatgtatatctgaatgttgcattgtattgtacagtatgcatattattgtttgtggttgcatatggcaatgaagtgtttgttttatattaaaaaaaacctgttatgtacagttgaaataaattttgcatttgc

SEQ ID NO: 99544 - DNA, 404 bp, Homo Sapiens
cacagggagtatttccatcctctctgtccaggcagctgagccttgacaacctctcctccccttcaccatgccccgactgatctcctaatggagccccacccctcgagtccctgggcctgtggaaggtagggtctccccctcctcctcatcctcccccactccactccaggtggggttgcaatagggcttatctggtttcctctaagcatgaagcccttgaccagaggaagagcgggagttcacgtcacgcccccatgcttaatcctggccttttgcattttttgtggatgggtaaactgaggtacatagtggtcaactcatgcccaggatcacagaggcactggcagggtggcaggaatgctgaattcacctgatgagagccagggacagcagcgggtggggcg

SEQ ID NO: 99545 - DNA, 843 bp, Homo Sapiens
atctccccaaggcagggagtgaatgcacagaagacgcatgaactgagaatatactctgccagttttcctggacatgcaattgcctttgaacttgctataatatattatgtctgcagaattcagaacattataatggccttcatccttgacccaaaaatcagggcagaagactctccacaagtaaatgtatttatggggaaaacaatgtgttatttgaaatgagctctaccttggacactccaagctatcagcttaccttcctgaagaagaaaaggataggtgtatcctcaccttcagtagcaggtccttccagcaagatgagactcctccaaggaaattgcagaagacttcctgagaaggaacaacagaaaatagaagacaattttgcttatcctggaaaatgtggctcttccatctgatgttaaatatgtattttgagcgtggaacaaagagtataatacagatcctcgtgttcttataattatgttagggtttcagaaaaacaatatatactttaatatccatcaatcaaatcatatgtattttatttaaaagtactacttaaataatgcctttcagaaaaggaagactgtgctctgagcccttgcatttgctcagtctttttcccatttcatctcatttgatcctcaaattcaatcatgaaaaaactaagtacccagggaagctgagatggagaggaagccaggaagaaactcaggtctctgaactcttagcctagtgctgtttatatagtgtgaaactattctgaaaatagggtccaaaaacacaggaggttaaagaaggagatcattccatgatccagaaagagtaaattatacaagt

SEQ ID NO: 99546 - DNA, 454 bp, Homo Sapiens
cttgtgcagctgatttaccaccaaaatgcaaatggttcctgggatctgaatgaagatctagccaagatcctaggtatgagtttggaagaaataatggctgcacagcctgccgagcttgtggattcctcaggctgggccaccatcctggccgtgatctggctgcatagcaatggtaaggacttgaagtgtgaatgggagcttctggaaaggaacgccgtggcctggatgcgtgcccatgcaggctccaccatgacttcggttgtgaaagctgctattactttcctgaagtcatctgtggatcctgctatctttgccttttgaagataccatccagaaaaagaagtgcctttaatttgctactgtcatttcctctagtatcacttttgctgtgatgatgtgttcttgtgttttataactctttattttttgccataaaagtaaaggatgcttactc

SEQ ID NO: 99547 - DNA, 461 bp, Homo Sapiens
gaccaaggcaccctcattgatcaaaaattggagctgtaggacagctgcaccactttcatgttggcaatagcaatcaacaccaggtctcccgagtattcgtatagcacctgttctcgtcccaatagccaagattttctgaactggatcaaaggctaatgctgtgggctgatgaggaaaaccatgccgaactgtcttgcaaatctggaaatactccgaagtcaaagtttcctgaatttcctctctgagaacccctgcagtccccgccggatgtacggaaccacttccagccccaccaccactgttactgccactgctgctaccactgccaggggaggaggcagttaagccatccaaaacttttcggaaattaaacttcttcattttaaacacaagactctgtctctctcttaagggcggactttccttcttcgaaacgttcggctcagagtattttattttca

SEQ ID NO: 99548 - DNA, 509 bp, Homo Sapiens
ccttttttgtccttcagatttggagaaggggaaagcagtttctctttgaaaagaagcagcgaatcgtggcttaagcaaaatttgtaatccttaaaactggccaggctctggagctgagttcaatttgacatgtctaaactttcttcttgagtaaccagattttcccttacagtcttttgtcacttaagagaactcataggcaatcgtccatccaaaacaagtctttctccttcagggaggacccatctttggaaactccagctggtttcctgtgcagtgcttatggtgccacctctcgttatatttagaaaaatggtctcacgtaacttgagaaaaaacatttcagtgaccaaagccgggtaccattggaacaccaagctaatttacttgtttgctcaattggaaaacgctggctctaggataaaacggaatctttgggagagttattttttatggtagttggaagcatccaaaagaagttctaataaaggtatttatgagagaaaaac

SEQ ID NO: 99549 - DNA, 534 bp, Homo Sapiens
gggattagccccaggagaaaatgcgggaagaagcatccttgaattctaagaatgggggtggtccctcaccgaagcccaaggaagggaccagccagttggtctggagaaatggggaagctttcagctgatttgcagaagttccccatgtgggccccagccatcagggctggccgtggacgtgcccctgcccactcacctgcccgcctgcccgcccgcccgcatagcacttgcagacctgcctgaacgcacatgacatagcacttgccgatctgcgtgtgtccagaaggtgcccttggccgagcgccgaactcgctcgccctctagatgtccaagtgccacgtgaactatgcaatttaaagggttgacccacactagacgaaactggactcgtacgactctttttatattttttatacttgaaatgaaatcctttgcttcttttttaagcgaatgattgcttttaatgtttgcactgatttagttgcatgattagtcagaaactgccatttgaaaaaaagttatttttatagcagc

SEQ ID NO: 99550 - DNA, 1216 bp, Homo Sapiens
  misc_feature (492)..(502): n is a, c, g, or t
cagccaggtggaaggcgccccgcttgcagcaaggtaacgcgcagcagccccagccgtccgcagtgaaacagccggagcagaagatacttttatttctcggcccgtattaacactcagctctacaaaataacctataggttttaacttccttctctttcattgaaaaaggttccttgaaaaatcctgtcctcccattccccggggttcccttacttttagttcatacagataatttccctgtcagatttcctcattgcattttgaactcataaaacatgcacataaaaatagcatgttacaaatttatggagaaaatgggctctgtctcttaaatttgttgactcgaaacattttgggtggggggtcttttttcgtttttagaagaaaggctttttagaaaactatgtacataatctgacttctcctccccgcattgcaacgccgaaaataaaatttttcacaatgcatttacaagaaataatacaaaacccnnnnnnnnnnntggaaatgctcagatacataaagttttacaaaacccagaatataactccgccgtctgaaggagggggtggtggtggtaatctctttgtataaattaacaaaccaacccaaaagagcggtaacaactacaaaaaacttgtaagtgcttggacctgccttactacatttataacaaatgcgacgagctccgcgtcacttgggctccggcggtcggcgccgtccggaagcaacgcggaggaaagtgagcgcgccggccggtatacaaaagtgggcttcgcctctcgcctcgttttgacttttttgtcccctcgagcaaagaaaacgctttccgcttcctccgtaggtgataaatactgtacaaaaagtctcaagaaaacaccgaagttcagtctaaaacccaagtctggtgtcagcgcccggcggtcgccagggtctccggggaaggtgagtgggggacacgcgtcacccggcgttcgtctccagtattttccttttgacaagaatgtgggaacgtctgtacaaaagccaggccgcgccggggcggggcgggagccgggcgcgggccgcgagctcgtgggtcgccgccgcagagtccccggcgtcccgaaggcgctagatgtgcgtcaggggcaccgtgccgttcacgcccacgcccgcgcccgcgccctggtagtgctgcggcagcgagtgcagccggctctgcgccgcggccgca

SEQ ID NO: 99551 - DNA, 538 bp, Homo Sapiens
taagcctggagccagctccatcaggtcacggactcgtggccttgggtagaaggcccagtcgcgctgctgtgatttcagcactcacccttgttggaaatgttgctttttcttcatgcacatggctgttttttcaaaagtgctgcagaaatgtggccaagacagcagaaaaggtgtgagcatccctggctacaaacgtatttgaaaccaaaagggaaaagaaaacgcaggcagccagcagttgctacagaaacgtgattttcaaagcatctgcatcacccgcaacctcatggaagcctcggtttggtttacaaaggagcgagtggtcggaaagacgatttgaccactttgtattcgtatgattcattcggagcagaagtttaaaactccatgaaacacttgccccgtggtgggcacggtggaatggggcttcactgggggcttttgaaagcaaaggctggtttaacaaaagttctgaaaagacagcacctctggggggtgtgcaaaggcccccacctccacgtggttcacaagaaagaaa

SEQ ID NO: 99552 - DNA, 570 bp, Homo Sapiens
tgcggccgccgccgctgcagacattagcgctaggaagatggcgcacccggcaatgttccctcgaaggggcagcggtagtggcagcgcctctgctctcaatgcagcaggtaccggcgtcggtagtaatgccacatcttccgaggattttccgcctccgtcgctgcttcagccgccgccccctgcagcatcttctacgtcgggaccacagcctccgcctccacaaagcctgaacctcctttcgcaggctcagctgcaggcacagcctcttgcgccaggcggaactcaaatgaaaaagaaaagtggcttccagataactagcgttactcctgctcagatctccgctagtatcagctctaacaacagtatagcagaggacactgagagctatgatgatctggatgaatctcacacggaagatctctcttcttccgagatccttgatgtgtcactttccagggctactgacttaggggagcccgaacgcagctcctcagaagagaccctaaataacttccaggaagctgagacacctggggcagtctctcccaaccagccccaccttcctcagac

SEQ ID NO: 99553 - DNA, 532 bp, Homo Sapiens
aaacttcagtctttaagagtctgttgtgcagcggagtaggctttaaagaaacagtgcagcagtggtttcagtaataatcctcacttccatcagaatctgcctgggagggagcttttacaatgtacaagtggtgagaatgtttccaaggtgctaattatggacatagattctttgtgtgggttgatagctaccaatgggacagtgtagaaacaagtttccacctttctaaaaccagtttggtacatatctttttaaagatcgctttataaaaacaaaaagataacattaacatttattgaaacaagtcactctgagaagaccaggaacaaagttctcttggcagatctgggtgatgtgtgtgtctcacatttttatcatgtttttatgactgttttatcttgcaggtaagctttacagctttcagaggagttgtagtacactacagaaatatgtcttctttccaggttcaaaaagcaaaatctgattggcattgcattgaattattaattaaataaatttattaattggcaaa

SEQ ID NO: 99554 - DNA, 594 bp, Homo Sapiens
attcagaaggtttgtaacaagaaaactatgggaaagatacactcaccggaagaaaagaagtttctgaagaaaaccacaaccatgccaatgaacgaatgctatttcatgggtctccttttgtgaatgcaattatccacaaaggctttgatgaaaggcatgcgtacataggtggtatgtttggagctggcatttattttgctgaaaactcttccaaaagcaatcaatatgtatatggaattggaggaggtactgggtgtccagttcacaaagacagatcttgttacatttgccacaggcagctgctcttttgccgggtaaccttgggaaagtctttcctgcagttcagtgcaatgaaaatggcacattctcctccaggtcatcactcagtcactggtaggcccagtgtaaatggcctagcattagctgaatatgttatttacagaggagaacaggcttatcctgagtatttaattacttaccagattatgaggcctgaaggtatggtcgatggataaatagttattttaagaaactaattccactgaacctaaaatcatcaaagcagcagtggcctctacgttttactcctttgct

SEQ ID NO: 99555 - DNA, 466 bp, Homo Sapiens
atgcctgatcagatgagaagcccgccatgatactgtcacagtgcgtagaatgggctctttatccagtagacaccactgtactttttgatacgagggcagtcttaacttgtgttaaggcctgtgtgtagcattgaagagaggagttgcttaaaccaatgggactaaaacctgatgggacaataacgcctttggaggaagcactcaaccagtactctgtcatcgaagagaccagctctgacacagactaaaagcatcacctgcttaactctcaatattgctttatcagcatcttttctctgtagctccaggggaatcttttctctaaaacatttatgcccttgctttggctagaaacacattaactggtttactcattgagaatccagcatatttaagaggtgaccctgtgttttttgtgatattgaggcattcatacagagctgcagttagacggggttacgggggc

SEQ ID NO: 99556 - DNA, 371 bp, Homo Sapiens
tctagtgctgagccagatgtaagaacatcatgctcgcagtctctcagactcagtcttcctatgcaagaaacgcaactgtgctctacagattctcccctgcccctggagaaggaggagcaggtccgacttcaggctcggaagtggctggaagagcagctcaaacagtacagggtgaagcgccagcaggagagggtgagtctccctctcccgaacaagctcatggaaagcttcctgtgccagagacaactgttggtcccacataacccggggacctgccattggcttctttgagctgccatgggctcaggggcaacaagcacattttatttctaaatctgccaattgaaaagcaaagaaagcaaacacgggtg

SEQ ID NO: 99557 - DNA, 467 bp, Homo Sapiens
  misc_feature (111)..(174): n is a, c, g, or t
agagtactcatgcagaagagcaaagatatatctatggggatttaaacagcgttatttgtaatatggacaattttttaaaaaaagttaatatccatcaatagggaacagttnnnnnnnnnnnnnnnnnnnnnnnnnnnnnnnnnnnnnnnnnnnnnnnnnnnnnnnnnnnnnnnntcgatggcttgagcccaggagtttgaggctgtagtgcacaatgattgtgggcaggaaacaggacctcgactttggaccagattcaagactggctgaaacagggaagaggcacagaaagaacttctccgtaagacacgcccaccagcacgacagtttaccattgccatggcgacacccagacgttactgcctttttccataacaacctggaagttaccaccccttttctggaaatttctgaatagcccactctttaatttgcatgtaattaaaagtcaatataaatgtgaaaaa

SEQ ID NO: 99558 - DNA, 628 bp, Homo Sapiens
ctcacttccagcacagcctctgatgtaggggatgggggcaggtgagggtggcaggagctggggcgtgctcagagggcaggagcggccagcttgccgggagcaggcactggcagaggctgcaccagatggctctggctgtccccgctcctcattaaagcagccgcccgagggctgctgcccacctgaaatgcagaggtagctcacccagccctgctgagggtactgtgcccagccaagctgctgtccttagatacttggcctgctcagctgtgccctggaggcccctaactgaggtctgaaagccagaggccagtgagggcaggactggatacagcctcctctctgcatggatgggatgttgactgaaacccagagaagaccagagacaccgtagctctccctcgactcacacagcaaatgtcttgagacccggaaacagcagcgccatgccaaacccacccctggaacactgacctgtctgcatcttccagcaccccaaacctgggtgaggtgtgtgggggcagaagaggggtctccgtgatgtaactatgccctttgtaatagatgtatatgattttttaaaactcaagcagtgtaaaagaaagcagataagtgataaacacgcgaa

SEQ ID NO: 99559 - DNA, 526 bp, Homo Sapiens
cagcttattaataaccctcaagctgtcagaatctctatagttaccatttacaattttatactgtgaaacaatacagatcagtgaaagcataaagacaagtcagaattcactttgaagagggtctgaggcctgggagagtctctactgtctattgaagaatgaggcatgtataaaatagttggttgaatttcactgatcttcccaatgtgaacaaatatactatgtatattgtgtgtatttctagaaatcaatggcagctgctgatggtgttgtaattagaaatctatatagattatagatgttttagaaagatggtgccaatcctaaaagatttgtgtgggctaaaagtgcttgtacttacttttttctgcacttataactgatttggttttaaaattgtgtgcgtgtatctgttctttctctgttgtggcagcttgtactattaaaataatagagaatgttaaattattttgatgtgaactgcaaatgattttttttcataaagtttaacatttttatcagcata

SEQ ID NO: 99560 - DNA, 579 bp, Homo Sapiens
  misc_feature (501)..(501): n is a, c, g, or t
aagagaattagagggattacatatttgtgggttatttataagaatgcaagaacataaacaacctcattttaaagcttaactaatatatgaacaaagatatttacatatattgatttagccaaagaaaggggaatttacaaggaaatcaacagtttgcaaatagttttattatttggaatcttaacaaaaatgaaaactaaagtagccactgactacaatggtgtataatgaacattgtatccccaaaagtgttatgtttttattatgaatttttcaatcaaacaagaaccataattgttcacaggataataacctttctaaatctttggcatggctgctaatgcagttgtttcttgagatttacttttttggggctgtgatcatgagagctatggtattatgtgccatgtatgcttaatcagcaggtgcctgggcttcttactaacattttaactaaaataaattacagtatgtataaggaatggaaagtgaggtacttanaatgtgttttcaagttaatgcataatataaaaagcagaaatgcatgtacccctatagaaataaactgctttgctccag

SEQ ID NO: 99561 - DNA, 586 bp, Homo Sapiens
tgcggccgctacatgctcacccgggactaccttacagtcaaggtctgggacctgaacatggaggcaagacccatagagacctaccaggtccatgactaccttcggagcaagctctgttccctgtacgagaacgactgcattttcgacaagtttgaatgtgcctggaacgggagcgacagcgtcatcatgaccggggcctacaacaacttcttccgcatgttcgatcggaacaccaagcgggacgtgaccctggaggcctcgagggaaagcagcaagccccgggctgtgctcaagccacggcgcgtgtgcgtggggggcaagcgccggcgtgatgacatcagtgtggacagcttggacttcaccaagaagatcctgcacacggcctggcacccggctgagaacatcattgccatcgccgccaccaacaacctgtacatcttccaggacaaggtaaactctgacatgcactaggtatgtgcagttcccggcccctgccacccagcctcatgcaagtcatccccgacatgaccttcacgaccgcaatgcaaggaggggaagaaagtcacagcactgatgaggacagctg

SEQ ID NO: 99562 - DNA, 427 bp, Homo Sapiens
attttgataacccagaagacttcagattaataaagaagctttgaaagaagaccatttttcaaaattttagtgaagtgtgaatattttttgtcaatggctttctcaaagagaatgaaacttttgcaccattttcagagtttttatagagatgccaaattgatatatttacatgtaatggaaacatgaaaaagttttattaaacaattgttcatagctgtgtagacattttaattcagtttccaaagctctcaaaaaatcgtatttttgaagtacggagtgatgcggtttggggcgtggcttacagttccaacgactcaattgtcccgatactcagttctttctacaggtatcaggttcgtgttaaacgctgtatgttaactatgactggaattctgtgatattttggtaataaatgaagtgggatcaa

SEQ ID NO: 99563 - DNA, 884 bp, Homo Sapiens
  misc_feature (220)..(259): n is a, c, g, or t
ttgcgctgctaagaagctaaagtcatccatccttattcacgttgacagtacctagctgtaatgtttcacagagtgtgctgctattttataaacatttttataatatattattttactgcttaaattccaagtcctgaagtagatggttgagatatgagttcttcgtactggaaaagcccttccgtagtttgttttcttctggtagcatattcatggttgnnnnnnnnnnnnnnnnnnnnnnnnnnnnnnnnnnnnnnnncctctgatcacattcttcaaagacggagtattctttacctcaggtttactggacaaaatcaataactacaaaaggcaatgattcacgcttttgttttcataatacctcacaaccgtacagtttctgcttgggagcccattcgcatgaggaatacagaagcagtgtgagcagggctgactccctctcaggtggaaggcagggcggtctcactcccagggacctttttggtcatggaggccatcgggctcccagttagaccctggtatcctcatcatgatggaaaaaatacattgaaccaagggatcctccctccccttcaaggcagacgttcagtacaaacatttatgcggtaggctcagatgttgtaatttgcacttaggtaccaggtgtcaggaaacagactaaaaagaattccaccaggctgtttggagatcctcatcttggagctttttcaaaagcggggcttcatctgcaaagggccctttcatcttgaagtttttcccctccgtctttcccctcccctggcatggacaccttgtgtttaggatcatctctgcaagtttcctaggtctgaatctgcgagtagatgaacctgcaccaagcaacgtttatggtgctttcttct

SEQ ID NO: 99564 - DNA, 402 bp, Homo Sapiens
ttaccagcaaataattggtattggcaaacaactgctgctaagagagacaatcaaatataatgaaacacatcatactagaacacatcaccacccgtaaagtcgccttgctcttcctgacatccccccaccaaatatctgttgaaatctctagatttaactacacaattacaggatatgaagagaaaataacatgttaaactatataccacaggaaaagaattggcaaactccagaatgggggaaacttcacagaataaactgtcagcttattcaacaaataaaacacaaggataaaagagtgttggagtacataaaggttttaaaagacttaacaaaacataatataacatatagactttatttggaccctggttcaacaaactgttaaaagcacatacatac

SEQ ID NO: 99565 - DNA, 607 bp, Homo Sapiens
ggctcctctgctgcacgtgccccccgccccaggtcgagcggccccgcggacctcggctgggctactccatcccctcccgctcgggtgcgtctggactggacaagagggactacgtgtgaggcggaggtttcccctgggagcccactgctccccactgccccgccctttcgaccttggcctgatgaccagatgccctgctccatcacaacctccttccccaggaaaacccactttccaaaagcccaagctacacctggctgcagggctgggtcagctggcctggctgagctcttctcagtggggtcccctttgatgttctcccccaagttgggcagcctagaggtgttgggaaccctggcctgcccccacctccccagtaattgtttccttccgttgcccaggacactggctggccttccttctcttctgagccctcccctgccccaggaaccctggcctcaccaaaacagcagcagctcgttggctccaaaaccagggagcagaccatgccctcccaaccctggagttgtcagggagggcctgcccatcacctccctctccccaacatccccaccctcgagttggaaataaagagcatttgtaactg

SEQ ID NO: 99566 - DNA, 471 bp, Homo Sapiens
gcgcgggggcgacgacaggttaaaaatctgtaagagcctgattttagaattcaccagctcctcagaagtttggcgaaatatgagttattaagcctacgctcagatcaaggtagcagctagactggtgtgacaacctgtttttaatcagtgactcaaagctgtgatcaccctgatgtcaccgaatggccacagcttgtaaaagatcaggagaacctcagtctgacgacattgaagctagccgaatgaagcgagcagctgcaaagcatctaatagaacgctactaccaccagttaactgagggctgtggaaatgaagcctgcacgaatgagttttgtgcttcctgtccaacttttcttcgtatggataataatgcagcagctattaaagccctcgagctttataagattaatgcaaaactctgtgatcctcatccctccaagaaaggagcaagctcagcttaccttgagaact

SEQ ID NO: 99567 - DNA, 521 bp, Homo Sapiens
  misc_feature (503)..(503): n is a, c, g, or t
tgagttaaggagcggaaagtttaatctgtaaaagaaaggagagaggagagcagctctctcacgggtgcacaagagaggcgtctgaaaagggaaatgtggcagaccgcagcagattttattggcaggcttcgggaggctgtgtctgatttacatagggcccacaggttggtccgaccagttgtgacatttatagaatgtactgggaaggctggtcacccgatcctaaacttattatacaagtgggctttccacttggccagcaccatcttgtctgtgccttactgtgcacgcggctggcaaaaaagagaagattgagccaccattttgaacatacctagtcccaggtagtatattcctatcggcacaactgctggcattcgcctgtacaagcttccagtttgcttgtctatgtctgaggctcgattttacaggctgctttttgtcagaaaagaaaatgatttgggggttgctttttattaaaaggaaaaccttaccaaggactntcgtaccctcactatctg

SEQ ID NO: 99568 - DNA, 561 bp, Homo Sapiens
acgacatcagtccgatgccctctgctgatgaaggtgttaccatagaaatagatagaatggatgtctatttcattccccattccaaataggtgccaggacacagattctccaacacacatatcaggctccgggaagtttccgaagaggtatccattgagggctggaaacagaaacacgctagtggaagagactcccctgcagaggcgactgggaccagaaatgttggtaatacgggcttaagcatggctggaaaaccagtgcagaccattggttgtaaggttttggtgcagaaaaacctggctcttagaaatatatattgtccaaaagagaaatgaaatgtttttattggcctttttccagagaaaacactcaataaaagtgaagatcagcatacactgagaacagcctcggagctgctgtgggaacgcaatatgaggtcaggagaaaacagagtgctgctcatatttacaggacgctcagtcaccttctgtcataatccttcactggcatatctgctgtctccaccagattctgtgctccttggaactagaaaccctgtct

SEQ ID NO: 99569 - DNA, 496 bp, Homo Sapiens
aacggtcacaaaagttgtcactgttgtgacaaccaaaaaagcagttgtggattctgataagaagaaaggtgagctgatggagaatgaccaggatgccatggagaggtaaatgtgtttcgattggaaatggagggcattacagttaaaggaaaaggttgccccaaaccaattaaatcctgggtccagtgtggaatttccatgaagatcttaaattccctcaagaagcatggctatgaaaagcccacgcccatccaaacccaagctattcctgctataatgtctggacgagatttgattggcattgccaaaacaggaagtggaaagaccattgcttttctgttgcccatgtttagacacatcatggatcagaggtcattagaggaaggagaggggccaataggtacaattcttttcattaaactatttttcaaataacagctgtgttgtcaaacagaaagaccttatagtttataatgttcttaattatgacaatgaa

SEQ ID NO: 99570 - DNA, 301 bp, Homo Sapiens
tttagcaaatcgtgttctcttaaaccaatacaatcctatagcgatcattcatctctgctatatcacattttatttttgaagtatataaatgatgtcttcatttttaaaggtataattttacatttctgccttctaaagatagtttggtcataattttagatgcatccttttaattaatgtatgtgtcgtttttaggagcacacctttccctatataatctgagtttatttataactttctgattatatactgcttatatctgtgggctcaagacacagaagtgaatactaatttttttaac

SEQ ID NO: 99571 - DNA, 550 bp, Homo Sapiens
aaggaagagctgcaggaaacagaaaatgcactgcctagatggaccctctgactccccaccacccaggctggagcggcagaggctgccaggaagagccagaaaacaggtcactgaccagctaatacaggccaaggctgctgggaggccaggaatatggccatgaggagcacagcacgatgttccctctatcacgtgtgcatattctagtggaggaagactgacagtaagtaggaacactctactggtaaggggagaaatgcctcaaatgagcatgtgcacaacttcagtaaacatgctgtgcatgtggcccctcccaagtgcccgcaggccaccacacaagtggacagccctggacagcccgcccctagggaagaatcaagggaggagaaacagaagccctggaactgtgctagcatataaaaccccaagtcaagggctgaatggcacacttggatctctcaagtcacctgcttggcccccttccaagtgtatttacttccatttgttcctgctctaaaactttttaataaactttcactcctgctctaaa

SEQ ID NO: 99572 - DNA, 544 bp, Homo Sapiens
ttttctttttagttgacacataataattgtacatatttgtaggtacatatttataggatacaaagtgatgattttggtataggtgtacaatgtgtactgatcaaatcatggtaatcagcatatctatcaactcaaacatttatcatgtctttgtgttgtggacattgaaaatcttttcttctagctttttgaaaacatacaataaatcatcattaaccatattcacctgagagtgctgcaggatgccagaactccttcctcctacatagctataatttggtctatagtttggtatccattaatgaacctctccccatccacctctccttcctacctttctcagcctctaacacctaaaattctacttcaaaatgtgatttaagaagccctggcttgccccaaccaggatatacacagagaaaaccacagctgggtacaatgtagtaaaactgttgaaaacaaaagccaaggagaaaaatgattaaagccgtgagaaaaaaattcattatttttaaaggagcaacactaagacagtaactcattt

SEQ ID NO: 99573 - DNA, 515 bp, Homo Sapiens
tctgttgatcttaactcctccaccctcatggtagaggcatggacttgcagtaacagctaggagtggagacccagcaatgagaaactgtccaagaccaccaatgatgatgtcacaatgtcccactgtcccagagtgtctaccctggaccgccctgcccaccccagcttggccactcctagatgagaccaaggctcagcctggggtgtttgtccttgacagctccggtcaattgcagagaatgaattcatgaaaaccataatgagtgatccagttccacaggtagcaaggtagagggtcctctagaatcctggacgtttgtccctggatacttttggaaatcctcactgagacattttccaccgatgatgacagagggatgctggtattgaatcacccaccgctttcctgtctattccgtgaatagtatataaagcatgaacatagccctgagcctcagcattctcaattacaaaatgagattgagttgaattacaataaatttctgtcaaaccgta

SEQ ID NO: 99574 - DNA, 531 bp, Homo Sapiens
ttgatcagttgataatcagggatttacctggacaatggattctagcctgaatttgagttctagtgttacctttaaaaaaagcataaatttttttggcagctttattgcttgaccctaatttaggaaaaaacagacaaggacttgttgacaaatatataccataattgactcatgactggcatatttgaagcaaaaactaaggtgcaaagagttgtgctacagtgagatttttagatgccaaaaagtacttattggtcactatgttaacatttatgctttttttaaatccatttacctctttgttatttgaggaaaattacaacttcgtgtttttcattcctcttctgtgaaatgccattatttcctgaaatggctcagttgcacttaatagtgaagcttattaaagagctctgttttgtttgtatcacactgtcttatataaaacacaacagctgcaggacaagaccataaatgaatgatatttctcagttcatagccttcaaatactgtgactcattaaaaacctgatgg

SEQ ID NO: 99575 - DNA, 531 bp, Homo Sapiens
  misc_feature (126)..(136): n is a, c, g, or t
tttttaaaagaggtctgacatgatcagaactatactttaaaacagtctctttgagtctatggacaaaatcatactgaaatactgtatgagtatgcaggaacacctataatattttaaggagggtannnnnnnnnnnaaagagagcactcacattcccagtctctatgaaagccacccgtctccagcttcctttgcaatggttctcagtgcagattccttatttattaactcttaagagagaaactagtcatactatgtgagttctttaaacacctaatattaacagtttagataggagattttaactctttccatagaagtatttctggcatcttaagtatacagaatataatttaacctattttgataactaaaaatccttatgaatatccgtactatgcttcacatacagatgtgagctgcacagtcaaccttatctgaactgaaaacatttcccatttttacctttattatgaaatttagaagctgcactacacaggtatctctcttcagagctatcctctgtgtatg

SEQ ID NO: 99576 - DNA, 564 bp, Homo Sapiens
ccggcacgaggtgataagtcaaccattggccacgatagatcacaagacagaggcttatcactttcaatttataagtggaatggagaacagcctttccaaacataacctgtgagaggagtttctgtaatcagaaaactgacttgttggcttgtatccgagaagcctttcctatcaccttagtatgatagttctctggagagctgtgaggaaatctttcttttaaagtggcggtcatctttgaaaccaagcatgcataaggaagtagagcacagtacaggaaaagaaaggccctctgctctgatcacacaccaccacaacatcctgacagatgacctggccatgcacagctgcctctccaggaaaatcttccactctcatcagggaacactggactggataactcaggtattcctaggtgaagtaagtcagacaatatggaaatgaagaaataaaaagagggctttcagggcacacagctcagtttgccaaattcaacatggctacaactgatccccaaatcctgagtaaacacccttgctatttaataagcacaagcaaaaaaaa

SEQ ID NO: 99577 - DNA, 554 bp, Homo Sapiens
  misc_feature (258)..(298): n is a, c, g, or t
ttgagaagttggtctgtcatctcccattgagcaaagactggcaggagataataaaaataaatatgggcacacatgtattaatatacagcacgcatttacaagtttatttttcagataaaattgtgctataagaacagctctaccaagacagtctgcaccatttccaagtctcagttaatttacagcaactgctgctttcggagatggctgtgaaaatatggaagttcctctcaagtaggccaagaaacagttctagannnnnnnnnnnnnnnnnnnnnnnnnnnnnnnnnnnnnnnnnagtgagcgtggtgactgcagaggttagtgctgtgaaaagctgggctaaatattctttctgtaaagtcaaacaggattccatcccctgtgaaataacacaaaatttcactctctaaaagcaacagcatgtaaactagaatgaaagaaggaaattatgtacgtatgcctaatattctttgtgaatgtctttcatttaactaaaattatattagaaaccagattgataaataaaaaattcaaagtagttttaattatcc

SEQ ID NO: 99578 - DNA, 454 bp, Homo Sapiens
tagtcaaaacatatttattacttttcagggtcattttgtacactcccgtacaaatacaagaatatagccatatttacaggtattgaaaagaaatctgtatattcaaacccaacatctaaatacagtagctggaagtcctgaactacaatagttccggtgcgcagagtgaattatttcccgcgttgccctctcccctttcaaacagtccctcaaagatatggtggtttttgaacataataaactgtttttggaaatgggtaacaattcctggcaaagttttaagaacctccttcccaagattttacaagtgtgaaacaaagatttagaagaaaaataaaactactaatttggactgttaaaagaagcataatgtcttgaaacagggctgaagcatgtttttagtctggaattgcagtcattttaaaatcaggttagacaagttagaaaaataaaa

SEQ ID NO: 99579 - DNA, 144 bp, Homo Sapiens
aatttaaacgccaagcaatggttatggatagaactaaatttcttttaaatgtagaaaatttggcacagtgtctagaacatgtagttgttcagcaattgtgagttataatgaatggcaagtaatgttactggccttcatccaaaa

SEQ ID NO: 99580 - DNA, 528 bp, Homo Sapiens
  misc_feature (78)..(138): n is a, c, g, or t
tgagccccaggagataccgcgcccacacccaatcttgggacactccctatctggttggaagagagtaaccagtttccnnnnnnnnnnnnnnnnnnnnnnnnnnnnnnnnnnnnnnnnnnnnnnnnnnnnnnnnnnnnntgctgttgaatcagaaacagatcaacagcccaaagattttcctgtccctggagtgccagccccaggaagctccagggctgagtggtcaggagccagtttctccagcccctcctccccacaacccctagtggggaggggcagctgtccatttgcccaaagtattaatgcaactgaagctgtgatatttccaacgactgtaggaggaaaaattaaggggagagaggaaaacaaaaccaaccaacccctaaaatcattttcttattgtacataacgacctcattctcctgtatatgcggaagatataaccttatatttggtaagtgtttcttgtgctattttatcacgtgacctgtttataaaaatatatattaaaaaagttgtaaaaacaaa

SEQ ID NO: 99581 - DNA, 544 bp, Homo Sapiens
tttgatgcagtcatatattaaactcagacatttgttcttcagttgatagagggacaccttcaagatgctttacttaaaagttatgtgaacctactagatcagcattttgcttaattttttacatttgagaatgtatagccaattctacctcatgggtgatttttttgttgtagaaataaagacccttcaggttctaaaggaactttaaaaattatctaaaccaatattaaatcatccttttacttgcaggttagaaaccagagagacgaaatgccttgtccaatgtcacattgtaggagaacgaagacctagtttatagtatcatcttccctttcctatgtaatcagttgttttcaaccaaaggaggagcatgtgaaatgcaaatccacccattttgctaaagtacagatagatatattgttttaagccacggctgaaactattggctaagataagggattttagaatatctacaaattacacttttatctgtgttatccctatctctcgccagcacaagttcctgaaatgtaatttgagtttt

SEQ ID NO: 99582 - DNA, 498 bp, Homo Sapiens
ttatttactctgaaacatttaatgctaactcatttatattttgtgaaacgatgagtgtatggctggagttcgggtggtagggtggagaggattgcattcctgtgccatttccccattcccaccagtgcccaactggacagtgattagtatcccctctccagactcaacgtcttcaacattttcgtttttctttctcacagttgagaaaatctaagaggctctcgacaacatggcatgcatctgtgaaaatcccactgcccttatattagtcttcattgaccatataaaaaatctttgactcaaatatatgaaaagcagtcagcatttccctttggccactggaaagcttgaggctgaataatatcagttctgcaaagtgctggcaatgcatcctaatgaattttccatgatgcatgtagtgccttgtacacaatgatcaagaaatgcttcattgaatcagaaattaatctattttataaagtgcttacattgaaaaaa

SEQ ID NO: 99583 - DNA, 459 bp, Homo Sapiens
gtttataaagagtgggtcctgtgtaacttagtcaagattaggatctgcggttagcaatgtgtaaactatatttttttgtcacctttatctcagaaacatcaacatgtattctctttgatttaattcaaagataattttaaattagaaatcaatgtctttatatcaagaggcttttgagagacaggcttgtattgtccaaactgctactttctaggtatgtcacccttggacaggttacttgaccactttgtcccttttttcctcctctgaaaatggggcatgaactagacctgactcagagggttattgtgaagattaaatggaataatccaagaaaaacacttagagtaggaactgcatataatagtcttcaataaatggcagctgtttttatgatgaagaacacacctgtgaaaaattttatattctgtaataagattaataaaagcaatgagcaaa

SEQ ID NO: 99584 - DNA, 634 bp, Homo Sapiens
tacaggggggatgaggtgtgtgtatatatatacacatatatgtggaaaacatatattcatattcatatctcatattatcacaatagacatatcttctccactatttttcccacactaattgttagatggctaaatttattgggtcaatttctctgcttactataccactgcaattatataagcaaactgaacctttggaaaatgctaattaataaggcagggtttgacacgactgggtttgaaaggccagcagtggggctagaaatacctaccacatacaactgtgctgccccatcactgaataatctactttaagcactgaaagaaattcagagattattcagtgatccaagtcccacaattttttctttccagagtaccaacaatcatcaaattatgtggtcctgacaccctcataacaagaaccatcagtaccttcttctgtatccccccaaaatattttaacctgcatcacttactctatacattcaaacctagttaaagcagaaagcaaaactattttctgactgcctcaatgatatatctggagttgtctaagtaatggattacacagttcccaattacttgtgaacagtatcaatggtcttcaaaaatactacagttcctatacccc

SEQ ID NO: 99585 - DNA, 725 bp, Homo Sapiens
  misc_feature (494)..(678): n is a, c, g, or t
  misc_feature (702)..(702): n is a, c, g, or t
tcacttattattatcacctattacgtactatacataattgcatgtgctatacttttatacaactggaagcacagtaggtttatttacagcagcgtaccacaaacacctgagtgatatgttgcatgacaacgtccacaagtgataggaatttttcagctccattgtaatcttatgggaccaccattgtatatgtgtccatcattgagtaaaatgttattacatgacacatgactgtgttcatcaggaatatgtatgctagtatgaacctataatgagagtgttaaattttatgaagcaaaaactaacagaacaaaagaaatagatccacaagcataattggaaatccacaattatatctcagtaattgatagcacttgtaggcaagaaatttagtagtatatgtaatcagctcttcatatatgcagattcaaccaatagcaatgcacaaatattcagaaaaaacacaatgacagtaaaaaaatacaaattttaannnnnnnnnnnnnnnnnnnnnnnnnnnnnnnnnnnnnnnnnnnnnnnnnnnnnnnnnnnnnnnnnnnnnnnnnnnnnnnnnnnnnnnnnnnnnnnnnnnnnnnnnnnnnnnnnnnnnnnnnnnnnnnnnnnnnnnnnnnnnnnnnnnnnnnnnnnnnnnnnnnnnnnnnnnnnnnnnnnnnnnnntgtggatagcaagggacaactgtntagaagatatgaaccacaccagt

SEQ ID NO: 99586 - DNA, 482 bp, Homo Sapiens
atattgtacaaataaataaataaaacagttcattataacagaaattgagcaataccatggagagcatcaagtgccagcacccagggaaatcagagcattcagagccctggaggcttcaaacagaaaagctttagagtaatttcagttttcattatttaagcctctcctaactaccagcccacactcaaggatagggattatgcaagtgcatgaacactaggaggcatggctcattgagatcaccgtcttagaggctgcttacctcatttgtccatctctttatattggctactgggaaggtttcctatatcataagaattagctacatatattaatagtttgcaaatatttgctgtcatcattttagacaagctttactgattttttgccatatactgtgttttaaatttttcagtaataatataatttaaaagtaatatatttcactattttaaaaaactaagccataccccgcccagcat

SEQ ID NO: 99587 - DNA, 698 bp, Homo Sapiens
taagactggcagctggcttctcaacagaaagaggcagtgggtgacaaagcagaaatgcagtttgtcaagtccctgtcccagcatcacagagctgactgtgaagggtggttagaagctaagaggcagcagattaataattggcatagataaaaaagttaccatgcaaatactaaaaagaagccagtgtagctatattaatgccagacaaagtagactttatgacccaaaggttgaggtaaaagcactactagggacaaagagtaatgcctcttagtgatgaaaggtaaatttaccaagatgataaaacatttctaaatctgtatgcacttcatgacataagctcacaatatacaaaacaaaaatagtaagaaagatttagagtgaaaactcattgacataaatttaaaactcacacacaacaccacacatctgttgagtacctctctctccaaggacacatgctgaatgcatcacactgggtggctgtgatgagggaggtgggattggggcatggaaaaaccgtgaaatcaagtgagagatacctccccacaaccaggtgccgcagcccaataggaagagacgtgcttggtcaacttagtttctgccctcaagcaccagagagaaaaggcagagaaaccaggtaagggcacattgtctattcattagacccatggagttttcaataaaaggacacaaaa

SEQ ID NO: 99588 - DNA, 414 bp, Homo Sapiens
  misc_feature (239)..(251): n is a, c, g, or t
aacaggtccgaaaagctcttctcaaccactgatactttaagctaaaataggagagaaaacaaacaagcaagcaaagaggttaatctaattacaggaatttaacagtcacgaatatcacaacttaatttgcaaattcaggtaacaatgacttggattcagaagcactcataaagcgggatgaaaccttaagtccatgagctgacagggtaaggcaaattccagtacaagtctctggattnnnnnnnnnnnnntccattgtcaaagtttcctgacttcgggtctcaagctactgctcctattataacttggccaaatttaagaaatctggactaacaggatcagacttgttaactctgcaagatgaacaaaagatctgcagctctgtgagactctgcaaaatactattactaagga

SEQ ID NO: 99589 - DNA, 523 bp, Homo Sapiens
tcttgctttatcattcctgattaatcactgtttttacattattaaaggtggcaattttctgtaaaaaatttaaaacagatgatcctattctgtcttgaaagttctgtaccacactgaccttaaccttgcttataacataacaattggtaaacttttaattcataatctttataccctaagatagtatttattaaatttttatgggtcatgaagaaactagaccctctccccagaaaaatctacgtacacagaatttacatagaacttgggttcatctacacaatttatgcatgaaataaaattgtactggtaccctataaatttatacaaataaaagagtttaagggagttcaaggatgccatatgtatattttaaaaaaatttctaagggaagtctaaaaaacataaattataatattacccaaaataagatgctacttttcacctaaccaagtcctgcctcatttcacactttaacctcctaagtatattcataaccctaccaaaagttgttttctttaaa

SEQ ID NO: 99590 - DNA, 495 bp, Homo Sapiens
tttcatttttagggtactgcatcccatttaaaattctaattacaactggacagtcccctctcacagaaaaaaagccacatccagacacccactctattttgccaatcatttcaggggccagggtcactcaggttgagcttttccggtgtagcccctcatctgcaagttgcagggaggctcactgaggctcagagtgaagacattttcaccgagttaccctgagaaggtctgagatgagtgaaaagatgtgtctgaattcttacatgtgggcctggaagggctaatgggaagggttggtctttatcacacccattattgaaaattaaagaagtgtcttccacatacctgggctaaaaaaacctcttttgcaaggttctgatgccattgactcccaacatttaattcttcattacaagaaaatcacagtaacatttataaaatgcagaagtatgaacacacagttattgaccttgaaaacagtgaaagaaggtcagc

SEQ ID NO: 99591 - DNA, 662 bp, Homo Sapiens
tttcatggtatacttttttttaattgatgtttataaatcaggctttgaaatgtatttaaaagtatacagtgcttatcaatacaaaatctttaaatctgttattattttaaaatgaattttaacatataatatttagtaatataccaatctaaaataaaatatagatcacgtaaaattcttgcttttaatagtaatatgcatcagtaaaacataaaatgggtcctctcaagacagaccggtgagcagacacagaatactgtgagatcattcgctaggagacagtgcagttgcttggataacaagtggatgacacatggaactcgggagcactagttatggagtcggtgtcagtccagatagaatgtcaacctgctcctgccgtgtgaaggctgggtgccagctcctgccctccacagagctataatatattaataataggaatggcaacaaaatgtgtgttcatcatctcagggcacacaagacaataggtaagggatgggatgaagcagatacattgaattgttaagttcccttccaacaagagggtctatgaattgactgtgatggcaatttcagggcagggtgctgcgtggagcctgtgacactggttccagtttgttctccagcctccttttctcacaaaagcaggtctcagtgcagat

SEQ ID NO: 99592 - DNA, 616 bp, Homo Sapiens
ccagatgcgacggtacaaagtgaactctgtgaaagtcttcaaaccaacacttcctctaccaagacaacatatatcagttacagcaatcattcaatctgaaacagggaaatggcacaatctgaagagacgtggtatatgatcttaaatgatgaacatgagaccgcaaaaattcactcctggagatctccgtagactacaatcaatcaaatcaatagtcagtcttgtaaggaacaaaaattagccatgagccaaaagtatcaataaacggggagtgaagaaacccgttttatacaataaaaccaatgagtgtcaagctaaagtattgcttattcatgagcagttaaaacaaatcacaaaaggaaaactaatgttagctcgtgaaaaaaatgctgttgaaataaataatgtctgatgttattcttgtatttttctgtgattgtgagaactcccgttcctgtcccacattgtttaacttgtataagacaatgagtctgtttcttgtaatggctgaccagattgaagccctgggttgtgctaaaaataaatgcaatgattgatgcatgcaattttttatacaaataatttatttctaataataaaggaatgttttgcaaaa

SEQ ID NO: 99593 - DNA, 411 bp, Homo Sapiens
gccccaccagagccccgtgccgggagctgacagctttcacgcttaaggcacgtgtgacctgggtagtcagacaccacttgagcccctgcccacatctgctggtttggggcttcagtggggagctgacagctgtgagcacaccactgtcccctcatccacctcggcctgcatggggcacccacttccttctgggtggggcttccatggtaagggggcctgcgtccctgcacactgcgaggactgccttggccacaggcccactccctacgacacgtgactcgttttagagctctgtcccagaggcgttcgtatgtgacccacagatggcgtcaatgtgaacacctctctttgtgctgaatttctgggccattcttttcctgtcttatttctaaatttccttcttccaagatg

SEQ ID NO: 99594 - DNA, 529 bp, Homo Sapiens
ctgctcgagtgtgagccgaccgctttcctgaaaatttgaaaacggctgcgccttgcccaggacccggctcctgagagccctgaccgccccctctccttcctctcctgcgttccagcttctgctcggctcactgtcccgcagtggtcccggcgggcctccctgagtccccagcacccggcactggctggcagcagggctgactccaagagcgaggcccgcaccgttctgtggggtcagcccagcgtcacggatgtttgtctcaggcggccccagctcccatgccccagaaggccccagaaggccccaggagggagttggcgctgcgtgaccgcgcacggccggcaggcagcacttcttcgtggcttcttcatggctgtgtttaatgtccactgacggcacatgcgaatgccatgcgtgcccacgctcctgggtgtgagatagtgctcggagaagccccagcactcactggcacccagccccatgtgcctgttgtggtgaaggaactgcaggctgcctatctgagactcgg

SEQ ID NO: 99595 - DNA, 683 bp, Homo Sapiens
ccaaaaaacccactgaatatagtgagttccagagtctagcaacataacagtggaaaagaaaaagtaacttttgaaacagtgtgacattaatgtgacaatgtgacatatactttacaattatgatcacttaagcaaatacctctgaccccataattctaattaatgtatatcattaagtgaatcacactgactttactctgaatttccttgacagccatgctaaaatacttaccttggacataagctaagctttaagtttgttgtttataacttcaaagagagacaagggacagtgacttaagaatattctaagctataaatttacatgtggactttgctacacacctgggatgcagccagatgagttttgttccattgcagtacatctgatgaccagaattctatcagagaatgttaatgaacgaaaagcctgagctttaagactgagattggtaccacgggtagtcatggccacctgctggcagcgtagggtactgcagcccagctatggttcagactaaaagccgagaaacgcctgtggtccagggaaaggtatgaagatcatataaaccggcggtggacaggaaatgccacagtcaagaagatgcccctgggatgctgagctcttacaactcgaaatcaacagcttttacaaataaaaccgctgcaaaagcaatagctct

SEQ ID NO: 99596 - DNA, 629 bp, Homo Sapiens
caaactaatgtatgatatttttttaagtgccagatcaatatggtctaaagcttcaataaggattgtgtgtaggtgaataaagacagctaagtgaatgtgtgtaaagtgtagcaaaagcagacagatatttatgtacagtattcatagaatggaaagttaaatatttttgcagtgtgtatttaaaagagaaactcaccataatagtgccgtctaaaaatctttgtaaagttaatttaatgtcctttagaagtgggagtctggtggaactgtgttggatttaagataccttttcactcttccgtatgtcatgagccttgtgggtcacctcactgtggtgcatgtgcaagggcgtgtgcacgcctgtgctttgccatcccatgttgtaaacagctgttccaaaggcacaaacgagtttagggtagactctgtaaacacctccttactcactatagtcaagaagtccagcggcgtcccaatatagaggtcccagtgcagtctgtccagaatagccagctccatcctcagcagctcattcggggaatagtcagagccatagtgctttgtgaagtcttttacttgtggaataaactgtaaaaagaaaataaagaggccaaagccctacatcaaaa

SEQ ID NO: 99597 - DNA, 440 bp, Homo Sapiens
tttttttatttgtttataaatggttacttgggttgctaccaaccttggccatttgtgaataatactgctatgagcaatgggtgaacagatacctcttccagaccctgctttcagttctttctggtatatacccagaagtggaattcctcgattatatggtaattccatttttaattttttgatggattgtcctactgttttccacaatggtgtgccattttacattcccatcaacagtgtacaaatgttccagttttttcaacttcaacattttttaaaggaagacaacaaaatccaaacacttaatagttatccaaaatgaagtacagagtggaataaaagattgaccaaaaaaatgaatgaaactttagtgacctgtggtacaatataaagagggctaatatacatgggatagagtctcataaagaacaaattgggaa

SEQ ID NO: 99598 - DNA, 929 bp, Homo Sapiens
  misc_feature (255)..(265): n is a, c, g, or t
  misc_feature (781)..(800): n is a, c, g, or t
caaagataaagaaatggaatactttattataaaacttataaaataattaaatattacacatatattttgacttttctctataatccatggttttattcaacattttatctcaaaatattacttagagaagcaagtgagaacacataataggctattaattaataaattaattttccataaaataataaaatgataattatataaagaaataacttgctgtttttcagaaggcaacggggttgtagtagagaaaannnnnnnnnnncctgttgataaaatggccacttctctaggccaagccaagcagattgagagaagttcctaagcattatttctctgggattcaagaactcatgactttaattagaatgggaacgaagtatgctgctaaatttaacaaaccactgtctagttgattatgctgagctggctaatccagcttgaattgagactttttaaagaagtaaaattgggttacattcatcaaagaagttgaggaataaagtagaatttatgtaaatatgccctttataaccacttctcaaaaaattacaggaggacacagtattataattactttggttttggcaaaatagtgtgatgttttttcaattgagaacaattttaaactcattaatgcctaccaacagctggcttctgatgactgaaaatactcttattcagtgagggtcttgtcatattatgatttattaatattaacatagcaagaagacagatggatttttttattaccactgtttcctcctttctttctctctcnnnnnnnnnnnnnnnnnnnnctgctgttagctgaatcctagggcaaatttaaacgtatcagttggtaggaaaaagccacaagtggcctttaattttccaagcagctctggtagtatgtacagagcattataaataatgatcctttctcc

SEQ ID NO: 99599 - DNA, 554 bp, Homo Sapiens
ctttcaccaacagattaaaaataacagacgaaagagaagaggaaaactggtaaaagcaagcatggtttaccataacaagcaataatgaacaacttggtatcaaagaagaaaaacttaaaaacagagtttaatctggtatcatttagagtgggacacacaggctctgaggactaactgtgaatagtaattgtggttttaaaaaatgaccttgtatcatcaatgaaatctaccctatattctgtttgatttggttaagaaggcagaaattagtattgctctgttcgagaagccttcaaaatgggatggcacttagaggcaaaaatttggtttatttgaaacattcagttttagcaaaaaacattcagtaagcgttgttactgtttaagacaagatctttttcagcaagaaaacagttctaaacaagcttttcagccaaaccaattggccatattgtatatacaactgatgatccatggtcctctgcagctagaactactatgtagtgtacatttatactcatcaccacaaataagttagcaaatatttttctttgg

SEQ ID NO: 99600 - DNA, 538 bp, Homo Sapiens
atttagaactaaagattaataactagagatttataaaggcaaaaatgttaatgaattaggaaacagtaaaccatttgaactaatctaaatactgattgcatgaaaatgccaataaaatcaatacatatttttaaaagccagtcaaggataaaagaaaagagggaaactaaaagtgagacattaagtatgagaaaggagataaaactaaagtgtggaggtgatgttaaaaattatattcaggtctgtgctaatcattttggaaatttcagtgagaagtgggcaattttcagtgaatatatcattgtaaatgctttgaggagagacaaaatctgaatagaccctgcaataatgaaaatgtctaggagccctcaagaaatacctggtttaaattgcatttcaggtggctggttatcacaccttgaagtatcaagtaattatgttatctaaattggaccaggtgttagaaaaatatgtgagacttcacaggtggctgcttatgtagcccttataccttaatctgataaaggtagcatatatt

SEQ ID NO: 99601 - DNA, 917 bp, Homo Sapiens
  misc_feature (154)..(165): n is a, c, g, or t
ttttctgtcaatgtttcatattttaaatcatagttattttataaaatgtgattgtgagttattatttaaaccatgccttctttagaggttggaccttttatcagtgtgaataactctttttgtcccttggatatcaattaaattgaattctaannnnnnnnnnnnaaccttacctcaggtgctgtttggctcctgcagccaaatacactgatgatttaattaaaatgtttatctcccccaaattttaagaactttatttgggttatttggaataatgtataaaatatctatatagattattatataattcagggggaagcaaattatcagaacaatttcatgttatacaaataacatcagaaaaatatcttaaattatatggcatattctattgattcatccacaaatttataagtccttaccacctttcattatattggtactaggcattatagtagtgctaggcactatagtaatgctggggtataaacaagaataaaacaaaataagttccttatttcaggtaacttacagtataggtcagtggttcttagcttgctttttaattatgaattcctttgaaagtctagtaaaataatccaacaccattattccccattgcacatacccccagatgttttagacatattttcaattgctccatggaccttaagaaaacttggttggtctgcagtttggtgtattatgggtaagactggacctggtgttagaaaatctgcatttgaggctttgttctgacagtgtctagtgtaaacatgggcagaccacttaaacctctctatagtcttctctgtagaatgatgataataccatctaattagcaggattgttgttttattcagtgagacagcatatgtaaataacttagtaaaataaaaagcaacgtgtttataatg

SEQ ID NO: 99602 - DNA, 551 bp, Homo Sapiens
tttttgaggtaggagtgaaagtttaataagtgaaagaaagctctctgcagcagagagggagcccaaatgggttgctgtttttacagttgaatgcaaaggcttttataagaaactgatgagggctgggtatctcatttgcataaaggcacaaacttctggtagctccccaccccattctcctaatgcacatgcagccccttagcttgagttctctatattgctttgttccccttactgcacatttgtcaggagatgtacttttccattgtgggcatgtctaggcaagtcacctgtgtaggcttttttatctgtggagctgtgcgcatgtctcaggcaagcccccctgtgcaagttcccttatttgtgcctgcagcttgatttttcaggctgttcttttgtttgaaagaattcaactgaggacccactctaactgcctgcctgtccggtttctttctcctctctcagagactgtgacaaaaatgacatgtgttacctccaggtcaaggcagttaaggccagcatgcctcatccattcctctcttccttccata

SEQ ID NO: 99603 - DNA, 599 bp, Homo Sapiens
tttttccatttccaagagcataactcactgccctttttattcactctttctaaaagtgtaactgaaaagatatccttgataaattgaaactttatgatgcaaaatcaacatttttcaaaaagattctaacacagtttaaaggcttctaaaaattaataaatacaaccaatagagaaataaacataacatggacatttggcaacacagtatctcaaatcagatataaggttgctacaataatgtactatataactctgccatttttaagtatatttcactcattgacatagcaatcacaactctccttcattccttcagagggttgctggtaaattgatcaagaaatgtgcttgaaatgtatttgattgatgcattacaactataaaatagttccaaagtgcaaatctgtgtaaaagtgtcatacacatcagctattcagccaattgtcatataaaaaatatatggtagccacttaagtgtactataaagtgaggataaccatctgaaatttataaatattcaagcctttgccgaaagcagcttgtatgtgaaacttaaatggcatacagtacaccagaaaaaggctccattccaaagta

SEQ ID NO: 99604 - DNA, 598 bp, Homo Sapiens
tgcggccgcgcccctctggcgcccagcaccgagcctgacagacaggagccttgggaggcaggtggtggcagaatgggagcactgaaccggaagagtgggccagacccctcttggaagggactctgctggtggtgtgaatgatgccacagcacctgctcctcaggtcagtcccctggacatgcaggcgcttagcactgcacggtgagctggaaatagaggacaggggtctgagccttgaggtccaacctctggtcaggctgggagaggcgtccacagacatggaagagctcaggaagaggctgtgcagctcctcaccccccagagggaagcagcaagtgctgaggaagcatccaggagcagggctggcatcaggggaagggggaggagcacaggggctggggtgagggcccaggagggcagccagtgtgcagactgctcctcatcccaacactgctcttgccgccctcgctcctgaattcagagcgttaagagaagcgacacagcagcgcggcctgtgtgagctgcacgagaactttcacactgccttgtcgtcacgtgagaaaaagtaaaaagttaagattgattttaacaatagacc

SEQ ID NO: 99605 - DNA, 582 bp, Homo Sapiens
ctccacagcaagaatgactgtcagaacatgtgcagtaaaaggcactttcaagtcatgctatgtgttgtacaaaaagaattattaaaaagaaaaatgtaccagtcagatctctagatgtttgtcttcttcatttagagaaatattatctggaagaaaatgtcctaagtttctcaaagtcagaaattatttctatgtagtccagacctgactccagataaatataaaagacggcaaagaaaggaagaaaaatgggtcatagaaatagaaaaagcatagtaacatggtagatttaaccttaaatatatcaataattatgaaacctttaataggttaaagtatgcaagtttaaaaggttgtcagaatggattaaaaaaacaaaatccaactatatgttgtttacaagaaacacatctaacatacaaggacaccaaactcttaaagataaaagaatgaaaaaagatgtatgatgcaaaaactaacctaaagaaaatcaatatagccatattaatattaaaatacactttaagaaaataaacaagaatctttataaaagttttataaagttattaataataactcaaa

SEQ ID NO: 99606 - DNA, 470 bp, Homo Sapiens
  misc_feature (334)..(343): n is a, c, g, or t
ctgtgtggccttcagcacatcttactgtatctcagttgtccactctaatgtgaaagtgtttggaatagatgatctctgaagttctgtcagattctgtggttctattatgaaacaaaagccctgccagtcactgagattaataaagtctaaacagcgcaaatggagacgaagttagtcatggtgtcagggaaggctttgaatggaaggaacaagatgctggatctgcatgtgtgaatcggcatgcacaaacaggcacactataatagctgaatttctaaagtaagtaaaaaaaatgtttaaatgcatgaatgtagtgtgggaagttaaaataagnnnnnnnnnntttaaagattgatttttacatcctattgctcctaaggaagatttatttacaggaaataaagttttcttctcatggaggcactgaaagaaaggctcataaaaattccctgaaaagttcattggtgcag

SEQ ID NO: 99607 - DNA, 503 bp, Homo Sapiens
aaccactgctaacaatcactaatgttcactaaaacactaggcttcaggagcatttggaaataattcctgaccgcacaaagaaacatgctggtgagagacagtgaccaagcccaggagaccatcatgagttccagaaaaagtgagagagagcggccacttttcctgtctcggagatacctcctactcaggacgcaggaagcatggggcagggcagcgccatggacaaggcgactcggtgcagggcctgcgggacctgcaggtgagaggaagcacaagctccagctcctcagctgtggaacgctgcgtgcgcggtgcacagctaccagctcggatgggtatttgagaatttaccgcactgacttggaccagacggaaagcagagaagagggagagctacacctgactgtccaccatccccgccagccccaacgtcggcttttcacttcatgtttggggacaattacacctcctcatgacagatcagaagtttcagaaaaaaggtc

SEQ ID NO: 99608 - DNA, 728 bp, Homo Sapiens
  misc_feature (200)..(256): n is a, c, g, or t
  misc_feature (692)..(692): n is a, c, g, or t
aatggggatacaacccaattaatatggataggggcagattatgtttctccaccaagcaaaacctagcgagcagctttcagtggccgttagaattttcacttatttccaaagggaattcaacaatagaggtattgcattactgagtaatgaatacatcaaagctggtgaacaataaattgcagcttttactctgagtgagnnnnnnnnnnnnnnnnnnnnnnnnnnnnnnnnnnnnnnnnnnnnnnnnnnnnnnnnngctttgtttacagatttgaaaaactttaattcagctctattaagcacctttatgataacatgtatcaaaagtgccattcttaaaatgtacatcaatgcagggagtgtttccagttccctaaagagtaaacaccgtattttcttctgtacacttatcctgaatgtgatcagagtatacctgcttcctatataatattgttcctagggatacccgccttggtagactatacaaaatgagtgcagaatgtaccactaaaaggaaatctttaacatacggagggaacaaatacacatggttttcattattcagggaggaggagagagtatacattattgtcttccatgtccttctctgagcctctttgttcatacatttcacaggaaagccccaaaataacttttcatgaagtttgatttctgctattctcctaaggttntaatccacctccacattttaggaacttatcaacaaa

SEQ ID NO: 99609 - DNA, 444 bp, Homo Sapiens
gtagtcagggccacgcggctgggcgcgccctctagcagcagccctgagtgaccgcagcgcacgagcgcgggaaaatgaggctgcgcgggctgaagagcgcaccgagaggagccgcccccgcggtaccgcgcagcctcgcgtcccgtcagtggggaacaaggtgaggggaaaacttattttacgggattcaaaggattaggatatgctccttccccgaaggggtttatagcctagctgatgaggtcggccagacgcagagaacagagaggcaaaattcggttataaagggctcgaggcggccgggcggggaggctagtcacggaggctcgaggctgaactgcaggcttcacgttaaagttacaagtgagttggacccagaaggcagaattacagccagaacgtagctgtgcatcatgtcttgaaaataaacgagcacatgtaata

SEQ ID NO: 99610 - DNA, 528 bp, Homo Sapiens
gaattgactctggctgtcagtgtgagccattagagtaacatcgaatcttggggcaaagagctgcccaggtgaattaaatttttccaggacactagctagtgtgccttggattgattacctcttctactgcattgaaaggcgccatgttttcctgaaatactaaattcccaacacctgggtaaacaatgaccttccagagagtggctcccgtatgcctctccctaggaccaaccccatgaacatgttttgtcacgtttgtctcatgtttctacttcacaagtcagtgagtgtgtttaaggtaagtacaggattattctagtaggaataggcgattgctgtcataatcaattctcatgttgatttcattttattgtaaagataaatttaaacccagttttgcttaagcacattgatgtaattttttggtattatttgacatgaaaaaacagcaaaattgagtgatagatacaatatgaaacttgttgatgaatgaattcaaatttattaaaaaaggagtaactgaaaaaa

SEQ ID NO: 99611 - DNA, 546 bp, Homo Sapiens
  misc_feature (57)..(57): n is a, c, g, or t
  misc_feature (286)..(333): n is a, c, g, or t
ttatgaagttctctaaacctgtaagtgaagtggaaacaggaaactttggattagaanacataccctctgaccagggaatatccaggatccagcatgtcttcacattggcagaattttctgaaataggaccgaaggtcatatatcactgtgtaatctatgaaaagagatgctcagaaggtttgatattcatacacactcttacaacttgttacatctccagagctcagactggctggctttacaaatagctggctttacaatttgcacagggataattgaagttcannnnnnnnnnnnnnnnnnnnnnnnnnnnnnnnnnnnnnnnnnnnnnnnatgccttgaaagtacaagattcaatattctgtgctttggtgtatgtatgtatttatctgtatgtgtagtggggattaggaggggacgattactccaaaataggattttgttccatcctgtatgggataactattaagcatttggcttgtggctaaaaatacatgttaaaataatactttttgtatgttatgttaaataaatgttattagaatt

SEQ ID NO: 99612 - DNA, 473 bp, Homo Sapiens
aaccgcttatcagagccctgcacctgggttggaaatggagacggattctctgtgtccaagaaaatcagaccctccggccggaaaagggaagtttattcttactgataaaatgtcaatcactgtgtatgattgtaatgggcaaggaaggcatttagcgagctagaagacattgatggctcagaaaaaggtgttcttggcaaaaatactgttttctgttaattttccaactgataccatctgggtctgtcctcccagcctgatgaatgtgtaggcagatactttctcagtcggagttgatttttattatcttgattgctgcatcctgtgcacagaggttttctgctcagctgggcttcatcctggggtcccagtcctggccccaagccttaatcagctctcgggtgatattaggcaagttgccaagcccctaagtgcctcagtttccaggtctgtaaaatacataacattacctg

SEQ ID NO: 99613 - DNA, 531 bp, Homo Sapiens
gcggccgcccatgtccagctcaggctgggccagagctccgaagaggactcacaggcagttggggggacagaaggtggggccagagacaagtgcccccatgggcaaagagtaggtgagacggggcagggaaggtagggctggggcctgcctctcagctctgatcccccagaaactcccttaggaaggaaatagagtttctcatccctgtgtttctgaggggaaaaggagacagagaaaggttgggcaggctgacttgggtcacgtaccaatacctaacgtttatgaagtgcttgtcagacactgttttaagctctgtagatgtcaaaggaccccatgacgtaggtattattattccctttgacagttgaagagatgaaggcgcagaggcatgaactcccgtagccagagagtgtgagctggactctacctggagcagcctcagtgcagagcccatgcccccaaccatgtccgtggtcgaggcccagcccagacagggcacaaaggggctgaggaagaggaagtaagatgcca

SEQ ID NO: 99614 - DNA, 489 bp, Homo Sapiens
gtcggagcacctcgtatccggcgcgcgggcccagtgcgggactgcggctgggagcccgggccctctgggagtgaagatacctttggaggtgagacggcctctctagcgcgttgacaccggccacctgttgagaatccatgtggggtcggctggctcaggagttgcgcaaggtggacacacaaaaccaaaagccggagttgggaaaagaaaattctttctctgaccatgccagacgcggccggtcaggctcgcagctccgcgctaggatcgggcggctgtacaaccaagatcgactttgccctgtcccccaacgcccccctcatcccacggctccacggctgggaggctccggactcagagctcgcggactcggcgctcagggtcagcaccagcagctcggcttaagccggggcaggctctctaagccctgctcagaagtcaagagcagcagtgctgcctctcctcgccgcctttcatgccgcggccgca

SEQ ID NO: 99615 - DNA, 637 bp, Homo Sapiens
  misc_feature (32)..(32): n is a, c, g, or t
  misc_feature (40)..(40): n is a, c, g, or t
aaagtcagataactagaatacatcaaaggaantcagcaanaccacatcagagtccaaaagacaaatgggccaataaccaaaaaaaataaaaaaaggacaaatggcaaaccaaaaaactctccacaggcaaaaggctaattaacctcctaagtaaagagctacaataaatcagtaagaaagatcaataacctcatagacacatgggcaaaggatgtgaacaggacaggaaatgtagctaatgcttatatcccataaaatacactccatctcctcctagtaagaaaaatgcaccttagggctgaactcatctgccatttccacaccctgactgcagggacccaagtgttcctatgtattgctggtaagcataaatgggaagacagtgtggtaaaatccatcaaaacagcaaatgtcccacactttgttcaagtaattcaatttttaggtacttcttcaacagttgtgttcctccttgtactaagtgacctacatacaaggttttcaatggtgtgtccacagtgagccacagtggggttctgtgtagctacccaaagatgtagagcacttgctgctgtgtacttaagttggaagatgcacaaaaaatgccagatgtggaacagggtggagaataagcaaa

SEQ ID NO: 99616 - DNA, 481 bp, Homo Sapiens
tttttctttttgaaagagatgtgtcttgctctgttgcccaggctagcctcaagtaattactcgggccttgggctcaagtaatcctcccacctcagtttcctgagcagctggtctacaggcacacaccaccaagtctggcagtcatctactttaaactaaatgttagggtaagccatttgattgaatgaattcataatataatgttgtagagctctgttcataaaacttgtatgattttatgataaaatttggtaatgtgattatctttagtgaggattgagccaatatggaatcagagtttagccctgcctctctaaattgttctttatccttaaatgtgtagtagctggattgcctacaattctacaattttctgttagaatttatggcagtagttttcaactgtggactgagaacattttgggaactgtgcccattataaagtttgtctgaagacctaataaataatttgcctttcaaa

SEQ ID NO: 99617 - DNA, 501 bp, Homo Sapiens
ccatacatgtacatttccacccactatctgaatgaatctgttccaaggtgcccaaagaggaaggactaattattcatttactgaaatatggatagttcatcttttaagaacctagtaaggcttttattatctatcattttacatttttttcttattaaataaacatcctttaaaggaaaaaggatttgagcagacatcatgaagtgaagccaactgtttagactagaatgttatgagattaaacccacaggagattattcatagacataaaccctcattttaattagtggatctggatttttgtcatatgtggaatcataatttaaacaaaatcaactaagatgatccaagttccacacaactgcacttcaatattcaagtcggtgtgaagatgcctgactactgcgtcacaagattctgagctgtcgtaaaaagcctggctcgtggtttctatttatagtgtacacatgttgggttataatcacaaacctggaactctgt

SEQ ID NO: 99618 - DNA, 497 bp, Homo Sapiens
tttcacacagctaagaatttaatatgttagactattattaattatgaaaacacataaagaattctgcatataatttcagaggtctatgatttctaggggatccttagcctggttccggatggtcagtaagacaactttcttcaatgcctacattttccctctgaattccatctgtgtttactaagcatctgctgtgtcctgggcagtccaacccacatgagtatcttggtcactagtgtcatcagcacctttgaggggtagggatcattcctattctactgatgaggtgagataacttgtccaaggtcgcatggtgaagtcgctgttgaaatctgtcttctgactcgttgctctgtcttcatctgaggaaagacttgtgaggcttctgaggaggctgctctccatcctgctgtgttctgtcagtgacactttgtgcacacaggagatcctaagacacataccctaggccctcagagccggcagtgacttcttcaaaa

SEQ ID NO: 99619 - DNA, 474 bp, Homo Sapiens
ccaggttcctgcccgcccagcgcctgcctgattgctgaatgcctgccaagctcctgcctaatctggggagagctttagaagccgccctagggcaggctgctcttttgtttctggaatccaggccactcagcagaggggctggcttcctgcactgcgctgctgcggccttcaagtggacttaggtcaagagtgcctggggaggaatgcagtcccttagagcaaagcccttgtaatgaatgccttccctgcaccccctaattgggttagcgaagtgatcagctagattctcaaactaaacaggataggcatgctgcagtcctacattgttatttccatgacaaagaatctcccttttcccagtgaggggaacaagctgaggctcagagctgctaattctacttggtttgagggctctgcagaggacacactgacagaggcacctcagctcaaaggtagaaagcctcataaaaaaga

SEQ ID NO: 99620 - DNA, 500 bp, Homo Sapiens
cacaatattatgacaccaatttgaaaaataaatcccagtttctccgctctccctcccaggtgttcacagaactaagaaaataaataccacatctaaggtgtgctatgcaggcagctctgggggctcttggagccgcctctaagcaaacatgtagacaccaggagaaggttcctggaaaataacaagtgcccaccgacggcgcagaaacccaagaatggaaatacagctttccacagcctttctgcctcttcagcaggttcacggagaagttgtcactcaaaggacgaccaagaaaccaacgtgcgcctgctgagccctgccaaggattatgctctgagagccggaggccgttttgtctctgtacagagggaactttgtgcaaattctctggaaccagagctccttcccttggccacatctgatctcaccataggcaggaaacctgcagcctgctcctcgcgagcgtccatgaggaaacttgcagggctggtagaaagaaa

SEQ ID NO: 99621 - DNA, 515 bp, Homo Sapiens
tgcggccgcagccaaggcgccggtgaagaagaacgcgaaggtggccggtgtgagcgtgcagctagagatgaaggcgctgtgggacgagttcaaccagctgggcaccgagatgatcgtcaccaaggccggcaggcggatgtttcccaccttccaagtgaagctcttcggcatggatcccatggccgactatatgctgctcatggacttcgtgccggtggacgataagcgctaccggtacgccttccacagctcctcctggctggtggcggggaaggccgaccctgccacgccaggccgcgtgcactaccacccggactcgcctgccaagggcgcgcagtggatgaagcaaatcgtgtccttcgacaagctcaagctgaccaacaacctactggacgacaacggccacattattctgaattccatgcacagataccagccccgcttccacgtggtctatgtggacccacgcaaagatagcgagaaatatgccgaggagaacttcaaaacctttgtgt

SEQ ID NO: 99622 - DNA, 569 bp, Homo Sapiens
tttaataaggacacctctttccaaacagtgccatcaaatatgttcttatctcagacttacgttgttttaaaagtttggaaagatacacatctttcataccccccttaggcaggttggctttcatatcacctcagccaactgtggctcttaatttattgcataatgatattcacatcccctcagttgcagtgaattgtgagcaaaagatcttgaaagcaaaaagcactaattagtttaaaatgtcacttttttggtttttattatacaaaaaccatgaagtactttttttatttgctaaatcagattgttcctttttagtgactcatgtttatgaagagagttgagtttaacaatcctagcttttaaaagaaactatttaatgtaaaatattctacatgtcattcagatattatgtatatcttctagcctttattctgtacttttaatgtacatatttctgtcttgcgtgatttgtatatttcactggtttaaaaaacaaacatcgaaaggcttatgccaaatggaagatacacatataaaataaaacgttacttgtatattggtaaaaa

SEQ ID NO: 99623 - DNA, 925 bp, Homo Sapiens
ctgggttccctgggatgtaaaatgtgggtaatgttagagttggtgtgaatattaaatgtaaataatgaatgtaacatacttagctctatacctggcacccaagtaaacaataagtttgttggctattaaagacgttgatttctctactgatatcgtcagagatgggcctcatgctcattaaagttccttcctctgcgacctatttccactctggccacaataataactaattatagcagaggcctgacccgactttcggctgttggcctcccttccccacatcgaaaaattcaaatcatgacccagggtccatcctagaagtgtgccatctgtatttatgaatggagcctaagcaaatctgaaaaccaagcagccccaggcaactgagcccagcgtagcaaccgacgccggggcctgttgctaagggaaaagaaagaaaggacgtggtccgtcagctattgctctccgggggcagctacttccggtccccctgggagctgtcctgcggtctacgttcccccgaggtgctgggactgcggccgcaggttccgctgtctcgggaaccgtcgtatccctcggtccggcggcggcggcggcggtagcggaggagacggtttcaggcctccggtgcggctgcaatgctgagctcccgggccgaggcggcgatgaccgcggccgacagggccatccagcgcttcctcatagcagagttgggaggagaagccagatcttttcatccgcaggccccaccactctcctcgtgatgtcattttgcagaggaatggagtttccaaagtcgccacttgtccctgggtattttttccttatgctgccaaagtcatggacaagtcctctctcccatccccttgacactcttcccttcagtttccatcttgaacttcgtggttttaagcacagacctggg

SEQ ID NO: 99624 - DNA, 544 bp, Homo Sapiens
ctgagctttccaaaacaactgcagcagcagcagctgccgcttcagcagccacagaagtgttggtgtcaccaggacacagcctcagagcttcattctaaaaggaaatgtctcacatggatcttatgcagagaagcctgagcgacttgcactttcaacaatggttttgtcatagatgtaaaggtctgtttccatggttacccaaattccaggcactggccccaggcccaccacaacgcatccctcaaagtctctttggcagaggaaaagcatttctccttgctgcggcaagtcagagccagaatctcgggttctcctgctccaaagcccccactacaccctcattcgcgtgtgattcatgcgtttaggtggttctgctcagcgtcgttttttgagttggggggcggtgagtaagcacaatataagtttccttcatttctcttctccttgtttgagctaaggaattactttcttgtaccaaacattacacccttggaaaacactccagatggttctcattaaaattccaattcctttttttgcaaaa

SEQ ID NO: 99625 - DNA, 484 bp, Homo Sapiens
aggccagagaattcaaattgttaaaacattggcatttgaagaggagaacaaaatgtagcatgatgtatttaaagtaaggcctttagtaatgaatgtaatgagagaaaatgttttgaaaagaacaaaacatcaaaatgaatagaaagaaaaattggaaggcgtccttttggtaacccgattattgtgtattacctttaaatatttcacatcctgtaagtgcttaatcatatcttttaattgtgtatttaagaaaagtgttttcacaacaaaagcttttgataaattgctgcgtgacatatactaaataaaaaaatgaatatgttgatcattaggggtgtgggagcagagaaaattgtgaaagtgactctcactaaagatgttagtagtttctcatgtcatttaaaaatgtttgagtattctgcatagcagtttgtaaaagtgtaacagcttattgacttaataaagcttttcctgcatgcaaaaa

SEQ ID NO: 99626 - DNA, 556 bp, Homo Sapiens
tttcactgtttgtaaatctcccaatgctatagggcacaatcaattaaaataattaatttttcaaaaccctgaatttatttgaccgaggctaatttcactggaatgtatgtcgtgtatctgcatatcgtccaatttctaaaatactaaaacattttatcaatgaaataaatgaattaaatcgccacctatgaaagtacctggcacactacaaatctcaatagtcaaattctttgactccttgaaatctcaaacagagctaccgcctctttatttactctacaatttacttctgaagaaaacattgagtaattatcctattccagccatcaaagtatgggaagaacagaaagagtcagcagcggtaagcggtatgggtgtttaagaaactagccacggaccagcagagcctgcgaatgcgcggcgatgtgacgacaaggttgttgatgccacagcctgtgagggacagcaggcaagatgccaaacggagggacccgcgtctctaagggccgccggctgagctggggctgatctcccttccgcctcccgggaaccccag

SEQ ID NO: 99627 - DNA, 498 bp, Homo Sapiens
ccctcatagtcctgttggaagatgctcactactttctctcttctctctccctgccctcccccactccattcagttgattcatttatgcaaattctgtttccaacttgaaaccattttgtcacatctgttggagagataatcactccttttccttaacattctgccagctttctgatgttgaagtgtttcagttgactacctgatgcaaaagctataaaataaacagtgggaaggggaaaaattggtgtcctgttttaatattttcttttgtagccttgacactgatggacattttccaagctgactcagtgttcagtgtcaacttaactctcagatagtgttgccatcaagaaagcatgcaacatcattggtttctaatgattttatggcttgtgacaatattttatctggactgacatgcctctgctgcttttgctttgtacttcattgctggtaatacaccctcagatggaaaacttacaaaatataaacttaatt

SEQ ID NO: 99628 - DNA, 550 bp, Homo Sapiens
actatgtgacctggggcaaatgatataaactctatgagcctctttccttatctttaaaatgaagagaagtaatacctaccttgtagggctgttgtgaggattaaatgaagtaatgcatacagtgcctaacaaagtatttaacatcatattttttaaaagctcatgaaatattagtttttcttccttcccctctttctattttctctcctgttcccttttctctccctcctctgccctctccttccttcagatgttagtctaaaacagcaccttggatctaagcagcacctttgagaaagaaaagactgcttcaagaatgtctagttgcacctcctttccgtatgtggcctaaatgcctaggttggatcaatagtttaatttttttattgaactgtttaatattgactatggacttacattcacttttactgttttctgtatatttacttttgcttgaagtgttttaatattgactatttacctctgctcatttttattgattttctgtattttttcaatgaaaattataataaaaattatttttgttaaa

SEQ ID NO: 99629 - DNA, 488 bp, Homo Sapiens
  misc_feature (20)..(20): n is a, c, g, or t
ttccagtgacatgttctaanaattgcaagttatttgaggaggttttacagccaataggaagttcttgggctaagtagtgtttcctataaaatgtgccctgaaacttctttctgccaagcaatagatacaattgagagattgtaaaatgtgacatagaatgaaagtctctcaagactacatttttctttcttgattttgcaggaaaactaggtgtctgtgttcactccaggctgaagttacaggtgagtaaacctaaatgtaaggtggactatgctaaaaattcccaatgaagaaactttcacatgtcttactctctgtcctagtcccagagcctgtaaaggtgaacccactgggactggctgggggagaagaggaagatttgttccagaaggaactgtctgagggatgataaagatttctatacagagaaagggagtaatcatcacttgttgaaaacattggttttattttttccaggtctgagcaaa

SEQ ID NO: 99630 - DNA, 368 bp, Homo Sapiens
ctaggaacttgtcaggatactttagtgaccatcccctcactataactctcacccagacccacctaactgatgcatgagaagagccactagctgatgtggcccacagctcagactgagccagcatggcttgtgcaggggtaggtagcacagcatcatccagacactgcctcccctggtagcttccattacatcatggacagcactgctcttccctgacttaaccttctgctttgttcaaatactagaaatattagatttcaagttcaataaagatgtgggcagatctgcctaagaatatttcacaggacaatgccttccactgagttaatgttacttgctcaaataacccttatgatcaagttaggtac

SEQ ID NO: 99631 - DNA, 509 bp, Homo Sapiens
tatgtctgccttaccagttattcacaaaaacttatatgaaacgcagtcctcctcagagtcattcaggaatacaaactgaactgtgtccgtattatatctttcattaaaagacactgtaaaaacagatacatggggttcaggaaatgtgagggtcacacaggggcacggaggccaaaatccaatggagaagtgaaacagccttttttccaaaatcaaagtagcactcaaaaaaccgtagtgcataaagaattgacgctgcagtttcattttttatttcctcctgctgtggacagactgtttcgctggcggaatgtcggttacctaggtgacagctccacagccatggcgactgctccaggccccacagacgctcagggccgagccccggcctgtggatgccgatccctggccactctacccaccagagaagttccagggagaaaggaacgctgccaaccaaagaggtcattctaaacctcggcaaactggggctctgatgcaaaattaaa

SEQ ID NO: 99632 - DNA, 462 bp, Homo Sapiens
gaatgaaagtgctattgcctaaagtgatgaaattttcagaggatgtatcggtcctgtctggtggacagacggccaccagagggaatgaaccagtcttctctgaacatccatgaggatgaagaacagtcactgaggtgacggtaccaagtcaccggccacctcccagggatcctctcatccggtcctcacagcagcgctgcatggtcggacctcatcacccacattccaccaagaggaagctgaagcccagggccttcatccactcatgtccgccagacccctggcacccatcctgggccccaccccatcatccaggccttgggccttcgacctggggagagtccctgtctcctccatgagccgtccagggcctgaagaggtatccaataaacaagaaagcagaacacaaagagctgtgatggagtggatcttatgtagtaagaataaaattattttgagaaa

SEQ ID NO: 99633 - DNA, 604 bp, Homo Sapiens
  misc_feature (61)..(173): n is a, c, g, or t
  misc_feature (212)..(250): n is a, c, g, or t
  misc_feature (442)..(539): n is a, c, g, or t
caggcaattctcttgcatcagcctcgcgagtagttggaattataggcatgtgccaccacannnnnnnnnnnnnnnnnnnnnnnnnnnnnnnnnnnnnnnnnnnnnnnnnnnnnnnnnnnnnnnnnnnnnnnnnnnnnnnnnnnnnnnnnnnnnnnnnnnnnnnnnnnnnnnnnaattacaggcattagccaccatgcctggcctattctggnnnnnnnnnnnnnnnnnnnnnnnnnnnnnnnnnnnnnnngtacacttttcctgggtggtctcatccattcctttgctttttcataccatttatttgttaatgattcccacatttatttatgcactgggagagctcacaggaatctcagaaactgatgaggtacaattctgaaccctcagtctcttccctttaaacctttctttttctctactttaatttttctaaagagtnnnnnnnnnnnnnnnnnnnnnnnnnnnnnnnnnnnnnnnnnnnnnnnnnnnnnnnnnnnnnnnnnnnnnnnnnnnnnnnnnnnnnnnnnnnnnnnnnnccctttaaacctttccctggcctttcccatagctggtgaaggacacctccatccattccgtactc

SEQ ID NO: 99634 - DNA, 533 bp, Homo Sapiens
cccacttgcagaatctgtgaactcaggaagtccttacctgcataatttgtggccattttaaactaaagaaggaagtctctctcacattgccatgctcactcccacacagcttgcacctccaggaaggtctggaaaggccatttgccccaggtgtaaatgacacgcagtgctgagaagcaggaggagcctggcagagtggatgagctgcagtggaagagagaggtccccttggaaagtgggggtgtggagggagggcttagggccactccagatgctgctcctagctggatgtggtcactggactggtcaggggtaactggactggatggggtcactggctggtcagcgttcagagaggaagcgggagagcagagcagcagggcccaggggatggagcgaggactcctaccagctcgttaactgaggctgggagtcagtctgtgctcagccagtcccgtgcccaaattcttggaaccaaattgaaatatgtacttttaacaaaaccagtgtttcaattttcccttaaaaataaa

SEQ ID NO: 99635 - DNA, 649 bp, Homo Sapiens
ccaagaattcggcacgagggccaacaaaactcttatgtgtaaaaccattattaaggtctgtagtatcagagacctcaaaatgtgaatatacagcatatgatttactacatcatttaataaatgtctgtttatttcagtaatgggagaatatcacttttactttgataatataagggtagatcaaaagtttcagatatgtatgagaaaagccagattatatttttaaatgctatatgtactctacatctctttcataatggaataggagaaagatgtcctgaaaaaactggcaacagtggatagcctcagagttctaaattaatcaaaatatctcaggtttctttcattcacataatctttcttctgtgcttatgatctcagtggggtttcttggattctgagataatgtgcccctttgctatctagaatgtgtatgccatagaaatactggatagaggtaggatcagcagctaatctatgagaaattttgtatgattagacacaaaaaattgaatgcttatcctaccgtccagtaaaaaatatttttcggtgtccccaaaaatagcaatttattaatggaaaaatataattttatcactaccactttttaatgctacaagtttctccaggagcaaaggataagaagaaa

SEQ ID NO: 99636 - DNA, 321 bp, Homo Sapiens
  misc_feature (224)..(224): n is a, c, g, or t
gcctataaactattgcacattcaaacaaaacacaagagaaaagatgtccaacaagataatatgttcaggaacgtatcaacataaaaactagcttgtgcccagaaataaaacatggataccagacaccactgcagtcaaacctgtcttaatttgcttctgttttaatgaccttaagaaactggtccaaactgattatcagcaatacattgtttttgctttttttncttaaaaaaatattttgagaccacttttgatacacacacatataactctgtggtcataacagacaaatataactttagcgagactaaacaaaagtgc

SEQ ID NO: 99637 - DNA, 525 bp, Homo Sapiens
ttttttttacatatacaaaatcccacaaatttaatgtgcgtcaatatccatgcagtaaataaatgtttttacaaatagagttctttttaaatgataaaaatattacactggacccaaaattccatacaaacattaatacatgatttctcatccattttgactaaatataggattactgaaaatgtgctgtagaaaggccactctcctgtacagttgtgcaaagtctgcaaaacgatagtgattcaatggtggtttcaaaagcaaagaaaaagatccccgctgtggagtttttactttctcctctacagcaaaaatattcactggcatatatctgaactcttaaagatgaaagtacattcactgagctgtacaggcaacagtataaagctgattagaagtagattttaggatatagaatagtaaaggaggttccctttctcctcctgaaaaaaacagcaaattgtgacttgtacattatgcagccagacactaaaaagcagcacagtcattttcatgctgtgatca

SEQ ID NO: 99638 - DNA, 494 bp, Homo Sapiens
gccaaaagtgcaggacagaatgtcttccttcagcttgatagagcggactctacagcctggctctgaggattcttgagagagtgcatggtcttgagtacttcctaaggggtcagaacgtgggctagatgaggcctgttcaacccctccacattttagatccccctgctcttccttggcatttttccactgaacccagttcttccaagcatttaccccatacatgtatttcagtgtcatcccggacactgagcagccttgaaaggctccttgaataagactcctgggctccacagccactatagacttcttccgtccctgtaagaattccaaaaatttacagaacataaaatttagttttggatttttaagagtcagggttctcaaagctggaaagggtatacatttgtagaataaagaatttagttttatatcctaaagattcagagttcttagagcaagaaagggctttagagattatttaatccaatccatat

SEQ ID NO: 99639 - DNA, 541 bp, Homo Sapiens
tctgttagaattaacatgtaaatgtatgggtggattacttataaaggaagttgctaggaagaatcagaaaacataccgtatttacgtggacaaatgtctgtcacaggagcgtcagatcaggattgctgaaggagagctgagaatgaaaccaccatttattcagcactcagaatgctccaggcagtgtaatctcattccatcttcattcatgactccagacaggtattgttattcattgtttatacttgagaaagcagattcagagaagttaaagtatctaccacaaggtacgaaagtagtaagtagtaatgccagagtacaagcctaggtctgcttccaaatttcgtggtttcggatttagtgccttcattgtgtttcacctacaggttaagaagttgttggtaagcaagaaaatatttaagacgctgggagaatccaaaaaattgtctagttgtgtgtaacatagtctcaggattcttacagtgtgcaattttattcaccccctcatattcaaaataacagtatcagtttgaccttgaaa

SEQ ID NO: 99640 - DNA, 894 bp, Homo Sapiens
tttccactaattatgttaccactaggagttactcagtaagtcacattttgtttatacttatatacacacactctctcatacacacagtggtcaaatatcaataactgtaacaactttatcaactttaagctgaagcttcataacagaaaaagttctcatcataaaaagggatgtttattatgctctgtttaagaaaccaagggcctaaagaacacaacaaattaaagatacagactttgaatttttggaaaatacggttatgtggagcatttcattgccacagtggtgcctggaatgtgaattgttaactctgcatgtgtctttcacattgatatttgcacaggagcacacacacgtccatgctcccaaacagctatgggaagatggcgatctctaccaccaactggggaagtctggaaacctaggaggacaggccttcgtggggcagcaacatggaatccagagtctaagatcactagttggtgattttacctttgaagcctatgttcactgaaaacaacattatccattcaacaaatgctaaaaacacaccaactgcctctttctgatattctgatgaatgagagctactcaaaatcctagagcttttgaagagactccacttcccttccccagcttcactgtttgacccatagccaggttttctggtcgggtttgttcccattaccatgtttaacgggggacgaaagccattatatacattatcaggtacccccaaacttgacatgattctacgtaacaaagggtatgataagcactgcagggtggcaaaactatgatcttattgaactagacagaccaccaatttcacttaggaattctgacatgtaagaaggacatgttttgccctccaacaaacaaaataactgcata

SEQ ID NO: 99641 - DNA, 550 bp, Homo Sapiens
  misc_feature (215)..(230): n is a, c, g, or t
taaagtcatcctggaatacatccaggatccacggtaaaacagagttatccagaaccctaggaaaccagccattcaagtttcatcatctggcatcaatgagcacatcctatgtgtcagacactgcgcttcaaggatagaaagagaaatgatggacagggccttggggaatcgttcttggacagctgggttttaagagtagacaaacatgaatgcannnnnnnnnnnnnnnnccccgtaaaaacactgtacccatcatcactacctttctaaattggagataccaacatatttcaatgctaacttttcatgagtgttcagtgtcaccataatgaaaaccagtaactgatgagacgtgctgtgatctcattacagaggaggctgcgtgtgatctgacactgaaatgcttctggtcagctgcacttctgggctcccatttctgcttctgatcatttttttgggtctctttcttctcatctctggtcacatctcttgtattactacaccaatctgcagtgggtcctgtactattattttgttgccgtagactaag

SEQ ID NO: 99642 - DNA, 464 bp, Homo Sapiens
tgggtgtgggccacgtggtaaccaccagcatcggcatgtgtgacattgatattcgcccgggcctgtacgggagtgtcattgtcaccggcgggaacacactgctgcagggcttcactgacaggctcaatcgagagctttcccagaagaccccaccgagcatgcgactgaaactcattgccagcaacagcaccatggagcgcaagttcagcccctggatcgggggttccatcctggcctcactgggcactttccagcagatgtggatctccaagcaggaaaatgaggagggcgggaagcagggcgtggagcgaaagtgcccctgatggcactcctccccacacacctgctcccaagctcagatggaagtcccttaacccccatgccacattgcccccctcctcctttccctcttgtcctcataaatggtgatgtttctgggttgaaagaagtaaaaatgttttaag

SEQ ID NO: 99643 - DNA, 561 bp, Homo Sapiens
  misc_feature (431)..(447): n is a, c, g, or t
  misc_feature (546)..(546): n is a, c, g, or t
gcggccgcggccccgtccgggtaggtcccccggcgcagcgcacggggccagaccaggcacgtggcagccgcggcccaggcggcagctcttccgaaaagatgaaatcattgtcgggcgacggacaagtctcccgacccgggactcgaacgtgcgccgtccgggaggcgggcagccctcccctcagctgcccccgagcgaactcagtcaggcctccccctcccccttcctgcttggctgggatgcagccgccacgctgtgcaggcgcgccgcgagtccgcaccgagattgctgggtgacacttaactttctgaattccatgccgttggctgtgggtgatatcaccgcctcagtgtcgtgtttctccgccccttctcttctaccgcccctcccccgacttttctcgccacttttttttgctgagtttctccacnnnnnnnnnnnnnnnnngttagttctgaaaaaacgatgtggggacgttatacaatctcgttgtttgtatcataggatgttatgattttgtaacagcgaatactggaaaatactctntagcgtatttatttg

SEQ ID NO: 99644 - DNA, 440 bp, Homo Sapiens
atccattgttttgaaggttggtgggtagttgcaaactccttgatgcatctgctgtgctgttgcatcctccctcctgtctatctcccctgcgtatgtaccactgtcgctatggtcacggtactgagcaccagggttgctaggttgcacaactttaagggggtgccattcgcaacctgcctgacacgaatggtgctccctggaattatgcattgcaacatctgcacgtgatcctgtcgaacaccagaaaattctactccagtggcaatggggaggctggtccctggcttgcttaaagaacccgcttttttattgtgtaacattatatacctttcaggacatttgacaagatatatttaagcatttgttaattttgtattattaaatatgtgtgtttataaagaaatagattatcctgaaataaagagaaaacgttggcagta

SEQ ID NO: 99645 - DNA, 419 bp, Homo Sapiens
actgggctaatgctaatgtcagcagacagattgaggacactgtattatacggttactaatagtaagtatctttcagtttctttccctatttggactgctaaccaaaatactgatacgactccgatgagtggagaaccccaggttcttcctcttgggtcgaattagaaaaaaatgacatggacacacatggagtagttttaaggagcagggagtttagtaggcaagaaagaagggggaagaaagaaataagctcccctgtacagagacagagggaggggagctccaaaaccaagagagggaaccccacctgccacggataccagtcaggtatatgaagaggctgaaggtgccagtgtttgatttgcatagggctcgggattggtttgaccaggcatgtcatccacatagcctgttaaaaa

SEQ ID NO: 99646 - DNA, 381 bp, Homo Sapiens
aaatataggttcactgggtaaagaagaatcaacttgatccaaaggactggaacctgaggaattttcctttggaacatcatctagttccaacactacatagtcatcaccagcccgacaaaagcttctttaatgtctggtcatacatggtttaaaactgacataagcatgtattcttccatatctccagcctgaaattgtatgataccctcctgcaggtttgggccagacagcaataacagattcgtggaccattgctgatggctccttttcagtgtactgtgacatatatggcagcgtctgtatgaccagttcagtagaattatagatgtgatttagtttttattcacactatggacaagccgcagaagattccgaaatgtg

SEQ ID NO: 99647 - DNA, 248 bp, Homo Sapiens
ggttgcttaagcagtcctcccactgagcccgctgtgcccaggcctgagttactatatttataaaagttatttcatatgatagacaaatcattcaaaacataatgaggtaaactgccaaaagaaaccattttaccatatttgaaggcatttaatgtaaatgttgaatttaatttcatgtactggaatcagtctttttgcatatgtaattttcataccaaaaatctctcttcagttgactcctggaactc

SEQ ID NO: 99648 - DNA, 490 bp, Homo Sapiens
gagacacggttactttatctactggatcagtaaggcacacaattaacaattaacaattaatgtttatttacaaagtaaagggaaaacctgtgtaacatgagaatttggcatgacaaaatggagaccattttgtatctgctgttgtatcttgtccgggttgcagacgtgcactattaaagtcccaagttaatagagcacaaacccttctcgctcctcccccatgtgcccctctttttagatgtgtataacttaaactcgatggctcaggaaaattccactaattagaatcatgtacagtaccccaggtcgttgtccagatatacaagtttgctaatgtagttaagcctggattattaaacacttttcctaaattattgtaaacagaacagcttagagaaaggtattctcagtccttaatattgtatagtagtttatgagcccctctctaaatattggtatttttatattccagagatgtacccaatagaaa

SEQ ID NO: 99649 - DNA, 481 bp, Homo Sapiens
agaagaaattgagtggcatattgtaaatatcagatctataattgtaaatataaaacctgcctcagttagaatgaatggaaagcagatctacaatttgctaatataggaatatcaggttgactatatagccatacttgaaaatgcttctgagtggtgtcaactttacttgaatgaatttttcatcttgattgacgcacagtgatgtacagttcacttctgaagctagtggttaacttgtgtaggaaacttttgcagtttgacactaagataacttctgtgtgcatttttctatgcttttttaaaaactagtttcatttcattttcatgagatgtttggtttataagatctgaggatggttataaatactgtaagtattgtaatgttatgaatgcaggttatttgaaagctgtttattattatatcattcctgataatgctatgtgagtgtttttaataaaatttatatttatttaatgcaaa

SEQ ID NO: 99650 - DNA, 409 bp, Homo Sapiens
atagcttagatgataacagtcttcccccaaactaaatcacctttgcgaagctaatgaaaggccaccaggttaggaggatgtgaggagcctgaattctgctaaggtgtagacataaaagattaccagccattattccagagatcacaagatttgcaactccccagctgctcctgcaaataacatcactattgtagagcctaagattggtggttgagatgtcttttcaggtttttgcatttctgacgactgatggctccacctggacctgctctccctccaccccacaagtcctgaggccccagtcagaagcaggctccctggactttgaattttcggggaattgatttgggtaataactctgtctcccatacagcatggctggccttgtgtccattaaactctttgttgc

SEQ ID NO: 99651 - DNA, 359 bp, Homo Sapiens
actggaaattttatactaattaaatcctttatttaccttttcatattttatcaatggaaccttttaattgctccttctatatcactcttctccttgcttggctgatctcattacatgactttcgttacagacagtgtgagtgtactagatttgtttgctgctaatccgttattttaagtgttgtcagaagaaaataacttcttggtttgaccaagtaattttgcaaagtccttctctacctgataacacgtgaatgtatagcagtaaaggtgaaaattgcaggccttgttttgttcttcatacccccttcagttgtttatgggttaatgttatttgaaaactcttcatttttttaatgt

SEQ ID NO: 99652 - DNA, 565 bp, Homo Sapiens
  misc_feature (21)..(21): n is a, c, g, or t
gaacgaggattaattagactntgttgctgcagattgatccagtgggtacataggctaattaatgtgagtctttttccttgtttaaaggagtccctcttgctgaaagtagatgattactattgctgtagtgttaggaaagtattaagtttgtgctgaaaatccattgccatttggtacaaatgacatttgttctttctgtgaaagagatgccctcgagtgtgtttgtacacaaacccttaggatggtgagttgaagcatcaccctcgcgctatcttcagtgacgggtgacggctcagggagatggcaggcagattgggctctaagtcattattctctcagttactccattggtgaaatggccctttccctctttgcagttcagtctaagtctcgtatttgctttgctgtctgtgtgctgaagctcgtcccgtgtgagttgctgtctgccccttgtcaggctgtgaggtgctcgtgtagacctggagcatgcaggctgcctccgtttttgggtactgtgttgtgttttgctctgtctaaaaacatctgcatagttttcaactggaaa

SEQ ID NO: 99653 - DNA, 675 bp, Homo Sapiens
ccaatttccagaagaaatggctgggatactgacaagctgaaacttactttaaacttacttctgatcttacaaaaacaaaaattggagtttatggcatgataaggaagagagtggtggctggtctgtcagcctgactaatgggctcttaaggttgcttagggatctgggttgggaactgatgttaaaattgcagaatacagactaagctgtaaatagattgtcctctttagggatttgtgctcagctttaaattatcttaacttatgattggattaagatggtgtgcaggattgctagtgcccctagtacttgcaagaatcaaacataaatccccattagagaaataaaacttcattctagcctcaaagtacctctataagctttcacatagtgtctcagtcacacaatacaatttaaccagtcaggtgaggagacaacgagtgttttggaaaaccaagagaaacaacagaaaactagaaagagatttacaggtgttacagacaatgcactatgaataagatgctcaagggaaatcaaagaaaagattgggaatgtttggcaaagaatttagagaacaacaacaaaaaaaagccagtaggaactctagaactaaaaaacattaactgaaattaaaaatcaacgtgtgaccttaacagcagtttagatacaactaaa

SEQ ID NO: 99654 - DNA, 662 bp, Homo Sapiens
  misc_feature (42)..(75): n is a, c, g, or t
ctattgcattccagcctgggtgacaagagcaaaactctgtcnnnnnnnnnnnnnnnnnnnnnnnnnnnnnnnnnntcagtagaacagagcctctagcctctgccaaattatctggcctcttgacttcccttcttccttccaaggttcatctccagccttagtaaacaagtcaccagttgctggatgtgacctgctcctctttgctttcaggtgtttgcatgtgttattcctaccgcttggaatactcttccacattttttggcctggtcaaggctgatctggccctcaggactcagttccaatagcactatctctgcagaggcttccttggtacttatttaagtgcctgtggttgtctcaactaggctgagactggaactatattccttaaacaggtattttagtaaatgactgcggaaggaggaacatccatgagcctggggtccatctatgtgctccctccgtccccaagtgatgaatggtgtcttaaacagtggtcaccacatacagtctctgagggcccagccaccaactgcccgaattccccaacttcttcctcttgtcccagagtcaaaagtaccacaatacagcttttggaggaagcttttcaaagcaagccagtttttatgagtgcaaataaatgattagtccatgggaccaaa

SEQ ID NO: 99655 - DNA, 717 bp, Homo Sapiens
tgcggccgccgacgcgcgggacgtcagacgccgcggctgggcgggggaggggagccagggccccaccccgcctcacgccccgcaggctcccgcccgcgggtccgtcccggctgaggtcacaggcggcgcgaccacgtttattggcaacagttgttttctaattggcggcaggtcagagaatgagttagacttttgacctgatgcttggaggtcggagcgcaacttcttcaggaggacagactttccactgctaagtgcggccccggcgggagggtgccggggtccaggtctaaggagcggcgccgggcggcggggctggattgggtggtgcaaattcagcgaacgcgcttaagacgcactcctttccggtcacctactctctcttcatggtgggaactgtttgtgtccagaattaagctatatttaataaagggccaggatgaggtggtcgtgcagcattttgttctggagaacctaggatcaactgtatgtcacaacatattccgtaggcgttaccattcccgtccatgggctgggaagagacagtaaactttaccgtgatgtttggggactggtacgaaaggtgggtatggggatattctttcactattttccagcttttcaaactgtgcgtgtacatttaagttgttgagttttttcaatattgacaacgtatcaggaatttaataaaagtactatcctggtaacaataaaaaa

SEQ ID NO: 99656 - DNA, 479 bp, Homo Sapiens
atgaacaactttgtaaatctttggtggtatctgtgtgatgatttcctgaagatagggctctaggagcagaattattgggttccagaattattaaggttgataacattgccaaattgctttgcagagcaattctgaatttatgtttctgtcagcactgtatgacaatgcctgcttggccctggctgtcactgtgttttcacattaaaaataatgataagtaattctgcatgcctcatggcatacctactctgttgacacactgacatggaacctttaaaagcagtggagctgggactaagggtggactgactatttgctttttctttttaacagccacctctttcctcagagggaagttagtaccagctgtcagtgtgccagcctgagtttacatagaaggtgtctaaatgtttacaaatgaagtatttgtcaattaaaatgtattttaatgaattatactgaaaatcttttgtaaaaaa

SEQ ID NO: 99657 - DNA, 415 bp, Homo Sapiens
atagggacattgagtaccctttctggcacctggcactctgccaaatgctatgcacactccgcccttcagtcttcccaggaaccctgtgcagtttgtagcgtggctcacatttgccaagaaggaagtgaggctcagcgaggttaagcagtgcctgtggagtcacatggctgcaagtagtggcctggactggactgcagagcccatgctccccaccgctttccatggggcaactctaggccatcattctccacccctcagacccaaagctgccttttcataatgcttgctgttgctccctttatgctcctgaaatgaaatttatggctaatatgccagcctttacatctaattaaaaatcatccaatggtttttttgtccttattaatatataagaaataaaaggtaatgataaaaa

SEQ ID NO: 99658 - DNA, 559 bp, Homo Sapiens; identical to SEQ ID NO: 59856

SEQ ID NO: 99659 - DNA, 480 bp, Homo Sapiens
tactagctggttgatatggaaacatcctccacttatctctcaagaaaataaacacaaatcagccaaaagtaattggtaccaaattactgaaagtacagctattccaaggcccgaattctatttacaatgctagtagtgaaaaggtcttcttaattatcagcagacagcaagttttcaagtctttttccaaaatcacattaagacttaatgttatgctgttatttgttccatcgttcaaaagaaaaatgagatgacaatctttttgtaatagtatatcctcttcttccagtcaatacctgagtaccaagcaagcagcactcaaatattgggggcagtggaaaaatggaactaccatataagcaagattaaggatggtgacaacttcacgtgcttgctgaaaactccatacacagagatttaggtcctttaaagtacacaaacatttagtttggtgttacattctgatgtggagcggccgca

SEQ ID NO: 99660 - DNA, 599 bp, Homo Sapiens
tgaatggaggttatattaccacctctcagccttcattgggaaatttgttccttcttgtaatttgctgataccagccttgttcttggtcatcagtagatacatatttaccaactagtggcctggttataaatcaataatgaaggcctattacttagcatatattgagcatcaatattatgtttacattgctgaaatctaacatcattctttccttgcttatttcgcggggctcctaacattgtatcaatctaaggaaagtaacattatatcaagctaaggaacatcctctgcttcatctgcttagcttgcttaggtttaacccagctgctaaaggaggacttccgacccttctcccacattcacaaacttcattccactccctggtcctcaggcagtgatggagaggatacagtgatggcagcaaaggaggcttgtttttgctacattgtgccatgatgttatccgtcaagttctttgacctccagaaaactgaattgtctctggcgccgggtcgtgctgaaggtccaaggagagcacaaaaatgatgctgtctataaatataaatataaatatgtagtgctaaaaaagctaattcaaat

SEQ ID NO: 99661 - DNA, 719 bp, Homo Sapiens
  misc_feature (410)..(439): n is a, c, g, or t
ctgcacacacagacacagccgcccacttccaccaggtatctctacaacagaacccttataaacaattattactagcaatggttccactaaatgattctcaggtccctgaaccagcagggtagagtccaggaaaagacaagctggaattacaaagtcccttggaggagataatttaccatgagtcttctaatttttaatgtggccagcagagtgtgtaaccatttttaacatatcttttgaaaatatgaactccataacttcctaggagtgagatagcaaagaaattttattttaaccgagacttcataaaactatcagctttttgtttacttgctaactccaaaattttaagtaaaccaaatgcaatgattctgctgttacttttacattgcatacaagtacatgcgtgnnnnnnnnnnnnnnnnnnnnnnnnnnnnnntgtaaagcaacaaattcaaagaagggtgtcaacacaattaaaatccataatgttaaacaataactgtgcttgttagttatacaaggtaatttgcatttgatataaacttaacttacattagtactttttagaaactaaaattattccaaatgtattaaatgcttagaaaattcatttctttcctaaacagattagaaccataattcaatatgtaacctttatatagaattatatgtaactcaaattatattcaattaattcaaatatataatttaaatac

SEQ ID NO: 99662 - DNA, 987 bp, Homo Sapiens
  misc_feature (823)..(823): n is a, c, g, or t
  misc_feature (873)..(873): n is a, c, g, or t
ggggtgatttcctcaaagggagcagatctgagcctgagactggtagatggagtcactgaatgttcaggaagattagaagtgagattccaaggggaatgggggacaatatgtgatgacggctgggacagttacgatgctgctgtggcatgcaagcaactgggatgtccaactgccgtcacagccattggtcgagttaacgccagtaagggatttggacacatctggcttgacagcgtttcttgccagggacatgaacctgctgtctggcaatgtaaacaccatgaatggggaaagcattattgcaatcacaatgaagatgctggcgtgacatgttctgatggatcagatctggagctaagacttagaggtggaggcagccgctgtgctgggacagttgaggtggagattcagagactgttagggaaggtgtgtgacagaggctggggactgaaagaagctgatgtggtttgcaggcagctgggatgtggatctgcactcaaaacatcttatcaagtgtactccaaaatccaggcaacaaacacatggctgtttctaagtagctgtaacggaaatgaaacttctctttgggactgcaagaactggcaatggggtggacttacctgtgatcactatgaagaagccaaaattacctgctcagcccacagggaacccagactggttggaggggacattccctgttctggacgtgttgaagtgaagcatggtgacacgtggggctccatctgtgattcggacttctctctggaagctgccagcgttctatgcagggaattacagtgtggcacagttgtctctatcctgnggggagctcactttggagaaggaaatggacagatctgggctgaagaattncattgtgagggacatgagtcccatctttcactctgcccaatagcaccgcccccagaaaggacttgtatcctcagcaaggatgttggagtagtctgcttaagatcacagaacatc

SEQ ID NO: 99663 - DNA, 487 bp, Homo Sapiens
  misc_feature (118)..(118): n is a, c, g, or t
gttgacccaactggtgaatagagaaatacagattaagtatccctacaatggaatattattcagcaatagaaagaaatgaagtatggacccatgcatggaaggatgcaggggtgtttcntacagcatagaaggaccttgaaaacacagggctaagtgagaggagccggacaggaaggatcatgtattgtgtggtctgctcatgtatgatctgctcacatattgtatgatctgcttacatgaaatgcccaaggtaggcaaatccagagtcaggaaataggtcggtggttgccagggacagggacttttgggggaaaatagagagtgactgttaacagggacctgctttcttctagggtgatgaaaatggtctaacattgattgtagtgaggggtgtgcagctctgtgaaatatgctaaagaaccatcgaattggacacttttaaatggggtgcaaattatatttccaataaacctatctgtagaaactt

SEQ ID NO: 99664 - DNA, 560 bp, Homo Sapiens
ttatgtggtaacagggtaggtgtgtgagtgctgctgatggggctcatccaggctaaaatatttttaaaccatctacaatttggagctcctctgaccaagcagattttctccaccacgcagggtatggagtatgctcttggtactctggatgacttccatgacaaagaaagcactagggaaccatgtctacttactggtttacatcatggtagcgtcatctgggcccagctgtcattttcattacatttttggagctagaccaactccatttcatttttgtataggcccatttcatatataaaaatgactgaatcttctatttacagtattcataatgtataaattcatctttttcttcctaaacatttatttcaaaatacttttatataaacagatatttagaatgaataaaattgggtaaacaacttaaatcaccatcaaagttattttgcaaaatataaattgttatgacagaagtatttttcaaatcttgtaatctcccaaataagaaaagaagttgattcagtggcaagaaaaaataatcattctaagttaggact

SEQ ID NO: 99665 - DNA, 409 bp, Homo Sapiens
gcggccgcggggacccaggtctgggcggggtcgccatatcggttccgggggcctcgagggaggtttgttcccgtttccgcgaggccctagggggcacttcttccttccaacgctgtcgactgcccagcaggggaaatcgcccttctcagtctttctcatttgaatacatgaaaatgcgagttgattttggcaaggcgatgctctcccgtggccagagggacggttttgtcgcccgcgggcgaggccgggtggggagcagctccggctccgacatccggctgcgggtgagctaggtccgcgcccggagcagctcagaaacccggcggcgctcaggcaggagtaggggaaaagacaaacccagtggctgtttttgtttgtttgcttcaataaaataagtgaaagccctggg

SEQ ID NO: 99666 - DNA, 517 bp, Homo Sapiens
  misc_feature (471)..(471): n is a, c, g, or t
  misc_feature (499)..(499): n is a, c, g, or t
tttccaacaagcagtgtttctatggaaggatttagaataaaaatatgatgttaacgataactgatagttacaaaaaactctaagaggatgtctgttctacactctaagtaaataactgaggaaggagaaaagagaattttgcgacttagattttggattttaattttgcaggatgagctgtcaggagtcttaaaatgcggccccacaaggagtatacaggtccctattatgttctcaaaaaccaaaatgtaaaatggctgcttaagtaactgacaatgcaaaacagtttcaaaatagaaaacattctatttttcaatatggatgattttcataacttaaaaaagtttacataagacatatcttgaaatacacatatttttacccttaaaacatttatctaaaggtaaactggaccaagagaagttgcctttttttcacagtaatttactgggtactggtgtccacatcaancttttgctttattctgaagttatttttnccatcacagatcggcact

SEQ ID NO: 99667 - DNA, 555 bp, Homo Sapiens
tgaagaaatggtttgtatatatcaatttttatctactcagtatttaatgaaatatgttaggaagccttagaacacaaacactccatttaaaaggtagacattgtcagatggaaaaaacaaagcatggccgagcatatactgtctaaaaaaggtgagctgaaaaatataaagactaaagaggttgtaagttcaagaatagggggagaaatcatggaaaaaataagcataagaaagctggtgtagctacatttctaccagtcaaagtagacttcaagagtatcatgaacaaggagaaacatttcacagaaatcagaatcaacgcgacaaagttatgggaagtgagtgaaataattatctgtaaacgccagggcagactgactaaatagtggggaccctgaataggagtatatgctttggtatctctgaagtggtggcatgatagcactttggttcttttcaacttcatggaccctcatttcagttctgaattcccttcttctagaattattttactttctattcataaacttctgtcatttccaaagagagagagaa

SEQ ID NO: 99668 - DNA, 466 bp, Homo Sapiens
actatgacaagccctctcacctaaccttggtgtgaatggatgggctttgaggagtccttgaatccctgaaactgtgcaaaagtctgcgtgcatttgtgtgcacactcaggctcacatttctgcaaggagaggagctggtgtccttgtccagttctcaaaggaatctgcaaacaacaaaaggtacagattttgtgaactaggtcagaggttggcaaatggttttttgtaaagagcccaaatggtcaatatttccagctttacgggccacacagtctctgttgcaactacttgactctgctggggtagtgagaaagcagtcccaaacagtgcatgaacagaggggtgtgggttccagtaaaactttgtttagggacactgaaatgtgaattttctgtcattttcatgtgtcaagaaatgttgttcttcctttagaaatgatccattttcgatgatttaaaaatgtaaa

SEQ ID NO: 99669 - DNA, 1072 bp, Homo Sapiens
  misc_feature (678)..(751): n is a, c, g, or t
cctttccacctccgcccagctcctgctcagcgcggagctgctttggagaacttgctgctggcgcccaacagctgggtgaattctgcttacagtgttttccaaagaggcctgtaggacatctgggtcttccatggtggtgggggttttggcctcaacaacaaggctctggtggcagaaatgatagcaacccagtgaaaagagagggacaaaagggtcaaaggagtcagtgcaaaagcactgtctgggaaagcgaatcaacccagattgtcccctcgggaaacatggcatgtgcttggtgtgacagctgattctccccttaatcactgccatgaaaacaaaataaccataagaacaatggcagattagacaagggaaattaaggaacccaaatactgacaggacgcatttttgaagatacagcagactcctgggtccttgtgacaaccttcccacaccaattctcagaccaccttctacccgaacctgcacggctgtcaaaatggccgccacaagaagcaatccaatggggctctgttctctccttgccaagaccacgatgataacgcagttgtgatggccacaggactaggaaggaccatggatataggcagcaaagtctaaggaaattttcttagacagaagtctgaaactagcatggagaataaatggttaaggaannnnnnnnnnnnnnnnnnnnnnnnnnnnnnnnnnnnnnnnnnnnnnnnnnnnnnnnnnnnnnnnnnnnnnnnnntgggacctccaaagccaggatgtagcaaggttaccagcagcagccctgtaagctctcccttgtaacccagcaactatgttgtgaggaagcccaggtcgcctggaaaagtccacatggacaggaacccaggaactcagctgacagccagcaccagctggcccacctgtatgcatgggccctcttggaagtagaccctccagccttcagtagaacccctccaactgattcaatgtgatacaaagatgaaccttccctgccaagccctgcccaaattgcaggtttgtgggcaaaataaattattgttgttgttgtaatctacta

SEQ ID NO: 99670 - DNA, 534 bp, Homo Sapiens
tgcggccgccccgcgggcccctcgcagaagttttgatcgtcttcgaaacaaatccctctgctccacccccttgaaaaattgatttgggagttggggagcgaaggctttctttttttctcctctgccttctttattattaatattttgtaaagctccagcgctacgaggagtggccccgagcgaggccagactgcgcggacggcagggagcgcggcggctccgccaggggacggcgccggccgggagtggccgcttgggaacccccgactgtcggccgagggttgtcgagaggctgaaacataagtgctcaccacaacacccagcacctaccaggcctctatacatatttgcctgtctggaaccgggagcttccccagctgaggaccacagtgagagcagagaagacccaggatcgtatgtgaaaccataaaagccacatgaagacactaagaataacttgcagaaagacattttctatgaattgaacacagagtcccaaaacccagaaagttccttggtctctatctcatgggc

SEQ ID NO: 99671 - DNA, 361 bp, Homo Sapiens
aacccagtgggcctcaaagaactcaaatgaaaggaagacttgcaagtctctcactttaagtccagagctagaaatgattaagcttagtgaagatgcagaattttcatagctagagagaagtcaacgcttggcttcaaaacttcaaaggatgggctgactctctttgaggagcactgcagctggtgactttaagttacagccagtgctcattgaccactctgaaaatctcagggcccttaagaattatgcaaaatctattctttctgtgctctagaaatggaacatcactgtctgggtgacagcacatctgttaatagcatggtttactgaatattttaatcccactattgagaactgctca

SEQ ID NO: 99672 - DNA, 318 bp, Homo Sapiens
ctatttcactttcatgttattagaaagatgaatagtgcactgctcaggacacttttctaaagcgagtaatcaaaaagttttttggtgatagttataatgtcataatataaccagacatcaaaaatggaccacagtagctacagaggttaagtcacagcactctaatggttatatgtattaatttgtcattgtcaggtttcatttttaaggtgttaaaattttcctacactgagatggtaatatacaagggagttgagaaaattcagtttgtttcatttggaagaattatttgtgacagttttcaaaacattttgtaaa

SEQ ID NO: 99673 - DNA, 283 bp, Homo Sapiens
tttaagtaaaataaagttattgattagtgaatgaacttcaaagggctatgttggcatggctgttgtgtggctacatgctgagtgaatggctacatgctgagtgaatgaggctggattctcacagcctcattcatcctgtcaataaagctgggttcccacagcgtcattcatcctgtcaatcaagcgagtgggaatggggtgtgcattctctattacccaggtggctctgaccgttggctggaatcatctgttgcctactaggcttctataaagcccagcagac

SEQ ID NO: 99674 - DNA, 508 bp, Homo Sapiens
aaattagtattataataaaatagttacatttattttaataaaacaaagcattttctctgctttgaacagccctcataattttacatggtggcagtggccagttggctgtattataattgagttaagcattctccagttgttagattttcctctattaaaactctgaaataaacatattcgtttgcctctcccctgcttactttcagattatttcccttggctgaattcccagaagtaggattactgagttaacagttatgaatgtttaaatggtttctgaaatggtttggtcaaaataaaattgttagaaattataaacagtttaccaagtagtgtttttctctgttgtatacttgaaaattcaagagaaactgcttttaagtgacaatcaccatggagccagaattaacacagacttctgactctcaggccctttacatgtaatgattaacctcaactgaggctgttcagttgtattaggttaatagaaataagtgtagctgtatct

SEQ ID NO: 99675 - DNA, 769 bp, Homo Sapiens
  misc_feature (113)..(113): n is a, c, g, or t
  misc_feature (144)..(144): n is a, c, g, or t
  misc_feature (169)..(169): n is a, c, g, or t
atggatggatcctcctaatagggattgccctcagcaagattcgcacagttctcttgtgcattgcttctctcagcagtcacactttctacacacatcccaatatggcaagctgncgtgtctctgtcttcttccttgtctaggtgnctgcagcccagggggtggtgtgtanatctcaggctggtgaaaggtaggttggcttttatccacaggatacagaaactgaagcttggggaatcccaaacagcagccatagactcactggctctcattaaacgggagaggaatcacagaaactggggaagggaaaacaaaccttcaaaggagaaatttcgctttaatgacaccattcatcattcgttttttaattaggaaaagctccctaatgaggctcttttgccagctaataggactctcgatttccatgagaaccattcttgcccagaggattaggggagctgttgctcaccacaccaggatcttcccccagcgtccaatttaatttgcaaatacgtaatgcagattccctgggtgccgtgaaagcctttcctggcatcattcatgttgctccccgtgctggctggaaagcacggttctcctctgccttaaaaacagtgcccaacagtgaactgcccctccgaggacttgagtaagtggaaaaaacaaaacacagactgcaatgtttgtttctaagtatttttgtattgtgtacattctgtatatttttgttgtaacatattatttgagcacagattccattaaataatatgtt

SEQ ID NO: 99676 - DNA, 502 bp, Homo Sapiens
gagaattgctttaagaagagtgaatgttccaatgatgatagatattataagcgacgatggttctgttgctatgaacacagcagtcggtccctgtcattgtccacccaggagtggccttgttaattccaagtggcatgtatcttccctctgagcttcatttcttcaagatgctctgggtggtgggatgggagaccatcctcagccctcctcagaccttatcaattcattgagagattgcaaagctgaaagcacctccggccactcctgggagacagaccctttggtgatgaaataaaccagtgacttcagagcctatggtctcaactgtgcttgaaaaacactgtctctgaaaacaactttgtgattctccctgctccctgtggacaaaagcacataattctgctgttacgggtactttgctcatacgagctttcatgttcagcatgcaatggaatcatgcttgtccatgtgaaataaatatggctctctcgtgtccttaaaa

SEQ ID NO: 99677 - DNA, 230 bp, Homo Sapiens
aaccttcctcctcacacttgatctttagcatttcctttttctccctaaactttgtatggagaaaaagaggcaatgagatgctatttttgcaacattagctgaacctgggatatgcgtagtcatgtttatttctgcatccagagatcacacacacctaactcaactgtgtaaaatatattcggaagaaattcagtcaaattaaaagcatgatataagcatgcttatagagt

SEQ ID NO: 99678 - DNA, 414 bp, Homo Sapiens
aaaggcataccagatgactttaatatgcattctagagcgaggaagcactgttctggtctaaaaaagaagccagtgggtagaagtagaattgtttaggtgtcattcattttagaggctgactttgtagttggaattcaccagcaacggctgggcgtggtggctctcttttctgttcgttgatgataatttatctgtgtcatatggactcacgcactttatgctttggattgtaatccaaggctgtcactatgagtttgttaaactgttccagctttggcgtctggcaactccttcagctggcccatgtccctctgagataacctcagtgtctgtgctcatggggggtttttagtgtaagcacctcattttcagatactacacattgctgcaggcttagcctgtcccagcctcaga

SEQ ID NO: 99679 - DNA, 864 bp, Homo Sapiens
  misc_feature (473)..(481): n is a, c, g, or t
  misc_feature (744)..(759): n is a, c, g, or t
tttttttaatctcaaaataagtttaattttgattcaaaataaatatgcacacatattcactttattttttatggaaaaagggggataatgcaaaatagcaaaaattgtaaacaaagttaaagattatcttcatctaaaccttaagctgacaatttaaaacaccttgtgcataatgcagaaaaaaactgtccgtttgacttcactttcattcacactgctccctacgcatgagaaagaccagatgtctggtttccagagtattaagctttttccttaatacttcttaattttttttcaagtttaaagaaaaactgtagcttcttctgatctttagcattctacagtttaataatttcatataccagaagtgtttctgcagaaaatgagctttgaatatttatgcatttgcaacagtccacaaacggctttggaaaaaattatttgactttcattttgaaaactccatttttctnnnnnnnnnccataaattcatagttttcatggagaagagtggtggagtacaatggagcatatggaaagaacactgaatttggagagaaaggtatgaatagatgacatttccttttccttgtctgattcctactaattgtagaaaaaatatacattatatatggtattcctcccttcttaacagaaaacaatgtttggaaattcctgtgtaaagctaatttgccatgaggaacataaagcccattaatgggatatccaggtccctatgggaannnnnnnnnnnnnnnnaaacagacaccatgtggtgcaatctgttacagtctacaaggtgggggtggggaggggagctctgcaggggccaggaataaagtcatctctgggagtttttgaggt

SEQ ID NO: 99680 - DNA, 533 bp, Homo Sapiens
aattaacaaataataattgcccatattcatggggtacacaatgatatttccatacatataatgtgtagtgatcagatcagggtaattagcatatccatcatctcaaacacttatcatttctttatgttggaaacattcaacaacttccttccagctattagctatttgaaactacacattattgttaactacagtcatcctacagtggtacaggatatattaaacaataagtatatttcttaaaacatgagcaatggcttggaagacagcacaggtacagagattgtgtgcctagtatggtgcgagaggagataggaaaataggctgaagaaagatggtggtagtttatttccaatttttatggatacataatagttgtacatatttatggggtacatatgatattttgatacaaacatacaacgtataatgatcaaatcagggtaattggggtatccatcacctcaaacatttatcatttgtgttgagaacattccaaatccactcctttattgtgaaatatacaataaatt

SEQ ID NO: 99681 - DNA, 456 bp, Homo Sapiens
tctccagcagacctgcatcacaagacatgttctgatgtctgatgaaaatctggatctacccagggggatgaagaacaggaaatattgactacttggatatgtatacaagatatttttcttcatgtaaatctctaaaaaggatattgactttatacaaaaataacatcaaatgtattgtggggtttataacatatattgaaaatacatgacaaacacagcctaaaaaggctatgaaaaagaagtaaagtatatactattggaagatccatatatgtactatttctgaaaagtacactgcaaaagcttttataaacattgatgatcacagaaaatataaatggtctaaaacaccccatttaaagacagagatttcttgataagataaataaaaataagatccagtcatgctgcctacaaaggaaacatgttagattcaaagacaaatagataaacaaa

SEQ ID NO: 99682 - DNA, 460 bp, Homo Sapiens
gagtcgttcaatgacaagagaagaggctttccatggcagctgtactgttgtagagtagctttgggttggagagagggtttggggcccagcacctcactagaaagtcacaaggcccaatggtgacttttccaaccaccaccacacccttagcagttcagtggagaacaaagtaatagtgatttcagatagcagttatttagtggatcagtatagattatcttcaagtttctggatataagagtttttaaacaacatttttttggtgttcttggcgggggtagaaataacactttctgcctaggtacttatatgtaacagaatgactattttaggcaataattacaaaagaaggatgttattaaaataattacttttttcttagtataaaacaatacatgttcactgtagaaacttcagaaaatataaactttaaaagatgaaatattacccataattcatc

SEQ ID NO: 99683 - DNA, 543 bp, Homo Sapiens
ttagaagattccaagcaagaaagtattcagcagtggctggactctggattctttgtctctgcaaatgaaaactttcaacaagtcattgatcgcactggtaagacaagagaagcagttatgctttgggaagctgagtaggagatatattcaaatatctacgtgaataaatcttcttaaaatgagcattatcagaggcttctagaaatgatcagccctcaaaaactatccagctcaatctcttcatttgacatatgactgcgacaaaaatgataggtgcttccccagcagcaggttaagggccgaacccagggctcttgccatatcatcaatggctcagagtatagcataaactcactgggttctatgaagacatttgcaaggatgtagttatgaaaatgaaattgtttaattttccccatcctgtattatacttttatttctgaatctagattttttctattctttggtctcaaaattgcacttacattctctctttctaataatgcacttgttctcaagaagaataaatgtctgaattctaaa

SEQ ID NO: 99684 - DNA, 650 bp, Homo Sapiens
tctaccacgcatggcctttgttcactgaactacagaattgccaagaatatttttaaaacaaacacattcaacattacaaagggcaagagaacaggaaaaaagaaaatccctactcagctttgaagtcatgagatggccataaaaatggaagagtacaagaaaagggcctttgaaaattaaatatatatgattgaagtgaaaaaataaaacacttaactgtacttttagaaaattaaacaatgaggcaaaaacctgagaacaaaggaatgtaagaaattcagaggactggtaaaatggccaaaatattagaagtattattattctaaaataattccagaaatgcaagaaataaaactgtcaaataattgaaataaaacatctaaaaatgaagggctcaagcttgcataaagaaagccaataccccataccaagtgatcaggaaaattggtaaaaataaacttacccaaaggcacatggacatgatatttcagaacaataatgaaaaagagaagacgctattagtttccagaaagagagagacaaacataacaaaataaagaaagaaatgtggaaagagtcagaatcagtaacactttacagcaagactggaaaatagaccacaatggagcaatgtcttcaaaatgcagaaa

SEQ ID NO: 99685 - DNA, 480 bp, Homo Sapiens
aattttcacatctgcacctcgacttgtggtttagtcatgtaactagcactatgccagtgaccgttgttgccctgtacatagtatgtttgaaaagtaaagggaattccagttgggaaaaaagggcagattagtcctgtaatgaacaccaactaatgtaaatcaaattcattctggtgatggtatttaacactttaaataaaacattttctttacaggcgtctgcagtgctttctctgacttttctccccacacagccctgagcctgctgcagctcattccctgaactcattgtgtcatttaaagaatgaaatcaccgtctcctacttctcgataacataagtggactgctggtcttagcagcggccctcagtagagcatttctttaaaacgccaaaggatttctgctcacactatgaaaaggtgctgttttttaaaagattgttattttggattgagtttctttctgattaaatgactcag

SEQ ID NO: 99686 - DNA, 725 bp, Homo Sapiens
  misc_feature (684)..(684): n is a, c, g, or t
  misc_feature (709)..(709): n is a, c, g, or t
tgcggccgcagcaatgccgggcccgctagggctgctctgcttcctcgccctggggctgctcggctcggccgggcccagcggcgcggcgccgcctctctgcgcggcgccctgcagctgcgacggcgaccgtcgggtggactgctccgggaaggggctgacggccgtgcccgaggggctcagcgccttcacccaagcgctggatatcagtatgaacaacattactcagttgccagaagatgcatttaagaactttccttttctagaagagctacaattggcgggcaacgacctttcttttatccacccaaaggccttgtctgggttgaaagaactcaaagttctaacgctccagaataatcagttgaaaacagtacccagtgaagccattcgagggctgagtgctttgcagtctttgcgtttagatgccaaccatattacctcagtccccgaggacagttttgaaggacttgttcagttacggcatctgtggctggatgacaacagcttgacggaggtgcctgtgcaccccctcagcaatctgcccaccctacaggcgctgaccctggctctcaacaagatctcaagcatccctgactttgcatttaccaacctttcaagccctgtagttctgcatcttcataacaataaaattagaagcctgagtcaacactgttttgatggacntagataacctggagaccctagaccngcactatcataacctg

SEQ ID NO: 99687 - DNA, 511 bp, Homo Sapiens
gcggccgcagcaatgccgggcccgctagggctgctctgcttcctcgccctggggctgctcggctcggccgggcccagcggcgcggcgccgcctctctgcgcggcgccctgcagctgcgacggcgaccgtcgggtggactgctccgggaaggggctgacggccgtgcccgaggggctcagcgccttcacccaagcgctggatatcagtatgaacaacattactcagttgccagaagatgcatttaagaactttccttttctagaagagctgcgtttagatgccaaccatattacctcagtccccgaggacagttttgaaggacttgttcagttacggcatctgtggctggatgacaacagcttgacggaggtgcctgtgcaccccctcagcaatctgcccaccctacaggcgctgaccctggctctcaacaagatctcaagcatccctgactttgcatttaccaacctttcaagcctggtagttctgcatcttcataacaataaaattagaa

SEQ ID NO: 99688 - DNA, 556 bp, Homo Sapiens
ttttgctgctgaacacacacatttatctagagggcaaatgtagactttggtttaaattcttctgatgaaactgtgtctcacacccaaatcccaagttcaacggactgctcttgagatgccagccgtggcggccttgctagggaggaggcccatgatggcctgtgtctgagtctgtttcattgcaacactcccagaaagccagccctgtcattaagctcacaaagtaaacactgtcctcagcaaaagcctgagttagcagtcacctaaaggcaactgtgctcctttaaggggagagctttcaccattcattgctccaccagtgccggccttaaaacttgaaatcaaacgcagggctcccaaggcgctggcctttcatccaaaaccaccgaaggctgtgggcaggattcagaattatgtttcaccagctggtccaggccgcagtttgtctggtgaagagaaaacgcaggtataccctgggattagtcagagtttagctgctcagagttcctttctgtccagtctgcttcccagtggacttttgtccttccctcttatt

SEQ ID NO: 99689 - DNA, 356 bp, Homo Sapiens
ggtcttctgagtgcatatgactgtgtgcgtttctctcctgttgcagctgtgatcaggccagtggcatgaagcaaagggctatcctgtgtggcacagagtaaactgggggaaaggctggtggcagggagacgagctgagagggtggtgcaatatgtgaaatgaaggcccagaggatgctcacttggctagccatggagaaagaaaagactacatcgggcaagtcctcttatttattttactctatagttgggaagaatgagatttaggagtgaaaggtaacttcataaaagacgtcatagtctctttaaattaggccagtttgatcacttgctgagtattttaccagccttattaaa

SEQ ID NO: 99690 - DNA, 692 bp, Homo Sapiens
  misc_feature (87)..(87): n is a, c, g, or t
actgacaccagctggcgtcataggtagctagatcattgcatttgttttgaaatgttaatatgttaaatactaaactaatatttcaanaatgtgtatatatgatttctatatccttgtttttcagatagcctgcttataatttaatataaattaactgatgcattcataagatttcaataatgaaatggttcccttttaaaaaataaaaatactttgtagattaaaaataaatcagaatttcaaatttaaaattgtccacacactaggaaatagaactgtgttaatatataagaaatctggggataattaagaatgaaggacttttctatcatttccattttataaattgccacctgtgaaaatggtttttgcacattatttgtatttttctttgtatatgaaataattttttgtactttgtaaaatatggagcccattgtaccttcagctatttgagactatacacagtgcttcttttgtaactggattactttaactttcgtgaaggcattacattgcctcacattcactaaccaccttgaattaaatttatttcttaagaaaaagcatccctcatttactgtgaactaaagttcattctgtagtgcacagcattcaggagggtaacactcaggattcatacatgggactaaaggttcaagaataaaacaaagcatgacccacaaaaaaaa

SEQ ID NO: 99691 - DNA, 546 bp, Homo Sapiens
  misc_feature (51)..(51): n is a, c, g, or t
aaaaaaatatatccagaaagaaacaatccataccaaggcttatcattatanaatttcagtatatgaacaatagacagaaggtcttcaaggattccagggtgggggcattacatgagaataaaaggctcctacattcctagaaaaaaactaaagagtcagtaaagtggtacaaaggtagcaaccagaacagattttaaaacttctgatcaagaaatgacagttttttgggtcatggttaacaaagctactataactgatttaaatgattttaatcaactaataacaatttgcctcagaggatatgcttctacaaactaaccaactaatgagggttccttacttctgaaactcaggcaatcaaaaatggcctgttaaacagacacatcccaaagccaaccaatcaacaactgtcttcacttgagtgacagtgcttctatagctaacattaacctgctcctgtctttgaaagtttgccaaccatggaacttcctaattccccaaaatcctgtaagaccagcagtctagcaaggttggggaaattaaaaa

SEQ ID NO: 99692 - DNA, 796 bp, Homo Sapiens
ttttaaataagtgagccacatggcaacctagtaattcttcaatgaacttcaatatcccattacaatgaggcattgtggttttatactatggggttgctgtaaatggagtttcactgcagctggttgctgaaaataatgatgtgtccatggctcttccagacaacataagtatggatgtcaggggtggggagccgggggaactgaagccacagcacttgactttgtaagtattccaaatgcctctactacagtccagtagtctacacttgcagaggctgaatgcttcagctttcgggctttaaactgttagtgtagagattttactgtagagtggtacaggcttgctatgtgccttataacagaaatcactgcaattcagggaagtttggggtgaagatgcgagtgaacatctgagccatgacagtaagctctgcctttggaaaggagagctcccacttcacggccacaacgcagcacacagaagagcacagagccgtgaggtggagacaagctctgaacacacgtgacgcccgcccgtctgtgcacctgccaaggcccagagcccacatgctgttctgcacgattaccagaacacagccgttggaactgggctcacagcacctttgctgcatatattcttctcatctctccacaactacttgatcagtgttcatagcacttaaaaaatttaggtccctacagataaggccagagtctcctccatggttctggcacttagatcacaaacctgtgtgatttcagtataaaatagaaaagtgttcatacagctgtatcc

SEQ ID NO: 99693 - DNA, 529 bp, Homo Sapiens
  misc_feature (120)..(132): n is a, c, g, or t
tttaatcctagacatcaatatattcaaaaaataataataaatttatacctgatgttagctgtgaagctctccttagggcctgtcaactacttctggccattctattccttagttgaaagnnnnnnnnnnnnngtggcagaaggaagaaacaagaataggaagggtggaaacaggccgtcttttgcagaggatttctgaaggttcttcctaggtaatgatgtgcccttactgccacttgtgtcaacctccagcttcctcggtggcttcccaccctcatcttcactgctgacaccagactcagcatcacagtggcagtggtagcccaatgccaagggttctgttattatctgtccagcttattggaggtcacataaaatatcaaaaggtataaaaacaggtcatgggaacattgctgagctatttcacatcatttaaataagtggggtcaatttaagtgcatttacattaaaaggtagccttggtttaaaaatctctgaagcataaacaactcccaagctatgatttcaaa

SEQ ID NO: 99694 - DNA, 574 bp, Homo Sapiens
cagctaacaactcagctgatgttcttgcaagtaaggctgacactgcatcctgaagaatgtaaagcatacggcaattaacataatatacttgaaaaaatgacttaaaaactcagcagatgggaatttacacttctatctgtaaagacgactcaactctcctgctgaaaacaaatatgaaagctgaataaaatagaacccaaaacaagcaaaacctctcagatgttttaaagcaatgaagagcaacaaaggcaatcaggactagagggccaagatcccaggtagaacagaaatataataaggtgagccatggccactcttttcccttagcgtatttgtcaattctagtggtgaggtacatgggctaaacagactgtggctgcctagaacagtggcagtgtcagtaggatatgaagactaaaattgagttcaggactaccaaggcagtcaactcacaagaggttagagaaaatgaactgtaaagtgagctcaatattctacatgatattcctgtcatggcatttgccattcctaagctgcctatatgcagagcaagaagctgagaaacaaagcaaaa

SEQ ID NO: 99695 - DNA, 618 bp, Homo Sapiens
tgcggccgccaacttgtcaagaagcagtgaaaaatgcgggggggtggaaagagtctaggtaactaatgtcttataatgcatatgtatgtaaatattacaggatttaaggttgaattttttaaaaagaaagttatagtctgtaatttccatttgttataataatgacctttaatcttgtcatttggaaccataaagcatttttatcaggtacctctgttccaagggatttatgtcttagaccatagctgaattgaatgtttgcaaaacactgctataggataaggtggtctttagttttgaacgtgtgaaaggactgcacacttttcagccagggtttgagttactgcccagggtcatcgtctcaaagtaattcaaggagtgatttaacatcagcatttgaaatgtagtcttcatctcctgggatccataaaaaaatgtgaacagggaaatggtggctaagcagagcctgaaataataacttggcaaagaaatgagtttatcaggtcgagtcaaaacatggcatcccctgttacactcaagaaatgctttcttcatgtaaatgtttatacgggcatatataatcacaatgggaacagttaaaaccccctcccttcaaaa

SEQ ID NO: 99696 - DNA, 258 bp, Homo Sapiens
tgcggccgccccgggcgcccgcagcggagagcgcacgggggcagggtagccctcgccgccttccccgccgcccccgggtgggtcagagacccggacccgggccggcaccgggagtcgggacgctcggacgcgcgagagatcagcaggcccgcgggccccagcaggcggctcaagcaggagcacggccggctagccgggtcaccggtaggccagagccccgcacgcatccagagtcccaacctctccagcgacaggtcg

SEQ ID NO: 99697 - DNA, 580 bp, Homo Sapiens
  misc_feature (559)..(559): n is a, c, g, or t
tttgcagcctctactctcattgcatacctttctgtttatggcctcaccttataccttagaaataaagtactcagcactgttttttctatcttttactttgtgcttctcttatctatctcagtttgaactcttcctttgataacaatgcttcctgttaatctggggacaatcccattataatacctaggaccacatgtctgagtacagccccatgcaagtcgcatctctactaagtttcccttggacccatgagtaggatagatagtccagaataaaaccagtatcgtgtgatgtcattgaaagaaaacaaagtttcaaggaagatagtcacttgggaaggggctccctaatgcctaaaaaataaagtctcgaatttttagcctagtcttaatgattatgccccattcaacctttccaggcttagctactcccatttccctacaagatactacacttgaaactagactacttgctctttactaggtatcctccatgtgcaaaggcctctatacttttgctcatgctagcaacaaagacagcagggtctcctgttaaattntagtgtgaatgtgattgagct

SEQ ID NO: 99698 - DNA, 805 bp, Homo Sapiens
ttggatttacatagcttttgaattttgagagttctctgtcaggcaaaatggtttcaagagctgaaataaagtaaggaaccacaacatcaatccctttcaagtcacagcagaacaaaggaggagagtttagaataacgctggccaagacaggatggcacacataatcatttatctgcaaaccttgaattaaaagcatgtaaaatctggataaataagctggcagaatctcttctccagtcttcttgctacaaaaaatcctacacagtgtcccacaagcctcagctcttcctgcttcatagttatcaggaaattcacttgcatcaaacataggattggaaaccatggtgtctgtggacatttgtgaccctttccgtcgaaactccatgctagcttgtgttgtaatggcagtcatgctgctgtctctgtttatcccattatgaagtttacagtgaacaaatgctgcatcaaataaccatgatccaaagagattcaagatgctgttaacctttggtctccgaggggcaggcagtggccggggttctgaactagtctgatttggacttgacagaggagaggtggaggacgtctggtgctgaactttagaggcatgagcagtactaactgtgcttgtcttcatggtggccttattcacagtaacagcccggtgcctccggttatgtgggggggtggtactgacagcagcactttgaggcatacttaatctattcacgggtgttgggggagcactgtctgatcggggtctagaaatacctaagaatgcatccaccagacagctgattccacg

SEQ ID NO: 99699 - DNA, 493 bp, Homo Sapiens
cagcttccagggcaccaggagatgccgctgaccttccaggatgtggccgtgtacttctctcaggcggaggggcggcagctgggcccccagcagcgggcgctctaccggaatgtgatgctggagaactatgggaacgtggcctctctgggattccctgtccctaagccggagttgatctcccagctggagcaggggaaggaactttgggtcctgaatcttctgggagctgaggaaccagatatcttgaaaagctgccagaaaggtgagaatggatgggatgctaatcctgggagcagcctcccaatcctgccttaagaggctccaagcgagggacagctggggcatggcgttcatattaatggcctcccccaggggcagtctcacagatacagcccctctacaaatgtgagcatgtgcacatgctttagaagttttatcttgctggtctgtttctttgctttaaaaatatatatatactacttctgatcaaaaa

SEQ ID NO: 99700 - DNA, 507 bp, Homo Sapiens
  misc_feature (263)..(297): n is a, c, g, or t
aaaagttaagcgatgtcctctgagtgatgtagccaggaagcagctgatacagaatttgtattcgggtctttccgtttccaaagcccctattctttttactaactggagatagggagtcctgggggttcctattgtgatttatttaactttgcatctgcagcaccaagcaattagccagtgattgcgtgtgtgttcaggaaaagaaacactatttctagtcttcccagtaatttgctaggcgaccgcaaatttgccatttcttnnnnnnnnnnnnnnnnnnnnnnnnnnnnnnnnnnntcatctagttgcctatcttctgctttctgaactgcgggacaaggagcatggtgtgtgggagcttagcctgcaaagttgtctgagatcaagtccagcactggctgccatcacccactgaggctcctccgtgcttcatggaacagtgtcggctgtcacgtcggtcgcgtgatcccaggatgagtccgaggcctgcaggaccccaccacggct

SEQ ID NO: 99701 - DNA, 416 bp, Homo Sapiens
taatggttgaatgggtggaggtagggggagccagtatttttctgcagctttgcatttgaagccactcagaacattcccagatgggcgtatggctcaaggtctaatggtttagctgtttgctttccctcttcttattagacacagaagttctcttaaccaccttttactcagctgccttacttggagactcataaaactcacagccttcgtaccccagcatagtgaagagcactcccctcatgctttagtctctagctcatgatcacttcttcattcccatatgagttctgtgttcacaaagggaggagtggttagctgtgtttgtccccaaatccatttatggtagctatatttactgtgtaaatataatgtaattaaatagtatgtaaatcaataaaatgagtgtgaatacaaaa

SEQ ID NO: 99702 - DNA, 535 bp, Homo Sapiens
agtttaaccactgctggttaatgcagctttctataaagaataaagtgctaattgcaggcaatctttgacttctagcacttcgactaaaactatgtggtaactgaagttatgggagtagagttcagaggtgtttgaaatgaaatgggctacttaactggaagtgacttccaagtctacagagatgttcagatagaagctagatgcccattactcaggagatttttaagagagattaaagtatctgataggggttggactagatgacttaaaagaatctcttctaggtctatggttccatggcaggaatcaattcacatagtgcatcttcagtcacttataatgagatcaacctcatgtcaatttgttttctaaagtgttctgtataaagatccctgtcctctggctcagtctaattccaagtggccttaagccaccctttgcactatcaatcaacactggtaactcttactggctcaagtatgctggcagcaagaagaggtgacagatataagctaacatatgcaaacagaaaaaa

SEQ ID NO: 99703 - DNA, 485 bp, Homo Sapiens
tttgtataattagtatatattatcgtaagcgtttaagaggcaacagtgaaatatccatttaactgacaacaaaagtgattacaatttaccaagcatctgccccatgctaagcatcacactaagcagtgtactttcatctgcccagacaccacacagtagatcttagctcagttttgcaaagggggagaccgaggcgtggagaggtttttcccaaggtcagccagccaggtctacccaacccccaagtttatgcttttgaccatctcaccatcccaagtagatcatcctgttaaccatcattcagtcctagacacgcagcattacttttggatacaaatcagccccatggcaaggtagaaaaatgagatttttaagaaaggaaatctatgcatggtgtctggtgggtgctggaaagtgtagaagaataaaagtgatgtccctggagctacactggatatttccagaaaatccagttacacagaagt

SEQ ID NO: 99704 - DNA, 559 bp, Homo Sapiens
ctcctgtcgttaagataaattctccagtagacaacctctcccactaattgtgtattagcaacgtattttatcttgagagcttgtacactgggctctcaacgtggtgtggaaggtagcctgttacagtgctggattcataaaagggcctttatggtttgtgaaagaatatctgtgtgcttagggaggaaactttttgatctgcagaaaagccagaagacatctaggacatccataaaaattcatcagagagcattttactactgagctgcaaagggaaaaacttaaaatggatatgaaaagtgaagaaagtgatcataggagaaaaccatttcaggtgtctgatgatttgtgagcctcaagtgactactctgtggaatcatctgtccttgcctttgaattagctttccctaggccatgagtcaacattagtagtttatacatccaaattgatgacaagagcacctcaaaggcagcagcctcaaggagcagccatggccccagacttgtcgcacggatgcagaaaacttaatggaggaggctgaggtcagaatgggaagag

SEQ ID NO: 99705 - DNA, 485 bp, Homo Sapiens
  misc_feature (41)..(41): n is a, c, g, or t
tctgttcactatcaggctgcctgccacctcagggcctgganttctatctcaagaagacctgcaaggaattaaccccctcttcatatccagcatatagccaactttggcccccatactttactcctcaaaccagcaccacaaccttccagtttcattaattccaccccttttccttctggtagcatcttcctagagtcttcctagactcagctagagtcttcctagatgctaggcccactgggcaactgcctaagcctctatttcctcaccaacaaaacagtaacagtgcttactgtctttatcagggtaccctttgagaattatatgaaaaatggaacaaatgactttgcaaagtattaaagagaaatagtgtagaacctaatgggaaccagtgaagtctagactaagatgacaggtgatcctgacctgtcaaacctaaaaactaaactccaccaattttaaaaaataaagaatttgaatttgca

SEQ ID NO: 99706 - DNA, 483 bp, Homo Sapiens
taccagtcctactggattaggactctaccactgtgacctcattttaccttaatggactctctaaagaccctatttccaattacaggcacattgaagattagggcttcaacatatgaatttggtggtggagttgggcacaattcagtccacaacagtgacttcactttatggtttaatccagcctccacattttacaaatgaaggaactgaggttgggaaatagaatgtgcccagcaaatcagtgacagaggcaggtctgtggccctggccctaatcatgccgtccttctgcctttctttttcatgttttctttgttttcttcagcttccattcacttagtacataagcaaaataagacatgcaatgcatttatttccatcctcataccctcaagaatttgttaaacatagagaagtcagttaaacattacctgaaatatactagcaaatataaaactactgggaatattagtgggtgttaaca

SEQ ID NO: 99707 - DNA, 390 bp, Homo Sapiens
gtgttaagtgattctcaacgtgaacacctccagcagtttctgccccagtttcctgaagacagtgctgagcagcagaatgaactcatcttagccttgttcagtggggagaacttccgctttggaaaccctctgcacattgcccagaagcttttccgaggtttgtagctcagtattctttctttgaggggggtggtggatgggcacacgttcactttatgtgggtattcctttcttccttttcttctttttatcttcatgtacagatactgaggcagcaaagagcggttttgtgtaacactttgctgtctaggctgtgttttaaaaaacaaaaatgtattgacttatatagaaaatacataatatgaattcagcttgtaaccagcatcagct

SEQ ID NO: 99708 - DNA, 566 bp, Homo Sapiens
tagaactatgggactgtatttaacaagtacatatgcatcagattagtttaactttatgataacttgcttctcctaaattgttactaaaaataattatacctaaagtcatccagaatgccataatttcatgagatgacacagcaggtaaattggtttctccaactcctaccttctaccagattgttctgtacagaacaatcatgcttccaaagacagccaccactagcaagaccaggaagaaagaaattcttatcacccctaatcaagcagataaattgtgtatgctccaaagcattcttattgaggaggaaaactgaggagttgtagaatatgctacagttactattagaaaaagtaaaagccagtcacctgagactctttaccctttgccccccaattctcagtatgccacctttcactttgatctcctgagtctcatttcacttccctaacattagagtttaggcacattcaattttatcttactttggattgttataaaatcaattaattctagtcttcttttgttttcctttttagtttatataataagagaacacatgctt

SEQ ID NO: 99709 - DNA, 496 bp, Homo Sapiens
cttgttaaaaaaaacaacattggtaaatcgttttcattaaatagacctttgtgattttactgatttacatgagtggcactaaattacatgatttataaggcttgacacaggaaggatacactgaggtatatggtaagaaaagggatatgaatactagagaaatgttaaattgataactaaggcacactttcggatgtgaatcataaatctaccactgtggctagaacagcctatatgtacatggattctgaaagacatgatcagttgctggtaaaagtagagagggcctgggcttctgccagtcccctggtacttcccacaccacttcagagaaaaagcatcatgacacaagcacagtagatggtagaggcccccagcactgagtcaggtgaagctacatggttcgctgtttagttacgtttccagtacttggtttaatttcacagtgagggagtcggttggtgatctctaagaaatccccaagcacctggtgttg

SEQ ID NO: 99710 - DNA, 589 bp, Homo Sapiens
tctttacctatgtgaagcgaggtgacgtgatacgtcactggcgccgtcttataatttagatgtaaaaatctttagaaacaaataaaactctctatatatgtgtatgtctgtgtacaaaaaaatgacagagctgatggccagtgtatacagagcgtggcccgcggtgtacaatacccatataaggtacattgtgcaggaggggaattgctggctgcttttacttcctgaccaagactgaaaaattatttactgaaatctgtaaacctttttatgaaacttttaagcaccaggctgtttacttacacaatttaggtctgccagaaaattctatctgtgatagatctgtaaagagggtcaggggttagagtttactatttttgaagtttacattgttacatatgaaatggaaacattattttgaaacgttgtcataacccaatggtgcattctgtaaccatggagtcttctgtttcctgggggaaaggggcattcatgacctgaactttttagcaaattattattctcagtttccattacctgtttggccaaacagattaataaaatatttgaaaaaatggcgttcaaaaaa

SEQ ID NO: 99711 - DNA, 258 bp, Homo Sapiens
tggtattatgccgggactttgaagagtctatcagatagtgaaggaattgcgaagccgtactatgttgaggtctccagaataaacatcctcagaatggaaggtccagatgagaaggttaccttgatgagaggcctttatgctttttgtgctattttcctttatgggctctggtagttctttagtgttttataatctcttttcagagaaagctttttgtaaattcttcagattttactttttaagtaacacttacaaaaa

SEQ ID NO: 99712 - DNA, 470 bp, Homo Sapiens
ggttatgatatagagggtcctgagaaagttaaaaaactgtgtaattcaacatatcggcgactgggaaccgatgaatccccaatttggacatcagaaacacatgaaaagttgtcacaaatgtgtttaaacacagaatgggttgaaatgaagagcaaggctttattgaatgaggaaacagtgagctccgggattatcgaaagggtcaccggattgcctgccacaggttttggagctgtctttcctagacatccaccggattggagcaaaatgttagtagtccctaaactgctacaactgtacaaaatgtttcttgattcagaaggtttgtttgcaggggcaaaggtatgacagggtgagccaaggtcaacaaaatgccctttacatgacatcttcgacttgcctttaaccaaatgttttctcctttcacatgcacaacattaataaccgtaataataaaacagtaaatcctc

SEQ ID NO: 99713 - DNA, 496 bp, Homo Sapiens
tagaatgaactcacagagatgtgctggcttagactccaaaaggattataaaactcccaaagtaccagttttccagaaaaccacattttacagtttatgatgattaatagcagcagcatgttcagtttcgcttatatgagaaacatgtttaggcaactagtcagaaaaccagctatggccttacagaaagggaaaagtttaacccattattaaaaagtgtgtgtgggaggggggctggtttacaatattaaaccatttaaagtattttattctacaaatggggtttgttttcttgtcatgcataatcagattatgtcccctcccttctggttaaacatggtttaaggaaccgctgctgtttggtttgtgattgatttagaaacttatacattaacttaccacagtgctatcaattaaagattgtaacaggtttccagatgattaattaggtcaaagttcaatgaatggcacgccagcattgaaaattaaaaaacaaa

SEQ ID NO: 99714 - DNA, 517 bp, Homo Sapiens
catcccaaacccctgacattctctacagaagcatcagacagatactcaaactctcactttccccaaatcacatctcttaacttttcaacgccctccaccctcagctccctgcacaattcatgggaggactcatttcttgccttgaataaccattttctaaacatcgagctcttcaccttccccaaggtggccaacagcttcctggctgccatctttccttttgaccttatctttccccattagtccctggtggcacctactctcagcccacctccctcaccacagtttccccttaggagacagcatgctggctgtgtcgcccaagcctgatgctggtgtaggcgctggaatcagcatgcagcaagctcacagtgcccctagtctgggtgcccgctgtccccgacaaatgtaaccacctccctgcctagaatacacacacgtcctccggtgcatgcacaaccacccagcatctttctttgtgatgatgtagccaaaaataaagtaggagcatccaaga

SEQ ID NO: 99715 - DNA, 179 bp, Homo Sapiens
ccaattcttttctttttgttgttaaagctgtacttcagtgaacagaaaaattgccaagcaaactaatggctataaaagcgtaatttgcatgtgtgggcataaactacagagcctcattgccatgaggtattgtacaaagttttaatacattttgtaaataaaattgtaaagaaagaaaa

SEQ ID NO: 99716 - DNA, 464 bp, Homo Sapiens
ggagtaacattttattatgttctcaacttctctctggtattggtgacagtgaactaatgaattgttgagaacatgaaaatgctattgtttaatgcttcaataggttgtgtggttttgcttgtttgtttgtttttaacttatctatacttttgaaatagccactttgaagcctgatattttggaattctttatatcacctctcttggttcagattgtagacagtttcatagggcccattttctgtcactagattcctcttcactaggtcctacatcttctctaaaacatatttctaccaattaaaattgtggtgtagtgaaaacagtaatggcgtaatgaaaacaatggtttttattataaaatggcagacttaacatacccatttacttttccctacttctcagatgtcattggaaatgacaaaacagacataagacaaagaataaatcattgtaattaaaaaa

SEQ ID NO: 99717 - DNA, 692 bp, Homo Sapiens
cctataacagacctaccctcggattgaactgcaaaggttgtgaggtaaatggatgtcccacacccctgggtatggaaaatggaaagatagaaaacaagcaaatcacagcttcttcgtttaagaaatcttgggggggagattactgggaacccttccgtgcccgtctgaatgcccagggacgtgtgaatgcctggcaagccaaggcaaacaacaataagcagtggctagaaattgatctactcaagatcaagaagataacggcaattataacacagggctgcaagtctctgtcctctgaaatgtatgtaaagagctataccatccactacagtgagcagggagtggaatggaaaccatacaggctgaaatcctccatggtggacaagatttttgaaggaaatactaataccaaaggacatgtgaagaactttttcaaccccccaatcatttccaggtttatccgtgtcattcctaaaacatggaatcaaagtattgcacttcgcctggaactctttggctgtgatatttactagaattgaacattcaaaaacccctggaagagactctttaagacctcaaaccatttagaatgggcaatgtattttacgctgtgttaaatgttaacagttttccactatttctctttcttttctattagtgaataaaattttatacaagaagctttaaaaaaa

SEQ ID NO: 99718 - DNA, 443 bp, Homo Sapiens
  misc_feature (298)..(298): n is a, c, g, or t
gcggccgctgactggctgcgtgtgccccgcaggagcatctccgccctgagtctcatcactctgtccaccgtgttcaacctgcccagccccctcaacgccatgcagatcctatggatcaacatcatcatggatgggccaccggcgcagaggtgaggcagggccggctgggagccctgtgtctctttacccacctgcggggcttcctccaggggctgctggctgtgccccaaggctataaggatgaacaaatacagccactttccatcaggagttcccagaaaacctgaagtgtgttgcnactggagtgagactggggagtagaaggcagaggagaaaagtacctgggccggcagagctgggtgaggaatggaactttccgctccctctgcctggatgctctctctgggcaacctgcatggctcattctcatgcttcattccagt

SEQ ID NO: 99719 - DNA, 299 bp, Homo Sapiens
ctttgtccctccggcgcgcacgccccgccgcgcgccgccttctgcaaggatcacccccgccgcggcgctacctggccctttgtcaccagctgccaaagaattcagaaaatcaaatttatttcccgattacggccggagcgcccctttgtgcagaggggtctctttaactgctgagattccagcagacactgtgcagccctttatggcgcaaaataaaagccgtccggcttcttgccccggcccccgccgcccctcccggctcccctgacttccaagcccctgtgggaacctgggaggga

SEQ ID NO: 99720 - DNA, 550 bp, Homo Sapiens
agctaccataaattatgaagattcaaaatgcaatttgccaagttttaaaagagaaaaacaagtacggaaacaactaagtggaaaacaggctggttaagtgtgtttgggtcagtttatttctagtatcatttacaggctaccctgatattgtatttaaaattttcattcatttcagagttcacaaaatgatgatttttcctgtgaagatacttcgtttaagagacaactgacttctacaactaaaatgtatacatgttcaaagaaaataacttgtaaaatatatttggttgaataacattgacattaagcctttaaaattatgtatcagaatctctggctattaagcagtctaatggtgcctactaagtcagagagttgtaattcttctctcctgtgctctgttctgataatgaagtaaagggatcagtagcatctactgtgctaaagaataaatggaatttacaactgtaggtaatatttaagcactttaagacaaatatgaatacatcataaatttctaactaggaaaatattttcaatgagatctcaa

SEQ ID NO: 99721 - DNA, 635 bp, Homo Sapiens
tctacctgaccttcctggagtatgacggcaatcttctgaggcgggaactgtttggctgccccagtgaggctgatgtcaacagtgaaaacctccagaagcagctgtctgagctggacgaggacgacctgtgctatgagttccggcgagagcgcttcactgtccaccgcacccacctgtacttcctgcactacgagtatgagcctgcagcagacagcacggacgtcaccctggtcgctcagctgtccatggacaggctccagatgctggaggccatctgcaagcactgggaggggcccatcagcctggccctctacctgtcagacgccgaggcccagcagttcctccgctacgcacagggctctgaggtgcttatgagccgccacaacgtgggctaccacatcgtgtacaaggagggccagttctaccccgtgaacctgctgcgcaacgtggccatgaagcacatcagcactccctacatgttcctgtctgacattgacttcctgcccatgtatgggctctatgagtacctcaggaagtctgtcatccagctcgatcttgccaacaccaagaaagcaatgattgtccccgcgttcgagacactgcgctacccgctgtccttcccaagtcaaaagccg

SEQ ID NO: 99722 - DNA, 498 bp, Homo Sapiens
gagaaaatactgaaaccacagacagtgcaaagactctcctgctttttttctgtctgagtgtgagctccatccgcctgggcatctgattttttgggaaagaagtccagttttatgatcttcacaggctattgcatttttactgattttctacaaaagtgcatgggggggattaattaaaccttctgactggaagttctatcacacaagaggcaagaaagaaaacagggtgggtgggaaatcagcctatttgtgaatttaaaaggaacaccgatttgcgggcaggggaaaacttcagtcacgtttgcacacctttctttcccattagaaaccgggttctcaatttggtcttcttttgttgttaattaggatgagtgccgtcagtgaaggggtggggggaatcaatttggttttctctcttgtttcttttttaatttaatgagacactctttgcattttgtctaagcgaaataaaaaagaaaaggttgtctgcctataaaa

SEQ ID NO: 99723 - DNA, 537 bp, Homo Sapiens
ttaaataaagttgcaaaaatgtatatagatctttaaatttgttttaaagaggggtggcttttttaatggctaaggaaaaaagcttggtgaccacatgaaaaggaggagcaaaacaaaattggatacaatgtactacaaaggtagaaatttcaaactccttttccataggtcccctatgtagagacaacagcaaaaccattattaggaagccatgtccctgacaagaagggtcgggggtagtggccttatccagtgtggcagtaggacttgatgaaggtctctggtgatacaagtacctagataaatttaaaagagacattttctaggtcaattttcttccaaatactcattaataaataccttttaagataatcccaagacagataaaaatattgggagaaaaccaaaagagaaaggaaagagatcctctaacaaagaagctactctaaagttacaactaaaactgttcaatcaggtcacataaattaacttagacaatggcaaggctaatttctaccataaatttgtctccttcta

SEQ ID NO: 99724 - DNA, 572 bp, Homo Sapiens
ccatcatttgaggttccaattgcatgaacattcagagttcaatggcctgaaggtgagaagagacaaaccaggttattagaagacaatcaaaatgaaacaaagcggggatggtaaggacagctaaaaaaaatcctaaggctgctgacacacccagataactggtagctatagttatgcctgctaagattggggtgtttggggcttggctttcgttagctcccttggtcttattttcccaaaaaagaaacctccaggttatgggcaccttatttagtctaatcatctggcaggatttgcagggtaattgcccagaactagaatattgatccagatttttacattactcatcccttttgctgcttctgagctgcagccagagattgctggttggttcacaggaataagcagtgttagtttaaaatgtgggccaaaacttaaaaacaacgaatgagtctaaaatctaatgacaaatatataagtcttgaaacataatttctctccagttctcatttttgttaaaaataaatcatgataggactgagttgtttgcaaaataaactttagtcttgtaa

SEQ ID NO: 99725 - DNA, 565 bp, Homo Sapiens
  misc_feature (42)..(64): n is a, c, g, or t
  misc_feature (136)..(158): n is a, c, g, or t
gatccggtaccggtaaccgggccctctccacctccgcctccnnnnnnnnnnnnnnnnnnnnnnngaatgagaaaaccacaggatatacacacaaaaagcatttccccctcattacttctgcctccacaaagatggnnnnnnnnnnnnnnnnnnnnnnncaacatgaactgttctactacaggagaggtttttctatttatctaaattgatcactataaagaaagaagatttgggaagtatagacatggacccaaaaaatcacaaattctaaagaagtttattttaaaattaatttcagagagctcatcctccagaacgcttagaccattctatgtgtctgagcttactcaacaaaaaaataagagccgggcagggttgatataaaaacaagtactgagaagctataggaactgttttatgggcaggatcaagagacttgtttgtgtatctaataattaagtcaaaattaaagagtgaaacatatgagcacatacttcttttacgagatgtagacagagaactatttagagatgcaaacaaaataaagttgacctaaaaaatcaaa

SEQ ID NO: 99726 - DNA, 517 bp, Homo Sapiens
atgggcaaaagatttgaacaagaacttcaaaaagaaaataactgaatgataacaattaaacacataaaaatggattcaacatcatagtactcaagaaaatgcaattgaaaaccacaagataacattccatacccactagaatggctaaaataaacaatgtctggcaattttcaaagttagtaaggttatggagcaactggaatcagatcagtgctattgtgaaatgagtttcaatttctgttcatgttaaattctattcaaagtgatttgatttatgtgataaaattgtttctggaaaatgttattcatccatgcaattacccaacaattatgtatttatagttcataatgggtgaaacaaagttgttcgtaccttcaaagagcatgtagacaagtttgcaaattaaagccttgttaagtcagccactatatagttactgttgtttatcacattttcttgaatcccaaacacatgtattgtcttacaaccaatttcaaaataaatctgacaactgat

SEQ ID NO: 99727 - DNA, 385 bp, Homo Sapiens
  misc_feature (110)..(110): n is a, c, g, or t
  misc_feature (112)..(112): n is a, c, g, or t
  misc_feature (115)..(116): n is a, c, g, or t
  misc_feature (122)..(123): n is a, c, g, or t
  misc_feature (128)..(128): n is a, c, g, or t
  misc_feature (228)..(228): n is a, c, g, or t
agattaaatattatcaatcttcattcaatgtatacctgatagtacctgacattttagttaggcagggtggtttaataatattggtcaggattattgttctttctctgtantnaanncacttnnctttnactggctactccagtacttgctaagctgttggataacaaatggaaaaatatcacatcacaggcatatttatctaccgagcaggcaaaacaagaaaatggnaacccgggcttggcatcatctagtgttactcaatcaaggcaaattatttattgtcttctgcccaggaggtcccatggggcatgaaatattgatttaggaatttgctgggcatgaatgactgtgtgttgcaattgtgttcttttttttaatcccttga

SEQ ID NO: 99728 - DNA, 502 bp, Homo Sapiens
cactgactttatgaagatatctcttccagtgcccttagtgtgagcatccccacaaaccttatgaaccagttgaatccaacctgaatgcctctccataagcccggagcccacaaatgcattttctccagggcccttggatggagggaatcaggaaggcctcctccaaacccaaggctaggagagatgttccctccggggtccagggaggagaacagaaaggactgagaagaactaggaatgccctcccaaacccaaggccagcaggagggtctcctccggagttccacagatggaggaggcctaaaagaagaaatcaagtctgcaacctaaaagtgggagatcttggattttgatagcacttacccagatcctttcccagcatagtcaggaacaactggactttttcaaagggaccttggctgtacctggtgtcctgggtgacacaggaaaaggaattcaggggctgcttcagaatcccatctttgccagatacgttaacttt

SEQ ID NO: 99729 - DNA, 471 bp, Homo Sapiens
attaagtgacatgttcataatctgcttgattgcatggaaaagaacatggagagaaaaaatttccagaaataccatagatagatttagtagcgtaaaagggatctgaaaacattctaaatgcacaggtaggaattagcacaaataaataagctgaccaagagttaagttctcagccgctcttatcttgactcttaaccaggatctgttttgatatttaatctatgtatgtatgtatgtacctagtaattcatactctgtatccagcaaggtgttcagaggacctatgatgagaagggtctaaacactaactctgttatagaaagccagatggaggaaatagcagatagtctgaccaacaacattgtttgctgtcctggcgaagttgaattctgagagtcttagctgccaggaaagccaggaaagatcttgagagaaccagtgtatctgcaatacagtctttttctgattaaa

SEQ ID NO: 99730 - DNA, 531 bp, Homo Sapiens
tttaaaggaagagatggtaaattaaggtgctggtacatggcatagataagcatccaatcaacagtacctgctcttgttattacttttattactttccttcatttaaggcacacagacacaggtgggatggcacctgcataacaaaaggcacaatttatcacagttctccttcagctccagccagtgggtggctgaaacgatcttatttcttatctcatgattattttgtcaagcctttgttctttattgatgaatgaataacagagttcctgcctgaaggcaggtgcgccactttcccagactgtcagtgcactgccaatcctctattgcctcacttttaatagtgctgatggctcatatttgcagacagtgtagaattatgcaaaccattttcatatgcattatcacttttgatccccataagaattttgtggggcagggaaaagaaaatggtattaattcccatttttatagacatggaaaatgaggctcaagcaagggacaaaattgccgcataagtggtagttcctg

SEQ ID NO: 99731 - DNA, 610 bp, Homo Sapiens
ggcacgaggacaccagctctaacatgtcagacaaaagtacaagggaatattatgaataacatgtctaacaatttgataacttagatgaacaaagtccttgtataacacaaattagcaaaactgtctaaagaaacagaaaacttaaaacatctctacatcaactttaaaaatgaattcgtaatttaaaacgtttctaaaaacaaaagtcctagcacaaatagtctcactagtgtgtcaaacattcaagaaagattatcaatctacacaaactgtttcagagaagaggaggtggaaagacttgtgaaccccttttatgaggctggtattattactctgataaccaaagctagaaaaaatttaagaaaccacaagaaaactatagaccaataactctcacaaacgtagatgtgaagatctttaacaaaatattaacaaataaaattcagcaatatacaaaaatgatgttatgaccgagtgatggatttatcccattaactcaaggttggtttaacatgggaaatccatttatttaactcaccatattaagagaataaaggagaaaaaaatatcatctcaataaagtaactgacaaagttcaacagtcactcaa

SEQ ID NO: 99732 - DNA, 416 bp, Homo Sapiens
aggaagtaccagatacaaaaacccatgagggattcctggatatagaacagggattcgataagagaaaatctggcatcatttctttacaggacacattatagcttcaggaggcccttggtctttgccattgctgttggcaggccttgtaacaaaccattcttggagggccttgtgggagggatcagttgtgcaagtgaaacaaagacttttggataactgactaacatcaaggcatattgatggcaatcagcaatttgagtcaggaaaaggactagcctttgtatctcccttgtttcctttctcctccatgtaattttaattcctgatatttccagctatatttgtctgttgtcacctgactctgtgtttgcggacgcagttctgggtctgaagcagcccttgacctctctagacag

SEQ ID NO: 99733 - DNA, 509 bp, Homo Sapiens
atgttacaaaataaaaaaagtacaaactgcattacttaataaatatgactaaaagtagttaaagtggcaatgagattgattttaagttggaaacattgtttgacccagcaaaccatacaagctctgtttacagacatttctacatcaatacagggcaatcctattttgccttttgaaagaatgtaaagaaatattaagacagtgttctcctgctataactgccaaggttggctccagacatttatgccattagtttataaatctcttagctggattcaagaagttatataaagcaggaggcttatcttgtcacagagttttataccatgttaacattctcttacaacaacgtgacaaatgtaaataaaaacaactgagagcaccagacaatctactctacacatcaaccagggtacagaataatcattctgccatcagcaaatatcagactttcattcaagtaagacctgctactatcccttaaaagaggaaaaacaaaacaaaaacca

SEQ ID NO: 99734 - DNA, 363 bp, Homo Sapiens
acaagctgccaggtctgaccacctttttttattgttgttgctattttaaataacgctattgacaactgacattgtttaagacagattcctcatggtaaaactgctgagaagaacatgaatatgaacaatattaagagaatccccaggtattaattttcaatggtactaataacttatcccaatggtaaaaaatgcagccggggagccaggtgtccagggaatctgaggctgtgccagtgagctgggcactgtgcctggcgctgaggacagagctgtgacttgaaccagccagggccctttcccctacccttggaaggaagatggtgatcagacagcaacaccccacaagtggggtaacaaacg

SEQ ID NO: 99735 - DNA, 574 bp, Homo Sapiens
  misc_feature (389)..(442): n is a, c, g, or t
  misc_feature (499)..(499): n is a, c, g, or t
tttcccttcccatttgatccttagtagcagctcataaaattcctctttataaattccagataatttcatcaagacatgacaaaagaggcactgctctggataatttaaatgaaatatacaaacatatatgtatgtgacttggctatttcaaattaaattctaacatcaggatatgtgcctctgctggtaatttgggtccttgtacctaaccaggtatctgaaaggtatccccacacctctgaaggcctagacagagccccatatttctcatctcttcctgacactcttgggccctgacaatctctctctccttgggatttctacagcatttattgtctgtttcaaccactcattccatacttacttacgaatttgaagcatctcttttnnnnnnnnnnnnnnnnnnnnnnnnnnnnnnnnnnnnnnnnnnnnnnnnnnnnnncatgtgaatgtatagttatgtacattatcaattttcaaaccatattataagcaactnttaagaagatacattaaaatttccttatattttccatagagctttggctataagaatgcaatatcatatttccta

SEQ ID NO: 99736 - DNA, 462 bp, Homo Sapiens
aaagactgggtctcactctgttgaccaggctgttctcaaacttccaggctcaagggatcctcctacctcagcctcctgagtagcttggactataggtacgcatcaccatgcctggctatagtaagttttgaaatcagcagtgtgagacctccaactttattgcttctcaggattgttctggctaattgagatccctttacgttccatacgagttttagaattagtttttctattaatgcaaaacttgtcactggaattttaatagggattgcactgaatctgtagatttctttgggtagactgaacatagggtatcttcccaattatatgtgccttctttcgcattttccagcaatgttttgtagttttcagggaacaagtcattcacttacttggttaagtttattgctaagtattttagtctttttgatggtattgtaaatgaaattgttttcttcattt

SEQ ID NO: 99737 - DNA, 295 bp, Homo Sapiens
tgatcataaaattaaatttcagacttcactagttctgcgtaacacgacaggttgcctaaggaacctcagctccgcgggggaagaagctcggaagcaaatgcggtcctgcgaggggctggtagactcactgttgtatgtgatccacacgtgtgtgaacacatccgattacgacagcaagacggtggagaactgcgtgtgcaccctgaggaacctgtcctatcggctggagctggaggtgccccaggcccggttactgggactgaacgaattggatgacttactaggaaaagagtct

SEQ ID NO: 99738 - DNA, 372 bp, Homo Sapiens
aagtcagggtcttgaaatattatgtattggtcacaattatatctggtgtttctttgaatatgcattattaataatgccatttaaaataaaacctttggcagttttctaaaatctgtcgcttttagcataggaatgttattatagtacatgtcacagcttccccataattcttcccttttcactctcggtaatctagtgccacatagcgaaaaactgtaaaacatgaacattttgccataccatttgtatgtgataagaaattaggttagtgccatttctatattgctttttctttggtttgatacaagatttcatattatgaatcatctgtcttacaatcctgtaaaacctatcattgcatcataattggag

SEQ ID NO: 99739 - DNA, 503 bp, Homo Sapiens
ggaagaaggagaccttaccttcaggaaaaatagagccacagcagtgccacatgccagggcgagcattctggttgacaggggccaggctgtacttgctgctagggtctggtgacctggggccagagaagcaggctggagccctcccaaaattaggcatctctgtgaggaaaagaaaatgaagctgtcccttccacaaggctacaaggacatctctctccaaaaaccatctttttccacccgggcaaatgttttggtggaaaccctgccaggaagcaacattctctagcagtaaccaaagggccctgggaggcacccgaagtcattcccgggagccaggattccttaaagagagctgcatacttttcagctcagctatcctttaaatattgtttaagggtatatgcagcacacatttttaagtttaaatatttgcaaaggatagaatttgtcttgtatcattatttaagttccttaaatatatgtttgtgcaaacctcgaaaaaa

SEQ ID NO: 99740 - DNA, 450 bp, Homo Sapiens
gttaaatgaggtcgtaagggtggggtcctgaccccataggattaatgtctttataagaagagacaccagagatggttgtctctctccccaggtacgcaccatgggaaagcacaatgagaaggcagccatctgtaaagaagagtgcccatactgggatctgatcctgctgactccctaatcgtggacttccggtctccagaactattgtttaagccacccagtctctaatattgtgttatgaaagctcaagtagacaaatgcaaagagcccagatatcatcctctagccttccttcccaaactcacctgtcttagattctattccattagttccagtgtaacaaactgattcatactgatctaataatcaggaacaaatttcatcatcccctcagagacatggtgggaaatgaggctttttatgcccagccaataaaacaacctagcagcc

SEQ ID NO: 99741 - DNA, 655 bp, Homo Sapiens
tgcggccgccgcttcgcgcgcagcgatgagaagaaacggcacagcaaggtgcacctcaagcagaaggcgcgcgccgaggagcggctcaagggcctcggcttttactcgctgggcctctccttcgcttctctctgagcaagagatgggtttatgggttggggcgccgccgttcggcgcgcacgagttccgggccgttcccctccccgctcttcttccaactcctcctcgcacgcccgagggccggcctccggtcccgcttccagtttccttgaagcgcccgccgcacacgccctattcagcaccagctccgcggacagttcccgcggtccaggcgctgtcacccttgtcagccgcgctttgggggaagtcttctgagaccacccagtgaataggcactaccctgggattcaagacagtcttttgtaactggcacacgccccacgccttcctctataacccccagagacaggctggggcagcgccaaggcggtctcgcgcgggactttgtacagcagtgtcttatccagcagccattggatgtaacgttttgctttgggttgtttttccttttgttgttggtaattgttgtaaagcagacgctactctcaagcagttgacaaaactgttgatttttgcattaaaatgatcgggctaa

SEQ ID NO: 99742 - DNA, 653 bp, Homo Sapiens
  misc_feature (17)..(17): n is a, c, g, or t
  misc_feature (40)..(40): n is a, c, g, or t
  misc_feature (118)..(118): n is a, c, g, or t
aggtcgcaaggtaatgnaaggttctccccagtctcctgtntgagccatctgcctctccagttttgatcggggaatatcatcaaagtagttttcatttcttctcctccttgcatcgccntgcatgataatgtgaggaacgtctagggagccaccagtggtgtaagtgctttggctaagtgatggagacaactgaggaggagtgtgattaccactgggttccctgagggtgatggaccgagggggcttctgtgggggatcgtcgtgcagcctgtctcccagagatgccaaaatacgtttcctgtggccaatcaaattgatttttaaaacattaataagttcaacctcccagatttttttcaacaggtccatcgaagtgtagccattaattagaaaggctttggtgtagtcgcccagttcaatggaatccagccactcagctacagaggtgggatggtagccatcatgcccaatgggtctcatctttggaaggagctggattgcctgtagaattctttgtctgtgcccagaattaaggattccaatttccaacaaatcctgatcttccataacattgcttccttttggagaaggagcagaagttgaataatgttaataatcttcaaatctataatattcaagtcaacctcagagaa

SEQ ID NO: 99743 - DNA, 543 bp, Homo Sapiens
taaaaagtggagtaaaagtgaggcacattttacaagaacataactcctattaaaacggagtaacaactatgcaaaggtttctatagcagctaggtgagtttgttttccgggtctgtcttaactggcagcttcctgtacatactggtacttatttgctgtaaacgtctgtttcatacatttgccatgcagtgactgtgctcgaaaggtgaaatcaatggtaaagaagcctaggattttatggtatgagaaactgatcgcaggattttctgatccatagctattaattgaaaacttctgatagtgctgtaggctctatagtaggcttaagagtgagtcttatactatgaagccagccacaagatactaacaaatgtataaattgaaaagtaccaatactttttgcacatagatcaaaatagagtggagaatttgggctccaaaaatcaggttagtaggctcatttccatgtgcttaaaaatgtttttgttgttatgcattgattaagggctagagcaaatataaaattaaatgtctttttcctcc

SEQ ID NO: 99744 - DNA, 588 bp, Homo Sapiens
tgctctccgcagtaacaattccatgattcaagtgtgtccacttgggccagcaagagcaagaggagtgaatccatacgtgctctgtgggtcagggtgtgccccagaaaccagcataagcttcaccatgtcctctctgcccagtttggctgcttcgtggagagctgtcctctcgttggcacaacgcagattgacatctgctccatagttgatcagcaaggcagccatgtcatagcagtcacgcagcacagctgggaaatgagaagtgtggtgggcatgttcaacgggaagttaagcccaaagtagcatatctgcaagtatccctcaggctttcttaaggagttcttcccacccactcccagacccgaacattctgtgtttaggaaacagattgtaaagtaaggcatgtgtcaaataatacttactgagaatgttttacatcaatggactatgtttttctgtaagccatgagtaattattcattgcttatgtggttgaaacacaaatgtaaacttttcacttatctttattcttcaagaaaatgggaacttaattattcagtatagtcctggaaatgtttgtagctgcttt

SEQ ID NO: 99745 - DNA, 518 bp, Homo Sapiens
ctgctgtcaaaccacggagcagctggagcctgccctgtccacggcccgtttccacccgggcatgttcgtctctcatgacttcggcagaggcccctggtggccttcagtttcagtttctcatccaggaaggtaaccttgggcattggcagtgggtttccctatggcttggatccagattagaattgatctttgttttcactttccatagttaataacatgcaaaataatgagaagaatttattttaaggtgacagctatactggtccaacatcgcctgcttattgtcagggtacagaagtttaatacttttttaatccagtttttcaaacttctccctgtagaccgtaaggatgaattccccaataggatcctttttaaaatcgattttaaattgttgcctagtcctgccaaggttattatgtgcatctgttatttttccaatacatgtaaacaaagcatcatgctgcaactgtttacatgtattggaaaaataacagatgcacatgataaccttggca

SEQ ID NO: 99746 - DNA, 310 bp, Homo Sapiens
aagtcactttctaaaacagttgagatttggggatttgctgatttactattttcacctgagtgatactagtttttcacatagtatatttttccagtaaagagaaagaaaatacctctaagtcttggctgctctttctattacaaggaaaggaattgggtttccataaataacttaagaattaggataatttcaatttatttgtacatacctttgtaatatgatttctcaatttaaatattattttcagtactatagaatgtgcttcctactattcaaaactcaacttgttttaataaaggagtattgctag

SEQ ID NO: 99747 - DNA, 412 bp, Homo Sapiens
caaaagttgtaaactttaatggctgatttttcgtaagtcccgcttctaagtagtctccctgaggagccaaggccatgagcaccaccgggaagagagtgcacgtcaaataacggctttgtttatgatcgtcgtacggcatcagaaaacggataaaaacatttccttttatcttttgaagacgacacgcctctgagagtaactggaacgttctgtttgcctctagccaacggcagaaaagcggattcaactctgactccttaacaagacaccgaaacacacccaggctcattagggcgacacgctgtaatttgaatttcgtggcaatctgggtttgccgaaactaagacagccacgatagtaatagtcaaaataacagtaaattaagtaaaaataaataataacagggcaagtc

SEQ ID NO: 99748 - DNA, 529 bp, Homo Sapiens
tgtggtatatatatacagtggaatactattcagccttttaaaaagaaggaaagcctatcatttgtagcaatttgggtgaacttggaggacatggtaagtgaaataagtgaaataaaccaggcccagaaagacaaataccacatgatctcacataaatgttaatgttttagatttttaacattgaactcacgcaagtagtgaatagaatgtcagttaccaggggctggaggggtgagggttgaggcgggagattcaagagatatgagtcaaaggaaacaaaatttcaatcagacaggaggaataagttccagagatacattgtacaacatggagactatagtaaatacaatgtattacatacttgaaaattgctaagagtgtagattttaagtgttctcagtacaaaaataagtatgtgaagtaatgcatgtcagttagcttgattttgctattccacagtatataaacatcatgttgtataccataaatataatttttgtcaattaaattaattttttaaaaagttaaa

SEQ ID NO: 99749 - DNA, 554 bp, Homo Sapiens
ctcagaaaaaataaaaagaaattgaaactggtccaaggttatagtcatatcctcgataacttttgaaaaaaaattttattaggaaattaatactagcctttttcattctggctgaaagaaaattattaaaggattagttgagtgtgaaattcaacagtattttgctcatacatactaaaaaggtgcgtagggacttggcgcatttaaacaagtttctgaaaggtttcaatttgactcaagaaaaaaattcaatatttcttttgaaaatactgaatttatcacttgctgcatggatcagatggcataggttaatctttgattttcagaatcctaatgaaataactttcaaacaatttgtgtccttaattaaaggtggaatgagatccaatttttccccctaatccttcagtttaagctgatacatgtaggttaatgtggaatgaaatcatctgtgatatattatgttcatttatcaactgagcttttttgatgttgcctgtttttatgtaaaacatgttcttaaagttaataaaataatagtacttggtggatga

SEQ ID NO: 99750 - DNA, 849 bp, Homo Sapiens
atttttctcttgtttcattttagcatttataagaattctatttttccatttttaataactgatggaaacaagcatcattgtctgataaatttattttcatgctgtacacgtaactaccactttcatcatccactgttccaaacagatactgaaagtctcttttgtaattttctccttcccagtaattttctccatctacttgcagtgtatttgggatcctgacacctttccattctaggaggatgaagtgctttgggcagctatattttcttgtctgcctacagagactattcaatcacagcaagtgaagggttttgcagtgctagtacaaacagacaaggaaaaaaacatataatttctagttatttatagcctgtgcagctatgtggtcttatttatagcaaactgcacatttgatttgaaaaagtcatggtcatctggaggtcaaattcagatggcagactcaattcagagaaaaggagctgaactagaaggtaagcaagcctgttagactgggcaacttggacttgactttgctccttcaacaatctagagccagttggatgatatttctgcacaaaggtggttggttttacaggttgctcagtctaagctgcttctagtcaaataacaaatgtgaaaggagatagaaaaagctcttcagttgaactgataaaagattacacttagggagaaaatgtatgatggtttgcattataaaaacaataatttgccataaatcaggcatttctaggtttcaaacttttgtcataaaaaccaattttgagcattgcaattttagggacatattttattgttgttattttaaataaaaatctaaaccacaaa

SEQ ID NO: 99751 - DNA, 526 bp, Homo Sapiens
tggttctggattttgctagagaggccctgcggttttccacctggacagatacttcaatgaagcacaacttcgttgccacgtctcccgtgaggttttccccgtgatattagactctggagccaagcagcctgggttcaactgccttttctaccacttagtagctgtgtgacgttgagcgggtcacttgactgtcgtgtgcattgttttccccatctgtaaaatcttagtgtccttaaccacgtaaaacacttaggacagtgcataggacgtagggagaactatagttattcattcaaggtgtacgttgaatgaatcgatcccttccctgcaaaaaataaataaataagtaacaccacacacaaaaagaaagtgaattgatttttcccatctgggattgatgtctccctcctccgcttgtcgcctaaagcactttgttcttctcatgttgcatttctactctgttacagaaatgtgtctctatagtccatgtgatatctgtaaaccaaaaataaaagtctaagccccc

SEQ ID NO: 99752 - DNA, 539 bp, Homo Sapiens
tcagccaggcggtcgatgtcagcatccactgtgatgagtcctgttgatggtgtggacccttgatgggatgtgatgagatgggcacttcaccccggggatcgtcctaatgattcataaacccagtctaatgagaaagacagcagacagtcccagtagaggggcactctataaaactcctgagccatccacacagctatcatggtcctcagagacaaggagagtcggagaagctcagggcccagaggaacctgaggaggcgacaggacgaaacggccagtgggaccctcgacgggatccctgggcaggatgagctgcggagcactggggcagtgaatgaagtgtgggccacgctcccggtaacgggtcagtgccggttcctgatccgtcacaagggcgccaaggagaggaaggtattcatgctgggaggacattggtgtgggcgtgtgagagctctcggtactatcgtctcaattttctgcaaatacaaaacttctaaaatagtgtattaaaaatagagaattaaagtgcaaacatacaaa

SEQ ID NO: 99753 - DNA, 270 bp, Homo Sapiens
tttaaagaaacaacaacatctttatcattccactactcaggaatcataattatgagcattctgaatttgaggatgtgagaatggcctccacattttcaccacggtagaataatttactcttcagtcggcagctgcatcaaatcagctttctggtaaactgagtgaattaagcagttactggagagagagctcctaaaaatatgtttttcctgttaggccatcctaaacttccaacccggtgttctggtagtgattttcattattaacctt

SEQ ID NO: 99754 - DNA, 483 bp, Homo Sapiens
gttctctacatgtaggatatgtttccttattgattacaactcagctataatcctgagggaacatgggaaggaatcaaaggtaaagcccattcaggcattattgacaagagggctttaaacaagtgaataattgcacaactaaaaagacattagaactgtgtgggctataagtgttcttatcactgagacacagtggatttttattgaaaggaaccacgtacagcaatgcggagtgggatagggataaaatacccaccccaaaatgaccttggccacctgtctgccatatacgtacactgagttcctgtctacccaagagagtcagcccttaattctcaggtgaacaaacagctaactgcatcagcaaattggaatggctggcttgaagtttccattattttcttgaagagaggtgatgctttaaattactttttggattgtagccagttcagctaggcaaaagccatacttttcacaattaaa

SEQ ID NO: 99755 - DNA, 467 bp, Homo Sapiens
ttttttttgaagttttgcacattggcaccagacatgatttaattggaaattcttattatttattctattttcaaaacataagtgcttttttaaaaaaagtctaacatgtctttttagtaccacacacttaaaatgaacaaaaaacaagtcgagttttcttaaaagttgctttaaaagttaaataccactgtatggggaccataatgacacaatttcgtaaactcagagaaatgcagcccttcgagtaagttcaggcaaatgagtgtgggaaggagtggatcttttgcctgtggcactacagatatactccctgagattggggtacacttacaaccagtgaaaagacaaatagtttcagaacaggttgtaaactttctttaaaagtgaccagaaaataatgtagtcagaaagctacttactgtgtgtttccatttgctctgagagaagtgctgaaaaggtttgctgtc

SEQ ID NO: 99756 - DNA, 651 bp, Homo Sapiens
  misc_feature (442)..(442): n is a, c, g, or t
caagcatcctccttactgaatttagattttgttccgattttgtggcctgcgtttcttcttactgccctgctctgtggccctgttcttcctgggtttggagatcctcaaggatgggcttcgggaaggcctctggccggatgatctggtgacgtaatcccatctgacgctcagccttggactttgaaaaggcacgactgtcctgtctgatggacaggatgcagaagcctttgggaatgggcattttgccagaataaataaaagaagacaattggcaaaagatggactgtaccccatggccccaggctgctgtgtggagagacttgtcctctcctctgcccacggtcaccagtgagcaccagggacggggtttcctgctgcacctgggcctcttcctgctgccaggagctgccttgctgcctccacctgtgacagtccacccccncataccccccccacccgcaccatgagaggatttccagggcccacccgcctccagtccccgttctctctgctgctttcgaggtcaccctgggctggaaggggtgcctgggatactgctcagacgtcttggccgccctcccaccccgcaacaccccgctcctggttttcaggatgaaattgtcctcaaataaagcaagcttttgagtcaaa

SEQ ID NO: 99757 - DNA, 495 bp, Homo Sapiens
atgtttgcaagtacacaactgtaatagaaaattttgtttggtgtcccatttataatagacagcacatatggtagctcattttttaaaactgatttttaaataaacaccgtttctacctaagaacagacagttcatcttcactaaactaaggttcaagagttcaaatgaactccaaaccaaagataagccccacttaatgcataacaatgaccaaagtttcatgggagtggaattactgttgagtattgtttttcatttgtgcaggtaacagtaataacagtggaatacatcaagcctgtgaatgccatcactttccatctaaatatccatgaggttaataaaaaataaacacttttgtttatagcacagaaaattaagcccacatgaagttcatgtgtacatttacacagaggcacgtctgcacatgaaatgtgtgtgcacaccaaaaaggcagtttagctggttgtctataccttttccttaaaaaaaataaat

SEQ ID NO: 99758 - DNA, 598 bp, Homo Sapiens
  misc_feature (545)..(545): n is a, c, g, or t
tttgagaatgacaggaattaaaaggaccattgtgaagctgaagacaatattcatcactgctcatttcttctgaacccaaactgatgcttatcttgaaagcctcaaagctacagtggcaatgtcagctttttcccaggttcctttgtaagctgcacagaactgaaatgcaaacaggctgaaagcctctcattttacagcattctattctgaagcaatcaggaaatgttaattgggatttcaaggcttctttctacatttttttgctttactttcagtagtttgcccccatgcccatcaaattctttatgcttttagcctctaaatgttactttattgattcattcatttattcatgcattccctcattcactcatctataaaatacattgagtgtttacagagtggaggccacatccaaggcatggaaaacatgattttctatcctcatagaactctcagtgtattataagcgacaaatttaaatatttgcagtaccatttggtaaaatgtaatgatagatgcatatatatatatttgaacaaaanaagaagtattcaactttatggacttggacaggggcagatatgattggaacata

SEQ ID NO: 99759 - DNA, 589 bp, Homo Sapiens
tctcctttttaatttctaaaaaagccactttgaatggaagttgtcatccgtaaaagctgaagtgtaagcactaggaaatctcaatatagagatttgaggaaagttatatccactaggtggcagtcattgatcataataagtgaaatgagcccttgttctagtacatgattttaggcttaggtaattaggtatgtgaaattacatttctttaatttaaagtaaaattcagaaggttttagttattataattaaaggaagactgtgtgtagaatcttacgtaatagtctgattctttgactctgtggctagaatgacagttatctatggaggtggtagaattaagccataccttttccttcatcactcttggaacatataaattttttgtcatcttccttgcaaagggcacatttaattttgttcttgaataaaatattttattgggtatttgtttttattggtaaacattagtgaatctcttctataaaattgtaagtagatcagtgtgtagatttatttagtaacttacctcattgactttggaacatggtaggatatgaataaactctttcaagggttaaattaaaaa

SEQ ID NO: 99760 - DNA, 588 bp, Homo Sapiens
  misc_feature (13)..(13): n is a, c, g, or t
acagacatcaatncgcacttcccaagctggagctgtcaaaaagatggaccatctgatggagttaccatagtaacctttctcgcctcactttttagtgggcggctggtacgtcagaatgtagccatgactggagaaattacactgagaggtcttgttcttccagtgggtggaattaaagacaaagtgctggcggcacacagagcgggactgaagcaagtcattattcctcggagaaatgaaaaagaccttgagggaatcccaggcaacgtacgacaggatttaagttttgtcacagcaagctgcctggatgaggttcttaatgcagcttttgatggtggctttactgtcaagaccagacctggtctgttaaatagcaaactgtaggtccaaatctcaattttttagaattttaagttatgaagtgctcaaaggtactgacacagttgattttattcacaccattaggggtatgcaagatgtccctgttttataaacataatcacaacagtaataaacctcaagtagtggctagtgtttagtatagaaatataagatgttgatttagtaaactgataaaaatcgaaaaaa

SEQ ID NO: 99761 - DNA, 462 bp, Homo Sapiens
cacgagggaaaactccggtttctggcttggcgatcgggtgaccgagcagccgcgaggtgacagcgccggcggcccgcgggcggggaccggctgggatagaggcgcgttgttctctgagcgatgtttaccgagaagcccgctccgcggcacgggcgggtgtcagttgggaccccaaccctgggtcccgcggctcctagcccggggcctgcggtgtagacgggggttggggacaggcccagctggccctgaccgggtgtcgggcgcccagagatgccgcgcgggaggagccgcgggagagccgccggactcagcgagcagagggtcgtggagcctgatggatcgatgagatctgaaaaagaacactgtgcgagattgtattcctgcttattctttccaagttagtaggcagattggaactatagaatttatccgtgataataataaagttcgcataactttaaa

SEQ ID NO: 99762 - DNA, 441 bp, Homo Sapiens
ttaaactcaatttataccaaaatgttcatctctctctctcacagccctacagaaactcaccaaatattttctaatatttacagaatgacaaagagacattaagctttttagaaattgtgcctcagtgagaacattattggtataagaacaacatgtactactctctcttaaatggatccctggtggtacaatgcttcatttcccagcaggggagaaacaagagccagatgatagcttagtgacagagcttcagactcatctgggaaaagctgacagttcttaagcaagctgctttattgcaaacaaggctcttcctccaggcagtcctgaggctcttctaggagtataggttaaaggtacaaattcttactcaaaaatctgacagcacaatgattctatcatggaatttcataatgaaaagcctatttcatctgtaccatt

SEQ ID NO: 99763 - DNA, 480 bp, Homo Sapiens
cttaaacatgctgtcccaacatttgtgagttgtgtcacaagtgagtcattatcaatggtagataaaatatcaatgtttgtgatgaatttactgtaaaaaaattaaggtcaatgaaagccattctgttatttttagcattctcacttatttagactctattacactttcttggatgagaggggagagtgtggtgttagctagtgagcagaggtctgtatattgtccttgccccagcctgcaatctgtggatgcccaggggaaggcatacaggcctcatccaccaggcaatagacaggagagaggtgagaactatttttagaaggaggaaaagtagatacgcaaattgtcacaactaagagtgataatttggtagctctgtatgtatgctggttccaactgtttaatcccttctgtctttctgttctcacaaagatggaaaagatacaagagcttgccggaaataaagctacatctatccaa

SEQ ID NO: 99764 - DNA, 491 bp, Homo Sapiens
taaaagatgaaatcaaacagaatagaaaatagtgtgcacctcctgcaggaaggccactggtttgtgctacacccgcacgtgagcctgtggcagacaccatcagctgctcccaactttccttttccttttgttcctgagcacaaggactacacttcccagcctccttcacggttgggcgtggccacgagactgaggactgaccaggagtggtgagtgcaaggcaagtgcaccatttgcaggctcgacccgcaaaccctcctgtactcacttcccatgcccttgaccctttggctggctggacacatatgcaggaaaagcccctggggagattatagagccacaagagtgaaggaccctgggtccctgaataaagaaaattgcctgccaacctgtaaaccaccattccgctgttggccattcgtgaccatgtgtatttgtcatggcagtctaacctatgctaaattaacaaatgagatacaaatcatgacata

SEQ ID NO: 99765 - DNA, 256 bp, Homo Sapiens
tgaaaaaatgtttctgctttgaaactagcaggtatatatctaatagatgttagcaagttcacacagaggaggcagacgtgtcttacttagaacatgttgtctcctatgcctatctttccagtcctaaattcccttcctttaggaggaggccagggtggcccatagaagcaacaactgctggatagagaagatggagcttctccagggccagcagccagattagtcaagggaaaaaagaagaccctgggttggaaga

SEQ ID NO: 99766 - DNA, 699 bp, Homo Sapiens
  misc_feature (306)..(360): n is a, c, g, or t
tctataacttgaagccctgtaaagcaaagatttaccaaactttagattttataccccctcttttttcagcatatccaaataaatttacatgatcttatgagtgtaaatcttctagtcttcatgagatttttccagcttttctgccttttagattgacatttctagttgcttaaggtttcttcttcaaagcaatgggtataaaacatgtgattattattaaacagttatggaaaataccatctttattccaccactttatcaggtagaacttgaaggtaaaataaagtttggatgctgagtctacannnnnnnnnnnnnnnnnnnnnnnnnnnnnnnnnnnnnnnnnnnnnnnnnnnnnnnagtggttaccagagatttaataacatagcagaagtaactgaatcgcctcctctgccctatgcacttgtattttttttatttcaaaaatgccaggaagataagtgtatgcaaaaatataaagtttgtaaaattttatacaacttaatctatttgatcattagttaagtaagcttaactaaattaaaaatgtattttattgctactttttttaactctctaaagaatacatttatgtttttgaaggagctttaatttagtaacagttaatctttttattaattttagtaaaaataatcatacccttttaataataaaaattaaactttaagtctttaaaaa

SEQ ID NO: 99767 - DNA, 367 bp, Homo Sapiens
tgattctcggaacccgaggagaagcggcgtccggggctatggctgtgactctggacaaagacgcttattatcggcgagtgaagagactgtacagcaattggcggaaaggagaagatgagtatgccaacgttgatgccattgttgtatcagtgggtgttgatgaagaaattgtttatgccaaatcaactgccttacagacatggctctttggttatgaactaactgatactatcatggtcttttgtgatgacaaaatcatctttatggccagcaagaaaaaagtggagttcttgaaacagattgccaacactaagggcaatgagaatgctaatggagcccctgccatcacactgctaatacgagaaaa

SEQ ID NO: 99768 - DNA, 536 bp, Homo Sapiens
tttttaggtcctggttaagtcgtcacctgttgtataaatagaatgcagagttatctgtaaaaatatacattactttcattgagtcttaatttggataatataaacatttatataatttaagtccagagaaacagtacctaacttttgatatacaatttattcttcattgttaacgcataacatttaggatacagtagaattatgtatctcgcaaaacttggaactgtgtgtgtgtttaattcacttcttcagaattgttgctagccctgaagggacttcagatatataatagtatcaacaactaatacatctaatggcagtaggcatcaaaagctaaaagagatttcacaatactacataccatgagacagggctgataaattatggcccatgctgtctggttttgtacgtaaagttttattggaacacacctgtgtccattctttcatgtattgtctatggctgctgtcatgttacaactacagagttgagtagttgcaacagagactatatggcccttgaccaaaaaaagcctg

SEQ ID NO: 99769 - DNA, 424 bp, Homo Sapiens
ttaaaggaacatttcaaatacacagggatacagacagcctttaaggcagccagccacgtgccaggtcccatttttcaaaacctctggtccactaaaccaaccagtggtgttaacctagccattgtctgtccacctgttgttttgtttcatcttgtttttgtgtgtgctgctgtttaattgacaagtaaaaattgtatgtatttacggtacacagcatgaggatttgatatgtgtgtgtacactgtggagtggctcggtcaaactattcaacacaggcacggcctcacatacttagcatttcttttgtgtgtggtgagaactaaaatctactctcagcgattttcaagaacacaataggctgttgttaactgctgtcaccatgacgcccaataaatcactgaacttccttcttttccctcgtgcc

SEQ ID NO: 99770 - DNA, 511 bp, Homo Sapiens
cagcgtcagccgctcatttccttctcatgaagtcccatctggtcatggggacgagggccgggagggcaccgggtagccttttcacacttggggattaggggagtgagaaaagatttgggccatgcatgcaaagtcaaagtttaaaattttatccttttcaaatagatgatataatatacctatacatgatataatatttgtatatatgaaatctctctatatttgtttaatttgagccattcaatctaaaccaatgtacaggtgtacaatgaaaaatttaaatgcttagttatttttcccaacacagtgtaaagtcaccctcctctgagagtgggatgtgcagagttttgatgttgcagctttgctcacttcctggcaagggcaggtcatgcctcaatttgtaatgggagtctggggtaagggtgggggttgaaagttgttatctttaaatacatgtacaaatcgttgtcaaaagtaacgttattaaaatagatttattatccctgaaaaa

SEQ ID NO: 99771 - DNA, 1028 bp, Homo Sapiens
tgctccttccctcacactccctctcctcaaacaaacatttcgggattcactggcacttgcaggttgttaggaaccggtcttgattttataagacacctttcaaaacataatcccggtgcggcgtgtaaggtgtgggaaccgtttagtcacagacaccgtcccgtctacctcccccgagtccagccttgggtgggtgctgcacagcgactttcggccttaggtcttctcgctgtgccttcctttcctcctgagagatgctctccgcctaagaccgctaacagctcaattgggtctcattgatcccactcaccatctagagccctgttgcctcattaatccgttgtgccaccagctcacgggctgcaactgggaagagacgagacctgtttatccatcgccgacactgggatacgcagcaatctgcaaaatggggtagaaaccacaggaagaaagtggtaggcgacggcgcaggcacggtagaaaggcgagggccggccccaagctgggggagtattctagactgcaacaccgttcacactggtaagcgtagagtgcgtctacgcttgcctgggcatgaacacaccgctgaacattgctggctcaccgagaccgagggcaggtatgtccatacccctgatactttagcttgcagagtaaacactaaataggttagattaacggatgcacaacgtttttttccacggatatcgtggtcaaattgcgttggccaaattctaagaggaaactcagtacctgggcttgtcccacatcatttatatttaggcacagtaaacgccagatgaccagattttaaactgcaagtcttccaggcaggcttgctggcaaattattattattattattgtcatttaaaaagatcacattcaaatagggggagatgggagttatcttggattggcagcttatgtgatatctttcaggcagaactcttcttctgtgatagagggtttgacatgcctaggcaaatttgcctgacagggtctgtaactcccgggccactgttaaaa

SEQ ID NO: 99772 - DNA, 694 bp, Homo Sapiens
cgtcatggaagactggggccgcttccaagtcacagacaggagacggggacaggaaagaactcattccacccaatcggacacctaataattgagtgtctacagcagcaatcaagtgacaagtgaggccctacctgacccagaaggtgcctgccggctaaacattctgcccccaccagaaactccagggggtccgcccgttatgccgtggcccacccacgcccctttggatcaccagcagtcacagacaacaggcaggcgaaactgaagaccccaactcagccccagcggaccctccagagcaaaagaggcccccggcgaggccacctgtcggcaggcatgccgaggtcaaacagccggggccaccgttcccagctgggccacgacctgcaccgtccacagatgggctttgagatggatttgtatcagggtggggggtgtggtttggccaaaatgcaatggaccccgacccctcctcgtaaaaggatgttgggtttccctctggtgacacatgggatgcgtcataaaccctcccccaaagtcctggtcagcagcccatccttccaacgatgagttttgcggtttttcagaacagaaatgatcactacgattgacgacggtcgtgatgttaagacgtcgtctccatgagctttggggggacttttatgtggaataaagaaactatcactgagaaaaa

SEQ ID NO: 99773 - DNA, 496 bp, Homo Sapiens
tttctacagaacttccattaaaataaaaaacaattctaaatcaagccttatggacaagaattaatggttctccctaatatatcccaaatcggtgtgtcacttgggcaagtcacctctctcccagattcttatttgtcctacacgtaactggggttttgcaacagatgttactcttccttctcctttccaggtctgttagaaactttattaggaaagcctgaaagtaaaatctgtactgtttacatccagagaaatgtttatactgactaaataatttcctcaaatctggtcacctttctatgggaaaattcctcatcttaacaatgtttcatgcataaagtcatctggcctcttaactgcattgttggatatttttaagaccaaaagcttgctaaacccaaaacagcgaaagcattcagttgaaaataaagtgaaaagccacatatgtcttagagggagaaaacagtgctaatgattttaggccttaatagtttca

SEQ ID NO: 99774 - DNA, 425 bp, Homo Sapiens
tgaaaggcgccgtcaagtcaaataaataaatgccctacaacaccaacccaggactgagatctgcatgctggaatgacggtggtggtggtggctttcagtattccccaggttttgtccggagcaccggcacgccctctcttgaagtccgctctccgcacagtggttagacgggaagatccggagctgtccagtgtcttgggtaatgcacggcatcgcctgatgtctgacgctagaacaccacgtaaagtcaagcagagggaagtgaatgcgccctaggcccctgcaggccaccaagaagagctagagggagttggtgcaatcctagagatgccggcaggtgcaccaatctgtggcacacgtacgctctccaatggaagacaactcaagaccacaccaagtttgtattaaaaaagtactgttgtgtt

SEQ ID NO: 99775 - DNA, 446 bp, Homo Sapiens
tttaaagatatataatcatgtgccacacagtgatgtttccgtcaatgacagaccagaccacatgaaggatggtggtcccatatttttactgtaccttgtctgtgtttagatacacaaattccattgtgttacagttgcctatagtattcagtactgtgatattgtgaaatatatatttggtcttgtctcatttcttggcatacaacttctaaaatctttggactttccagagtgatgcctttttgtatgctggccagcagcccctaggtagcttcaggatgggggctggtgacaggaaaggccaaggcaggcataagagggttgggactttcagcctcacctctcaacctccggagaggggagacaggctgaagattaagttcatcaccaatggccagtgatttaatcagtcatgcctacataatgaagcttccataaaaattctg

SEQ ID NO: 99776 - DNA, 422 bp, Homo Sapiens
ttaccattctgctttccttttctttcttttcaacaaatattgatggagcacctcctcggtgccaggcgctgctgcagcctctaggaaatcaaccgtggaaacacacggaccctgccctcccggcgccagtgttctggtggtcaggaggtgaagaaaaccagcaagaaccagcacaggaatccgacggtggcagcgccgagagaaacaagcttggaggggaaggagagctacagaggctgcatggatgtgatggttggagtggaagctgacattgtgggccaggagaccctgggagtataggccaagatgaaaagagcctcaatccagagcgttctgtgaagcagtcaccacggccaccctgggccatcagcttctggacttttacaacatagaaattaaatttccattgaatttgttggaaa

SEQ ID NO: 99777 - DNA, 333 bp, Homo Sapiens
accggggacaccactccccatcacactccacaccgagcctggtgcccggtctgtgcccgagcacagcgggaccaggaagggatgggccctgccagggttgcccctgcactgtgcattctcgcctgggaggcacaagttctttcatctgcttttccttcagaggtgctgagcccacgccatagcccctgtgggatggtgggggagggggcgacccgaacaacagtgcagtcggtatcgagattggggagaggagcgagtccaaggagaaggtcatgagtttctttttactcgtgttgaataagaacaataacaacaacaatatggaaaccaccg

SEQ ID NO: 99778 - DNA, 362 bp, Homo Sapiens
tgaagagaaggatcctggccgagatggtgggacattctaacctggggccccttacctgagtctaaaaatgaggcctgccctcttcactctgcactatttcctccctccccgcagggggcgctcagtacccacaattggacttactggcagtgtggtcagtaccttggcgttgggcctggtgagtcccgtgaactacagaaagggtgactcaggagaggaatgtcgtggctgtgtgaacttgggccacattaacctctccaagcctctattttctcatatgtaaaatgtggcaaaaaataatacctccctatagaactgttgagcatgaattataaggggcttaatgttgcaccttgcactag

SEQ ID NO: 99779 - DNA, 558 bp, Homo Sapiens
ttccttccaactaaatgacctacacggacttttattttcttgatcaaagaggtgtttattaaggacttctggataactatacttttactctatttttaaagatcacaaagtaattttaaatgtgaacaggttcccataccatgaatgctggcctcaccttctctatcatccacattttgaaatgcaaagaaagctcccttgtaagccatacttccttccccactcccatcctaggatacttgcccagtgctcattaggcatttcttattcagatagtccaaatttaggttattatgcttaatttgacacattaactaaatgcccagttttaaaatatatccatcaattcacgctgaaatgtgcttctttgtgctatcaaatggaatagaatacacttattttttaaacaatcccagaatactgtgtgtagacttttgttgtgctcaaataaatgtttacttatcttacaaagctcaaatactggattgtaaccatgtgatgaagttatctatgttgtacctaacattgcaaattaatcaataaatctctgttgtcaaa

SEQ ID NO: 99780 - DNA, 413 bp, Homo Sapiens
ggatgagatgagacagctataagtaagcaagccccagtgagtgtgaaggattggtagaaatgttactgatgatgtgaaagatttagacagagggattaggtatggtgtatgatgagtttggtagttgaggagcccttattacaggtaatatagcttctcccaagctcacttgcaaactggaaggcttttttaaaaatgggcttccacctatgaagggaaagcatctgctcttacatagttggattaggtcattctgctttatttatatatcaaataagaattaaggtactggtgaacagtagagataaagtaagaattttattgtaacaggttataaaaatattttgataatttcccccaaagagaatgtactatgaataaataaaatctacaaattattgggctaatttaaa

SEQ ID NO: 99781 - DNA, 582 bp, Homo Sapiens
  misc_feature (41)..(41): n is a, c, g, or t
cagggtaaggggcattatgccaaatgcacagaagcaaacanatatgactgccaatcagggttgatagtgactgtcaactagagttcagtcaactcacactgtttggaacagatgtttgggaaacaaacaaacgtgagcttatgatgtactggtagctaacctaaagggtgtgggaccatgacaacatttatctgaacccaagtgagacccctcagtgtgtgccttcaatggaacctctctactaagccatcaatgggtgggaaaagctgagactatcctaattgtggctgtgtttgttgggctgctggaaccagattaccatacctctttgatgaatgagcctggcagaccccgaatcgcatttaagtgaaagccatagccattttcacctttagccagcctgcagagtttaggcttatgatcttcttcctctgtagtatctggtggacttgagacttccagagaagtgggagtaggagctggagcctccttgacagagccattgggcagttcttgactttgatagtagagaaatggagaaaaatgagccttttgaaaaataaagggaaaaaacattaactt

SEQ ID NO: 99782 - DNA, 530 bp, Homo Sapiens
aattggcagtgatcaaaaatggtgccctcagtcatcttccccttcagagcccttcatgtcctttggaggcatcttggcattcaccctctgaggaagcaggcattactcagcggattcacttctgcagagtccttccacacacaccccttctgtgtgcaaatggactttatagccaatgcaggcacaattctaccaggggaggaagaaaacaggccagccgagcctgctggaataatccagtgggggcctttttagtgggcctccaagggcactggtcttgcttttctcatagctgtggtgccctagaaatgaactctccctccactatccactcctcagtgaaagatgtggaccagccaggaagaagcaaagaagtgctgttttattgactccagaagagaggccttccaagcgagcaggcactgtcattcccagcctgtatcccagaggctctgagctcctagcaggcagtaaacagttgcaggggtgaaagcattcattcggcaaatcggcaaatcttcactgagcat

SEQ ID NO: 99783 - DNA, 296 bp, Homo Sapiens
gaaatggtggcaacagtaagagcccacgaagagctgcggttggtagttcattctggacagccctcccgtgaaccgtccctgtactggcacttgttgctggggactgtcgctgtcctctccctccccgggccaggtgtgtcctggagggcagggaagcgtcttggcacgcgggtgcgcgccgccccctcggcctcctgggctccctgaacctcgcaggaccccggcaacttcgagccccgccccagctccaggccgcgggggcgcatcgcgggcgtcgggcggggcggcccagcggg

SEQ ID NO: 99784 - DNA, 260 bp, Homo Sapiens
agtgtaggtggggtataaatatacccagatccccgctgatttggttactcggggtgagcatcagatggaaatagaagtttccgggggccaagagagaaagagggatgtaacgacaattcttttcaaaacgtgtcccatggtatgcctcgtggaaaaaatggttcattggtcaaatgaatttgggaaaatgctgtcaatatcaccgactcatggagcttcgcaaggcatcttagcttaataaaggttatgaaaagtcttgc

SEQ ID NO: 99785 - DNA, 556 bp, Homo Sapiens
ctgccagacaaaaatcataaatcccagccatcatttttttcatgtccatagttccagagttcacttaaatatactatttgtaaagctgccattttcatttatagtttgactatgccaaagagcaattactaaagcaattttggggttacattaaccaaaataatgtaattacaaggcctgttaacacacaaagcctcagaaataccagtgagtgtgactgaagaatatttaggtgataccttgacatgtcacttcaataactccaaggggcaaggtaacttcaatatacaaatgaaagactattagtgaccaaagtagagtctaattttccatctattaagaatttgtatagaaaatacctgaaaaagatacatgtatataaaatgatgccacttgaactttgttggtagaagattgcacaagttcatcatccgagccaattaagacataaaaatataaaagaggtaacatcagtctgaggtaaacaccaaaagtttaaaactccaaatatgaaaaaagtagttaccttcagttgatatatacatttatactttgt

SEQ ID NO: 99786 - DNA, 398 bp, Homo Sapiens
aacccagctcggggcaggtgccctccgggtatgacatgaatgagtgacaggaggcatgaccttcaccaatggaggaaggaagtcaagcattggtaaagatatagagaagctctctgacaagacttgaaaagaccttgtagctaatagcatctgtattcttagtaaagaatcagagtagtctgcttaggtgaggagtttcaaaaaaagcgaaacaggcttccagctgaacagtggaatgccttggaaaggaagaagatataagggaatttgttcctatagaattggagttctgcaggtagaggagggagcatgggtatcctgcatctggaagaatggaatgctcctggattgaagtgagaacacaagggataccagaatttagaagggaggtttgagga

SEQ ID NO: 99787 - DNA, 517 bp, Homo Sapiens
tcaagggccacgcaggcagctgcagcagggccagctgcaggatggggctgccggtcactgaattgtcgttcaaatgcatcatctttgtggcgtctttctcatgcgagcaaagccacgtgctctcctgtctgctgtcacatctgtgcctggattgcttaaatattgtttgtgatggggaggttttaatctggtgatgcagagggaagcagggctgtgggggcacgtttaattggctcccagcagcgtggggagtgcttctatggtgtgtggggttttttgttgcctccctctagaagtgttaccgttttcacgtcctattaatgtcctctggttgttaaattacagcagcacattacagtgcactgggttccctcctggagtgaatacaaacggagggcatctacttgtatttttagaagttttgggagaatttagtgatttgtggctttgatcaatcctgttgactggtgtatgtctgcgcaaacctgtttcaaataaatcttttgttaaagtaaaa

SEQ ID NO: 99788 - DNA, 571 bp, Homo Sapiens
ttaacattattaatctgaaacaggatggcagggtttaaagatggtggtggtgatggtggcagtgaggatgatgactgctattatattgattgtaattgcttacgtgtgtatgtgtgcatgcctatgtctgtgtagttctgtgcaggtaggaagagagaaagaacggggaaaggaaaaggaaagaggagagacataatttaacaaatgtcttgttttccaactgaagaaagaaaaacaagcattgctgagaatgctagcaatgatgggatttctccttcctatttgcttggtgtctctgcctcatatttctcaaccttcccttttcaggggaatacaaacagccaagacctgtggaatttacatatgtagttacattcttctctcatttctagtcctacaattacaacactaattcatattcttagttttatctcaccgggaccgttgcaatagtgtcttaaatagtctccttatgttcagtctcttttctcaaaagcaacacatatgctgtgtttttatttactttggctccttaaaagtttcccattcttcaatgataggtgcttaggca

SEQ ID NO: 99789 - DNA, 177 bp, Homo Sapiens
cacagattccttggacgtccctgagagctcagtcatgaaagtcaacttggttttctccccctcatttgggttcagaatttaaagtccacacacacaggcagtaagatgatatagataaggacgtcatcactcggtttcggatgttaaaatgtctaggtgggttagcggtgatttgag

SEQ ID NO: 99790 - DNA, 732 bp, Homo Sapiens
ccaggacactttgtgcccaccctatagcctgatcttcagtgctgatagcattgatttagaataactcagatgctattaactctgtccccctggaattcatgttaaacccgtaatccccagtgtgatggtattaggaggtggggaactttaggaggtaataaggtcaagacagtggagccctcatgataggattagcactcttattagaagagacaggagagagatgctttcttactgccttgtgaggacacagaaggcagtcttctgtggaccaggaagagggcccttaccaagaatctgataccgtgttggcatcctagtctcagacttccagcctctagtactgtaaaaaataaatgtttgttgtttaagccatcctgtttatggtatttttgttatagtggcccaaagtgacaaagatctcagaccagaggaaacatcaaagtcttaacctctgaagcattaagaaatgagaaggcaccttcttagccattctaggtagcaactttctactctagttaggctgaaatgcacggccctgtctatgtctgtttcagttatcctccctctctctgaaatcaagtcacacatcattcatgctacttacttaacactttgccctttgccatctgatgccacctcccgtactattgtctcccattatttaacctgttatttattgtttcatgcattcattttcatcttagagaataaacatcttggaattagaaa

SEQ ID NO: 99791 - DNA, 458 bp, Homo Sapiens
gaccttattcaaggggagaggagtctggagggaatgccgcttggcttcactaccaaaggttttatgacttagcattttaaaaggttttccttttaccaagaaatgcagaaaccaagagcaaaccccacgtaccagatcactgattcctactgaagcagctagcccgagaaaggactctctcatactggtcttgggaaatgacttggcagcctgagccatcccagcagtggacaaggatggttaattcttattctgtagacgtccacaggaacagactaggatggaaaacacagttaagcacagccatgcaccctgtggctgtagaaatgcccctgtgtgaaagaaaaataaattcaagactggagttttggaggaaaaaaaatacaagtagcatttacaacagctctttgctctttaaatttcttaccattcaataaagtgatccagtcactcacatt

SEQ ID NO: 99792 - DNA, 614 bp, Homo Sapiens
ggcatcgaatgacaaaagagactgttcattccagaagtcctgatggcactatcgttagatttagactcacctatctgcacagacttccagaggcaaggacagacagcacgtggctcactcgataggtggggcattcattcagagatgctcacttagtgcctactatgcaccaagcattgtgcttgcagtgaggctccaagaaactaatagggatattctagttctccaggaattcccctctgttgtgagtgatggactagaatagaagtaggcacaggctgtaccagaagagcagacacttgctatagaaggaaggccaggaacactgcttgtgatgtggctactgcttcactggacggtgaaggtgcctaacagccattccagagagaaaggccagcagagacaaaggcacagaaacatgaaagggcagagggtgatggagacacaggtgtttccaggtggccagaccagatcacagcaagagtggcaaaaatgaagcctataaatatctgttgaaaatagattataatgggagaaaaattttgcaatctatccatctgacaaagggctaatatccagaatctacaaggaacttaaacaagtttacaggaaaa

SEQ ID NO: 99793 - DNA, 500 bp, Homo Sapiens
tagagatcagatctagagatcagatttcagcatgggatgacagcaggcaggaccagcctcacgggcctgcaggcagttgcctggggcctcatgcctgaccagcctcatgggcctgtaggcagttgcctggggcctcatgcctagaagggtgccatgcttggtttaatgttctcctgttgctgtctagaaattgttaatacgtttggaacatggggccctacattttcatattggattgaactctgcaaactacgtacctggtcctggtagttgttcctccctaattgcaaagtttggtgcatttcatagaaagaattgggtagctactgaggctcagggagctctggcctctcttaggtctggaatctctggagaagccagaagcatatgtctcagaatattaacctcatcagatcctcagagcaaagagggttttatatgaaataagtttgagaaatgctgtttacttgaccctgtatttggagagtcccagtgtccat

SEQ ID NO: 99794 - DNA, 226 bp, Homo Sapiens
ccctcacaggctcacaatggctgttgaagctctagccatcaagtgcagtgtccaaacagaaagaaacaagggctggaaaagggaagggcagtaactatatttagaaaacaagacttttccagaaatcctcagtagacttctacttaggtctcattgttccacaaagtcttgcctgctgcaaaagagtttttggctttgcagcctttatactagaggaaagaagaaa

SEQ ID NO: 99795 - DNA, 780 bp, Homo Sapiens
  misc_feature (434)..(443): n is a, c, g, or t
tttcacaggggcaagggcatggagctttggagtcagacaaccctggctttaaactgtgccttttatcagcattctgaagtactgtatgttgaagtaacttctctgaaccccgaatacttcatctataaagttaggaataataaatacgtcatagattaagtatggacattatctgatgcatagcaggtactattcaaatgaaggaaacgaagttatcctaggtcctttaatgcactaaatgtgtgctccatttccgcctttcttggcatctgtgtgaaatctcaggatatagtgtccactaaacttcagtgcactgcctaatgagacaacgaactccaagtgcggaccttttgagtttaaacgggtttcagtaggtaaaatacgtaaagttcacagtaccctcgcaatttagatggaggaaaaaaatcaagtcnnnnnnnnnntccccgtatgcaaatacaggaattacagaagaagacaggacccccgccgcagcaccacttccccctacagggcgcaacgtcccgccgctggcgcgggggtggagatttgcatgtgcgaagtcgggaagagggggaaccacctctcgaaaaccccggccgtcgccctcccaggccgggagagtcggccccgcgcgcccccaaaagctccccagcggccggccctctctacgtcatccgcaccctcccgcccgctcctgaactttaaaccacactcggaagaacaacctggaggagggggatttctcaggagccagcggccttctcacgctgctagccg

SEQ ID NO: 99796 - DNA, 460 bp, Homo Sapiens
ttgttgtgtaccactgcaatgtggattaagtctgactagaaatataccttcaacttaatgatctaatggttgtcccccaagcccacagaaatagcacatagcataaatctgtgttttctgaaaatatcacattgtattcttgaggtcatcagcatggaaatgatctccagtgtaaaatctatatgagatatatgggactctctacaaggaatattggattattgcactctgtagctttgaaaaccatctttcttggacgacagcagaaagcttcaatatacttgcatgaattataaatgacacccagtactcttgttgaagcagctgcagaatgcttttccaagacagacccttcagcttgtggatatcattccacatctgtcacaccaaagatttgcccttgggaacactttagttttctagatatttttagtaaattgaacatagtactcaaagactg

SEQ ID NO: 99797 - DNA, 775 bp, Homo Sapiens
  misc_feature (380)..(388): n is a, c, g, or t
  misc_feature (662)..(732): n is a, c, g, or t
aatcaagaaatataaaccagtatgtagcagtttcttgacatggagaaccaagcccataatacgatgggaacttctccttgtgaggctgagcttcaggaattaatggaacaaattgacatcatggtaagcaacaagaaaatggattgggaaagaaagatgcgggctttggagacacgattagatcttcgggatcaagaattggcaaatgcacaaacttgtttggatcagaaaggtcaagaggtagggttacttcgacagaaattggacagtctggaaaaatgtaatttagcaatgactcagaattatgaaggacaactacaaagcctaaaggctcaagtaagaaaacttattataatttaatatcacacattttgatatannnnnnnnnacctgtagagttgtgttaactttaaactgttttcagtataaacaaatgtcttgtattttaattataagcttggtcatgtctttccctgttttatatgcattgattttgtctctcactagattgttgtcttgctatattttctgtgcctctgttagcacagtagtagacaaatggctttctatttctcaagagacttgttgatgaattaaataataattagctcacaaaaaataattctgtgagcaacaacaaaaaacaattattttttgtggtnnnnnnnnnnnnnnnnnnnnnnnnnnnnnnnnnnnnnnnnnnnnnnnnnnnnnnnnnnnnnnnnnnnnnnntcgataattgcaataataaaactggtctttattaccttaaaaa

SEQ ID NO: 99798 - DNA, 531 bp, Homo Sapiens
  misc_feature (211)..(211): n is a, c, g, or t
tgaaggcccagagacccttgaccaacattgtatcagtcagagtctattctcggtttctatgaagtcctatgctgctttacctaacatttgcatagtattccaaaagaaatgctttaaaaatgttttttgtaaaaccctgtgaggttaaaagaaggcttattttgcatgttgaagtctctttcagaaactattttctgtgtgagtacaactntattcatgattgtacctagtaaatggctgagtcagaattggaaactagggttttggaccccaagtccttcgcaggccacccttttagattacctttgggagagcttggcagagttttgcatttcttaacctcctttttcacgatagaatggcagtatggcagatgtgccaaagtgtgagatctggaatcagactgacttgtgtctgaattccagcttctactgtttcctagttggaaaataacatttattatatttctttgaatctaagatgccattaattggaacatataccttcatttcagaaagtataaaatgtaaa

SEQ ID NO: 99799 - DNA, 278 bp, Homo Sapiens
agtccatgtctgctaacgttattatctctgtcattttggggtttgtttctattaaatgatttttctcctgattttgggttctatttgcctacttatttgcatatctagtatttttaacattctgaatttaatgttgttaaatgtctgtattttgttgttttaaaaatggtaaaatttgttttggctggcagttacggaagtagcggatgaacttcctctttttgaggctgctttctaaaccttgttggaggaagtctagagttacctcacttttcggc

SEQ ID NO: 99800 - DNA, 195 bp, Homo Sapiens
tttatcctttcactttttataaatgtctctgacatgtaaataacccaagaaaataaaaaggcaggagctgattacacaattaccagtaaactctatcatcttttagaaaatcaacacacagctaacgccatatacagcatgcagtaatgtctgagaaaggaccctgcggagaaataaaatggctagaactctaac

SEQ ID NO: 99801 - DNA, 471 bp, Homo Sapiens
ctaatttttggaaatctctttctatgaccggaaaatattcacaaactcagagtgattgtttggggtaaaagatggtcccataccttgtgggcctctctttgctatctatacaacgttggaaatgaacccctcccttacaggaaagtgaacagcaaccaaggtgagcccaccctgggagggcagagtgggtgtactttcctcgaagagccctgaacacaacagggcacacaaacagccacagcaccctcaacaatgccccaccatctgcccaccagggcacacagattcacgcagattcagtgacacattccaaaaaaagggaattaaggaggacccatggcatggctaatggggagagagctttactacttttagcaccattgcaaattaatggagcaaagaaaggcatacaaggaatggaacccaacctgtttaaagtaataaatgtcaaccctaaagtgcatggaaaaa

SEQ ID NO: 99802 - DNA, 579 bp, Homo Sapiens
tgcggccgcggtggagctttaccgcgggcgcccccgaacccccgaagcgcgtccccgcgcaggccgtgggcgcgcacggccgctgccgccgtttgttctggtggaggctgcgagtgcctgggcctgtgactcccggctctccgcgcgcagcatgccctggacatcattccgaacagcacaattcaagggtggctgaaacaacaaaaatgtaacgtcttacagatctgaaggcttccgggtcgattctggactgtgatgagaatctgtgccaagcctctctcctggcttctggtagaactcggggcattccttagcttgtaaatgggctgctgcttgtgtcatcacattgtcttccctttctacttatctgtccccatgccccaatttttccttttcaggacaccagtcagattaggacccaccctaatgatctcatcttaacttgattaactacaaggaccctatttttaagtacacatttacagagactggggggtaggacttcaacatctttttggagggatgcagttcaacccataacaagaatcattgttagaaatgattttgcttcttcactga

SEQ ID NO: 99803 - DNA, 456 bp, Homo Sapiens
  misc_feature (396)..(404): n is a, c, g, or t
gaagggagagaaattgtacctggcctcctgaaagacgcagcctctgaaatgaatattgaagactggggaggatttaaacaggtagagacggatggaatggacacagggctcgggagcagcgccagcccgacatcggcggaggagcaccggaagttctgcagcactggctttctttgctcttccacctatgcaagctccttctctcttgtggcttgccgagcctggttagctctgagaccggaagttctgaagtcagctggcatcctacatctgtgcaacctacttctctccccatcccaccacagaaaccagagcctcgaggcttttggcttgggtgctgccttcacagtttaggttttggtaagaagaaagcttatcttcatgtcatgagaaagnnnnnnnnntgtatctttacgtaacgagctgaaagaacaaaacaagtatacctaagccaaa

SEQ ID NO: 99804 - DNA, 437 bp, Homo Sapiens
ggttgaagtatattaggttaaaatgatctatattccaaatatcttctatacagactatccaagcaaacatcttccacgagtactttatgttaattaaatgtttagagaaatggttcctaaacatttgtgaagattttgaacatacagatgtccagacctcacccaagaacaactaaatcaaaagctctaggcttctggacagaaaatcagcactcagaaggaaatgtatagagtcagctaagatcttatgtaaacaaatatttacataagattaggctttaataaaaatgtgtaactcctctaattcaggaatttcacttgaagacccagtgaaggatgagggcaaagacgtgcacctagttagcactttgcactttagaatggttaggagggttgatttgttatgtgttttttactacacttttaaaaaatcatgt

SEQ ID NO: 99805 - DNA, 428 bp, Homo Sapiens
aggagtcagttaatactgtaataaataaattagacaatatccatatataacaactataggtccaatccatccaagtgcaacgctgaagggacgtattgattgcataggccagaatgttggcaaaaagctggtaaatcctgcagggtgccaccagaccgcgtgctgcaaacaaataacagctagagagaggagaggcttggttgaatttcggccttgactggtctgaagactccagaggcgggacgaatttgcggacagttctaccccatcccacatggcgtcagcttcccttccattctcatgactccatggtccatggctccaacctgggcctctgttaggctgtgtcctgtggcacctggaccatcgcggtagcctcggagcttctgactgtgtctctggttgcagcccctacacgctctcttcct

SEQ ID NO: 99806 - DNA, 467 bp, Homo Sapiens
tttctcaaagggtagaaatggtacatctcaatttttgtaaggcttctgaggattaagggcagctcatcgctcaggacttgacaatctctaaaggagctcctggactctttcaccacaaggatagatggagccactcctatccacaactcatagcaaggatctctatgcatctagattttaatgccaacggtttcttggcttcctgacttgacatgcaccatgcacaaagagcaaggtactgactggtctaaagccactctccccggacactgctaactctagctaaccatctcacagacatcctgcctctgatcataagatggtccctggaaggaagcataaacacttcccaaatactagaacagacagcccaaagtgcaagttctactaatgggagagtaaatgaatcacctctgtgtacagagaatggcacaggaaattgttatgagtataaaaccatatctccc

SEQ ID NO: 99807 - DNA, 569 bp, Homo Sapiens
  misc_feature (270)..(446): n is a, c, g, or t
gcgctgccctggagaccgcagacaacacagacgccggcgccacatgggcggggcaggacccgacctaggatcccgcgtcccgaaccgcacccccggccctggcacggaggctgcaaacggccgtaataacgacatcggggcagagccggaggagcccgaacgccccgggagaggctgcctcgccgccccgacttcccagcgccggagggcagaggccacccgggggaggagatctttgccacaaataaaactactaaaatacgcgaggannnnnnnnnnnnnnnnnnnnnnnnnnnnnnnnnnnnnnnnnnnnnnnnnnnnnnnnnnnnnnnnnnnnnnnnnnnnnnnnnnnnnnnnnnnnnnnnnnnnnnnnnnnnnnnnnnnnnnnnnnnnnnnnnnnnnnnnnnnnnnnnnnnnnnnnnnnnnnnnnnnnnnnnnnnnnnnnnaccataagttgagtcgaaaagtccaaagttgaaacgtctggcagcgtcaggtgctagggaggacgtagtgcaaagaaccgtcaccttctgcgggcgggcgtgagaaccgatgcaaccaaccat

SEQ ID NO: 99808 - DNA, 555 bp, Homo Sapiens
agcatcagtgaacactttgatgaaaggagaatgccttccttagatacctatgtaactgtcttctctttgccaagtgggtctctgctcaaatgttaccttcttagagtggccctctctgaccactgaagttgaggcggcctccccttcactctccatttcatcccattctctgatcatgcccagaaattaggagtggtggttccatatggtaaaagactttggtttgttcattgctcggttcccagaccctgcaacagtgcctggcacagaataggtgctcagatgtttattgaatgaacgacaccccgttcacccccaaagcttcttgtttcttggggttcctacttatcagagggtgcagaagttctgagtatttatatattaggcattcactctcttatttccttttttccactttctttttccttaaaacagctactcacccaccactgagagaaaaaaatagctcaggttccttcctgacccaaatttctcctcctcctttccacatgcatctgctcacaccaacgtctgtgtgctacattggatcaacaa

SEQ ID NO: 99809 - DNA, 834 bp, Homo Sapiens
  misc_feature (671)..(683): n is a, c, g, or t
cgccaactctcaggtttgtgcgagtgcttccttaaattgagtgtcctaggtcactcactggcctaaccctaatcccctgccctgaatggcacgcataaacctggcaagtcaaaacctatccattgctaccacactgcacgtgcacctaggagcagaggctctgaaaccgggaaaactgctccagaggcaagggaaattaacagatatttacaaacattgaaggattctctgtgttggctgtaacttctgcgcccctcttcctacctaaagatactctttctatcccactaatattttttgtgaatatagatatccattgtaatctgaagtatcaaaaattacctagaaaaaagctttgaggaactcagactctctctctcacacacacacagacaaaacaaaaggtgatagatgataggtgatctccgtccaaaggatctacaaacccatcaagcagataaatacttcaagagttaaaaaaaattactaaatggaaaagtcagctctcaaagggacagttccccgagcccaacccctttctagcttcacatccttccaggaagatttcatgggtggtttagctctagagatgcacggagaagcttctggagttgaagagaagtggttgtgcccctgagtaaattacaattccaggtgcctacatagtgttnnnnnnnnnnnnntctgaaaagagcttgcctggaccaaatttgaagccattcagagctgaattctaacctatgaccttgatcaaattacctcttttagccttagttttctcactgcaaaatgggacaaatgataccggctgtaataaactatgcaagaatgttc

SEQ ID NO: 99810 - DNA, 505 bp, Homo Sapiens
cagtagtaagtcatggggatagcagttactcttgatatgatgggaagaaaatggcacttcacctctgtggtcttcctcccaataactcataacccgagtattttctatgaggaaagacgtcagacaaattccaatactaggcaacctataaaatacttggcctgtactcctcaaaactaacaaggtcatcaaaaataaagtgtgagaaattgccacatttaaaaagacatgacaacttaatgtaaagtggtatctgagatggaatcttggaacagagaaagggcattgaataaaagctaagaatctctaaataaactatgccattttaaaaataatgatgtgtcaatattggcttattaatcataacacatgtatcatactaatgtaaagtgtcaacgatggggaaactgaatggaaggtatctgggaactttctgtactgtctcctcagttgtttctgtaaatctaaaactgttctaaaaaataaagtttgttaaaaagaaaat

SEQ ID NO: 99811 - DNA, 583 bp, Homo Sapiens
aatcatgcaagggtatgctagcatggctaagacagcagccaagacttcacagatttatagtaacaggcttcttggcttctttcatgtctcatagctaacaaagctttgaatatgtggtaagggaaaaaaagttagatcatgtcgttcctctgtccccaagccctccagctgtaatgcagagcaaatccaaagcccttatcatagtctacaagatcctaaatgtgcacctctccaccccactcctgattaaagaattttgctcctaatggcccactatgggaatactctttccccagatagccacatgcttcaattgcccacttcctgtctctgccctccctgtcatctgtaaaatagtcccaccactatctccctctctccccttactccctctctccccttactgctacgttctacatatttatttatcattgtctccttgacttgaatgtaaactcaatggggcagagagttcattttcttcactactgtatccgcagcgcctggaacagtgagtgacatagtaggcacccaaaacgtcttttcatatgctgccaataaaccatagctgatcctggcaaaa

SEQ ID NO: 99812 - DNA, 495 bp, Homo Sapiens
  misc_feature (308)..(317): n is a, c, g, or t
aatttctgtaaatcagaatattcagatgttgaaaaagtctttgccttcagatttaaaagatacctttaaaatgtagcatatcccaaaatgcaacccagaggctggcaatgtcaacatttttctgttttaaaaaacctcttatgaaaactattgccatactaaattttttacttgctgatgacttacagctggaaaggattctgtacatataagacatcaaatattgaggatactggaacttttaaattaatggcaaagaaagtcaacaaaggaagttcatatgaaatcaaactagtaatatgattacnnnnnnnnnngtttaaaatttttcttggccccagtcttatcatttctgagccaaatacaattctatcgaaatcacctgaaactgaaatcaccattctaggctggttttcccataaagatggactgctccaaaaagaggaatcaagaaagaatttggctcacagtgaattattcactttgtcttagtta

SEQ ID NO: 99813 - DNA, 775 bp, Homo Sapiens
aatcctctttctctgaaatcagatcagcatgttcctatgtatttatcaatatgtaaaataatgtagatttcccttctctatggaaataatttgaacaatttgatgaaaagtgtggtaaatgaagattaaatgctgtgtcacacctgattcccctgagctgtgagcactagagtcaatcagctgctctcattgccctctgacatttagatttttccccagagcctacatctgtgggaatgtttctttctatcatttatccagaacaaacaccaggaaacactagttcttcaaagtttatcttttaaacagaggccattttacaatggggttgtataggtcttcacgtatgtgagagccaggtaggtgatcctccttgtggtatgcttttggcaagggagtaatgggctgagaaatccgactatccaaaacataaattcccccatataccaagagatgcctaaaatctgctgttatggtattctttcttgggttaagactttgtgctattgaggagcatagaataaggtttacattatttctagtcatttatattttactgtgaacgtctaatagctttagggtatagggtcctgtaaggaaggcgggtaggggaccttgagcttgacaattacatctcccctctccctacagatccaaacaaaaagacagccctctggcatagtggtcattctcttgtggggaatatttgctgctcagatgtttttatcttagggacttgctataggatgaaataaacaaacaaaaacccgacaca

SEQ ID NO: 99814 - DNA, 706 bp, Homo Sapiens
atatgctgtggttcacaggctttaccccttcacaagaaaagctctttagattggcgcaattgcttctgattttggtgaaattttccctggtagggaaactttgaagataagagtacacacatgcattttgtctgttgtgtcatagaggtaactaggctagaaaatttgtgtttaaatgttccctattttatataatcaccacttcatgtttcttcttcttggagcatgtccttgttcaaagagaagtgctttctcagtgatgtgatatcttcactgaggaacttgggtagagaatgatttcttctgcataaacacttcaaggaaatacataatttgggactacttgtaactcattagaatgagaaatactcacatggtttcttaagagaaaaagaacatcggaaagcaaaataaatgggaagatatcactggacatctgcatttatactcgaaataccagcattttctatggaccagaaaactgccatcacatagaccacacagcccagataccaggcagacggatggcccaatggcaactgatgtcagggcatggggtaaaggagagggttctaatctggtgtatcacttaaaaacagttatttatataatatatctgctatatagatcaacctccaccaaacttacccaaacagcatttgttttatttgaaactcactttaataaagtgaattatatacacaaa

SEQ ID NO: 99815 - DNA, 501 bp, Homo Sapiens
acaggaaagaaataaaagttgggtctcaaaaagatctttgtacatccacatgaatagcagcattactcacaacagctacagtgtggaagcaacccaagtgaccatcgatggaggaataaacagaatgtggtgcacccatccttatagtcagccttaaaaaggaaggaaattcaacatggatgaaccttgagggcattactttaagtgaaataagccagtcacaaaagaataaatactgtgtgattgtccttagatgaggtccctggagcggtcaaactcatggagacagaaagtggaatgggggttgccaggggctggggaagaaggaatggggagtcagtgtttcatgtttgggaaaatgaaaagttctggagatggatggtagtgacggttgtatgataatgtgaatgtactaatacccctgactgtacactcaaagatggttacggtggtcaattttatgttatgtgcattgcaccccaataaaaaagggactctgtg

SEQ ID NO: 99816 - DNA, 319 bp, Homo Sapiens
acaaacaagtaaacagcttccacagtaccatccacccatcaagacctaaagtcctaaatcctgaaattgtccgctgtttctcaaggtccttaccaccgaatctcaacatctgaactgcaagtggtttgcttttactcattttacagatgagaaactgagatagactcagagaagagaaattattaaaattgcattgagttagggagctggaactgcaatctggttgactacaagttgcctaatacatttgttaattcgactcacatggtgattccggattgtaaattggtgacagttttaccaaactagataatgtgtg

SEQ ID NO: 99817 - DNA, 585 bp, Homo Sapiens
gcgaccgccgcccctggagtaggggactcagtggccacgaaggccttccctgctcgcgacctttccacgggaaggcacgaagcttccgatgggggccccggggcgctcctgacttttctacggcgcgagggctctgactctgcggttcaggtttgaaagtcctttggaagctcgcaagtggtggtctcccaccacctcctcggtcatcgcaggaagaaggcgcagtgagggcgggagtctggatgagcggagagtagccaccgcggagaagagtgcgggcttgcaggagccgacgaagataactcgaaatgtgggcaggcaggtgttggtgggtcttgaaagtgggaaagcacgagaaaagaacaatgttcgcgtccgcttagaatacggaaacaagtgagctttaaaggaaaatactcattctcattacccctgtccaggaagaagagtgctgatctgctgcttccagtccgctgggctggagagcagaaagaggctacttgatcccagccaagccagtgtctgtcccccagcaagcacttctgccttggtgtgatccccattccttttctaaaaatacaaaat

SEQ ID NO: 99818 - DNA, 503 bp, Homo Sapiens
cgtggcggccttccccatcagggggcgagcgtggcggccttccccatacagggggcgagcgtggcggccttccccatcgcggggcgagcgtggcggccttcccagtacagggggcgagcgtggcggccttccccctacagggggcgagcgtggcggccttccccatcagggggcgagcgtggcggccttccccatacagggggcgagcgtggcggccttccccatcgcggggcgagcgtggcggccttcccagtacagggggcgagcgtggtggctgcctctgcactaggacatcccttccgttgggagctcgtgacggggccactgggggttcatctcttgggttgcgaccctgccgctccccagggctgctgggtgcatggaggaggagcatcttccaccactgcccccatcttgcctgctctccatttcaagaaagaggaatgggagaggggcgtgggcaccggtcatgtcaaatattccaccagcagccaggtccacct

SEQ ID NO: 99819 - DNA, 522 bp, Homo Sapiens
gagtgtatttggggagcaggggaggggagggtgttgagaaagctgaactggagtcaatcacccttcccacaaatcaccaaactgctggaactctccagccaaatgctgggagaaggacctggagggtgagtctttgctgacctctctctactctcaggcatgtcttttgtccttttcgtccatctatttctgtctgtcgctcactcgccccgctttctctgtctcaccttcatccactctgcaggcctgctccaccacagccctaatcctctggacgcttgtgtagggcctggggtgaattccctgtcccccatggtacctcgagaggggctggggagctcagcttggtctcagagtctccccaccagatactgtttaaaaaagtagcactgatgtgttttgtaatctgcccctcccagccctccgtggaggctgccagggccttgtacggtaaacctagctgcatgtaatctgtggacaatggcattctctacaatgcaataaaaacaattacccatgaaa

SEQ ID NO: 99820 - DNA, 460 bp, Homo Sapiens
tttaatttaaggcacattttaatagatttataaaaatcatatatacaaaacatgttaaactaaccaccgtggctataacatatatttttacactttatcatatcttaacctcgtacactgtattcgtaaaccaagtccggtcacggcatgatggcccggcgcaggtggtgctggcgctgtagcgaccgtcttggaggggctgcacagagcactcggttcctttctgtatttaaggtcctgaaaggcacaggcgctaaagccagaaggccgtccaactggtcccttcggcagtgtgtcctcctgctgcgtgggctggggcctgagcacaggaaagggagttcaggacacggtggccatgagtaggtgccaagcttaccacactgaatttcctggcgacgcttgtgcccatcgatgtgagctggttcaaatggagttaagaaaaagggcatttcgaattttt

SEQ ID NO: 99821 - DNA, 849 bp, Homo Sapiens
cgcaactcgcggcacgccactctcccggaggcggtggctagatggggctgggctggcggctagcacggcctgtggcgcgacgaccgctgtatttgcatggttcgcataggcagagaaccgtggggcttcggcagtgggaatttgagataggagattggggtcttccgagccttcccagtgcgggttcgaacctcagctgttttgcgagtggcgtgatcttaggcaaagctgacttaacctaagtttcggtcgtgtttctaaaatggcctctgtaaatctatgaggcttatgcgcgagtactggttgctgcattaaaagacaaacttgtcacgattggctttgatagcgataaaggcgactaacaaattcattgaaatgttgtttccctccggtaacctgaatctgtccttagcctgcacagaaaggggaagtgcgagtggagttggggaaatgagacggcgaatgtcaagtgcttaccacgtagtgcagactcaggctgacagggggccacagaaatgcaaatatgtgagcagtgtgggtaactgcatcctggggaggaagtcctatgtgctggaataccacaagcacccatttctgccctgtggtactgcgcagcgttggtgtgaagcgatacataggcgtgaagtcccgagaacgcaattttcctggttaaaggacagcaacgtctacatttcttccaagaggcctactttgttggaacttcacttcacttgtgaaattagggtgttgggcagtgagtgaccactaactcagctcccttcttgtgaatcttggcaacagaaaacttttcgtttgtattactgaataaagtgtgtttcttaaaaaaaa

SEQ ID NO: 99822 - DNA, 731 bp, Homo Sapiens
  misc_feature (299)..(315): n is a, c, g, or t
tttaacatgttgtggatctatctatctgatcaccttattgaactgagaatggttctatggacttgacttttcttggactgacaactgtactgtctggaaatgacagtttctccttcctttcagtatttgtgcctgtctatcccacatccctgtactggtcaggatttccaggacaatagtgaataatagtcgggacaacaggctggttctgattccactgttcctaacattctaccaagaagcatgttttttttctattttggtagttttatgttaggtagccttatcaagttaggacnnnnnnnnnnnnnnnnnaacccaagctaaagaaagtacccaaaataaagaaattttatcaggaacaggtataaattttaagaaacgtatttcaacgcctgctaaaattaccacttatttttctattatggcaacaaattacattaatagattttcactgttattgtttatcctgggagaaagcatacttgtgaacttttttaggtactgtgctttcgaaccaaatttggaagtgagatgaaatgtcagctgtactctcctggttaggtatgatttcagggtcaggtatgcctgataaatgaagtgagatgctttaactttgttctagaatagtttctactgaatgggaatgatctgttccttgaggatttgtcacagtctgcccacagtggactggatttggcatgtaggatgttaatttctatttactttgc

SEQ ID NO: 99823 - DNA, 541 bp, Homo Sapiens
aacgtctgtttctattcagcggattttctaatttctttgatcagcctaaatattttcttggcaaacggaaattgaccatgccatgaatatgataacaacctgcttggaaaaaaagctattttgtttccaagcagcagaaaaaaaggggtggggggacggtgaaggaggctggctgttaggaatgcctgtaacagattccagcacatacatctttttgcagtctctgaagcagctttgtgaaaactgccttttctctctcgtgaagcttctttccttcctctcctcctctcagttaaacacacacctggtctcctaaaagcctttgatactctttattaaaaaatagaacttcaatggatgcctcaggagactttccctttaaaacatagatgaaaggcaaggttaatacaatgttctcttaatccctttgccttctgagtcaaaataaatattttcttctgcatgtgattgtacatcctgccatttggctatggctataagcaaattgacggtaataaaaatgttttgaggctgtgaaaaa

SEQ ID NO: 99824 - DNA, 519 bp, Homo Sapiens
ctcatggctttgctcatcttccggcttcaggctctgacttcatctcaggatgggatcggtgtgtgtctgttttcatagatccactacatcagaagtatctttacatctctgtatctttacatcccaaggtcaaggccctggcaacctcagaggttcccatagcttcagtcttccccaaaccatgccacttcctcccatttctttgggtcaggaatctggcttttgttttccatatttctttttcccaagacattgggaggcatctggtgaacaacaccaataaaacagttctctccccacggtcatccaggtcacttctctaactcattcctgcacacacagcacacgtggaatttgcctgtttagtctatgttcttgacttgatcacagacgcctgtacaataaagccccttttcaacaaggtgctgcagaatgataatgctctccccaaaatctgaaactgatttgtatcattgaagtttttttctgtattaaaaataaagcaaaattaaaaataaa

SEQ ID NO: 99825 - DNA, 462 bp, Homo Sapiens
tgcggccgcgggaatccgagaatgtgagcaaagacaagttttccgacaccgaaaactcgttggaaccggcaagcgcgcccctagctccggcaggcaaaatgcgaccttctctcgccctttttcgtttgtactccgaattgcgaaagtactgtatgttcactggaaatatgggaaaatgcagaaatacattaacggctgcatacattccgtcgagtgagtgaaactaacttaccctggacgttaagctgtttccagttctcactttactaaataataatagaacgaaggttcttgtgcacgtctaccttgtatttttataattcctttcctttccccacttccctccttgtccgctaaaataaagtgctaccagataaactcagggcaaaatgagcttaaactaagtgaggagtggggagactcgaattgctcttatataaaccccatagaaagtacggagct

SEQ ID NO: 99826 - DNA, 429 bp, Homo Sapiens
tgaccagtaagctcatgtgaaaagatgctcaaaatcattcatcattagggaactgcaaatcaaaaccataatgaaataccacttcaaacccactagtatggctatagtaaaaaacaggaaaataacatgtaagcaacaatgtggaagaattgatgatgggaacataaaatggtgcagctactttggaaaacagtttggcagtttcccaataagttaaacatagagttactatataacttaagaattccacctttaggtccatactcaagaaaattgaaaacatatattcacacaaaagcttgtacatgaaagttcatagcagtgttattcataatagctaaaaagtggaaatagcccaaatgtccatcaaatgatgagtggattaaaaatgtggtatatccatacaatggaagagtatttggccataaa

SEQ ID NO: 99827 - DNA, 563 bp, Homo Sapiens
tttgcagatatcgtgggcttcaccaagatgagtgccaacaagcctgcccacgccctggtgggtctcctgaacgatctgttcggtcgcttcgaccgccttgtgtgaggagaccaagtgtgagaaaatcagcaccctgggagactgttactactgcgtggcgggctgtcccgagccccgggccgaccatgcctactgctgcatcgagatgggcctgggcatgatcaaggccatcgagcagttctgccaggagaagaaggagatggtgaacatgagagtcggggtgcacacgggcaccgtcctttgcggcatcctgggcatgaggaggtttaaatttgacgtgtggtccaacgatgtgaacctggccaatctcatggagcagctgggagtggccggcaaagttcacatttctgaggccaccgcaaaatacttagatgaccggtacgaaatggaagatgggaaagttattgaacggctgggccagagcgtggttgctgaccagttgaaaggtatgtgcactgctttacctcggcatcccccctcccagatccccattgtattaaatt

SEQ ID NO: 99828 - DNA, 561 bp, Homo Sapiens
caatccatgagtccatactaatataaataaagtgacaaagtgggtgagaaggaccagtgcccctggatgaagaatctctgctcatgtgggaggaaggtgggggatcaaagctggagcacttgctgctgcaggtgagacccctgacacactctcaaattggtaggcaaaggtttaaagaacgggatatttgcttagcttaaaagcacctcccaaggggaaaacagtaacttcacagtggagagacctggcaggcaccaccctcagatcaaaatgaacctcagcagtaatgacacgtccacatcagcacccccaacaccactccctgaggaggacatgccagttctgggaacatcacactcatcgtgaaaaaacatcagacaaacccaaacggatgaaatgtgaggaaaatctgtagttggttttacgcggatgttaatctcttagttttgatcattgtgctgtagctgcataagaggttagctgggtgaagtgtatctggggaccctctatggcttttgcatcttttctctaagtctcctgtcatttcaaagtaaaaacaaa

SEQ ID NO: 99829 - DNA, 479 bp, Homo Sapiens
gaagggtatccccatcatctcctccaaatgtgtatcaccgactcttaggatgctttatgacataagactttctcatttatgaattattgtgtgtaccacatattatatattagtgaggcttaacatctttcacagatgaaaaatagaatttctaatatgttcttcctacaacccaatgcatcatcttgcctgcttgctgaaaccacgtttgagactatcagcatatgagataaaacatgctcttgagtgtgcagtgggttccttacctcccctgctaaacaagtgagaaaaagagagccagcatggtgatgcccatcttgagttcccaagaggctgcagctggaggatggcttgagcccacaagttctgggccttagtgtgctatggcaatggggagccagggaccaccagattgctcaagaagggtgaatcagcccaggtcagaaaggaagcaggtcaacaaaaacaacaacaacaaa

SEQ ID NO: 99830 - DNA, 536 bp, Homo Sapiens
tagactcgctaccaaaaacgtaaagaaagccctcttcggtgtgattgtttttcattatgggaagctcattcagataacgtggaagttgaacctgatgaaaagggaacttgaatgtcatgaaacacaggaagaatatgtccaaggttataagtatacactatattatagaggaatataaacaagaaaactagtaccttgagcagggaactacatggttcttagtaacagcatgctgttacttaccacagtaacttttctggttatatggaaaaattcagacatatcaagaaaagccaagagcacaaaattaagttatactggagaaaaacgctgcttttctacgccttcaagataaatattctaatgtcaggccaaaacagcaatgttagaaccaaaaaaagccaaagaggagaatgatcatctcaggccttctccaggggagaaaaaaatgaaggaaatgacatattgacctgcaaatcatgtacagcaagaaactgtaaaagatgaacttctgcaatatgaatttgagaaataaa

SEQ ID NO: 99831 - DNA, 497 bp, Homo Sapiens
ctgcacgcggcacccccacccgcgactcccacgcagacagtagtgcggcctgcagggttcccccggcggacgaggctaatggttcgctccgccccgcccacacagaggccgcccactggctccggctgcgtttcaggactctggaggaagggacttggccttcgccctcagacgctcttaagggtaggcagcgttgtcctcagttctgccccagcactcagacccagactgggtccctgcctccgccctccgccctcggactagtctcttggaagccggcctgcctccgccttcagacctagggagaggtcttaacctctgttctcagactctggaaaaggcttctcaacggcttggcctgacctcagctcctcgcattccctccacatctcaagacaccaacccagggatgcaggacagacacacagacactcagtgagggtcaaatatctttaaataaagtgccaggaacaataaatactgtacaggaagagaaa

SEQ ID NO: 99832 - DNA, 525 bp, Homo Sapiens
ttcaatttcaatgaaatcattttctcgaagagatgggttctgaattctcaccttgagtaccagctctagaaaaaaaaggagaaatgttaatgaatagttctggcacagcacagcccatgttgtttaagatcttttccagaagatggttatacttaatcatgccaaaggtctgtgcatgattaacagacctgtttggtgggaaaaccaagtgcagccagcagggtttgctcaggcccagctctgcctctgctggggcagtttcctgcactgtcgtccgtacttctaaggctatggttcacaaagtaagagcaaggcaggggaaaccattccagctatgtagaaggataatttacttctgccattggagctaaggaggcaaagtcttaagaacaggtttgggtatcaaactatacatgaacaggggaagagggaagaaggttggaaagaaggcatgggcaggatgtgagttaccctaaaaagatttaacaattatggacctaaaggtatctgtaaaatatgaaactc

SEQ ID NO: 99833 - DNA, 512 bp, Homo Sapiens
gtgctgacaattactggctgaatgaatgaataaaggaaggaacaaaccacaccttccctggccttactaagatgcaatgaggtgttcttccagagggaattttggagggaaccaaggggagatgaaaggtactcaggagtggggattaggtgggacccagcaataactaacttggaatgaactaacccagaatagccagacctagttggttattcacactgcaatttgggcctttttcagtttttgttcaagtctgattatatcaaggaaaaggtcttggtttgaggctaacatgtctttaatgactgtaacatttgtcactgtctctttttaatagagagaaggtctcaaactcagggctgttgacatcagcgtgctagaatgtactgatagcgctttgttttttttgtacttgccgttactttctggttttggcaagtgctactggttttccatgtacagtaatgatgtaaagattccttgataaatgcattgattgaagtcctttaaaa

SEQ ID NO: 99834 - DNA, 513 bp, Homo Sapiens
gcggccgcttccgctccgcctcctccgacttctcacacaatagagtcggcgcggcctgcaggcctcagcggcggtgccgagattcagcgaaccactcgcggctctcgacggcagcctgcagctcgccaaggtccccgtggccctcccagagatatggggacaaacaatcctcgcaaaaacggtacccaccgtggtcgctgaactgcaagcgaggacccaccgcgactcacctagacacgcgacttctgcgtggctaagacgaaatggccagcgggcgcctgcgcaacctaaataaggtcccttgtgcgagttctgcgcacgcgcagccagctgcccgcaccgccccgttgcgtcacaaagagctctggcgcatgcgtaatttcaagagccagcccacctcccgccggcggattattacacgcttgggttttgggctcagcacccccacccataaacccgccgggctttttgttgcgcctgcgccttcccgcgaatattgaacttcggagtcct

SEQ ID NO: 99835 - DNA, 546 bp, Homo Sapiens
acagatgttaaagttaaaaactaatattacacaaggataaataatagtttaatcatggcaatctaactcccaagctaacactaagagaatgaaatcttttcagaatatgagttttaaaaacttacaaaaacagggtattcaaatagcaatgtgatttactaccatgatttctgtgacatatcaatcatgaaataaatgcctacttatagacaatttccgctccgaattatatagcctcctctctgacaaagtgttacgccataaatttcactaaaagacaatgaattaagaagtgctctaacagcagtagtttcaataaattagcattactgttatatgtgctgagacataattctcttctattaaggaacttaaaaactggccaccattttttcaatatacaaacataattatctagactctaaaatatcttcccaactgaaatactgatcattacataatacagtcaacagttttaacttttaggcacaactcataactttagtgacaaataactcatccatacagatatcagcacctcagggt

SEQ ID NO: 99836 - DNA, 585 bp, Homo Sapiens
  misc_feature (430)..(463): n is a, c, g, or t
tgtatcgatgaggccacagcaagtgtggaccagaagacagaccagctgctccagcagaccatctgcaaacgctttgccaacaagacagtgctgaccattgcccataggctcaacacgatcctgaactcagaccgggtgctggtgctacaagcggggagagtggtagagctggactccccggccaccctgcgcaaccagccccactccctgttccagcagctgctgcagagcagccagcagggagtccctgcctcactcggaggtccctgagcccaatcccacaccctgcagagttctcccctctctctgatccaggccgggcctatacagaggtgctggctgcttgtttacattctcctctggggctctacctctccacacttccccagaagggaaaagggcaccctggattactctttggaaatcactnnnnnnnnnnnnnnnnnnnnnnnnnnnnnnnnnnccaggcctctgctctggccctcttgcatctggaacgccaggtgggtttttctggcataggagcccacttgcattttcatagttttatttgataaaattccatcttacattctgtgtattaaa

SEQ ID NO: 99837 - DNA, 491 bp, Homo Sapiens
agatccaagtattttgtaagaaaataccagcaaaagataaaagtttttttatggatcgtatttgtatcaatcacctacatgatctagagccctcacatggataacatttaaatgttcagtttgcctaatagccttcaatgaaacacggattcttctacttaaaaaaggtaagcctggagaaaataaaactgattactatgcaagaaaaaaatgtgctctgctgtgctccttggtatttttaagtggtttccattgtcttaacacctgtcttaaaacgggtatgttgtttgcactgaaccctcaaaagtatttatacctattaagttaaatttccctttttagagttaatgcttcattgcctgtcggcatattatcactatctgtctttgaaaaattttcttttaagtctcaactatttcttcataaagctcttgttcagggaaacattttttgatttgtccaatggactgaaataaaaggttagtaaacca

SEQ ID NO: 99838 - DNA, 705 bp, Homo Sapiens
tcagggaattacagtatttccggaagaccaagggcaactctgattgttccagactgcctgggagcaccagagtctgattgttccagactgcctgggagcaccagagtctgattgttccagactgcctgggagcaccagaggtctgggtgggggcaggagtcagtccacctggaacttctgcctccagtgcactgagtctgcacggaccaccagggctgacactgccttacttaatatgggggtgggggaagtccctgcgatatataatggtctcaatttaaattctgtgctgtttttattttagctgtgtaatttggaaacttcaaataaaaagcctgaaaggaaagttggactatttaagcttacacagactctattaatgctatatggttattctacccctgactttggaagaaggagaaactggcatgggaatacacttttctaaaaaaaatactatttaaaaatatgaaagtttatttaacatctaaggaaaggtacttaattagagggacactcaacaagaagaattgaggatctaagtaaatagtccccatctgctcctggtcctaccacctggcgattacttcctcttcttctctgatagattttagccaaccaattttgttttatttgtgcaagttgagaggccacctgttatggaatatacttccacattaaacaaagtgaacatttcctaaaaaa

SEQ ID NO: 99839 - DNA, 523 bp, Homo Sapiens
ggcttctggtattatgcttacaaatatctttttccaggaatatgaaaatatttttagtatttaatattttacatattttcacctagtacatttactttttttatatataaacttaatacatttagaatttatttttgtgtttagtatgaagtatggaaataaatctttttcaaaatgctcattgtgctagtaccacagattgactaattcaccctttccccagagatccttagatatcccatcttaaaatgcaaaacagaccttcatctggattctctacacaattcgacttcatttggttttttttagacataaagcaattcactctagtaacttctaactaattctaactacttaggacaaaattggtccaagtaacagaaagtgaggatccacttctgaatggccaggagccaaagtaatttttcaaagaatcaggagcctgaacaaccagagtgtgccacaaggtgtgacagaaaccaaaaagaaaggttgctgcaccagtgtttggtactacttccta

SEQ ID NO: 99840 - DNA, 550 bp, Homo Sapiens
atcaacaaattatcaccatgggatgtgaggcaagtactggtggggaaaatacctcagagttgtctcacaataggtgtaaaaacaggtagggtatttatccaccaaatcctggcctatcattgaatgaaagctgcttcagtctctctggcatttcaacttgccctgcaagtgagctgagtgtgctctgagcatgccagaacagacacctttcagcagagtgctgcaggtgtccacaggaagcagccttcaatctggagaagtgagtgccaagggtataagagcaaaaaacagtatctgctaaattgcaaacagttacaaccatgaatctgaaaatagatgaactgtcatttgctcaaaggaatattatataacagttcagatggacagtgtagctctacaatagtgaacatcaataaatttccaaataagatattgagaaaaaatggaatttgtatcataataattaatatatgtaacatttccatgcagtttaaaagaatgaaaaactatagcaaattcaggaagagcaggtgcatttagagaatagcaa

SEQ ID NO: 99841 - DNA, 558 bp, Homo Sapiens
  misc_feature (341)..(350): n is a, c, g, or t
gagaagattaattggtgacctttcgccgtgttaaaataggatgagtatgttgctggtcaaggcagaaacgctaacttccaactgtggtctgttaagagatctgctgggaaccttcagaagcactgccttccaaggcggggccacagcttggggtgttcagcacttgaggacgggtggagcttgttcaacccaaagatgtgtgcgatgaacggatctacacactggaaatacgtatcaaaactgcaacagcaaaatcatattttgtaaattaaaattgtgtttacttactgtgactactgttcagtctttattcagaaacctttttataggctttcttagcnnnnnnnnnntccatatctatggataatgtctcaatcttctgtatatatgttttattaatatgtaaatatttagattttttaaaattactatgttctttaaaaaagaattcaatgcaagcctggttgtgaaaatggtgtataacattgtgttgtggtatcaattcccaagatgctctttatgtctgatctggaagaatacaataaattactttaattg

SEQ ID NO: 99842 - DNA, 326 bp, Homo Sapiens
gctgtaagttacatcatgcgcagtggaaggtctttttcttattgtaaatattgtgaacattacttaacttcacacacacacagagaagagtgtggccccacccctcctagtgaactaacgctgcgtccttggaatgaatgatgcgtgagttagtttcactgtcttcttggctggacctgtcacaagcaacctttaagtcctacagcactttgccctgttttcaacattggagtaggcactgcatagcagataccattgaattgctgtaaaaataggatggcgagtttgtgttttaatttttcataaaattgaacctgttggttgac

SEQ ID NO: 99843 - DNA, 342 bp, Homo Sapiens
gcggccgctgtcctacaagggcgccgtggcacaggtgctgtggcacctgttcagcattgccgcccgcggcctggccttcgcgctcttcgccagcgtctacaagctctattttggcatcttcatcgtggcccactggtgcgtcatgaccttctgggtcatccaaggggagacggacttctgcatgtccaagtgggaggagatcatctacaacatggtcgtgggcatcatctacatcttctgctggttcaacgtcaaggagggccgcagccgccgccgcatgaccctctaccactgcatcgtcctgctggagaacgccgcgctcaccggcttctggtactccag

SEQ ID NO: 99844 - DNA, 954 bp, Homo Sapiens
  misc_feature (871)..(902): n is a, c, g, or t
cagcacagcgcccttctaacgggcgggaggaaggccgctgctcgcagggctaggtggagacacacttcccagatcaccgcaggcgggttttacccggagagctctgggccgttcggcctccctgccgggtggcttcttcaatcccgtctccttcccaagctcccggctttttctaatcaggcaggcgtctgtcaaccctctccacttctgggctgaagcctccccaagccccgctgcgccaacctgtgtggggtcttcttcgggcctccctctccgccccgctcctgctcctacctgcagcacccccagctccgactccagactctctgcatcaggtctccccactccacgctccgggcgccccaactccaacaccacgtcctgccgcgcaggttcttccccgcgcggaggagcgcgcagggtgggcggcttaccatagcaagtgatcctgcgatagggaacgcgcccttgccccgaggctgcactaccacaggaaataacatatgtaaataaatttatttttttatgaataataaaacgcgctgtaaaaaccgtgtgccccttggaggtgtcaggatgtggtctttgttgccctttactaagagggtttggctgtagaagttaacttttaagggctgatctcctctggtcagggcggtgggtcattgcgggaggaatggtggcgatcacttttggatcactccatttccaaacgtcattctctattaatctctatgattctgctgcttctccgcgccgggcttcctggaaggccataactggaggcctaataaaagtcctgagtcttgaggcccctgctgtcctgacagacatacactcctcaggctaacataggtgcacgtctctcatnnnnnnnnnnnnnnnnnnnnnnnnnnnnnnnngcagctactccagctaaaagcacactccaatccttaccattgcaagtagttc

SEQ ID NO: 99845 - DNA, 566 bp, Homo Sapiens
agggtcatccaggagaagagagactcaacacaggactgggctgtctgtacacagcagtagaccaagggttggcctgagtggattctgccagtttagctcaatccagagtcaggccctggagcgctaaccgagcgtgacctgccagcccgtgagtcagtgagtgtctggcggagtgacaagccccatgtggcatttttgctgagctgacagccagcgtatgcaacctagtccagtccaccctgccccaggggaggggttgtgtgtgacactctgacctcaatttaaagataggacaaatgacacagcccctgagttggccctggctaaatattatacatcacacgtagtgacagctgctcctcctagaaaccaatttacagccaatttagtcatttggctgtaagaatgctcaaccacatgagaggatagaaaggcatctcttctaatgttttcttctgtgtgcgtctgtcatcactgcaaatattgtttagtctacttctcaagagaataggaaaatacacctgtatccttaaatcccagaaaatatgaactctaatgtaagaacc

SEQ ID NO: 99846 - DNA, 550 bp, Homo Sapiens
tttccctaagctactgcacactaaacagtgagagagcttttccctgcagtcttgttgaagcaccccgggttttttgctcattgttggtgggtgcattttaattttttcattccctggactatgggttatgatatccatactcactgaagacaaaaagccaccttttctgcgtctcggtggcatgcatgtgtctcatcatcctttcaaacttgtggtggaacagggttttcttccctgtctgtgtattttgagccagcacagttaccaaaattgaacttgtctttcgcttgtgagcggttgtggtcattgtgagggcgggtcatgaggaggctgtagccaaggacgaggtgtgtgcggctgttgcctggacgtttgtccaatccacgttgacatttgagggatcacagcgtgtgaaaatgaactcagaggagaattggtgaattcctatccagtgggcatcttcaaaccctggtcgacggcggaagaatatcaggtcccgagatcacccacccggcgcggcaacagtgcagagtggccacatctggtggaa

SEQ ID NO: 99847 - DNA, 442 bp, Homo Sapiens
tgttctcttcgctgtttagttagcgagcagctagggtggagtcggcctcaaaggttccgctctcatgtcggcaagtgtgatttgaattttaaaacactgagctttcccggtggaagagttcccaagtttattccgacctacggaagcccaggaggaccaggattaccgctgccgctggatgcgtccagggccgggatgcgcgaccgtgagacgctgcgcttccgaagccctcgcaggcttccgggtgccagagcaggagacataccctctgtccagccttccactctcagcccccagttttttcccacttttgcttttcaggagtcgtccagcaagacttgaaaggaggagaaaggcctgctggacaggatgctagagcctggcagtgaccacttgggggccctgggcattaaataaacttcttggggcccgtttcgttatt

SEQ ID NO: 99848 - DNA, 505 bp, Homo Sapiens
tttttgtagaattatttagctaacataagtattctgattgctacctgatggccattcttacttagtttcatagatgtgctttaactatgatcctttgaagctcaccccttggagagcctacagaacctcaggctgatagctttgaagactgccaaacagcccagaaggaagcaaagcatctgcataatcaggagggttgtataacaagtagtgatttggcaaatatgtgggtagctttaggctgaggcacgggcctcaggcaaaaatgcccttcgagtgaatccgaagggcatgatcttcctatgtccttgactaggcatgacgagtcatttgaggtcagatattatttgagttgttcagcacccccaaaggtaggcattctcctgggaaattttcatttccattttatcgccaaacaaaataaaaagcaaaacaaactttctaagctagaataatgaaattaagtcattttccactttgtatatattgatgctaataaaacaga

SEQ ID NO: 99849 - DNA, 223 bp, Homo Sapiens
caacgagtacattgaacatgcttcacattcagaacatgaagtcttttaaatgaatataggtagaacttccaacttccaggctttgtaacagaaatcatattaaagactcagtagcaagcctaatcctcaaatcccccatctgttaacctgataatcctcatgtgtaaacttatttaagaagctaactcctgagccacctgtattctgagcattgcaataaaga

SEQ ID NO: 99850 - DNA, 511 bp, Homo Sapiens
tgcggccgcgcgagttccctgctcaccctccctctccgcggaagtccccacgaggtggcttcagggtgtaacagagcgcgcggctccagtccgaaggcagcggccgggggagggaaggaggggaccgaacccccgaggagtttcgcagaatcaacttctggttagagttatgggaagcgcggttatggacaccaagaagaaaaaagatgtttccagccccggcgggagcggcggcaagaaaaatgccagccagaagaggcgttcgctgcgcgtgcacattccgcactctcaacgccctgcgagcgccgacggttggatggagggagggtcgcccggattcacccccagctgccatccccgtgggccagcactgcctctttctctccctcttcttccaccttatcttcctgtccactttccccctttccctcccccataattgaccccaatgtggaattgagggtcatttcaaaatatttctgatactatttgaagaaaataaactttatct

SEQ ID NO: 99851 - DNA, 526 bp, Homo Sapiens
gatattggaaagatagctaatctaccctgtgtggaaaagaatgaactttgcacaaagagaagttaggcctttgcttctgagagtattttaagcctttgtaatgtcctgcctgataagatggggttacctggcagcctaagaccatgccagatagtctatgctaacaatgtgattatggtggggctttaggccttgcaatatcaacccaacctctggaaggctggaagctaaggtggtcaatgggtggtcaaccatatctactggtagtcaaccatatctatgtaaccaagccccagttaaaaactctggacaccaaggcccaagtgagtttccctggctggcaatactctgtgcgtattgcccaaacatcattgctgggaggaattagcactgtctagagttccactgtgataggacaactagaagcttgcacttgcaactctcctggaccctgccccatcatgcctcttccctttgctgattttcatttcttacttttcactgtaataaaccataactgcgagta

SEQ ID NO: 99852 - DNA, 517 bp, Homo Sapiens
tttaattatttttttatttgtaaagttcttgtaacatcaatttttagtgcaaagtaaaagtctttattaacacctgtttttatctaacaagcttctgtattttaaaagtaaagtaaaaagatttaagagtaaaaattattgaccggctcatctattcttggtcagataagtgaaaacactagaagatgaaagtggtttggtgacaaatcactgtttaaattacagacagaaacaaatacacacatgtaacttttttttcacggtgaagaaatgaggtcagaaggttactaatataatattccagtaattatcttatatataattactaagtcttacccttgaactacaagaataaaatttaaaaactcactctgttcattatcattccactgatttcaagtacacacatgtttgctttcttacaattattacctttccatactatagcacttatattttctattctgggtgggaacttttgagtcagggcaaatgaactcttatgaaaagggacatc

SEQ ID NO: 99853 - DNA, 480 bp, Homo Sapiens
gaagccatgttcagagaggttcagctcgttacccactcaagcagccctgaacaaacacccttttctgacctccagctgctagtaagaaagtgcagggaggacacaacaaaagctgagggcagactgtttcttcccccacacctccgcagtctcttccctttggggaatgtgggccctgcccactcactgcccacttacctaagtcccactgccaccccactgcctgtacaaaagcaggtgagaagcccctcccctcaaagagcctttccccaggccctgctgaggtgacccccatatcttcacctcccaggacacagactgcttggatcaggggttcccagtgttttggaatgagggtcctttgtaatgtcaacacatcttgaagactcatgggataggttggtatttgttggttgagaaaataactattgtcaaataggtgttataaataaattattgacccttttaaggcaaaaaaaa

SEQ ID NO: 99854 - DNA, 462 bp, Homo Sapiens
agtgggttaattctcacagaagtgggtgagttattgagagcagttcattacaaaagtgagtttggcttcctcggctttctcttgcttcctcggctttctcttgcttcctctcaccctacgatgcattctgctgtgttacaacacagcacgaggccctcaccagaagctgaccagatccagccaccctgtcttggacttcccagcctccagaactgtaaaaaacaaaccccttttctttgtcaattacccagtcccatgggttctatgacagcaacagaaagtggacaaattgtgtaacatgcacatgtccaggagggtgtgtgagaggtaatcctgttgttacggttgttctgtagggtgaccacaattgggaatttccctgggactgttttggttttagcactgaaaactctgtatttcaataaactactcagacctggtaaaccaggatggttggtcaaa

SEQ ID NO: 99855 - DNA, 414 bp, Homo Sapiens
tgcggccgctccaacatcaaaatggaaacccctccacctcccaccctcaaaagcacccaacaacgggccctgggcactgagggtgggaggtggaggggttaccattctgcttgggggatcagcatcacccattctttctccttttcctctgggctggtgctcagatggtgagagcactgtgctgatgaggtgggccctggggtggaacccatggccccctccgactcccaggagacctggccagctgcagcggcccccgtggaccagcagagggacaagagaggagctgacgtggaggagccgaggcccactgggggctcctggagagtccgtccgcctgtggacagcagctcaggtgttcagctgcttccagagaggaagcacctcttcctagactgaggcatcgttttgatt

SEQ ID NO: 99856 - DNA, 508 bp, Homo Sapiens
attatacagcaagagttggcatcaggactattcctggcagttccgatatgcccattctagcacgcaatgggggagtcattgggccaaagtccggatgagtcaggggatgaccaggattcagccgctccggaccagaagccattgcctcccttgtttaccttgggtccacctccaccaaaacccaacagaccaccaaatgttgacctgacgaaattccacaaaacctcttctggaaacagtactagcaaaggccagacgtcttactcaacaacttccctgccaccaccgccaccatcccatccggccagccaaccaccattgccagcatctcacccatcacaaccaccagtcccaagcctacctcccagaaacattaaacctccgtttgacctaaaaagccctgtcaatgaagacaatcaagatggtgtcacgcactctgatggtgctggaaatctagatgaggaacaagacagtgaaggagaaacatatgaagacatagaagcatcca

SEQ ID NO: 99857 - DNA, 576 bp, Homo Sapiens
acaaggtgtggctaaggagatagtgtcccagcgtagcgtccacagactcactggagttcttgggcttcccctcacagtcaggttggtactacaggtgtcccttacgtgaatgtttcaatctgtcagtatgaaattgaaatgaaatgattggtagctccctcccagagaactttgcacctcctggcaaagatgttaaagcagcgaaggctcacagttggaatgatgcaactggaatctaagcactagaaccggaactggaactagaatctaaggactagcactagaactgttgcagtagctctgtttagtgtgtgaacttggctacctcttggaggtgttgggggagtaactggattaagtaccatggcactttctaatccctctccccaacaccggtcactgtgattgcagcactgaaacatctaaatgtttaacagaaagagcttgctagcccctggcttacattatctatggtatttttaacatggaatgaatacttaaagtcacttgcaaagcagtctcactgcagaatctttctaggtgtttatgacatgtccttccagccttttggttaaa

SEQ ID NO: 99858 - DNA, 330 bp, Homo Sapiens
aaaaggctgagttcagctttggggcatgtcggtccagggagccacagaccccagggaaaatgctcgacaacacccatacggtaacttaagtgtgcatatgtgtagggggaggatttaggggtgagggtcttgtgggtgtatgtacaggtggtccagccacaatgagactgtcagcatgccccctcattctcccaggttccaggggccacccatctaaggacagtggggatatgcgtcctcactccgcagccagcagtggccctggctgctctggatataaagtttcagctgcgaggcctgccttgcctcacctgtgctcccgtccacacc

SEQ ID NO: 99859 - DNA, 508 bp, Homo Sapiens
catttgttttaagataaaacttctttcataagtaatcccccacattcgctgttagcctcctggtgggaccaaatctacagttatagaaggtttgcacctcactggcaaatcaaggaaagaggtgaatgattccaggtgctcggagcttgagctgattcttggagatgactcagttatgggaacattttacagacaggcagagcctttaaaccaatgcctgacttagaaaagaaaattgcaggaaactatcaaaagatggtgctaggttaaagcagcaccctgagcagtttccagaggtgtctgaattacagtaaggcaagcacagggacaaagtgatgaagggttaaaatactgcaagcagacaactgcaaaatgtgaggagatgacaaaaatgtaaagttttcgactcagccttgtctctgaaacccatctctgtaaaatcagactacaggtttcactgccaattttttctagcctgtatgtttcataaataaataaatgaaacagc

SEQ ID NO: 99860 - DNA, 518 bp, Homo Sapiens
  misc_feature (446)..(446): n is a, c, g, or t
aaaactaatatttcaaggcattaatctgtaaccttcacaagtcagaggatcctctattgggtaggatttcacacctgtgagggcagacatggccatttcagatgctctagagaactgggttcctgtgtgtgctcagaaagtgaggacccaccttgcttccactggactttccactgaaaaatctatttccatggtgataaacctagccttcagccttagaactagaagtcagctgttgggctctaaaacccacacttggtttaaccatgacattcttttgtgagattttacgtgtttcatctttgaaaatgtcttttcacagaggtaggtacttccaaatactgattacatggtagaagtcatatggcatgaagatagtttatctctgatgatggaaaagggggtatccatacaaaccaggaagatttccttccaactcttgcttnctcagtctctccccatcacacgtgtggactgtaactcatctttttgttgtcactgttgttacaaaaatggag

SEQ ID NO: 99861 - DNA, 725 bp, Homo Sapiens
aactcctatttgcacgcaattgactctttcaaagtctttcagtaggttaagtttgttttctgcagttttgattacaaatacttcatttttgttacaaagctaagctttagtttaattcttggtcatatcaaacattttaaattcattgagtctaaatcatgagttgattatattagatttgtgtaataaagcattaacaatcatgacagttaagatgattcttttatgtgttagttcattggggcaagaagacagcataatacagatgcccagtgtaaagaagttagcagattcaaattatccagtggttcactcaactagaaactctaatttttaaagaatgatgtaaaatttgctgggcacttgtgtgtactcgcgtgcatatgttcttgtgttgttggtgtatattgttctgctttgttttgttgttcttcatatacattcaaataagagcttttctgacttggtagtagtaggtcaggataaagagctggggtgtgctatcccctacttgtgagttgtatataatttgttaggattcttttgtgtccacctttttttaagtttagatggctggctctgactgctataacaaggtatgtatcacagctatgtaatgtaagaatgcaaaatctactatagttgtactataaattcagcacctgttactgtataattaagatactgcatttgaagacaataaaaaagctaattcaaatacgtgt

SEQ ID NO: 99862 - DNA, 524 bp, Homo Sapiens
cttgcagttatgttatcattcttataacattgtatgttaatagaaaatatatttgcataatatgcatatatatgtatatttaccaagattttgtttcttacgcttgctatcatggcagcatgcgatgtcatattttcctttatgtgatgtaactactttctgttatctagaaattaagattgaagctaaaacacttctactgttcaatttcagaaactaagaatcatcctcatgcctttatttctgtatctgacatatttcataagcacatccaactactcctagactgactaggattctgcaggaacatgacccgtacacaccacgcgtcacccaacgacccatgaccgttctctgaggcaaaggagggcaacctgacagcaaacacagtcactgttggttccttctgatccacagcctcatcagtatttggactttttaaagctcgtagaaacaagacaaggtgcaccggtttcatagacgcaaccttaacttactatttagatgagatctttctaaagaaa

SEQ ID NO: 99863 - DNA, 588 bp, Homo Sapiens
  misc_feature (132)..(141): n is a, c, g, or t
ccaaaaatataatttcatcttaacgttgtgattaatttttaaatgtatttgctacagtataatttttaaatgcaatatttaatgctgtcagattacttgaagacaaagttttacagaaatttttaaatttcnnnnnnnnnnctgcaatgtaccaataaacacctagaaaataatataattaaaaaatttaaagcatcaaacaacctcaagatctcgtcaggaataatgaacaaggcattttgcgttcacatcggttagcaacttgcatcccagttcacgcgggggagggtgatggtcgatatttctgtgtgtgtgagaatccagcacaattattttgcccgttttcccaagagaaagaagccagggggaggggcagaggatggacggagggggctcggctgcagtacgttttggttcagcgattgtgtttccttgaaacacatttagataaattctgctcgaaatcttaattgctggggaattgggaaacccgtgacctgccctggtctttgtccttcatccatggcctggtccagggtcccaccactggggtcttcccttcctcctccctcctctggaccaaaagtt

SEQ ID NO: 99864 - DNA, 408 bp, Homo Sapiens
tgcggccgctcatcgtgaacaatggtctcagggcttgacatctttttccagtgccccgtgctcagagagtccaaccaggggatatttgttccctgtctatcaacattcacagcagagaataaaattccagaacaaatagctcaaagagacctgtttcactggaggccagtagctgcaatgagctgccttgaaggaccaacccagattctacacctctttgtgttccgaccagtgcccgggacctgttaggggcttatggaacgctggttggcagtgactgcttctcagccgctgtgctgtctcaggaaagttgcgtgagttctctgatcttcagagttaaccgtccacacaatgcaaggggttcttatggaattcttatgaggaagaaatcagatcatgagtgtaaac

SEQ ID NO: 99865 - DNA, 506 bp, Homo Sapiens
  misc_feature (27)..(27): n is a, c, g, or t
  misc_feature (94)..(94): n is a, c, g, or t
aggggcagtgtcccgcaggcagtgaantggcacagcacccctgcccctgaccctcgccattgccattgtgatgggggaggggtcagggcccctntgcacagtccaagccacagcaaaatctgggaagtctcctggtctttgcccaggaaacagccttcctagacaggctctgaattattcacctcttccccttcatattacaactgccactcagacgtgaaggtgcagcacaaagcttcagaaacaatggaagaaactgaaatcaggatcctgactcctgcatgggaaagctatagctgtgtgactttgtgcaaatcacacacctgttctgtgtcttgcgtctgcatctgtgaaatgcaggtgaacctagcacttacctttgagggctccttggagaattaaatgaattaattcatacaaaggacttagagagatgtccggcactgagtaaacactcagtgctagctgttatgatgatgattaaagataatcaaagcttaaaaaag

SEQ ID NO: 99866 - DNA, 407 bp, Homo Sapiens
gcacgagggaaaccgtattttcaaatattgagagggtaaattagaggaaagccattttagagggcaatgtggtgttacctgtcagcattttgaatataattaccctttgccacaattctacacctagtcagttatgttctcaaaaagcacaagtgcagaaatatagatgcataagcaaatgtgttgcagaattgtgaaaaatttggaaaaaatgtttagtgctattaaagttatgggttacttaagttacagaaaatcagtttagtagatcactgtgtagttacggaaaatgagatggatctctactcaaagatgtcttgcagtttatgaactgagatgtaacttcatgactaacatgatgacatcgttattaactacataaactttataaagcttaaaaaatgcaa

SEQ ID NO: 99867 - DNA, 917 bp, Homo Sapiens
  misc_feature (470)..(470): n is a, c, g, or t
ttaacaggctaaactaaagctttatgctataaaaacaagaaataaaataaggagatttataggccggctgattgtcagcaaacacaatatatttactgtattagcatttgctcacagtgcaaatggtacaacattacaccatttcaatatttcggtttttaaaaatgctgttttcattaactatattatattggcattacaatatgacaaaggagcaaatgaaatgttggtgaagaatttcaccttttcacaatatcaagcatatttttttaaccttagtataaggtactataaatccaagaaataaaaacatccacaaaatatattacatctggtttgtcttttttctaagtactcaactttatacaaaagtctttcaaaaaatatcattccccataggttttcctgtttaaaacctgatttttttctctcagttcacataagttagagtgcattttcttttgttgctnttttcttttaaacatgcagacatataaaaaatctggatagcacaaccttttggcaacaaagttatttttctcttagtttagcttaatgtctgagaacagttttattaaaacaaaggaaaactcaattatcatgcagtgacatgcatataccagaaggagcgagcaaaaaatattatagggtatttgattcctccttctagcttggaagtgaccaaaatttttgcttttttaataatcatcacattataaaaagtattcagcaaaatactgtctctgcaaagaaagattttacccttcagctgaaaaaatatgggccctcctggcaaacttcatcttcttctctctccttctacaaaaagtccaagtacctggaaattcacaaccccctgctcttcgatatcccccctttccactagagtccttttagtattatttatccaccaccaa

SEQ ID NO: 99868 - DNA, 585 bp, Homo Sapiens
atgttcccagatttcaaggctggatacatatctgcttactactagaggtcatgttaccattagaacaaaagccttgtgatgtgtaacatttttggggaaaagccttgttctgctatcattcaatagctacttgatcaaaaatataaatgtcagattgctcccagagattctgccaatagctcttccttctaatattcatcactgccaaatagctggcttataatgcaatactaatatgtaactggatatatatggagggaagagttactcattagtacagcaggaagtaaggcatgcggggagtttgtcccacactatgggaagagcaggattgatgagagccaagttgagatggtggctgacttcactgtctctcatctagacttctgctaatgtcaatgcctaatatgtaccaaccaggcaacagataccttgttatcccccacaggcatcaaggcaggcatcaatctctcactttatagctaagaaggatgaggggacaaaaattaaaaagtcatgttctattcactgctatgtaaatcttgccttaagatcccacagcctggaaataaaagaactctaatt

SEQ ID NO: 99869 - DNA, 565 bp, Homo Sapiens
cttaattgaaacatatcaaaaaagtcagcaagcataatcccaaggaaggatttctgacaaagagcctttagataaaaacatatttatcaaaaaacaaatttttcagtcaagggcctttagacactgtatcattttctttccttataacagatattcagactacttcttggaagggccccaaatgccttgcctaagaacaatggacaaaagtcgcagtctcctaattccattagtcagaaaacattgtggtttcagaagtttttgcttatagggcattttgtagcggtatcctggacaggggttgacatggaaacctgtgtttctccaatagggtttccatggcaattctatagattttctcatttgttaatagcaatagccttggtcttgataactaatataatagacctgagattaaaaaggtgaatcactctacttggatggggttcccttgtcagggtcagaataatatatttggcaaccaaccagcctctgcacagaatcatctagaactgtgttaactaatatgatgtccattatccacatatagctatttagatgtaaa

SEQ ID NO: 99870 - DNA, 575 bp, Homo Sapiens
ctctgtgaagcaggcacatcggtgtgtgctgtggagctcaggagtgccccttgaatctactggcgcttgagggtaggggtttacggctccaactgcccgacgaactaaatccttaaccaaatccttccccccagcaagcatgaggggagcgctcggaaaaaaagctccttccagctttaagctgtgtggccgcaggcgactcgcggaacctctcccggggcccggcacacagtaggtgctctataattactaccgactgagtggatggatgaatggaccaacacggaacggagctccagttcttttcacaaaacagaatgaggggcctgggttagattcatcccagaggttccttcgcgtttaagcgtccatgcggtagctttagccaacttcccctctcagaacctctctccctttctgtagaagaggagccgggactggacccgggcgatcccttccgagtctcacggaccacgccggccagccccgaccgagtcgccccagctctgggaacctcttgcatgatgaggtgggggaggggccgcgccgtggctctccccagcctggcggccgca

SEQ ID NO: 99871 - DNA, 364 bp, Homo Sapiens
gactcccaggaccaggcttggagagcagacagaaactcaaacgggtcagtaggctgcacagcataggcaggattcgtgtcccaccacagggaaggtctggtcctcgagtttcttctgtgaccgatctgacgccaaacattctttccatctgaatcactcacataaaagtcccagaaaaaagcacttctgactcctggctgaactaaggattcagccctgcagactaaagaccagaagtggaagtctgaagtcagggaacacccatcctttctagattctacacactagagaagtcctacaaaagggcgatgtggtcctagaaggtatgcgttgggggatgggagagtggtatgtgctccacagg

SEQ ID NO: 99872 - DNA, 683 bp, Homo Sapiens
aaactaggcataattagaactcatggacattcacacccattccacttcagtcacatgcttccgaggcctcactgagttccttttacacatctatcttctctactttggttcttattccgtatgatggcaaaaagaaatacaactggactctaagatgatggtgactcatgatgcctgctcccttcattgctgcagatctttggttcttattagctccttttacacatctatcttctcttcttatgaataatattccactctctgatcatacaatgacctatcccagttatcaaaccattcctctctttgcacatatcctttaaccacaatgagacatttgaactgttaactttttcaaatatcagcttttgtctttctcattatctttcctgttcaaactgaactccgtaagtgatctcttaaattaaccttatacaagtattcttgatcttctgtcactcttgcctttctggacacttgtcacacaaaaccatacttaagaattaatcctaacatattcctgaacccttctcacacctgatttgctggacatctgtttaaaatcattcaagtatgctatattaattgatagtctttatttcaagtgatagaaaatctaccccattatcttaggctaaaaactgtaaaacactgatgaaagaaataaatctcggatatggatg

SEQ ID NO: 99873 - DNA, 715 bp, Homo Sapiens
tttgcatttcctaatgaggtagcttggaccaaaaactttaatgaagatcttttttttatagccacaagtgagatataatattagactttaaactccctacccctctgtagcagacaggaacccgctggaatctttgctgggaactggggaacaccaatttggtgcacaaggggtaagttgaagcaatgagctttcattgcagttagatgaaaggaaacaacttgtctgtgtctgggatggcatttactggatcctgaacagcccactctatgtaaaggccaaagatacccccaagctggaatttgagatactcttttggaagagaattagatgagtgactctttgaaaataaataaggattttagaggaggggtagtgattatagaaatcaggtgctttccctcttatccattataaacgaggggcctctttatagaaatggaacttaaaaaggattcaggactttatattgcaacagagcaccttaacaaatattttcttacttgatgctcacagtaactatatgaacttggtacagtggatgtccctgcgggtcagaaaaatgaaattacctttccactatcaaagctagacagggaaacagctagaacttcaactccaagtcttccaagtctcatgcactttcagatatttctttctttttttctttgttataatcaggagataaaaatgtaaaggagagtagagaaatatt

SEQ ID NO: 99874 - DNA, 594 bp, Homo Sapiens
  misc_feature (100)..(100): n is a, c, g, or t
  misc_feature (142)..(143): n is a, c, g, or t
  misc_feature (148)..(220): n is a, c, g, or t
catattcaattgaatcaagttttaaatatataaaacttttcgcatacgtaagagtatgaacagataataacgaaatacgagcatattataaccaatatanctgtaatataaagttatttattactgtgaaatctgtcaaaanntatcnnnnnnnnnnnnnnnnnnnnnnnnnnnnnnnnnnnnnnnnnnnnnnnnnnnnnnnnnnnnnnnnnnnnnnnnnggcatctactatttgggcaactctaagcattataaaagatgatcttaaaaatgctaaatgctattattattactatcatcatcatcatcaatatcttccatcagtcccaggaagaatgacagtctggggagcccttcctagaaaagtgtgtgtacacagtggcttgccatttaggaaaagctaagaaaggtatcttgcaggcattattattgaagcttcctaggcaggcttaccatgtgtttttcttcaaagcttgctactcatggaaaacttaggccaaaaagaatggaaatataacagtaagaagctgggcgcccgtctaaaaccaaatactcaaaccaggtgatacccggaacatcctattgacagggctg

SEQ ID NO: 99875 - DNA, 476 bp, Homo Sapiens
ttttcttctttgtctgttatggttaatactcataagattttagaaattgagaagttcttgaaacattttattttcttgagttcatcacttttgactcttgtatgagatgtgatttgtcataaaagatagccttccactacttcactaaatgaatttcagagtaaacactgtgattctgcagagcggattcagtaggctttccaatgttttctcctgctatacagtgcctaccaccttgagggcacttcagtactagaggatgaaaactgaaacgttgttttgatgtttattgaataacgagattagagaatatttgatttttgttgtcagtgtattaaagaaattttcacattgataaatgttctctaggaatgtgtctacattcatcaggtgtgaactcttgtacatgaattttgtaccttgaatccacatatatattaagtgtatcatcaatataaaaataaacattatttgct

SEQ ID NO: 99876 - DNA, 430 bp, Homo Sapiens
tttaaacggggctcctggggattagcaatacaaacagcagcatcaggactgacttggcttcttaaaggggccagtgtcggggacggggagagccgctcagcgaacacctctccttggaaaggaggctgggcaaccactaaatcattcttcagggcttcccctcttccgcctttcccttttggtttaactaaggcagaaagtaacccacgaacagctcgagcaagcaagaaaagacaagaatgtgaaataagcacctacagaaatgcaagtgttcccagtggattttccgcccgtcccaggttcgaggtcccaggtccacggacgccgtgcactgggatgccccggacagcgcggctctgcgggctgcgggctacgggctgcgggccccaggctgcgggctccgggctgcgggctccaggctgcggccgca

SEQ ID NO: 99877 - DNA, 674 bp, Homo Sapiens
  misc_feature (65)..(128): n is a, c, g, or t
tgcggccgccaacttctcctcctataatgaagaaagtaaaaaacttccagaacagttaataaacnnnnnnnnnnnnnnnnnnnnnnnnnnnnnnnnnnnnnnnnnnnnnnnnnnnnnnnnnnnnnnnnaataacctacatgtgaagaaggttcattttcataagtgccttagaatatgtttaagcaggccacatggaaacaaagagataaagaagcaaaatatactaagccacaatcccctccttcctgctttccctttgacccagtgtccaggagcctactggtcagggccccctcaatgacccccctccccacctcatcaaagaatttagtttgggctagcttgccatcacctaagtgcagtcactagggccataagtcaaatgctcagagtcttgagacagtcgccatgtattatgggtggctgcaacaaaatgcagcaaaaaatgcagcaaaaagaccctaaagaacatacttgaagtcttaatacaactaccaataggcgatgcccaggaagactataaccccgtagtactcagctaatgaggaattggggaagggacttgcacactagggaagaaatagtttgttgaaactgtcccaggtgtacctgcactccagacacctgatcttgcaagactgtcattaaaagtctctctttcgctgttaaaaaa

SEQ ID NO: 99878 - DNA, 472 bp, Homo Sapiens
gagccactgccactgaccatccccatccccaatctaacttcttatctttaattttggcttccttctgcttcctattcccttatttttttcccatcctgcagacagctcatcaaatgtgcctttaaaacagtgccttaaaacagtttaaaactactcattcccaactggagtagctgaacagtagtcacctccacccagtcctcagaatgggcactgaccccaatgcactcacctccagcatggagtgtgttcaagtgcatgatgagagagtattgacaaggcataaaccaaggattgtgggtgctgtgtacatatgtaatatatatttaagatttaagctaattatattgcatcaaaccattctgattcagatttaggaacaaaattcacaaggctaaattccttttctaaacataaggatttcattgcacttcacagacttgcattctttttcttccaatagaactgaaaa

SEQ ID NO: 99879 - DNA, 532 bp, Homo Sapiens
  misc_feature (423)..(437): n is a, c, g, or t
ccaacccctacagttgagaattattttgggatgatatgcaccatggaaaatgcttccgatacaatattgagtgaaataagccaaatgcaaactcgctacatgagaataacagccacagagaaatatgcaaatttcctcatgcaaatagcctcttcccggaaaagaatatggaaaaatagaaacagcgatgtgtaacaggtggagttgcaggagacccttttaccaataaacttaatcaggagataatgtgcccagaggtggagagggatggaagcaagtgggcagaggtgcacgtgtcctctgagagaaggtattcactggacattaccccatgtactggaaaggagccctccttcctatccgggtgccccagcatcagtcacagggcacaactatgtcatgtttgtcgtggctgtctctgannnnnnnnnnnnnnncttaacatttttctttggatgtcatctgatccttctttttacttttcacatcacaaataccagtacaattaataaaataaaaataatttcatcag

SEQ ID NO: 99880 - DNA, 439 bp, Homo Sapiens
tttctcacaataggcttattgtacctttgccaagtagttatgtggaaaccatttatttatttattggatctagtttataaccaaacatacagttctttcctaggtataattctaaagtctgcctcatttccttcttttttctcctccccaacacacatatgcttctctgactgtaaagatgaccactttaaggtcatttgaaatcatagacttgaaagagaaaacaacttccctgatgagttctttgcttcagggctgggttccttgttttttatgaacacagtaggatttaatttctgagcagctttttcaacctaatcagaaaaacctgagcttttctgtcactgtataattccaccattactagactttttgtttacaagtggtttccaacaaggaatgactttgtttccatagaacacttgtcagtgtctggaga

SEQ ID NO: 99881 - DNA, 422 bp, Homo Sapiens
aaccaagcaataatctaaaacaattaaaagcttaagtgcaacaatgggttagagccttgcctttaactcacaaaataataatgctttattggagacataaatatttaaaacactgaactattcttgaagtactcaaagttattacaaagacaaacagtattttagtagagtcaagattactttgcttgtgtcagagttcatcagtgttttgctaactggtaaaacaatggttttcttactgcagatctttattactggcaagaaagtcccagaagttcttttctctaacttatgactagaatgctgagtagcttgaaaatcaataggttctggtctggagctgacttattcattagtcacagtgctcagggcccatgatactttcagtggcctatggaattgttttaactttactttaaaaa

SEQ ID NO: 99882 - DNA, 562 bp, Homo Sapiens
tgcttcaggaaggaaaataagcacatgtcaacttgggtcagatcaagcatttcaagagtagtgctcacagactcttagtaagaataaaaagtaaaaaccagaacagaatagttcttacaaaatctaccttcataaaccagaaataaacatgataagttagcctctaatgtaagttagaggcatgcataaaatgcatgaaatgcaactctggttttcaatagtttctttgccttttaaaacaagtctaatgattgaaagccttggcccctttgatttttaaatattgcgctcaaagcgatcatgccacagcgatgtcaaaatatgaaaactaagcatgcataaaacaaaaggtgaatgagaacagagatgtaaattgggtaggtgacttggtcaagtccatagagctcatcgagagcacagccagaagaaagaatgggaaaagttcaagaattccattgttctcactctcctaagattgaaagaatcctaatatgacacaagcaggtcagcttttaaacttaacctcagaaatagtatgatttcaaagacaataatttttctt

SEQ ID NO: 99883 - DNA, 740 bp, Homo Sapiens
ttaccattttgatgttgtggagcatgatgagaaactgactagtgtttctattgcgtagccaattcagattatatcatagttattctatggaagtgaagaataatgaaaagaaattacaacagtgcttagtactttaggtgacttttatgaaaatgtttatagtttgcagtactgcagtagaacctacaagtaaatagaatatttagttgtgcctgcatgcaacatgcagcttactcttgagtagttttccaaatcagaatgaggtgattaatataaaatggttgcatgtttttcttcttgtattttctatattgcaatattgatgaatctgtgttgtataccagaaataaatgagattaaaggaagattccaaaaaatctgaaatataattcgacactaatggttcaaacatttgtcttgaaaggctttttgataccacattggtaatcagctgaagactgacaataagttacaaaaataacaaaacaattttagattggctagcattccatttatctgtcaaatctcttccttcaagaaacacattcttgttgtttggaggtaagtatattggtatgcttcctttgaaaagttacttagtcttgacagagactaagtagaaatataagttaatttagacataaattaattcaccaaaaccaaggttgctaactggcaacaagtctgccaatgtgatatgtttggcatgctgttttcaaaacatttgaattccttgcaaa

SEQ ID NO: 99884 - DNA, 723 bp, Homo Sapiens
aaaccagacagtagtaatagcttctttggatgtttgttttagccactttagaatgatttaaatgataagctttctattttgtcatacaaatttattttcaaattggacttttaacaaaagcctccaggagtgttatgccaatcctccaactttaccctagttatctgataggccacacaatttctatcacatgtggcttagcagaaggtgagagtaatagcggtttagactgcggatagctgaaggctccacacaggctgaatgagataaaacctgtaatgtcctgtacactgtgactggtctaaaggaagtgttccatagatggttgtttttaatgttattatgtttacaattttttttggtccctaaagccttggaaaaaaatcctcctcattataaaatacatagtcacatatgcacatggcaaaagaaaaaaagccttatctggctcttgcttccacagggcttcattttctgtaatttttagatagaggtggtgattgcaaaacatatgactaattgtggttgtcatttaattgttcactttaaaattattagttacattatgtaaatttcaccttaaagtgttttaaaacaaaaaattataaaacatacagattttcagccattctaatatttatcagttgtgtttttcttatctcaatatctgagcaatttttgaaaaatagtctgtcaacttaataaaaaaaggttctgctgtca

SEQ ID NO: 99885 - DNA, 428 bp, Homo Sapiens
tcagaactttggtgcatttgaagtgcctgacaatgtagtccagcttccctcctgttttacctagagggctggagatatgagggcccaaaggggccacaactattatcttaagtggactgaaaggaagacgaaattaaaactagcttctactccacttgtaggaaatgtgcttttaatctttggtgtagcccagccttctaggaacaaaagtatcctatgttggcaactgcagtaacaaaacagttatggagagtatggaggagggccagtaactcctaaaggtcttgttcctttgacttttcttctcaaacaaacatgagatattcatgaattgcaatggcaaacgttttttaggttcgccaatatgaaaatgtaaagcagttttaagatgattaatattaaaataggccaagtgcggtggctcacaa

SEQ ID NO: 99886 - DNA, 505 bp, Homo Sapiens
agtcctttattccaagaactcgccttcctatctcataatgccacaaggcccgcaggccaactccctttccctttccatgggcagcgagtaacaatttattagatcagaattgatccagaggaaacaccacagatgccaatccacgcccgtgacagaaataccaggcagtcctaattctccaaaccaaggagacagggctgaagatgctaagaataaactgcggggcctgcggggcgccagaaacaaaacaaaatgaccatcgatggacacggacagggcatgcaaatacttatcgatcagtgtgggcacagtgccagggggcttttccattctcggaagtattcactgccaggtgtcctgcttagagatgctggcaagggtcaccctgggcgggcagtctcctgttggggtgtcagagcaccccaacgtgcatcacaggcaccctggcacgaagcctctgccgcgaaggcttttgtcccagtaaaatccaaagaagacacatgca

SEQ ID NO: 99887 - DNA, 462 bp, Homo Sapiens
tgaaagaatgtagcctctgcattaatggtaaatggtctagaagttttcgtttccactgaggcttccgccactcgcttttttaaacttcctgctatggtttggatatggtttgtcctcaccaaaactcatgctgaggcctgagtccccagtttgattgtgttggtaggtggtgcctttaagaggtgattaggtcattgagatggattaaaggctttctcatgaggctcagttagttctggaatggattcgctcttgcaggaatggttgaattctcacaagagtgggttgttatgaagtgaggatgcttcttgtgttctgttctctttgccctcctcagttcaccatctgctttccaccatgagttgaagcagcatgaggccctcatcagatgggctccctgatcttggactcctcagcctttggactcataagccaaaataaatctgttttctttataaaaaa

SEQ ID NO: 99888 - DNA, 741 bp, Homo Sapiens
aagagacccacagagacccccccagtgaaggagacgcaacaggagccagatgaagagagccttgtccccagtggggagaatctagcatctgagacgaaaacggaatctgccaagacggaaggtcctagcccagccttattgtaggagacgccccttgagcccgctgtggggcccaaagctgcctgccctctggactcagagagtgcagaaggggttgtccccccggcttctggaggtggcagagtgcagaactcaccccctgtcgggaggaaaacgctgcctcttaccacggccccggaggcaggggaggtaaccccatcggatagcggggggcaagaggactctccagccaaagggctctccgtaaggctggagtttgactattctgaggacaagagtagttgggacaaccagcaggaaaacccccctcctaccaaaaagataggcaaaaagccagttgccaaaatgcccctgaggaggccaaagatgaaaaagacacccgagaaacttgacaacactcctgcctcacctcccagatcccctgctgaacccaatgacatccccattgctaaaggtacttacacctttgatattgacaagtgggatgaccccaattttaaccctttttcttccacctcaaaaatgcaggagtctcccaaactgccccaacaatcatacaactttgacccagacacctgtgatgagtccgtgaccccttttccaggccttaagtcctcgagt

SEQ ID NO: 99889 - DNA, 798 bp, Homo Sapiens
ccaaaacttaggcaaattaagtccccagctagaaggagctacactcaatacacagaaagacaaatgttaaggtgaccagcaagtgtaaaaagcaggcagagaagggataagtcgtcatgcttgttgccattatggagagggtataaccttaagaagttgctaatcacatttctattgatggcagggaggagcacctgactttatgcatgagctgttcatgtagttaaatgactgttataaaacatgacctctctgttatatgagtacacacactctgaactggttgttctcttcattagaaatacagtcactctgtaaatgatttgtaatgaacacttaggcatacgctgcctggtacatctcctgatagccctggcctggaaattctgctgctgactctgttgagaattagtcctgagactttgggcaaacatagttttctcatctttaaagtgagggagtctgacccttgcaggtctaaaattatttgtctctggtcataaacatatctcgaacttcagactcatttttggttcttatttcttctttttgtgttaatcaccaagttctgttggtccttccttctaggaaggaaattgtttttgaatctccctgttctgtctattctcacagctacacatctgctgttacatcatggttggaccattatagtagcctcccaaatggtctccttgtctctattttctcccatccttatttgtcctgggaaatctctcaatctttttgaaataccaatttccctacctcacttttttgaataaaaactttggagataaa

SEQ ID NO: 99890 - DNA, 533 bp, Homo Sapiens
gtcaggtcctacagcagtggttctcaaaatatttatttttcaacatttaggcccctttgataggcatggcaaaaagcccccaaaagtacctctctgctgctttcttcataccaatagagaaacagtctgcccatgttatcatttctgtactgctgtaacccacagcgtggaatagactttacattcatgctttgtgagactgccttcctgacccgcttgtaggctgcttttgagaaccactaccccagacaacagggcatgtgtgtttaactggaaaatgtggaacacagtgctgagtacagatggcacttcctaagaaatgatggaaacgtctcccttgcactccccactgatgcaggtttgcctcccttcttctccagttgcaggctcctttagctgcaccatgaagtttacagtccgggactgtgaccctaacactggagttccagatgaggatgggtatgatgatgagtatgtggtgagtcttcccagcatagagactttctttgacaccttcacaacactaagtgact

SEQ ID NO: 99891 - DNA, 569 bp, Homo Sapiens
tgcggccgcgcctttgttcgagaggagggctgggcgccgcctctgctgctcgcggggtggtaaacagcggcgcagccccttcagacgccggagactggtccgactctgcaacctggcgggcctgctggggtccccagacccggaacatacacattagaaaatggaaagccgtgactcgctctcagaggctgcaaggggcacggtagcagtggactcaaccattccctgtatttaaaaaatatccaagtagtatcttgttaaagaaactccactgcctgactgagtctcagaatcaaagaaagaacatgaatgctgctctgtgagtaaaaagtagaaaacacctgtggagtgggaaggcagtagcccagacacgttcctggtgcgcagccatggatttggagtagaactgctattgctccccatcagtaatgaaccacgtgcactgctcacaatcccgagtttactttaggcagggctgacagacgaaggtttatatgttattacaagcaaaaccatggcccttcggcgatggaatacattgtcctttagctacctgctaaaatcaaacg

SEQ ID NO: 99892 - DNA, 707 bp, Homo Sapiens
gttaacaggcttaaatgaacaggatctttaaagagatctttcaaagatcactctctatgtgatacttgattcctgtggatgttgggagaaccctgctttggaaatgtattcagggggttggtgtataatctactcctttgaaggttcatgtttttgtgactagctattataggccaagtataatgccaggccatgaaaggtgaattttagggtttataaatgaattagacctagattctgcccttagaggctgattgtccagtggagaagataaaacagggaagaatcgctattttaagtttaaaagtgatgattgcataagagagacacaggtgaaagacccagttcaaagggggaacatgtctccaacttggaaccagggaagtgatggctaatagcagcatctgcctttgtggagcgctccctatgtggtaagcactgtgctaaacacgtatgtgttgccttttctggtccttatgatagttctagcagcttttgaacccaggtcttttctggtgtcaaaacctttgctcttgttcactgtgcacagtggcatttatgggaaaagagtgtgtgctgaggaggaggtagagcgaaggaactccattggactggggaatgtaagaagcagaggtgtgagataaggtgggccagagtgccgactgtatgcatgtgtgtttcccagatcccaggccgccagaggaaaa

SEQ ID NO: 99893 - DNA, 554 bp, Homo Sapiens
taggctagatggaagctccatatgggttgtggccacatctgtgtggttcttgtctgtgattactcagcacgtaagaggtgcttggtaatactatatttgtaaatggatggtagggagatatttagactagactgaggtcattggagggtagagacagtgtcccaccatgtatgggacaaaggccagattccattgtctcccaccatcattttttcccagccttatctcctgctcctctgaactttttcacttagacaggtggatttcaaacagctctacccttttccgaattctgccagtagttgcttggcctcctttctacctgtctaatgaatgttcccacctcatgggccacctttgaacttaggaaacttgtgaggaacacttatttgacacttagccatgtatatactatgagaatgttttcaagagcatccattgagacacctggtgtaagaaataatttttctatttttgtgagtttaggggacttttcctttgaacagaaattaaaaccttatttactagaagaataaagtgatgttaaattgaaa

SEQ ID NO: 99894 - DNA, 552 bp, Homo Sapiens
taaacaacagtgtctgcccaagataaatgcacgtgtgagatagatttcacccctgagagcagttcatctttccttctgcatgccattttccctgtactgcccctcaaatggattctgaacatatagattacattatcacattaaatgaggatgagtaaacttcaaaggttcagagttaagatgcacctggacttttagattctgacttgaaagcgagctcacattaactgttccataaagctgtgatggagacacctaatgtcgttgtcaaattcctctgagtagtttttcaatgagccaaaccaaatgcaggacttcagggcttgtgagttattctctctaaagtgatgctgcaaagaaacataacataacgattgacaattttactaaaatcatgtattataaaagtgtatttgtatcagtactcacagccaattgtatacctacctagttgtaaccatttagttattacacaagaaaaaatgtgtgtaaatcgcagtttgggggcacatagaaacaacactatatacaaattataatttgtattcattg

SEQ ID NO: 99895 - DNA, 562 bp, Homo Sapiens
cccatagaagtcttccactctgctccatttttagcagcaagcatttcatgtagcataaaccttggcagataagtgtgcctaaggtttatacagtctgtccgcttggatgtatacaaatttagatacatattttaacatgtgttctcatagatgactttataacaacacacattacctataggtgtctagactgtgtacatacaagtgtgtacagacaagcttcatacgtatatactgtaatccgttacaacaaataaattttaaatcatcgtttaacatgtatgtggtacttctacagtgtacattgttttcattatttattgtaacattgaaaaccacagtgcagggaaaacaaaagtatcccagcatcttcatcctgtacacttggaattaatttcatttgggcatatccaagataaactcaactttcaagaaatcttgtatattatttaatcatctgtgttaggatgacacctatgcttgatgacttcggttgaatagctttattctggatttttcataactaaagctaaatccaaagacctgaaaaaggacaaaaaga

SEQ ID NO: 99896 - DNA, 318 bp, Homo Sapiens
ggtaaatccagagaaacagtagattagtggtagcccatgtcttgcggggcaagagaaatgtgaagtgactgttaacaggtgaggggtttctttttggggtgatgaaaataatctggaattagataatgatgattgtggcacaatcttgtggacacactaaaaaacactgaattgtgcacttaaatttactctttaaaaagggtaaatttatggcataggagttacatcacaaattttttaaaatgacaaatataataaataatgtaatttcaatcagaatcccaacagcattgtgttttggggagaagaggaaaaggg

SEQ ID NO: 99897 - DNA, 112 bp, Homo Sapiens
aaaaaggccctgatatttataatttacctctaatattcttgtaaactttctatggcaatttgaggatatactatatctcggtcaaaataaacatccagtttcagtgaaaaaa

SEQ ID NO: 99898 - DNA, 401 bp, Homo Sapiens
gaagtaaacaattgaaaatataatcaggctacttaatatacaacatatgtgtgaaacattaaattagtctgaaatgatgagaagattagtgaactagaacactaagcagtaattaattactgtaaagacaaaaggagaaaagttatattaacaaaatctaaaatttacatgtatgacagggagcatgagatggagtaaaacaagtctgattatttttatagaatatattttcaaaatcaaagtcagtattcagagttggtgactcataagtttctaaaattgaaaagcagacataattacttctcagccttttggctaaaatcaagtgaaaaccagatataagtgcttgaattcaaatgtgcagtgttccaaaatgagaaaaataacaaaattaattcctt

SEQ ID NO: 99899 - DNA, 536 bp, Homo Sapiens
agatagctagtctagcatagtcaggctcctgaggatgccagcccttctggtagcactgcaagtgattaaagcttacatgactgcttttcttccacagtgtgatgtatctacttccaggttcttgtataactgccacacgtttctgcttgatatatacctatcaaaagcttgacagtagtaaatacttatgcaggaggggctggccagatgatgagtgagctcatatccttttgatcgcttgtggaattgctttgtactaaactgtgctttgccagtatactattcctgcttttatgccagaggtagcaaattttttgtgtgaaaaatcagaccttggcgatgaccttaaacagcaggatatgaagaactcccacaagcttagcgttccaataatggaacactaggcataaatgggttaactgaagagaatatttgcagtgttaaccctataaaactcacctttataatttctgtgaggaatattgttagaaatgttgtcatacatgaagtgacactatctgtctggaaaaattttc

SEQ ID NO: 99900 - DNA, 758 bp, Homo Sapiens
  misc_feature (699)..(699): n is a, c, g, or t
gcggccgctccaacatcagacctcgtgccgaattcggcacgaggtgttaccattctggtcaccaaacaggagggtcctggcactacccagatttccacagtgctgctaatatcccagctccagccagcaccccatctgcacctgaatcctctaacttcacggtagcacttacagctgaagccatcagcatctggcaggcacacctgagtcaccatgtagcgctgctactggaggtagagacggccctttgagatggtgcccagcaggccaaacccacctgcctctgccaggaacagccaactccatgggaactctatgggagtggcttttaaaaattcagatgagttagaagctttttatcccttcctctcaagaaaatattctttcaccctgtctctcaaaccacctagaactttagaggatccatctttaagggccggtgtggatgaatgagaaaatgcacctttctgacagtatctccactttacttaagaaaactagcaaatatatgaaaagacccttagtaccaaatacactcaattgcctttttaatgaatgtacttgtcttggataggttgctggtaaaccattttaaactattttttatagctgaagttcttcactactataaacatgtcttctgtactataaaatccatttaactggtgttcttaaaatcagagcgtccagaggaaattnttcctaaaactagggttcctgttcctttgtcttctcactcggcactctggcactgctcc

SEQ ID NO: 99901 - DNA, 531 bp, Homo Sapiens
ggcacgaggaacttttttaaaagccagcaggttgcacaaaccaaaaacaaaatattttgccccttaaataggcattttaagaagttttatttcctggtacttaaatattgtgtagagggaaagctagttgtaataatttgtaaaaatgcgtgtatttttaggaatgcgctatttccagtaagggaagtattgacatttttaaggaactgtgctgcattaaaatccacagttgcatgaaacttttaaaagtttaagatataaagtaattgctaaaatttgtgaactactcagaggactcaatgccctaacatgtaggggattgatcattgcgatgtttaggccaggatttctcatgattgtatatggttattgatcatttttaaggggctgaacctgctgcctttatacttttgacacctccctccctccctccctccaaactgtggctgtaaacagtgactctgcatagtcagcgttatacttgatttctttgtgaatgcaaataaaataaaatttgtaagtccaccaaaa

SEQ ID NO: 99902 - DNA, 538 bp, Homo Sapiens
tttataaatttatagggcacaagtgcaattttatgacatgcatagatagggtaatggtcaagtcatggctgttagtgtatccgtcacccaaataacacacagtgtgcccattacataacttccaattatccatccctccccactgcctcacctccaagtccccactgtccaccattcccctctctatgtccatgtgtacacatcatttagcttccacattgagtgagaacatgtggtatctgacccgcagtgtctggctcattttacttaacttgatgacctccagttccatcaatgttgctttgaaagacatgattttattattttttatggctgaatagtattccatgtaatctatatataccacatttcctttatcgtatcttccattaatggacacttaggttgattccatatctttgttattgtgagtagtgctgtgataaacaggagtgcaggtatctttttggtatattgatttcatttcctttgagtaaatgtccagtagtgggattactggatggcatgatagttctct

SEQ ID NO: 99903 - DNA, 548 bp, Homo Sapiens
accattcggacggtggcggagccggtgaccgcgcctggctcggcagggttctctctgcgggtgtgcacagcaaagcttcggcccgtggggccccggggtccgctcagctctacatccaccacgtgcatgtccgtgaggctggtatcagccacgagcaccccaatcaccccatcgaagcccaggctgggggcagccagggcagccgccgccatggtgttggaatttcgcggggcaaaggggcagagcccacggacagggccttcgtagagcacagtgcaaggcccagggctgtgggctgcagccaggggtccctcaagccggaagccatcggggtgtgtggccatggtgacacgaaggctcttgacttgctacctttcactctgtcccccatcgtgccaccagctgcctccagtgtgacgttctcgctcccacgtccgtccctcccgttccccagctcgcgtcagcccaggagaagccttcgaggcctggagaggccaagtgcccccaacatgagccccagcctctgtgccttgagggtgcctggcatc

SEQ ID NO: 99904 - DNA, 533 bp, Homo Sapiens
tttccttggaaattttaaaaatcatccctcaaagcctaagtgaaatttacagaaaatcttcccttatttcttgtttaaagatttcatctttacctcctccgtactttcatagtcatttgtttatcacaataacctaggtaaatttatttccccttctaaattgtgaaaattacagtcaggaactcccccaatcctaataatgacaacttagaaattaatagctatcattacttgaatatctcttaagtgcaaattgttattaagcactttaatacagtttttctaaaagtcacaataactttcttttcaagaaatgcaatctgagagtcagattaagtaatttgttcaaagttccacatgtatacagtgaaggttggattcaaatccagacttgtttgattcttcacccccagcttgccatacttcttagcaaattgtattaaataccttcctagtaggtacataataaaatacatgaacctggttgaaataataaaactctgctacaaaaaagagatactgcttatgtatgt

SEQ ID NO: 99905 - DNA, 463 bp, Homo Sapiens
tactttataaccaaagcaattaaatgatattgggtagggaatgttggccagttttgtttagttttgcatcacattgtcaccagactcactagcccaagtaatcgggcgcccgaagagggagacagagatgtgcagagttgaccagtgtgcggatgataactactgacgaaagagtcatcgactcagttagtggttggatgtagtcacattagtttgcctctccccatctttgtctccctggcaaggagaatatgcgggacatgatgctaagagtcctgggtaaatgtggtgagaatgcacgcgtgcatatgctacacatatgtgcttctcagttgcagaaaatgaactgctttgggagattatcagtagaaagagtgttatcatattggtgctgagtgctatgtgtgcttatacaatttgttcttgtattttaataaactttgaataaaagaataaagctaaa

SEQ ID NO: 99906 - DNA, 633 bp, Homo Sapiens
tttcaacccattaatggtgtaagagtgacttgaaacatcaacatcctgttctttatcagtccccttttccatgtagtacaacttataattctgaatttccccattgccagacactggtgtttcccacgtaacagtgatggaggtaggcgaagctgcatatgcacgaaggttaggtgctgggccagggagctgaacctcaggttgtgtttctactcgcagtggagctgaactctctcctgagccatgcttattttgagccataactctaaagatgtacacggtcgctggcattaggttttgaatggttacttgcatctctcctgggtgactggtattctcaacacgttccctagcaatcccttccttggtgtagaacacagagtaggtaaggttgtctccgtgaggatctgatgcaggtgtccgccacgtcaatttgatgaagcgggtagagaccagggaggccacgacatcccgaggagctgaaggcagtggtcccgttgtggctggtgcatgttcaaggattatcagttgggctccagcttgtgcatctccaacatcagattcagcaatgcactgatagaacacttcatgtgatttcaccagacctcagacttgaagataatgtgcctttaa

SEQ ID NO: 99907 - DNA, 534 bp, Homo Sapiens
catgtttaagtttcagtcatgctgatagatgagggcaaaatttgtttcattttaagagcaggatatattttattataggtatattctacaatgtatttatgcattctcctctcaatgaacatctaagtggcttccagatttttgctattacacacaaggttgtaatttgtttacacaaagcttggggctcaaatccagagatattggattgcaacgtgggtgtcaagattttcaatagttccctggaagaacttaatgggcatccaggcttcctcagtcagactccatccaggccaacttaatcagatttggagggggatgtttaggtattacttttgtgaaagaacccctgaagagattctaacaggagcctaggattgagataagcccctcctctagagaaactcttgcatttgctggacaaggaataatgcgcatgaatgtgtattgtgccatattctagagcagtgattctcatgtacagtcatggcagagaacttctgttctagaatataagcatggtaatggcatttc

SEQ ID NO: 99908 - DNA, 469 bp, Homo Sapiens
tcttaaccctgtccagaaaatctgctgagtcaccgagtatcaatcaagagaaaaataatgcagagctgcaaaatgctaatctccttcctcctgctctccttcctaacagcaagccgactcacagggtactcaaagcccagcggtgcctacctgctgttcttctccacttcgtagaggaaaagctcgctgctgccactgcaaaccctgatgtcaactctactctcacaagctggggaccctatccccagaaatttcacaggaccacacaccagctccacagcctccaccttctcctgctctgcaagccatccttgggtttttttctgcattgcttcaagactaatctaagataaaaatctactctcaaacatcgtagccattagggaactgcaaattaaaaccacaatcagataccaggcacatctataggaatggctaaaataaacattataacattgagtactggcaa

SEQ ID NO: 99909 - DNA, 537 bp, Homo Sapiens
agtatgctaaaatcctagtcactggtgaactttttggaccaagaacctagctaactgtttcatactggattttatttccatttcatgaaacgtttacctcactttttaactcagaggtattttttattttccttcacatgttttctgttactgcctaagtctttttgctggcaaggacaaatcaaagcctgaccttacttagctatcttggttagaattcaaggccaattccttttcaataattccatcctcaacatctctcctgttttcatactttcacctaaactcagtacttattaccttacatgggacagtgtatattaaaggtcctagtaaaatacctggaatataatagtgattcaatccaattaacaaactgatatatgttcaataaactagtcaaattttcaaaatcaacttttttcaaggacaaagaatttggaaatgttatatatctaaggaatttatgaggctatatctaataaattcttcaccagatactcaattcttctacatgctggactttctaaatatctt

SEQ ID NO: 99910 - DNA, 556 bp, Homo Sapiens
caagagctggggtgtgttacatagatcagctctcagaatcacttgatttagagtagaacacttaggctactgatttgaaatggagataagcacttaaacagttttagtgttttcaagtttcacaaatgttacaattctcttctggtgatttatcccttaataatagaataagaggtaaaaatgattgttattagaattaagaaacattctgactaaattaagattgacagatttacatacttgtatggaataaaaacactattttagttagtaggttggtatttcttgattttaaaattcatgatggagtcaaacaaaattattgtgaaaatacttataacactcagtaaagttttttgttttcctttatttttaaaaacttcataaaagtgcattgtatacattgttcatcctagaattgtgtttgtcaaacgtttgtagttttccccatccctcccaaaaaggtttttaattggtgattcagaatatttgtcatctaccaaattaaaaactgcaggtttgcaaacttggcactccaagaaagaaataggtgcca

SEQ ID NO: 99911 - DNA, 220 bp, Homo Sapiens
tgaaaccctgtgagaaatctctatttcctagggtgctgaaattttctattttattacaatcaaaagaattgaactatttatacagtctggtgcagagagggaagttacccctgatttggggcatatggtgaacaacaaaacaattacaaggcaagtatagcactacaggaacatccataaaggacaccttattcacatttaagaagtccaagaaagattt

SEQ ID NO: 99912 - DNA, 544 bp, Homo Sapiens
cacaatctgcaccctggctcctacagcctagataaaggacttgtccttctatacgaagcatgcagatacgacagcaaccaagagaagagtacagtacacagttctgacaggatgcgggcgacagggaggcctgcgggccaggatttcagtttagactactgcccaactggggttgagtgggcaaagcagatgctgattggttgtcttggcacagagaaaaaccaaagcaagaaagctgccagatagacagtcaaagagaatgttctccctcaaattttgctactaacattttttataaaatatttattcagaatgctagctcctaccaaattgctatagctatagaaaatcctaaagaataaaaggatttacattgtaagaaagcccaaaactacaatttggcagaacatctgtagaattataactaatcaaactgtactacggcaacttcaaaaaaccaactgtgcccctagatgagtcaaatgccgccttcaattctccctgacaaaagtaaaataccaaagacatcagcttatgtatcaaa

SEQ ID NO: 99913 - DNA, 522 bp, Homo Sapiens
ggcacgaggagaactttgagagtcttctatttaattgcaagtagtaacagctgcatctgcacagcgctgtctccaatactggttccccacatcaaaggcagagggagaaaacagaaggctgggaaagatcaaagtgacttctaagtcattcaaagtagctaggagcctcccagcgaatagaacccgggtgtcccaagcctagagcatgacctagaacttcgctctgtgggatgatgttagcttgaacttcttgttgggcaatgcataggtgctaggagaatgttgacagtgagtttggggttcgctgggatgggatccgagatgtgggcagaggtggacaccagcaggtggaagaatgtggacaaggtggggggtaggggcagccgccgcttcgccactttccgcagctctggttttgctactgtgctgctctccttgggtgcatcctgtgcctggccacgctgccaccctccttgtcacggtgaccacgattgtatgacaataaaatggacctaatggcca

SEQ ID NO: 99914 - DNA, 313 bp, Homo Sapiens
ctagttaataagagtttaaatgatcaagttaatacatttgtgaggaaaatctcacttagaaatcagagatttttaagtttaggggattagattaaaaataattttatttgaaagttaggcataaaatgtatgtatatttgcatatgtgcatagtttttaaaaaaaactggaaggatgtggtatgcattaaagaaagatactttgtttgctcctgctttcatttctgttgacaagttgccagaattatttgtatagggcctctattttcggaaccatgatataaataaaggattcaaaatgtttccaataaaaa

SEQ ID NO: 99915 - DNA, 382 bp, Homo Sapiens
tagctgattgcattgtgtcaggatctccaataccaggaggcagataatacaaggtgggagtagagactcctgtattattaagtggcattaagtattgtttgtcataagccttttaccgattaagtaattttcaatttatttagagtcttccagaacggtgataacaaatggaaatgggataccatcaaatgcattttctgcacctattcagttaatgtgggttctctcctttaatccattagcgaaatgaatcgctcttattacacatatttgaattcctcaggtaaacccctgcttaatcatgatttaatgtttatttacagttcagcacttaaatttgtaagtgggaagggcctatcattttatcatattattttcatta

SEQ ID NO: 99916 - DNA, 554 bp, Homo Sapiens
gagcccgtatgtgggcagtctgtccttacacaggtttctgtaagaacagattaagctagtttgaaagtcgtgccagattagaaaacttgtaaaaatctaaaacgaaatgttcctcaaaaggatttaagtccacagacaggaggtttactcactgctagtactaatctcaaaaccagcctggtttttcaatttccaatgaaaaagaaacatattagaattggagttccaaaaaaggaagtgtgtattgtttacactttcaaatctataaaagagattatggatgagtccattactttctcagctctagggcagaatcccatgaaataacactggccttaaggtgctcttccctgaaacggcagagagaagaaaaagcatgctgctgctttcctgttaaaggagggctcttagctttccctggcagctagaacagtttcctagaggttagtaccccagtgttctgcaccataaatgagagaataaggaatatacggatgttcaggggagggactgtgaagccaccaagctgaatacggataggtaccatttttttc

SEQ ID NO: 99917 - DNA, 562 bp, Homo Sapiens
tgcggccgccgccgccgcccgcaggctgccgagcgcacagctccccggttcgccgactcgtgcgcgcgcgcacccgggcagggcgggggcttctggagagtggggaccgcgcgggatggaggcagtcaaggcatgctggctgcggccggcgctggagggaccctttagttctcagtactccctgagcgggcgggttcgttccatcccggttggcgatgaagacatccttttctgtgtgctcgcggctccgcgctgcgtggccaggaatggctagagggaaaatctggcctggaggctcggattctgagaccttcggagccaggccgggcgtgagcgggcttgggggggttctctgcgtgcaagaattctaacctccccagtcactgcttctaggcccacccgctgctctgttcaaattttattataagaagcatattcatttggctcctggttttccactacctcttcctcttcccaaaacccaggaactcgaaatactggaattcaacgcccccccaccccggttgatccatttaattccttgggtctaaaatagaaatca

SEQ ID NO: 99918 - DNA, 466 bp, Homo Sapiens
agacagtgtttctagaggcacgattacaggcttggttctgtttattgtcgcatcagcccttcagaatgctgtcagcaagactgctcacatttaaaggttgaagctgaagtactcattttacccatagcagaaacttcttacttataaagcaaaatataagttatttaattggaatttctagaaagtattggcaaagatgatgtttcttaaataaaataaatcagaaagaaaaaattacactctgccctgcttcttcctgcccattcatgatagacaatgtttatcttcacagcactcttcaacctcataccagtgggactacgtgttgttgccatccagggagtgaaaacagggttgtatatagccatgaatggagaaggttacctctacccatcagtaagtaagacgccaaagatctcggccattcgttcaatgcatgtaaaataacaatggcagcaacaacaaa

SEQ ID NO: 99919 - DNA, 584 bp, Homo Sapiens
aagaaaccaagaaattaacaactgaaagcattttaatggactatttattaaagtgcaaacaaactcagcaatccttatgtagaccagaagctgcaatatacaatgatgaaaatgaaacgaaaaggaagtccccccatcagactctggacacccaggaatcaaaagagaaaggacttttttggtgactcaatcccagtgtctggtttggggccaatctacaatggatccaaaaggacaaaacatgttacaagcaaatcaacatagttgctgcaggcggaactgagaccagcctctctgggcgatgaaggacaatggtggtagggccacttagagagcagtagggcccaggctggtgcagcctacatggcacaggatatttccctgcaccagtttcccacctgtcacttgcagcatcagagggtgttgcattaactccattttctccagcagccataaaatgaatggcgtttctctccatatttgcccagaagaggcagttatgattccacttctcctacatttaattatttttaattgagaacaactcatgatcacaattcagtcgctccatgagggtatcctca

SEQ ID NO: 99920 - DNA, 608 bp, Homo Sapiens
  misc_feature (118)..(400): n is a, c, g, or t
aaatgatcattggaagctcctgcataccataagctactggaggtcagtatacatatttgtgtgtatcctggagtacctagaatacagtcttccatgtaagaagcattttacttgttgnnnnnnnnnnnnnnnnnnnnnnnnnnnnnnnnnnnnnnnnnnnnnnnnnnnnnnnnnnnnnnnnnnnnnnnnnnnnnnnnnnnnnnnnnnnnnnnnnnnnnnnnnnnnnnnnnnnnnnnnnnnnnnnnnnnnnnnnnnnnnnnnnnnnnnnnnnnnnnnnnnnnnnnnnnnnnnnnnnnnnnnnnnnnnnnnnnnnnnnnnnnnnnnnnnnnnnnnnnnnnnnnnnnnnnnnnnnnnnnnnnnnnnnnnnnnnnnnnnnnnnnnnnnnnnnnnnnnnnnnnnnttcagccttaatagttgtttaatctgaataaataaacaaatgaatttttatataatggaatgttataagtaatataataaacctaatgtatctaatcattaaatattgtatttaaaatattgcttacattgtattatttgttaatatttaaggttgtataagttttgacatgttatgttgagaaattatgccataattaaagaggaaa

SEQ ID NO: 99921 - DNA, 545 bp, Homo Sapiens
  misc_feature (442)..(442): n is a, c, g, or t
gaattcggcacgaggattgcagggaaacttatttgtaaatagcttcctcacctaaactttgacttggcaatcaatactttctactttgtggaggggattaagaatagaatgggcaggatgagaccatgaaaattataatgattcatgtatatatttgtatgatgcttgtaactttgcaaagtcttttttattcattgtctcatttggtcagaacaattttattgaggacatgaatttaacaattagaatttagattttctgactgtagctactaaatgttgtagctactagaccaggtgagctaggtttagagcaaagtatataagccttgtatggactatattagaattttaaaaattgtaattaattccttatcatcattataaaaagcttgatttttttatttgatctaaaaaagcattattccaaagaattttttcanagtagaaatgggagttagttataccagtgttgtttttaactaataaggctattttagaattcagccttgcctgtaaggtctttgagaagggagaggagtaggc

SEQ ID NO: 99922 - DNA, 447 bp, Homo Sapiens
gcaggtgccaccggctcacagcgagtcccaagtcaggtgtcatttccgagattggctgggcccagtggatggcccggcgctggctgcacccgtgtgggatctgagctggggccctgccccgggtgtagccacaacccacgagtgctggtgcttctgcctttggattctgtcagggatgcggcgtgtggacatcctaacatgggagttgttgatatttaatttttctctcatagacactgtggtgttctcatttatttccaggagttttccaagtatcgtacgtttaacgaatggggttggctttttaactttcatttgcagctgctcatcatgacaatcattttctcgccccctaaccaatcagttctaatagcttttcttaaaaagattctcaggggacttaggaatgtaattacctctgagaataaagaacatttccccttgaaa

SEQ ID NO: 99923 - DNA, 498 bp, Homo Sapiens
gctatttttaccctcacaggggataagcctccctgaggctacagaagcaaagcccagagatgggagtcggggagacagagcctcctcatgatgtcacgatgtcacctgagctcctgggtccagcttgtttcatgagctgagactaatgattgtaactgttcgggcacggtgaggcaagaggaacgtacagttacagaatccgtgggcaaagcatctcggggccaggagcgagcctgaaggcactgtgtaggccttgatcagtttagcaatttctacgattctgacatcctctttctgttctttccggactcaggcatccaaggtcacctcattatggctctgtgcgaagacagcaccccaaaggggccatcgatttggaacatctgatcggctttctgagtcagatccactagctcgtaaaatccaataaatgtcaaagatatgtcaggcccattaacctctggaggtctattaaaagactctgcttctgctaaaaaa

SEQ ID NO: 99924 - DNA, 574 bp, Homo Sapiens
ttaattgttgaagatttccccctgtaaagttatagtctaaaattgcaatgttagtctacgatgcttctatcattaaaactatactttctccccaagaatttttacacttctttaattgacccacagcattttcctgatgaagtaatactaaactaaaaccttgaatgcgtataccctctacatcgctcaggctttagataactgggggttagtaatcaatcaccttcatgttttttggcctaggctctgtacatttcagtagtttattcaaagggaatcattcttttcctgagtacaagaaatagtgaatctgactcctcactgaccaaacccctgaccaatgtggcagagtcccctgaacacttctggggtggccatgggtacataccacttaggaggagcatcaaggtccactctctgtacccttaagaagtagcttggcatggtggcgccattctgagcccaggccctccttgggactgagataagatatgacttcagcctgaggccatttctcacacttgaaaaagtaagacactcctatccccatcccattctgatgttggcggccgca

SEQ ID NO: 99925 - DNA, 493 bp, Homo Sapiens
cctgcaaactggcctgcactttatcatttggatttgtgctgcttaatgctcagcgaaaaatgtctagtaaaatgaattatggttgtcaggagagaggttatttcgacttttgaaccaattgcacatttctcattacccaagctgtggtgagatcccaggggctgtggtgaacaaatgatgcttttatagatggtccctagcttacaatgattcaatttacaatgcttcaatttaacaatttgttgacttacaatgggtttatcaggatgtaacccaatgcatttcaacttacgatattttcagtttcgaatgggtttatccagatgtaaccccatcgtaaatggcggagcatctgtacttccttcctctggcagagttccttagagcctgtgccaattacttgaaagtctcattctctgccatttacatgtgtgctattagtagaaccaaatttctaagctgtggcgtgctgaaaataaaatgcttatgaagc

SEQ ID NO: 99926 - DNA, 468 bp, Homo Sapiens
tttcacttctgtggattcaaataattcatttgtatcaacaaacaatgcattattgtcctgtaagcagagggagcttctctagagctgtcttgtaactccttggcttacctagtttggttgataaacaatgactaaatgagcaaatagccaaaaacatgactgcatagaataggccttataatgtgtggccagtttttgtatagagctgttcattccttctcatgttaccacagcaacacaggcagcttttctcagcaactttcagctgcgcacctggagaaagacatatccttcctaactcatgctccaaatacctatcggtccaagtgccattggtgtcttggcctaagatgatttaatagctagcatttgttctgcaaaaatagcactgcttttagtttcttcttcttttgcatttttggcacctgttggctgacagcagtctgcaaaggccgctggagatgctac

SEQ ID NO: 99927 - DNA, 803 bp, Homo Sapiens
taacagcctcccaccccattaagactcaccaggagaggtctgagggccattcagaacccactcctgagtgggtgggtgggtgggactcagtccagagacctaacattcagaatatagcattggttgcctattttgagatggatttaatctcccacagtattcatgagaccatctgatggaatcagatccctgagccaccttgcaggacgttttccccaacctcttacaccctggatgtcactttggaaaccaagcccttggaagcaagtggggtggcatgggagagaagggaggaggtgggcacaggtggtgagcttatgtgtgggcactctactgcctcacagaagccagccaagtgccaaggtcagcttggctggtctgaggccaccttcttagccaaaaacctagggttcattttcaggactttgataatgaacaacaaaatggggacttctttgggcagatgctaggtcagttgttttcacctaatatcctcttttagctgcatgtatatttatttataattataaccctggtggactgcagccttcatctttattgggaatgagtttgttataaatcagaaatgggtccatgatgaccactgttttccaaacccagtctgttccctgctccctcgctggcaagccccaccacacaggagtgaggccaggggctaggagttctaagaacagaggctggggtgagggtggcacccaggcagctgcatctggtctgttttaatttaactgtatttaatttgctttcaaaattaaaagtcaaatacagtttttaacagtcct

SEQ ID NO: 99928 - DNA, 466 bp, Homo Sapiens
tgaacgatactgagctcattcgctacgttaccatcaccaactgcagtccgttggttgtgaagtttcgctggttcttcttggtgaatgatgaggaaaatcagataaggtacccccagcacagaactctcacagaactctgcttttcatttgttttctctttcaggcttttcatggggttttctgtattccatgtactggccattcatgaatattttccattttgaccactaattattgacagaattaacaaggagcttaaaatcacgatccatcctcgatttcctaacaggaaacatagataaaacatctttgaaagtcccaatcaccaccgaattaacaaagcaatatccataagcccactttatttttgagtctagtgataagaccattagaaattcatcactaaaaaataaagtctttgtagaattgtttaaattattattttattgtggtaatatatatacaa

SEQ ID NO: 99929 - DNA, 525 bp, Homo Sapiens
tttggctatagaatcgtcttaagtgcatgagatatacaaacaatacaaacacacccatgaatatatacacataatgtcaccatatcggtaacttgaggttgttcaaaatgtttatatttagaggaaaatataagagattatcatcattaatagctaccaatattaaatacctgtcatttatttttagtaacatctagaatggccttgatcacttaaaacatcttgccccagtcttacacagtccacaaatttttctttctgttcagaatctgcaaagcattactcttactctgtatctagaatctacctgttaacagctcatatgaataattaaagaaggtttaattttggaattgtacttaatccatcttactgctagtcactgttactgtgagatctgcatcagagagttctgacagtagaatcagcaaaatgaaaaacggctcacagcacaaactcttcctgctaggatttatcactacttaaaaatagcaaatggctgctgctagtatcttaaagacttct

SEQ ID NO: 99930 - DNA, 921 bp, Homo Sapiens
  misc_feature (383)..(383): n is a, c, g, or t
tctcatacccagactgaagtaataattggatcatttagttcagtagagcggagcatgctcaacttaatcacagatcgaaccaacagttctttaactattatatcacatctgaaatatctgcattctttattaataaaaagggtgcttatacagggcagaaatataactttttcaagtattttatcattatgatctgaagtactttaaactataaattataaataaattataaaaactagcataagatgcatcttttcttacatgacattgttggaaataagctttaaatacagaattgcaatatcacctgactttatatatgattagcatgtttcactgttgatcatatataaagtcaggtgatataacaattctgtatttanagcttatttccaacaatgtcatgtaagaaaagatgcatcttatgctagtttttataatttatttataatttatagtttaaagtacttcagatcataatgataaaatacttgaaaaagttatatttctgccctgtataagcaccctttttattaataaagaatgcagatatttcagatgtgatataatagttaaagaactgttggtttgatctgtgattaagttgagcatgctccgctctactgaactaaatgatccaattattacttcagtctgggtatgagattccatggacaagtaaggactagattgccaaggaaaagactgtcttgcccttggatccaaaagtttaaattagtgcatacatcatgtcatttcacctcctgttcctaggaactctccattcccaagcattgccagtgttttccagataatcttagctgttgtcttgtgctgtggaaatggaagaaaccatcttcacagactgtaggagaattcaacatataatttcttaataaatactgtttcttttaaaacaaa

SEQ ID NO: 99931 - DNA, 463 bp, Homo Sapiens
  misc_feature (65)..(96): n is a, c, g, or t
aagtgacttccatcggtgtggtttctccaggggtgatcccagggacaccagcttgagaatcaccnnnnnnnnnnnnnnnnnnnnnnnnnnnnnnnncttatcaaatgcagttccttgggaccagcccgtcctttgcttctctcagaacccctgtgagtagatggataatcaacctccttttaccatagatgaaactgaggctcggagaagttaggggacatgcccgagatgatttaattaaataatgacaggcatatcttcaactgctgcagcccctgccctggtcacaggctccctgtggaccccacctgctaaacataaacaaacccatagtgcagcagccacaactcaagctgggaggcctttgtggaggttgatttttatctccccgcagtcaggcacaagtgagagtttcataaatagttctaacaaagctgcctttcacagccagctctttgcactg

SEQ ID NO: 99932 - DNA, 532 bp, Homo Sapiens
  misc_feature (215)..(253): n is a, c, g, or t
ttaaatgtccaatatctgcctgatgtctgtgtttgtgcacattggggccacagtaaataggctaaaaggcagtcccacctgcttaaaacacacgcaggcttgtcagttggccttttcaaaagtgcacatcagtgtcatctgtgacttcagagatgggtgatatatatttaaaaacaggtccttagtttggaaaggcatgcagttatgggcaaggnnnnnnnnnnnnnnnnnnnnnnnnnnnnnnnnnnnnnnngtctctgaagtgatagtgaagacagatcgcacccgactgtacttacttcccccttgctttgcgattgctttacatgatgaaggttacatgtagtgccattgcccatccatgcccatattcatgcccattccactcataggtcctgcaggccggatccccatgtgttgctgaccatccaacacaaagctccccatgggctgaccctctggactatatgctgctccttggctcactgaaggatcaagaagaaaacctgattgtggtcattcgaggacacag

SEQ ID NO: 99933 - DNA, 468 bp, Homo Sapiens
cacacacaagtaccccaaaaggccattatggtctagaataggtttcatagagaggattactaccacctgtgattatatggtatatgaaacatgagattttgtaacctggacattgcttttagctctgttggaaatggtcagtagagcaatttctgaatattttgatggtacggtgttgatggcatcagtccttttctgtggctttcagcccaacttaatacaagaggagttaaaaatagcacccaaaaggggtagctagagcaccctcaccatgcactaaagataaatctaaaaggtgttcaagtacattgaatcaagatgagtaatccaacttctatgttatgtaggatggatggagcacacaaattcttgcaaacattgtagaggtttttttaaacttcatccactaaggatttttttataataattacttttgaaaataaaatctcaactatttaacaagttaaa

SEQ ID NO: 99934 - DNA, 687 bp, Homo Sapiens
aagaaaattgttccaactaccacaaaaagaccacacagtggaccacgagccaacccaggcgctggaagactgaataatgaaaccagacccagtgttcaagaggactcacaagccttcaatcctgataatccttatcatcaggaaggggaaagcatgacattcgaccctagactggatcacgaaggaatctgttgtatagaatgtaggcggagctacacccactgccagaagatctgtgaacccctggggggctattacccatggccttataattatcaaggctgccgttcggcctgcagagtcatcatgccatgtagctggtgggtggcccgtatcttgggcatggtgtgaaatcacttcatatatcatgtgctgtaaaataagaactagctgaagagacaaccaaagaagcattaaggcaggttgatgctgatgggaccataaaatatttttacactcaacctgagcggttattcttgacactcttaacagaattttttcaattgttttccagaactttagtatatgcaaatgtactgaaagggtagttcaagtctaaaatgccataacccctttattatttgttattttttatttgcattgctttgccataagtcttcccttgcttgtatcttccaaagctattttgaaataaacatgaaaatttacagtttgccaaaaatctca

SEQ ID NO: 99935 - DNA, 924 bp, Homo Sapiens
gaggagttcagtttagaagagatcaagcaggcaactggaatagaggatggagagttaaggagaacactgcagtcattagcctgtggcaaagctagagttctggcgaacaatccaaagggcaaagacattgaagatggtgacaagttcatttgtaatgatgatttcaaacataaacttttcaggataaagatcaatcaaatccagatgaaagaaacggttgaagaacaagcaagcactacagaaagagtatttcaagacagacagtatcaaattgatgctgcaattgttcgaattatgaagatgagaaagacacttagccacaatctccttgtttcagaagtgtacaaccagttgaaatttccagtaaagcctgctgatcttaagaagagaatagaatctttaattgaccgggactacatggaaagagataaagaaaatccaaaccagtacaactatattgcatagaatgttggccttgcagcatttggtgtcatatgcagtagccagtggataaactaacctgttgattcaatattatttgactccttttttactaccgatgaccaaatgaagcagtgtaattaatggaaatagttgagtggactttttctcagtggttaacatgcccattttaaagagtaatacttacctttaagaagaacgctgttgaactctttgcatgttatttagtatgatgtgcagaaaacacttaagaacgtacctggtcttcatgaattcctctttggaactgggaaagagatccctgtggctattaaaaaggggggagggttcttacacaccattaattatgaagcaaaaggtttatttgcttaaaatgtcatttaaagatacttaaactgcatgcaaactttatttactgtacagagttctggatgtatttatcaaatagaaaaaccacccttg

SEQ ID NO: 99936 - DNA, 510 bp, Homo Sapiens
ctgggattaatctccaagctgctgattacatcgtgcacgtttgatactgtcactttcatgatgttaaccaatatcacgaaaatgaaaatttcatcaggaaaagcaactcagtcccaagagtttttcagtgagctcattctttaacaaatcgctcctgtgcaggcattgacagctgtgtcatgacagctgcctgaccatagtaaggtgttaccaattctaaaatgcattccagttttcagagatgttttgaaagagatgatggaagattcagaggtagagaatagataccaaatctatagactatttatatcccttaataaaatgctaggaaaaaacagaaatcaaaattataatagaaaataattttaagccaaggaatatttgaaccctaccgatcaaaagtactcttcaagaagcattatttggctctgggtgtctaaggtgggaggactgcttcaggccaggagttcaacaccactttgggcaatataatgagatctcacctctact

SEQ ID NO: 99937 - DNA, 413 bp, Homo Sapiens
agaagcatttacagaggaaggacagtgtagattcatgaaaactaaggaaggagatttgaaacaggaagacttgattcacagttttaaaggctgcaaaggaggtaaattgaaaaaaagactaagaggccatgtgaaggtcatcaagcatcatccagagagaaattccgcagagcaatcagtgcaaaatccatgttttcattaccaaaaaccaaaaactttatcacaatatgatatgaacttacctatatgaagtctttcagtggccccaaaacaaatcatatatatttaatgaatagccattattgaaaaaatatatactaaaaagtaactacactggaaaacccatgatgtattgttactattgtaattgggagagaagtcagatgttggaatattttaggaatgaaataggt

SEQ ID NO: 99938 - DNA, 527 bp, Homo Sapiens
agattgctaataacacttaaaaggtaacttccacaaagctagaatttcagtgtggattggcctaagggtcagaaactcctgaggattctagtcttagggggacctttaaacttctgtgggcttgagccccaggaaccccagaaggttctcccagtgaagatgtgtgaaactcccggatggctctgctggagcaagggaagagtaatcattgtgaaatacacctagagccttctccagaacaaagaccttcctaggaccttatcctagctgggggaaagtcatttctcccactggagcaagccccttgagtctcctaggctcacatgagggagaaataaaaattcatagtcaacaagaatcaagactttagggaaatacatctggaatgctatatccagggaggggaataggaagcagggagggggaaaaactattccactagagacacccttaagagagtcacagcctaaagatacagacctactaaatactaaagactaagaaacttctaatattgaaatgcaaag

SEQ ID NO: 99939 - DNA, 357 bp, Homo Sapiens
tttaaagtcagaatgttaacagctgtgatatatcctgcagggcttttgcagtttcttctgttctgtgttctgaaatcctgggtagagaatggctgaggaggagattaccagagaagttgctttgctcagtgctttgccccaggattgcctcaaatctgagtggacttcatcctttgcggcggctctgagcctggcccatcttcctattcccacgtgtagctagtgtctagtgtcagctttgctcaatgtggtggaaacattttgcagaactgttgtagaaagctgccttatagttggcttgacaaagcataattctctcataacaaactttcaaatcattacagtagcttagctact

SEQ ID NO: 99940 - DNA, 284 bp, Homo Sapiens
agtctcttcttctcactctgggaagttaatgactacacttagaagagaaacagtacttggagaccagatctggggtcccaggaagcagaacgggctgggccaggaagagcagctcaaggtgcagcagtgtggggagccttcgagctccacttctgctcactagagttaatgtgtgctactgccaggcagcaactgctgacaactcgcctggggtgctgcaaatgctccctgcaggaggtgaaacttcagcatcaaagaattaatgaaacattacatggataagc

SEQ ID NO: 99941 - DNA, 380 bp, Homo Sapiens
tatactaatttcattatcaaagaacttaacattttttggttcatgatcatcttcccagtaccacagccataatggattattttaaggattggtttgactttttcaatgcaagctgatggtgtgtgcatttggtcacaatgacatttcagacttaggcctcttcttttaccacagttcttttctctgaagcttcccttgtaccccatacacaagtatttgctccagttgctggaagccagtactctacttaaattccttcatgggtctggatttattcaaacttgtattagagctgcttaattatctgccttcaggctagactgtgagctccttaagggcaagggacttagcaatgtgtgtgtatatcccaccatgctttg

SEQ ID NO: 99942 - DNA, 458 bp, Homo Sapiens
taggaggtacccacaaatgatggttcccagtcaacaaatatccatttcccttttattaggggcagtgttacatgactctgtgtgaatactgacagcattcagagagcaatctgacctctgttctccagaagcatgcaatctaggcatcggcacagcaccaaagcagagaaagagcatgatgtgtaattaagcttccaatgcatagtgtggatggtgactccaggggaattgttctttgggttataacttctttagtgggagaaagttcccaccacacatcttggagatcaggctcagagacactaagtgacttgtccaaagccatacaacaggccagcagtggagctcaagttagcttcaaaagggcctctgaaggattctgccagaagaggagctgcttaatatgttagcatgagcttgaaataataataataaagattaatagtaatgctaaaaaa

SEQ ID NO: 99943 - DNA, 236 bp, Homo Sapiens
aacaaagacgtttcatctaaattgggtttcatatggaaattagtctcactcaaagtcctccaggccacgagtaagccgggctcacgtggggtgaggtggccactctatcagatgttgcttctggcatgggcctcttagacaacagccaccaatgctggggttcacactgtctctcttggttcagcatcctcagagtttaatgcaagggagtgcttggagccccctccctttttaaa

SEQ ID NO: 99944 - DNA, 456 bp, Homo Sapiens
ctgttttaaggtagagggggctgcatgagaaggaatgcacatggctttgaggagctgagagaggccttggctaacagcaaaggagctgggaactgcagtcctacagccacaggaactgaattcagcccataagctcattcataggcttggaaaggcattcatctccagtctccagataagacccagcctggccaacactttgaatccagccttgtgagaccctaagccgagaactcacttaagcctgcttggacttctgacctacagaactatgagataataaatcagtggtgttttaagctgctaaatttgtggcaatttgttatgtaggaataggaaatgaatacagtattttaaaagaggtaaagaggaaatcttcatacttgattccctgtagtatgctggatatttcttggtaaatgcatgaataaagtctttagtagcaagtcaaaaaaa

SEQ ID NO: 99945 - DNA, 701 bp, Homo Sapiens
ggacagggcgccgagatgtggcggggcgcgggcgcggctcggggacgcgcttcctggtgctgggccctggcgctgctttggctcgcggtggttccgggctggtcccgggtctcgggcatcccctcccggcgccactggccggtgccctacaagcgttttgacttccgtccaaaacctgatccttattgtcaagctaagtatactttctgtccaactggctcacctatcccagttatggagggtgatgatgacattgaagtttttcgattacaagccccagtatgggaatttaaatatggagacctcctgggacacttgaaaattatgcatgatgccattggattcagaagtacattaactggcaagaactacacaatggaatggtatgaacttttccaacttggcaactgtacatttccccatctccgacctgaaatggatgcccctttctggtgtaatcaaggcgctgcctgcttttttgagggaattgatgatgttcactggaaggaaaatgggacattagttcaagtagcaactatatcaggtaagttgtgaaaatatagcaatatttgatcattgcatcaaaaaccaaatgaaagaaattgttatacttccattgaaacatttcagtaatgttttacttagaggtcatttgtaaaatgtactcttggaaccattaaactttgggaatttttttcaaa

SEQ ID NO: 99946 - DNA, 305 bp, Homo Sapiens
attgtcccagtttgtaaaaggtagtctaataagtggcctaagtgaatgtgacaacacttcattgaaagcaatcttaggtttttccaactatagtcaataataacttaattgtacattctaaaataactcaaagagtgtaattgcaccgcttgtaacttaaaggataaatgcataaggggatggatgcctcattctccatgatgtgcttatttcacattgcatgcctgtatcaaaacattacatttatcccataatatacacacttactatgtaccccccaaaaataaacattaaaattaagtttt

SEQ ID NO: 99947 - DNA, 447 bp, Homo Sapiens
tgcggccgcccacggccccgcgcccacgtcacgcgcccgccgcgcatacctacataaggcagccggggcgactggcgcggcgaggcccccgatgaacagggcgggctggacggggctaagagcggcacttggtgttcgggagaggctagtccgaaccgcgctccctcccctccagagggctccgtggaaaacgcgcgagccagctggcggcgtgtgcacgtggtgctgggcttgggaatattcacagtctccctagttagtaaaagggacaggcggggcgtatgtcctttccaagacaaatgcaaagcaccagtgacggatttcatgctatgtgtccgacattgagctttcaagtataactcctaaaaaaccagaactgtgaaccacgctagacctaaattccccattctcaggagactgacggaaaccaagtgacaaagtgtcctt

SEQ ID NO: 99948 - DNA, 813 bp, Homo Sapiens
tttctcctacatcaaacttccctaaattatagaaaagtcacaatgttaccaaacatattcacaaaacacatataatcttgaatccaaatttcagttacagcagaaaaaataaaactctagatcaatctcaatcgtgtaaataaattcagatttccaatctaagagtctcaatttgacatacttctttctctctcttctttcaaaccaggagaaatataaatatgagccacaaccttacaaaagctagaaaatatttacaattccacacaacaacacatgaagaaaaccttctggacatcaaaagtttaaaccagtcaagactgaacaccaagataaagtgcatgcctctgaagagcttgagctagtcaagaagcccagaaatccctaaaagaggtgtgtatactgaggactgaggatcaaaacctgtgatctttacttggaacagaaatattgcagcatgtgaaccctccacagagtgacagagggaaaggagtttaaagggaaacatgcaaatgtatcacctttggaataattaggacacgtgtgtggtgtaatgaaagaaggcaaaaagatggggaagaagccagacagatggcaattttcattctattatgaaaagaaaaggataagtcacaagtcacatgatgaaattaacaactatgaatccactctaagccatagtcaatcctatagcctaggagtcattctaacagatgagagtgttttggagacaagattccaaaactcgtctgccttccatcatacttactacccccagctcctcctccacaatatcctttcacaagtatctag

SEQ ID NO: 99949 - DNA, 611 bp, Homo Sapiens
gatttgattccgtcagaagagactgtaatccgtgtcgtcagcctgggagccttccccagtgtaatgtagctttctctcttaccttctggaagagggaatgtttcatttattactgtttgattttcttgtatctggttctactcccaggatgaaattatccaactacatatatatttagaggaagaaagtgaaggggaaatttaaaatgtttacggcgcttaattgcctggaaatgaaatgaaatcaaatttatcagtttttttccccctaattacccaaaagatcttttgcaaactatgttacatgaatgcttctgcctctttaagacaaagaagaatgtcacccaaaattgtcatttttttcttaatgttcatcataaaagtcctaaaagagtaactgtaattggatgtttattgtttttatctaaagtaaggtgtatgtgtttgagacaagctggttttgttgataaagagatgttaaataattgtgaagccagatatgcaatgtgtatctaaaaagcaaggaatttgcagccgttttacaaatatctgtggaacatgtaaatactgtcaaatggaaaataaaataagttataatttttgtgaatttcc

SEQ ID NO: 99950 - DNA, 533 bp, Homo Sapiens
ccggtcaggagagtaatggactttctgtgagtcacaatgagcacaactgttgcattagggtgacagtatctcctactgcagccaacttccctgaatagaaaaccactggatcctgtctttcaggaagcctctggatccagtcttatctcttagagtggtctatcttcccaggcacaaatagcaaactcgtcggtttataatctatagcaaaaaattcatattctcacattttaaatgtagtgttacctgtactataaacaatgttgtattagccagacttcagctattttggggtgcagtatgttaaacaaaagaaacaagtctcacttgaaaggatttcatttgaggaggggggactttggtctctagaggaaactggtgtaatatttctatattaatacaaggactgtagctcaagaaaataataatggctacagataaagatctggaaatatatacaattaattggagccataggaaagatggaataaagtggggctggaagaaaagggggctgatagtataattctaag

SEQ ID NO: 99951 - DNA, 483 bp, Homo Sapiens
ggaaggtctaaaaaactatcatagtcaagagaagcctaaggagacatggcaatcaaataaaatgtaatgtcctggatgagaacctggaacagaaaataactaatgtttttatctaatctgagtgaactattgacttcagttaataatgtaacatggttcattaattgtaacatgtgtaccatactaataagggaaactgggtggagtgagggggtgtgtaggaactctgtattattttctccattttttgtacatataaactgtcctaaaatctgttttttaatgaaaaatctacagaaattaacgaaataatagcaaaatattttaaacaactctatcccactaaattgaaaaaaacttatggaaaatggacaaacacctggagaaactgactcgagaagaaatagaaaatttgaatattgctgtattcattaaagaaataaaaggtatcattaaaacctttctgcagtgaaaaaacaaaaa

SEQ ID NO: 99952 - DNA, 725 bp, Homo Sapiens
  misc_feature (267)..(275): n is a, c, g, or t
ccgacagaatgatgggcagctgacctggcctcagagagagcttccccacagagtaaaagtcagagaagcagctatgtgagcatgagaatcgacaccaccgccattgataaatactccaggatcatctttccagcagcatacattttattcaatttaatatactggtctattttctcctagatgcttgtaattctacaaatttcacatttccatggcatgcactacagaaataactgtataatgaaaaagtatttaaggatatggttnnnnnnnnntcccaggacccacccatgttttcactatcccttctgcagctttccaaagctacattgacgagacacttactggtttaatttgcacttattaaccatctattgaatacacagcattatattaggtgctgcaggaaatacgacactgtagcgactgatgttagttgttacccagatcccctggaaaagcacactaccagtgttgtgggcacatttagttccacccgttagacccttgatgctattcacatgaataatttattttcctcaagtgtcattacattgttcaggctacgtgaacttggaagcacctacaggccatttgcatgaaattcacatgcacctaaatcctcactttgacagaaactcatgcttcagtttataacctattacctattttgtatgcgactccacctccgcatgtttattttaataaaaggcaatgaggacaaa

SEQ ID NO: 99953 - DNA, 879 bp, Homo Sapiens
  misc_feature (703)..(703): n is a, c, g, or t
aaactgtgggtgtgaaagacctccccaaagcatcagtttgtctttgctcagctattagagcagatatccagccacaagcccttgtatttctcagaacggattggacagaagcctgtctgggtcctaaatctagagggatgcataccaagctctctcagggacccaggtaaagtaactttccttagacctgagatgggttgagacccacaccacattgataattgtggccacatatcctactagaattctctctggcctctcaacctttttcgtagactgaaagtcatacactggtttctagacagttgctttgcaagacctgctttggtggtcttgaaccttactttatgatataggagtaactggcacttgttgctcagccaaaactgagcggtgaaggatcccatttttacatcctgttacacatgcttcaaagaaatggtcagcacaaaaaagcccactcataagacagtcagtaagcatggtatagctcctgcacattcagatccctagagaatgaagagctgttttatctctccaaagtttgcttttttcttggtatggtcatcgacgttctccagatgccacaggttggagagataaaggtgaggggctgccctcaagtggtcttacaggcagaaactcctaaaagtggatggagtgaaagaacaggaaaggacagtgtaagagctcattggagacncttcccagaagcccaggggtgaagggcagtgagtgctggaggcccgtgtcagcagaggggccaagtgctaccgaatgtgaatgtggatgatcatctttaatgtgaccctatgtgttctgtattcccggtacgcggtgccatattttccttcagataaattgaacttaattaactcc

SEQ ID NO: 99954 - DNA, 378 bp, Homo Sapiens
agcccagacctctgaacagaagaaggagtcatggagaaacccagaagaatgaggtgtcacaggcaaagaaaaattggatgctccggaaggagagaggtctgtctcacgaagagagataaaagcagctgggaccacatagagattttgtgaagctgtcccattcaaagccacccccagaggcccggaggagaccacaaagctgcgaacacagccgggacctgcccactgacacactgaagagtcaacacgattcaggaaagcactttcaaagagtgttttatcttggacagataatattccgttttgtttctgagaggcaatgacaatctctagttcgattgtaaaactatttccttcaaaatatacatttttatctat

SEQ ID NO: 99955 - DNA, 498 bp, Homo Sapiens
  misc_feature (174)..(174): n is a, c, g, or t
  misc_feature (194)..(195): n is a, c, g, or t
  misc_feature (213)..(230): n is a, c, g, or t
aaagttcattattttttattgcttttattttcatcacagcatagggtcagggactggcatcttcagatgtttaaaacacttatttaggtagcattattttttataaaggacacgatttcctaaaaccgccagaaaggctattggaaaactcagttactagcctgggaaagaganacgcatttaaactctaatanncgattatacctccagcannnnnnnnnnnnnnnnnnatgggattggaaaagggttgagtttacagaagagagagagcagagaagggtgggtggaaggtggggaaggcgaaggagaggcagggaataggaagttctcggcaatccccgggattaaggtaaacgccggagctcggcggacgcaggaagctcccttacctttctctctaagccccgtttgcacctgatctgcaaccataaatacttcgtggtgcttagtgtgcagccaaacgatggccaaatgttaaacaattcttcacgctccctc

SEQ ID NO: 99956 - DNA, 569 bp, Homo Sapiens
tggcacatctggcagtgtctacagacagttttggtggttgcaattgggaagatcttacaggcatctattgagtagaagttgaagatgctgcaaaatactctaggacagactcccttcctacccaacaaaaaattacctggccccaaataccactattacagagtttgagaaatcctgctttataataaagctcacactttgcaagcctcactaaggcactcagaacttccattcagcttttaagtcccactcttatatatgagtagaccagcaaggattaccaagctgaggagagcctttaacacaatgtatagaggtcaaaacaaatagagcagcaaaagcagcttggaggaaactaactgcaaggagaataaaacttttaaaaagtgaacatatccgcagagagataggaagagatattgtaaccatgaaataatatcaggatgttattattttcaaagaaaggtattcttagcagaacaaaagagagctattggaattttaaagctattaccagaaatgaaaaacccagtagaagtgtcggaagataaaggtgaagaaatctctca

SEQ ID NO: 99957 - DNA, 895 bp, Homo Sapiens
tattctgcaccgaacaaggaacagaaattattgcatctgtggaacatatatctggagttactatactttactgaagagcaaggcataaatttagactaaaatccatccagattacactcattctttaggctactcctggatacttcatttaaatttgattttcgaggtagtgagatgtcggcaaggtttgtcctgtatattaggaataaaggaaaagttctaaactgcctctgcaatgacttgtagtcagtggaagagtatcactttcccctgatcatgaccactaaactgtaaattgatataaattagttttctctcgagttacacccaagtaatgaagacttaagagaaccttggttgaaataaatttccaatagtttggagactcataaataccatgcaggtgtaaccactgccaataggctgtttctatgcttatttcctattttgatttttactttgaagataggaatatctaaattatatctctagggagaaaatgttgtaaaaaattaaaagtacatccctgattgtaaaataaagttcaaaaaactgatttcagaaagtctcaactaccaaatgttttcaatatattagttttgagatgctaggattatactgtgattcttatgtttatagtaaagtctggaaagcagaaggatagtttttttagcctggaaacttatttatgttgccttggtgagtcttctatcattttttaaaaatttagcttattgaactgtaaaatagcttttctagtatgagagatgttttgaatttaaaaaatgaaatgcagtttttcaaaaataaatttcctttggaaattcttgcatatcaatttagtaaggttttataaaattttacaatttgataaagtatcacatctagaaaaaaa

SEQ ID NO: 99958 - DNA, 372 bp, Homo Sapiens
tctcaagaaaaggaaagggaggctgagcagtggctgaagcgatgcagccttgagacacgctgtgagcatcccatccgccgccccagcgctgctggtagccaggggaggggtctgcacagcgagaagtactgtgatgactttgagccgttgacatgtatgtcttcagatgcctttctgcctctgtcgattttagggtatggatattaggagccataacttttaatcttgttctctgaacgtagagataagctgctataaagccagtagatgttaaactgaagagaaattattcccacctgctatgagtcaggcttaaggaatctcttcaatagtgtctctttagtaaaataccaaacatgtctttgtaaaaaa

SEQ ID NO: 99959 - DNA, 243 bp, Homo Sapiens
aatcacgcatttggtagagtctaaatggataaaatgcaaggcttgctttccccttgggtgctggcctcaatgtcagaccccacgcgctgccccttcctggcctgaccccagacgcagtgcctggcagtccagaggcagtgggatccctgagtgctgaatgctcgcctgcagagcagcccagaaagagccctgactggggagagaacattttagaatctctagtgtaaaagacatcaacgtgct

SEQ ID NO: 99960 - DNA, 448 bp, Homo Sapiens
aaattccctgctgctcttaaatgtgccaaagccaatttcttctgtatgtgtatttttgagaaacttatgtcacactgaactgactgaagggatggcattgaaatctagcttgccctgatttatgtgtctatttcacagagactcagagatgtagttcagaaaatgcagggcctggcagggctggagacttcagagttcaaactgaagctttcagttggggaataataataatcagatgccctcacccttgtctaggtaatggccgcaaaatccatccgcatgtattattctgcactaatatggttaggaataacaacctgaaatggaaatgtctgcctcagagcaattacagttaatgcttattcaggttttagttgtttttccattaaaatgcaatgagctagtgaaagaacagcatctctgttcactagctcattgcattttaatg

SEQ ID NO: 99961 - DNA, 576 bp, Homo Sapiens
aactttttttagagcatttagaaaagccaagataaaaaccacaaaaccttaccatggaagtttaggggtcatctagacagagtccctcaagaactaattaatttacttaattttacccagaagtaggattagaattcactcagcaaatactatgcacctgttctgggtcaggcattgttctaggtgctggagatagagcagtgaacaaataagctattcttactctcagcatgatgccttttccagtggactacttcacagcctatcatattgagaaatataaataattggagtaaaacgtgattaggaaactgtctgcctgtgagacaattttctgaaccacagttattaggatagcgatagaatccaggtcagggtaaaaatatttcctctgaaaacgttgtaggaatagaaaatgaatgtaatattcataagatataccattgtatgttcattacatacattaaagataacatcagacctttgaatactcatggtgttaggtactgaaaaacattgttagcactaaaatacaaaatccctatccacagaatacagctctcagaataaaagaaa

SEQ ID NO: 99962 - DNA, 273 bp, Homo Sapiens
tgcggccgccgagatcgtgctggccacgctgcgagagtggctggagcagcacaaggacaaggtggaccggctgatcatctgcgtgttcctcgagaaggacgaggacatctaccggagccggctcccccactacttccccgtggcctgaggctcccgcagcccaccctgaccgggactgacccgccttcgggaccccgctcccagctctgagaggtcgccaaagcctgcagcctggcctgggcctggccaccccttctttccctccgcgccccg

SEQ ID NO: 99963 - DNA, 552 bp, Homo Sapiens
tttcttgtccagctgttcacagttttatttttatatagatggtgatataaatatttccaaatgcatttgtaaacattctaaatattctcaagtcatgttcaatgtttcctaaaccttcaattttggccaaagtccccaaacacatcattgccacactctgaagtagagaaagaaaatttaggggccagttctcaaggaacacaggtcctttatttttattttaactaagttgaagacccactcaaaaagctcttgtggttttatgttcttgacctttcaactggagtcctctcattcagcaggtggcccgtgagacacagaatacatgtctgtttgctaaagtaaaattactgtaactcagtccgattattggtgacggaagtgtcatttaaggggatctatgttttgaaccttgcagtctattttataatcttttaaaagtttctcactttaaaacatgtatacaggtatgcacactctacacatatatttccatatatttaatattccataaattctgaaataatttcaagcaaattatcacaaataatt

SEQ ID NO: 99964 - DNA, 475 bp, Homo Sapiens
tattaaagaatgcaagcaagcacagaaggatcatgtgtagtgctcagtaacatccatacagtactaaaaatagaaaaatataaatgaaatttcacagaaagcagcctccctcacagaaacacaggcaaggtgctgccgagcccaccatgcgatgccacgtgccacctgcctggccacgcttctccccattacaaacaaaaacacaagcttctctctacacccgtttcaaatacagcaccaagaacggagaccccttccacagcagcgacactcctgaccaccactttgggtgctttccagccacataaatgacagacaaccccggtccccacggggttggctggctactggcccccgactctccatcgcttcagcgaatgtgggtgagaaaattaggcagtgaagcaataaagacctcacctttactccctcagatacacggagggatgaggtggacagacacgcaggcggccgc

SEQ ID NO: 99965 - DNA, 432 bp, Homo Sapiens
agaggctggctggactgagggcagacaggatgctggcgtcccagagcaagctggaggctcccacctcttcgggcagttcccccaagctaagcttcctgctttcctgacacctctggggaaaaggagttgagagagactccagaagcacttccaagtgacctgcctggaagtgaccaggggaaacggtccaagacgagtacaccgagtttctccacgaggcacagagctgagtaggcaacctggcacgggggcatgtggaaggagctgtgggaaacagccttgggccttctggggaggtctgtgcaggctcctctggcctgtaggccccgagttctggtctggaaggtcccctttcctggagcacaggggagcctgaagtccaggcctctgagatgatagtcataattaaagctgctgttgactgaaaaaaaa

SEQ ID NO: 99966 - DNA, 523 bp, Homo Sapiens
  misc_feature (452)..(460): n is a, c, g, or t
  misc_feature (462)..(462): n is a, c, g, or t
ctccaacccacccgtctttatcactttttgaaaaaaataagccccaaacaacaacaaaaacccacacaaaccaacccagaaactgctaacctgaacgccagagattttttggctgcgggagtgaatagactgcagggaaagaagggaagagatgctaggaggtctcaaactccccagatttgcaaacaagtgctcaaaggcgaatgcttcccctagacatgaaggaaggcaggatcagtactcctggtggggtgtatgttggtgggggctgtttcaaaacacacttcaaaaagcatttttgggccactggaagcacttggtgcagcgaattgaaaagaagagaagccagacaggagaaagatcttccagcctgcaggggaatgggccagggggtggaagccattcctcaccggatctctgccctctccccaccagcacaccccgaccccgannnnnnnnncncacgtcttcatctctgttgggacttttccaagaagtgagtgaagaagacaggacaaatgag

SEQ ID NO: 99967 - DNA, 416 bp, Homo Sapiens
gaaattgatcatacctacagtaacccctcactcagataaatatttcccccaagacagccaacagagacccttagagacactaacttaatgctaaccgagcaataaatgcagcgtacccatacccaagcatacagacccacccacccagtcccaaggctctgtcccctgccctaaggtgtctctctgcagcgtaccccctccccaatacccactgagggtccgtcagccaaagaggtgagtgtcttaacacagagaagcagaatctatccgactccttcaggaaggggacctggcaggaaggagccccgtccctggcgcttgttctgggagttccgtccaccccctcccctacctgccaagagctgcatccaggcgcagatcttgtagaccgtagccgtgttgcagaagaagaaaag

SEQ ID NO: 99968 - DNA, 533 bp, Homo Sapiens
  misc_feature (42)..(92): n is a, c, g, or t
ttctatgtgctatcttacttaattctcacaaaccaccacgannnnnnnnnnnnnnnnnnnnnnnnnnnnnnnnnnnnnnnnnnnnnnnnnnnttcagtggtgaagacaaatgtgtctcttctagggaaccacactaccttattctcccaccccggcccgggggtgtgtaatgagggactcctatcgaagtcagctgtaagtctatcttgcctattcattatacaggctgtcgtcttcgcgcagtaaggataatatgtgttttgattcaaagaccatccagcttgcacactgtgatgaacagagatcaggagctcatgaaggcaagggcaagtcttatttacctttatctccccgaacctagaagcgaggtcaaacagaagcgctcggggtagcaagaaggctttgtagatattgaaatgtgaatgcatgcccagcccttaccaggtgcgtgaccttaggaaatgcacttgtcctttctgtgccttaattttttcaccaacctgctaatgtatgttcctcagtgaaaatttaaa

SEQ ID NO: 99969 - DNA, 686 bp, Homo Sapiens
  misc_feature (621)..(634): n is a, c, g, or t
aaaattacaagaatgaagtactcttcatttttccaaacaactcatagtaggaatactttcagtaaaattcttctagaggattagttcacaggtctgtgagaaaaccagtcatgaagatggcattatcatgtaggttaaataggaaatcattcatattaaattttgcttttatgttttaacatatattgttttcaagataccttgttacaatataaaagaagcgactaagttccaaggtcatgtaaattttaattttatccatgagcaaaaggagggctgctccaagtaaaataggactgatttttgttttgggtcgacccaatttctcctacaaataggtgccaacttctctgaaaattgagactccgagctcggctttactttgggcaaaacacaattattttggggctctgagatagagaagtgagactttaatccaaaccttccagggaaagacatcagatttcatttttagccctccgttcctcccacactcagaatttttcttgcctgacagttatggaagtcttttgaaaaagtcctcattttggcattatcttgacaaccgatgatacctcatgcaaatctagatagagggggaaagaatattataacatggannnnnnnnnnnnnncctgttcactaagttttttaactgttaaaaaattaaataattctcatttctt

SEQ ID NO: 99970 - DNA, 487 bp, Homo Sapiens
agaatgaaactggcagccatagaatccgggccttgatgcccaggcctcgccatgcatacctgctggccggcatctccctgagacccgtctggcacaggcaacggcagggcccggcccttggagcacagggatggcagagcagggtcatcgaagcaggtggcgtgcagacagtggcttctccgcaagagctcctggctctcagggagctgagggctcctcaatggggaattctggctgagctccaggggaaagcgggttggaggcctggctcctccgcccccatctcctctgccccaaccctggaagggggtcagatatcaatgctaacatttgtgctgactcaattaattcaaacgattcacaaaaacaaacttgcttaaagtattaatttcctaaaaagaactaaaatgagttcaaataattcacataattaaattattttaattgttaatttaattaaaacatctcagttttcaaagcaaaaaaa

SEQ ID NO: 99971 - DNA, 431 bp, Homo Sapiens
tactgggttccctcctctaccaaagccctcagagatcaaataatgtaacacctctggaatattatgtagtgtggatgaagggtacctaaatctactactaccaagaagttccacttcaagatttctcctctggcaccaggaagcccagttcccccttccatgtttctgcctgctgctttccacctgccacctcccatttacaggagacttgtgaggtatccctccccttcatgttatccgtggagagtcatctgtaaggagctctggcttcttcaatgcccaccaccttctgcgtgagggtaaatcctgtagaaagggtacttagaataatagggaatttagagaagtgattcccaaaccagagagtgggtgagggtcgggggcaaggtgggcggatggtgaaacttcccctgcaactgccataaacagaa

SEQ ID NO: 99972 - DNA, 587 bp, Homo Sapiens
gcggccgcatcggccgtcgtgccctggtgccggggcaggaagatgcgcaccgacgtgcccgcccccacctggctttccagcgtcacgacgccgcccgcctgcttggcgaacccatagatcatcgacaggcccaggccggtgccttctcccagcggcttggtggtgaagaagggatcgaaagcgtgcgccaatacgtcgggcgtcatgccgcagcccacatccgtcacccctacctccacgaactcgcccgcctgcgcctccggatagggtctcaggaacgccgggtccagataagtattggccgcggacaccgtcaacggtccgccgtccggcatggcgtcgcgggcattgatcaccagattgagcagcgcgttctcgaactggttgcggtcgcagcgcaccggccacaggtccgcatcgagctcgaacgccagcgacacgccttcgccggtgtagcgccggaacaggtcggccatcgattgcagggtcgtggtcacggagaacggctgcggatcgatcggctggcgccgcgagaacgtcagcagtcgctgcgtcaggtgcgcggcgcggttggccgaatccatcgc

SEQ ID NO: 99973 - DNA, 783 bp, Homo Sapiens
cagttttttcatgctttagcaaaatgttctcctaaagatcatttaaaataaagtactcttatagtgaaataaagtttttttgtttcattttacagaccatagccactaatgctttgcttttgttcatttcttttttcttgatttcatgcacatatctctgttttaatatatacaatatatacaaacagtacatccacatttttctcgctcattcagacaaaactatacaaataattttatcttgccatgttattgacctttgtgaataaaatatttagcaattaatataatccctttcaaatattttctcacttttcatttctaccttctatatatacacagaaactgctcagtttggatgagatatagccaaaaacatggaatttactggccagaacgcagcaccacactgatcgtttaggtggcaaatgtccaggcaaggttcatgattccttagaatttctacagcttccaaggttactaaaaaaggctacatgcgttaccaattcttaagtaattctcattgcacatgaaagtaaggcaaaaaaattaaagtgctgaacatgaaaaaggggacaagatgattactaccctcgcaggttcttggaaggtggtggggacaagaaaatagtttaaactctgtgagctgcttctcattatttcccatgcattacccgtttaccacacacctgcccctctgcaaatttccacaagacattaaaaacctgcagatttcaaaagttgcattaaatgtgctgtagagattaaaacaaacaaacaaac

SEQ ID NO: 99974 - DNA, 342 bp, Homo Sapiens
  misc_feature (304)..(305): n is a, c, g, or t
aaaactaacttcactgttaaccaagcagttcaacatgaaagactgaatctcttatgtttaatattttcttctcttttaatcttcataactaatttttttcagataattgtataaaataaccatggtagcaaaataatgtgatcactggaaaataagcagggaaaaacatgctatgaagatactcctatctgggtgaattcttgatagctttacatttttcatctggcatttaaacattaaacagttaatgtatttgacatgaaaattatttcaagttatcttattagttttattagagttaaannagtgtttacaagagttttaaaaggctctaaatcattt

SEQ ID NO: 99975 - DNA, 535 bp, Homo Sapiens
tgatagacttgagtagtccttaaaacaagtgttattcctgttcaccaaccccgggactgtggaggggtttcactgtctataccatgcgacatccatttcccctgaatctcaaacgaactagaaagtatgtcatgataatatttccattagatttggaagctacctgtacatctgcaatattgtgtttttaacgccagcacccagaactttgacatgttcagtcactccctgaaaggcacttctctcttgtccaaacacagcgttgacatttttactgaggagatcatctcaaaggtgatgccaaacgagtctggggctggttttaaggggacaggcacattgcagttgtaggtgttcattttcagcatctagtagataatccattggtgtttgtcccaccattggtgtattctaacaagaatgtgtccaactttgaatctcctggcttgaaagtataaaccatcacttaattcttattttaactctccacctgaaaaccagttcatatttctggccattttatgtggagagttaa

SEQ ID NO: 99976 - DNA, 594 bp, Homo Sapiens
tgaggcggcagtggaggtggtccagctccgcgactgctcccacagagcagggctgccgctcggtcagtgtgcagagtgcagccgcttggggccaacttgccatcatatgtataaccacttttaatgacatgctaattaggggacgggttattcagatatagctggaggatgggcagttgcttccaggtgttgccaaggcagtgagagcaacgggaactgcccttggcgcctcttccagctttggcctgtctttggtcgggtccggggaccaggcttgcctaccacgttttctgtgtcaaaacagtcacgcagaaataaacagtgacagcactgtgatgagaaaagcgaagaaacaacttatttcaactttctgacttttgttgtggcctcagcacttttgtttgtgcttaacattgaaaacagtgaggcagtgtaaactgtgagatgtgatttttcatttggtaagtgcaaattttagttcattcatgaaaccaattttgaagatctttaaaatagaatttagtcgaccttaagaattgttaattgtttacaactaaagaccaaaaatccaagagaataaagcgttgcaccagt

SEQ ID NO: 99977 - DNA, 603 bp, Homo Sapiens
gtgaatcagagtataaatcaaacaaggctggccaaacatgctgaagtagaggaataggtatgtgaggatgcattatgcttctctacttttgtatgtttacaatttcctataatagatatttgtgaatttgcttagtatgctttctgtaagcaaacatggatgaagcagcacatgaaaaagaattttaaccaacaaactagcagaaaataatgtgacagacgacttttagaggctttggagaaactgaatgctaaaggtgctgtacagccagccccagtctttctgacattctggcagtgtctttctcaattgcagctcctcatctgagccactgtccagaaaataatttgagtaactttaatcctcaattctcccaaggatagtaccattctagatcttactaatttattagctacaatggataccttagggggggattaaggcctacttttctagtgaaatcccagttgagaatggctgctaaaaactgagtaacattagactgaaaaaaagggaatattgtataaagttgtactttaaaaaagagaaaaagatgtgtctaagtgactatcagatagcaatgtaatgctccctaattgtaaa

SEQ ID NO: 99978 - DNA, 863 bp, Homo Sapiens
gggcatgtggccactcaagttcgcttgtacctgctctaaaactctatgattttaagacgacactcccagtttcctgaaactgtaggaaagcggaaacatgacgagtctgtgacttataaaaagcaaaaataaatagcggggaaaggcatcttccattcgcggagagcagggagggtggggacggagcggtgagtcactgtttactgttgaaaggcggccacacggagccctctctcagctggccagatttccatttcccgtgtggactggacccgaaacccagaaagtccactccagaaacctttagactcagaaacagctgggacaagaacaggcacaacttcttctccgtctgggtggcaaacagctttgccagagactgtaaacaaacgcagccatcgctgagccccgtgggtgaaagcacacgccttgtagacagcgaagtggcccggaagacggtctcccttaacagcagcctcccgggtgcacacaaaggctggcgccccgacaaccctgaccctcggtaaacgctggctcccgggtttaccagcacctggggagtcgacgctgcgggcaaccagcccctcaaagccctggctcggttcaaggataaaaggcaggagaagcctggtttttctgctttaataaatgtcttattttggaataatgagaggtctagttttaaaagcagactccctctcccaaggtcaaactcagacattcctactgggttacctaagaaagggagatgttctcataaatggcactggacgcccaaatagggtgtaggtgtgtcccagacacctgcacagcccactatgttctccagaccccgccccggcataaaggtgggggccggctca

SEQ ID NO: 99979 - DNA, 550 bp, Homo Sapiens
atggcagttgagccccctgcagccttttgcagtgtccagatgaagcccacagagaccctcctccatgtacacacagctgtgagggtagcaggagttggtgttgaagggagagcccagccacgctcaggtccccaccacacatggcctggggggctccgcccttggctgagctggagggcttggggtcaggaccaagggtgggtccaccctgcttggaaagaagctgtcctggcttttggagtcagcgggggaggggcactgcccgggagctggtgtcttgttggaaggggcagctgggagtagggagcagccgagccacaggctgcccacggcatcgtcccctgcctcgggtcagggggccccttgactggaggacctcacaaccctgggggtgtccatggcctgttcctgggagctgcaccctcatcagattctctgtagggggagaagtcatatcttttcctcacccatcacaagcttcatggctgagacctgttagaaacaaaatgcttcctcggtgccacaaagaaatagcactcaaacattaaaa

SEQ ID NO: 99980 - DNA, 448 bp, Homo Sapiens
tcctgcccttcatatttctcaaaggtagacttaataaaggtagaagagacatttctaatttttctatatatctcttgctccctaatttctaaaaggcataactaaaatgctttattcgagccactcccttgcatctgaaccctacctaccaagtaggttaagagtaggttaggtaaggtctgtagctacttctttctttcagttacaaattgtaggtgggaaagaaggatgcggaaggaaacttgcaaggaaagcaaacagaaagaaaaagaagtaaaaaaggagagaagggaatttggtgggtggtccaaccatcaaaatgtggtactaatgccataggtatctacaccacttatgtaagttggaatgttgatgcattccaacgcatgtttttatctttgtactgaaagcccttaagaatacccgaagtaaacatataaaaagtaaa

SEQ ID NO: 99981 - DNA, 432 bp, Homo Sapiens
  misc_feature (191)..(232): n is a, c, g, or t
tcatgtgacaactgctggacaatcaggaaactgccaagtcatcacctgatggtcgtctgacattcctggtgggtggggggagccctctcttgccctgctcatacctgaccagctacctattgtaacagttgtatatatgtgtggtacagtgcattatctcagatattcctttaaaaatggccaggttaggnnnnnnnnnnnnnnnnnnnnnnnnnnnnnnnnnnnnnnnnnnatgtcatacagttaataagctgtttgctggtataattcaaagtttgtatgatttaaaatactttataccacactgctatgataaagaaccatgatatgtggctgaactgacattcattcagcagtttttacagtatacatttatagagtacctaccctataccaagtcctgtgctcaatccatgctgtatttttttctgt

SEQ ID NO: 99982 - DNA, 531 bp, Homo Sapiens
  misc_feature (450)..(462): n is a, c, g, or t
ggggtccaggagagaggtccagactagaaatctaaatttaggagttgtggctatataggtggtatttataattatgggatgatttccagactcccccaagatgcagaaagctggaaagaatgttactcttaccctgaaacaagaataagttgtatgttctataaaataataaactcatagaggtggggtgtgggcatggctcacctgtggcagagcacagaaaataagcagggctgtgtactagcaggaaaattaatgaattgctaaagtccaagtgtaggcaagcgtgagcgtatagaatccttgggagctgcagacacaaagacagttcataccctcttgtaggtttttctccaaggacctccagcagttgcttaggagaaaaatggggctggggacacaagggagaccagagaatgccttggtaggtggtacaggcccacttggacnnnnnnnnnnnnnggaaaaaaaggctttaagccgctgggaaaaaggaaataaacccagttttccattgtgtctgggaaaagt

SEQ ID NO: 99983 - DNA, 539 bp, Homo Sapiens
ggagatggggcaagaagcttcccagagcgccatgtattggaagagcaggggagccagctgttccccagcccagcctctgtctggggacagcaccctcaaaaggggccaatgtcaggctctgagtcccagctctaaatcccttcccactctgtcccaccacatcctggcctgtccctgggcctgcccaggccagagatacacttttagggatttaaatctttcctgatcatttgtttgtcagcttcactaattaagcagtgttaatttcatttactggaaatggaaattcatccacctcatttcttctcattcatcctccacacacaaaatccatcactcctcggctgcgggctgcgtaaaatttacaagactaattatgttgtcaggtctctttgtaaatacagtccttaaaggccactgtgcttgctgggttgtaatgcaagggcattcctgttgttagtttaattactggttagttatttaggttctcaaatgtttgcctcattttccctaaatcaaattaaatgtcccgcttgatg

SEQ ID NO: 99984 - DNA, 484 bp, Homo Sapiens
tgcggccgcgtgggtgggggtccggggtcggggggcggtgcgaggcccggcggcgtcggctgagggaccagcgggactggggcgaacccggcgtgggccgagccttggagctcgggcgtcgggtcaccgcgtcccgggactgaccacctgtccggtgcgccgctcagagaccggggtggccgcagcctccgccacttgcccttgactttacacttccgccgaagcctacgaacttgccaaccggaaacaaatgggaacgaattttgttcagcaactacaaaaggcagatgtgaaaagtagttgcagaacaattcggtgcccgctgccgctcgttgtgctgaggacgaacggcgctgcgggcctggctccctatggcggctccctgctcgcgcttcactccaaggggaacccacagaggttttggaggagttattaataaattgtcttttttggtgaagaaaaggaaaaagaaaaacctcgtgcc

SEQ ID NO: 99985 - DNA, 549 bp, Homo Sapiens
accgcccagtcaaaaccttccagggacacacaaacgaggtcaacgccatcaaatgggatccgtctggaatgttgctggcatcctgctcggatgacatgacattgaagatctggagcatgaaacaggaggtgtgcatccatgatcttcaggctcacaataaagagatctacaccatcaagtggagccccactgggcccgccaccagcaacccaaactccaacatcatgttggcaagtgcttcgtttgattctacggtgcgactgtgggacatagaacgaggcgtctgcacccacacgctcacgaagcatcaggagcctgtctatagcgtagctttcagccctgatgggaagtacttggccagtggatccttcgacaagtgcgtccatatctggaatactcagagtggaaatcttgtccacagctaccgaggcactggcggcatcttcgaggtgtgctggaacgcccgaggagacaaagtgggtgccagcgcgtccgacggctctgtgtgtgttttggatctgcggaagtaaccacaaaatattatcgaaa

SEQ ID NO: 99986 - DNA, 554 bp, Homo Sapiens
  misc_feature (320)..(329): n is a, c, g, or t
tcactcagttaatagtccactgttttggcagccctaacaaaccaataaaatgagttacctggtgatcacatgaaacgtcagctgtgatgacaaaaaggtgcccttaagaacacaaaacaactggggtccaccatgtggaagcagaagcctgcaaggagtgaaactgcaggaaaggaagaaatgcccagtagaagagaggccccaggtgctcgctctggcagtacatatactaaaattggaacgatacagagaaaattagcatggcccctgtgcaaggatgacacacaaatttgtgaagcgttccctatttttaaaagttnnnnnnnnnnttttttaaaagacaggaggtcccaggaagccctgctgcctctctgcccaccctctccaggccaaccctgctaccaggaagaaattcacagggccaaattactcagtcatgtgtattgaggccagaaatgcattatttaattttttgcagcagatgtacctttttaatactgttttgtttcaggctaaaattacaatattaaaatttaatattcaaacattaaaaa

SEQ ID NO: 99987 - DNA, 194 bp, Homo Sapiens
ggtgaagggtagcatgtgttcaagtcttaaatgtgattattaagttaatgcttagtgtccctctgtttgtaccagaaagggcaaaagaaacaccactcttatccttcaccaaaaacaaacaaaaataaaagataataggttaaaattaagatcaagctccacctgacaaaattaagagactgaaggacatgtat

SEQ ID NO: 99988 - DNA, 399 bp, Homo Sapiens
aaattcatcaaactgtggacatttatgacctatgcattctctttatgtagattaaatgtaataaaacattccccccaaatgatacagatactacacttatacattaccatgtcagtattcactgagatgtgtatgactacatgtatttgactctacagaaaaataatatacagacatgtttattcacttggtactttttaaattgtctagaacagactgagagtgacacgcatatttgattgtgaggacagtttttgtcataatatctggttatcgtgtgatattaaactactgaagtaggggccagcaaactacagagcaaaccagatcctgcccatagcctgtttatgtctgtctttgaactaagaatcgtttttacctgaagtgttgttttgaaaa

SEQ ID NO: 99989 - DNA, 372 bp, Homo Sapiens
gtagctcattgccttctcttaagtaaatgatagatattctcactgaagccaaaggaataagttcatcaagaaaatgcccaaagccctggtggatacatcctccctatcttttttttaaaccttccactatcactctatgacactgaaaagaaccaggtaagccccaaacccagatgttccagccttatcctctattgggtttaccacagacatagcaaaccctgtcagtgaggaaaattccccatccttgagtgcccccgtcctagaagtttgggccatattatggaacaggggtctcttatttgaaaagagcacaaggaggccaagattttaatggggcactttaggggatacagcccacaatggcatggg

SEQ ID NO: 99990 - DNA, 640 bp, Homo Sapiens
caaacacctagttttcacttttttacctaattcagtgtggtactaaatgaacactattaatgcttgatctttgttcagtgacctgggaaatattaattggtagcctacatattagcagatgtttttgaaccactctacttagagatgtgagccgagtttggaaactgtagtgatagtgagcagatagttcaacagattaacactggtaaacccacttactcggaaatttcaagtttaggttagtgagaaaattttctgtccttttaaactaaacccaaaaatcagtgtgactccttcccaagaatttatagcacttaatgttcaattcatcagaatttttcaggtattagtccataatctccttcacactaatccagctttcaggagtcattaaaaaaacaaatggaaaagttttattctaataattgattatttgtttttatattcttttataccgtggtgatgactacctatacattatttcaaggttatttatttcaatggcatggaaatgcttgttttaaaacactatttctttagtgatcccaatagaacatttgtgtctatcagcaaatggcttatcaaagatttataactgtctcacaagggtgcgtcaaaataaattcctttcttaaataaa

SEQ ID NO: 99991 - DNA, 505 bp, Homo Sapiens
  misc_feature (95)..(107): n is a, c, g, or t
ctagttcctcaatatttgagttcctgatttctttaaatcctctaattcttgctgacatgtcataagcagttctcttatgacctaaataaatgtgnnnnnnnnnnnnngtattattctctaaagaagtcaactcatatacagcagaacctcagaagaacataacttgctataaagcaagggctagctgcctgttttgtaaataaagctttcctggaacacagccatacccattcatctacatattatcgatggctgctttcagggtacactggcagagttggatgtttgccacagagaccaaaccataaagcctaaaatatttaccatctggccctttacaacatttgccaatgcccagtataaagggtaaatagggtaaagctgaagaaaactttaaggaatctgccactgcacggacccgaagaagagcatcagaagggaactctggtgttatgtctaaactgaaatatgattctttccaaacaaacaatgaaatgacaagaaa

SEQ ID NO: 99992 - DNA, 633 bp, Homo Sapiens
caagatattaacaaaggaacaaagaaacagggcctgatgggaggcagaggatagaacagactgtacagtgggaataaagatcatacctatttacaaggaagtagaaaagacatggtaatggatatcaaattgagtgtgaaacctgggaaaggacagaaaactcctcccttttgcctgacctcctttttactcccctaccttggcctgtgctatcctgagacactcctcaattgctcaattaattctccaggaaaggcaaacctatagtcaatagttagcttggcaagaatataggttaataattagagttggaggaagctaacagtggagataggacttgagtagctgccactggtagttttacctataacctctcctcgaacctcgcattaacctcagatttcattgaattaaaaagaaggtgggagggcaagtaaatcaatcaaaacttccataaaacaagtaccccaactgaactaccatcaattaaagtgcaaactgcaggggtatatggtggctggggctgaggccatctaaaggccagaggggaaaaaatgcatatgtataaatcagaggatgggtaccagaaactgtccctcctccaatcagatcacagcagagccaaagatgcag

SEQ ID NO: 99993 - DNA, 856 bp, Homo Sapiens
gtaacagtcctgctagctcagacccatgggtatggttcagcatagggggacagaggacgcggaaggcacatggggacacacaggaatcatctcatggatggaagcagtccctctggctggaagtaacatccacacggacagcccagggatgcccaaggctgcagaaccagttgaaaattaatttcatccttttcataaacattctaagaatcctgatgagaaaacttagaacccaagaaacaagaggaaatgaagtcagccattataagcgcctggccaggtccactctcctgctgatccccctctttggcatccactacatcgtcttcgccttctccccagaggacgctatggagatccagctgttttttgaactagcccttggctcattccagggactggtggtggccgtcctctactgcttcctcaacggggaggtgcagctggaggttcagaagaagtggcagcaatggcacctccgtgagttcccactgcaccccgtggcctccttcagcaacagcaccaaggccagccacttggagcagagccagggcacctgcaggaccagcatcatctgagaggctggagcagggtcacccatggacagagaccaagagaggtcctgcgaaggctgggcactgctgtgggacagccagtcttcccagcagacaccctgtgtcctccttcagctgaagatgcccctccccaggccttggactcttccgaagggatgtgaggcactgtggggcaggacaagggcctgggatttggttcgtttgctcttctgggaagagaagttcaggggtcccagaaagggacagggaaataaatggtgcctgggatgagattcaaaaaa

SEQ ID NO: 99994 - DNA, 754 bp, Homo Sapiens
  misc_feature (261)..(281): n is a, c, g, or t
ttttttttaatgtaagccctcttaagagtcaacagaactatactggaaaattttttttcttgtacctttagtttcttttacagaacattcagatacttttcaggatgtatgagcttttgagaaatgctgactttctccttagagtttgcctgtacagtcctatttcctagagtgaagcatttttgacgtgctcatgatgtgtgcttgccaaaggatattaataccctttctttaaccatcttcaaacctttcttgtctccnnnnnnnnnnnnnnnnnnnnnctagtttagtcaattcctttagatcatttattacatggcaattaatcaacttgaagtaaaaataaatgattggcattgctttcttcccccagggaagtctataccttagaactgaagtattttgctcccctgttctgtaaaaatagaaacagaatgtaacttgctgatttttaaatacgcttagcaaattttaaaagaacaaaatggtcacacttttttcctccaacctgagattaagattttatattcagcaagttaggtgtatgtacagttgatttttatacatattattcattgacatagcattttaagattaaaagttaaaattgctgtgtaaccatgtctttaaaagatcctcataatcatcggttaagaaacaaatttgtttctgtgctagtataattaacctgcaaatttgagctagctttttatttgatttatagttcgttatacctttttaaaaaataccttta

SEQ ID NO: 99995 - DNA, 750 bp, Homo Sapiens
gttctcctagatccatgctcgcactgaggtgagaaatgagaagccagggccgggagcctcctgggggttggctgccaacgccaggcaggcggggaatggtgattttcgcttgtatcgtggaggatgccacgcacagacgtgaatagaaagagcctggaccgtgtcctgaggtcagcgactgaggtcctgggtggggccagccaggacctgcccgggggctactgccctctgaatcaatacctccagggaccctacgttgacacccatggcctcccactctccacccctcagtcctgcgtgcggcacgtagtgctcactgggcgtctgtgtagggggttgaaggctgaggctggaacaagggcgtggcggtcgcaggctccagggcacgacggtccttcctcttccccttctcagccacatctggggctccgtccctgcagccaaggctccctggcgctgtccttggtgctgacgcggttctggaagtgcggtgccagggtggctggtgcggctcccgatggaaaagccccaccaaccccacaaagcagactcgggagagaacacgccaccgtctttagcgaatcttaccaacccagggccagagcgccctgcaccccagagcagcactcgtggtgggaacacaggctgatgtaataaacagaaaagtgactgcgggggatggggaaggcgggatgtccttagcgtcccatggaaaaaacatatttcctccagatgggatcatcgataaaa

SEQ ID NO: 99996 - DNA, 515 bp, Homo Sapiens
tttcatcaatcaaacaaatatttactctgggcccacatcgctaagcacctgcaggctgctctgccagtggtctgcacatgccactgactgtgggaaatgcaatcccagcgtaaggtcagggctgactttttattcacttaggactagtaaagccatcactcatgctttcaagacaaatcccaacatatgcccattcccagggaaagccagcatctgcacactgttgaaacacacccaccctcggccctcacaacagccctgtgaggtaggctttcaggtgacctatggcttagagaaaaggagattgagggtcaaagaggcaaagggttaattaagtggcccctgggtctgccagatcctaaggctacgcgctttctaacataaaacacagattcgcatcagacagctcaagttccatcaacatgacgccgaaacaaggctcctgctcttcaaacgtggcatacaaacgtccgtaagatacaatatggtggttgttaacaggtccatgaagagca

SEQ ID NO: 99997 - DNA, 430 bp, Homo Sapiens
cacaaaaattgttcggctggaactgacccaggctggacttgcggggaggaaactccagggcactgcatctggcgatcagactctgagcactgcccctgctcgccttggtcatgtacagcactgaaaggaatgaagcaccagcaggaggtggacagagtctctcatggatgccggcacaaaactgccttaaaatattcatagttaatacaggtatatctatttttatttactttgtaagaaacaagctcaaggagcttccttttaaattttgtctgtaggaaatggttgaaaactgaaggtagatggtgttatagttaataataaatgctgtaaataagcatctcactttgtaaaaataaaatattgtggttttgttttaaacattcaacgtttcttttccttctacaataaacactttcaaaatgtgaaa

SEQ ID NO: 99998 - DNA, 575 bp, Homo Sapiens
  misc_feature (294)..(312): n is a, c, g, or t
atacctgttcatagttgaatctgttacaaattgttaccttttatttgatgaagaactatttaaagattttccttttttatttcttctaaagcaaaagtcaatgcaagtaactctaatcagcgtgcaaaggcgtgcatatatatctgctatgtaattatataatgtttttataatgctgtgtggataacttttcactgatttagttacttgactgtaggaaacactgttgctttgcacgctgtgagaggtttgcactgttacagatgaaggcaacatatttacatatgtacatgnnnnnnnnnnnnnnnnnnntcaaaaataacatcggctctttggggtgtctgtttccttggttgtctcacgccactggaacattgaacccagacagaccctaggatgtgaggttcctgactgcaccttacggaccacagagccacgtgtctatttctgtagacctatctccttagatttgtacatgcattttttgcggacttgaactttgttttctgaaattagatgccatttatgatgatgtgatgtcaatcaaataaagcatcattattttcagaaaaaaa

SEQ ID NO: 99999 - DNA, 446 bp, Homo Sapiens
  misc_feature (222)..(239): n is a, c, g, or t
  misc_feature (384)..(384): n is a, c, g, or t
ttttttctcacatcaggctgatgagtgtgtcacgctcttcatcccccaagtgagtgcactcccaggcccacctttctggaaaatgttctttggtgcagggtgcatggtgggccagggaattgtctgggcttcccattaatctcagaggatgggagggtaatcccttcacaaatatgggaatgggggctgctctgaggctggcaaataataaacaatgagggnnnnnnnnnnnnnnnnnnaatcctggattcctccagccctcctctctgtagtcctcagcaataacttagcccttgtcttcctctctgaaggatttaaatggaatgaccttaattctcgctttgtttgcactctatctcttaaggagctgtgatgaagaccaanacaaacagtagattaacagtgctaccttttataaggctgattagttcctaaaatatgctgaa

SEQ ID NO: 100000 - DNA, 536 bp, Homo Sapiens
tttgaatccaagacttactgttatgatagaagcaagaagcaattagggacctacccctgacatccattaaagtcaacacctacatagctatatcacaagaggtggaaaatgagattaaaatgtatatttgctagcacttaatagtttatagccagtctaaataaattatcaatctaaatagattatctcatttgattttcaaaagcaagtaaaattatgtatggagatactaaccctgtcttagaatgaagtcagaactttgggaaagatcataattttccttcaaaacactgacaacaatttgtacttttctatttttctctgtaactccacttcatccattcattccacaaatatttattaagtatctactacatgtcaggtactgtactgggtgctagagatacagcaatgaatgcaacagacaaagactgtgacccctacattccagtaaggattttttttgtttaatatctgtctcatccaaccagactataaactccacaaaggcaggacaagtgcctgtttattcacct

SEQ ID NO: 100001 - DNA, 273 bp, Homo Sapiens
tgattaattgttacatggagtatgatacatgaagcattaatctccaaactatccctattatgactttacattgttactatacagaaagtttcgaaacacagaaaattttattatttggccaatcaaccttcaatagttctgtgaaaactccagcataagatccaaattcccttcattatttggtacctgaattttttccagtcttatctctaacactcgtcagtatctataatacactatagtcacatacacatagaaaatgctttgtgatct

SEQ ID NO: 100002 - DNA, 574 bp, Homo Sapiens
tgcggccgccagacactcacatgccccaggatgtcagggcctgtaaatcctggggcatgtgagtgtctggtggcctctctgcagaacatgaggcgtgtgcccagcccgtgggggctccactggggctccttagatggcggctggctgggtctggggcaaggggttctctccctggagtggtgcttactgagtgggagtgagggacagcaggtggagagatgagcggaaagggggctgtcacctttctctgtcctgagttggggctcttggggaaaatcagagtgcagtagtgagcagagctgggctttatgccctgtcctccctccctggtcctgattcatgacctccccgtgagccacagccccacggaagggacgtaggatttggagcctggttagtaacgctgttgttctgttgactgggcatatgatgtgggccagcaacaatgcctcgttgagcctccgtgttggcctttgtgaaatggatgtgaaaatcctcctcctgcctcttccactgaggttgtgagcagcccagggggcagtgaatgtaaagacatttggaggactctaggaac

SEQ ID NO: 100003 - DNA, 723 bp, Homo Sapiens
gtaaaacaggtagaattaccatatcccactctaaggggtagttgaggcccctggagaagtctggagaaaggagacctccagagttgatgccatctcttcctcctctccaggtgttctttactttatgaatgaagccagagcagcccaccttcctgcatctctaccaccatggcaccatgccctgtgatgggtgggctggagtcaaatatgtagcaggcagccagggtcagtttgtggccactgctgccccctcttcctacagtctcctcactgagtgccccttccctgttgggttcaacacatctgtgctcctgtaagccctcagcctcctcgttctcttcctcaacttctaccaccagacacatctgagaagcaagcaagagaggctgaactaggagcaggacccagggactgaaaccagcacagcatccccacagagaattgggtggaaggcagcatggcttccagcttactggtgctgagcagattgctctgggtctccattgtatcctctgaaggaaggaggaggattgccttctgtccagatctcaggatcaaacaaataggtccaatttcctgtgctcacttcagttagagcacttctcatgtgactttgtagctttgtgtgcatctccttcctctactagacctaagcccctcacgggagggactctcttattcttgatgttccccacacctggaatttcaataaacatctcaata

SEQ ID NO: 100004 - DNA, 402 bp, Homo Sapiens
cacaactaactggtagataaagtgatttgtctttagtatttgataactaatgggttttagagtgttatttataagatgtagtaaattatcctcatcattatttttaagacaaatttataagacaagtgtaatagaaatagatcaacagcacaatagaaaaagatggcagaaaacatgaatatgtaattcacagatgaaagcaaaacaaatggtccttttattaagggaatgcaaagttaaaaatcaactagacccttttttgtttgtttcttcttggattggcaaagaggagcacttaaaagctgtattttgttttggaggattagtttggttatgtctactaatgactaaatgtgtacatacattttgacccattagttacacttcaaagaattttatcca

SEQ ID NO: 100005 - DNA, 532 bp, Homo Sapiens
gcaaaatgaatcccctagcctttgtcctcacctaccctaaggcaggtgtgtatgcttgaattccttccgtatggctgtgagcaacttgggttggagacatatctaaatcctttttacttccactccctatatatagtagatgctcagtgtatatttgtggcattgaatggaggaccagaaggtagggtgcaggtgactcaacagctgtacatgattaggaggagcctatgtggggtggatttcagcaccttggacaggagcagatgtgtggtggggttggactctcttctggagacccagacaattcagtctccagatttctggcagtggctgtcttttgagggccccagccacaaaggccacatgcctctgataggagctgcctacatcaggctttgtctgacttgcacgctcagcttcccaccctaacccacttcccttgttgcacatagcttatgttttagggactttcctggaagcaaaggcagtcacatctggcataatcataataaagaaaacaactatcaaaaaa

SEQ ID NO: 100006 - DNA, 543 bp, Homo Sapiens
ttaacggtaaatgcgaatgtagttagttcatcttgggcatcagagagcattgtaaaacttgctaattatagtatcctctgagtaagctgatccatcttttggcaaaaattatgttgtgagagacttttcatttgaaaatttcttggctactgactttaattagcagttgatactagaatggactttcatggcgttcacagcctgggatggcccacgtcatctttaaccttgaactcactgatgtttgaattattcagtagctggcttagccatattgaatttcaaataagtgttcaatggtgttagttacttatttctaaatggtacacaacattttaaatgttttgctattgatttatagtgactagtttcctgtctgatttgagaggttctgacaaattttttaagaaacggatgtaaccatgaaatcctaagtagaggacccagctaacctgtacccacaatcctgatacacttgagactgtgagataaatttgtgttgttttattctgtatgataataaaacttacaaataaaatgaaa

SEQ ID NO: 100007 - DNA, 747 bp, Homo Sapiens
attccattcttctgccttataataaaacttttaaggcagagaactgaactaattatagaatttctcctttggagagttataatgttacatagtgaacattcttataaaagaaagaataagtttaagttgatgaatatttagctgcaaagattttttacttaaaaaaatccatgaatatctttgattttattataaagcatttgtaaattatttgcatttgagctgtaagattcataaacatttacatttcccaatgatttctattttgatttttaaaaaatatacagggcaagctacatttttaaagcattaatcaacaactttattatattacacattccagtgcacaaacacacaatatcatttaatactcacagtagtacctgtgaaatatatcagatggatattcctatctctattttacagcagaggaaaccgaaattcagagaacttacatttctaaggttgtacagctgcaaaatgaccaaattgtgaagtccctaacatccaggttttcataatgccagtactctttctatgacatgtttatgaccctccaaatgtaccaaaactacctaactaattcactgagaggaagccaactgcaaaaataggatttttaaaagtacaatagagtattactacattttatggatttcagacaaagaaacctccgtttattatatcctgatggtgagtattgccagctctaaattattcatatttctaagaccaaggaaaatatag

SEQ ID NO: 100008 - DNA, 271 bp, Homo Sapiens
cctcatccccctcccctaccccatcacactaccaggggtgaccacttcaatagcctggcatctatttttctagacattttgctaagcacataagcacacacacagaattaacaaaaatgcttcataccatacatagttttctgaaggctgattcttttattcaacaaaatgtcaaggagattattccctgcctacacatacacccatgctgtgatggtttaataactgcataagactccattataatgatgattccacaatctgcataaaa

SEQ ID NO: 100009 - DNA, 125 bp, Homo Sapiens
tttcgttatcaatttttatttcctaccatacaccaaatgtacagcactgaacacaattttgttgctttgatgtaagaaatattaagtgtttggagaaacagtatacaaacaaactacctcaaatt

SEQ ID NO: 100010 - DNA, 544 bp, Homo Sapiens
  misc_feature (56)..(161): n is a, c, g, or t
cggcccgaggggggtctcagtgttacccagactgaaatgcagtgtcttagtcgcannnnnnnnnnnnnnnnnnnnnnnnnnnnnnnnnnnnnnnnnnnnnnnnnnnnnnnnnnnnnnnnnnnnnnnnnnnnnnnnnnnnnnnnnnnnnnnnnnnnnnnnnnaacatacacttcttgacttcaaaactttctacaaagcaacagtaatcaagacagtgtggtactggcaaaatgatagacatacgaatcagtggcacagaattaagagttcataaataacctgtgtctatggtcaactgattttcaacaaaggtgttgagacaattcaatggagaaataatagtcttttcaacaaacggtggtgggataactggaaagccacatgtaaaagaatgatgttgaacacccagctcattaacatacacaaaaattaactaaaaaactgaccacagaacccaaaagtaagagctaaaactataaaactcttagaggagaacttaggggtaaatctttgtcaccatggattaggcaatggtttaatagat

SEQ ID NO: 100011 - DNA, 435 bp, Homo Sapiens
acagggcctcactctgttgcccaggctggtttgagtacctgggctcaagcaatccttctgctgtggcctccaaagggctgagacttacttacaggcatgagccaccacacccaaccacggactgtgcttttaagagtcggtctccaggttccacctccatcccttgaacgtgggccctctgaactcagcagcaccttgtcctgcttgatgcctcctaaccctccccaaactccaaccatctgcattacatctactggccatcccagtaaccagagcctaagtacattttgaagaatatagtcgaggcctcacaccctggctaaggagtaagctggtttttgggctgtgcagagccacgtcctactaactgtgctttaacatcccctgcagagctaagtcttagccaccaaggacaagaccaagcaagggggggtg

SEQ ID NO: 100012 - DNA, 704 bp, Homo Sapiens
  misc_feature (587)..(631): n is a, c, g, or t
atcagtacgttttaaatcttaatttataaaaatgaagccaactaactcttgcccaaagtaaaggtgtgcttcatgaactatcttgacaaaactagtattctgtgtccttaaactaccttacagtgctcatgtgaagttacaataaatgtagtcttttgtatttaaccacgcgaagggtagctgcttctggcatgacctctttaaaatagaaaagtaatagaaagtattccgtaacaatatgacaaggatgtgacagtttaatgtatgtatagtatatagtacaggttgaacacctttaatgagaatccaaaatctgaaatgctctaaaattggaaactttgaatgccaacatgatgccacaggtggaaaattccacactttacctcatttgacaggttgcagtcaaaactttgtttcatgcacaaaaggtataaaattatcttcaggctatgtaaggtatgtatgaaacatagatgaattttgtgtttagacttgggtcccatctccatggtatctcactatgtatatgcaaatataccaaaatgaaaaagtcaggaccaggcatggtagctcacacctgtgagtannnnnnnnnnnnnnnnnnnnnnnnnnnnnnnnnnnnnnnnnnnnncagaacaagagtttaaggtcagcctgggcgacatagcaagaccctgtctattaaaaaaattaaaagctccaaa

SEQ ID NO: 100013 - DNA, 527 bp, Homo Sapiens
tctaccatgtactcaacactctaatatattctgcacatttggttctatgtcatgccatagtcttaaggacgtaggttccataatcatcccttattctgtagaggaggcccaaggttagtgagcagaggaaggttccactgtcgggaaccggtggtcttcaaactcctgtgctcctcttttgatatctttctgctcatatatgttggaaacagcccagcatgagcaaagcaccacctcctagcccccagcctgtgccagccctgcaaagaggaaatatggctccactcagggagcccatcagcgactaagggagccctggagcacctggcactcagcacccatgaacacgagggcaggcatggtgggacaaggcagtctgcttggggcaagtgagcttcgggaagtagctgagctttggggagcagctgtctatacccagcttctcagggctgtgcaagtagcctgagggagaaagaccctatattagctgaaactgcagcccagatgagtcagtattttctgctacg

SEQ ID NO: 100014 - DNA, 527 bp, Homo Sapiens
  misc_feature (88)..(102): n is a, c, g, or t
tacccttattttattatataatgtacagatgtattgaaacatcacactctaccccataagcatgtacaattattatgtgtcagttatnnnnnnnnnnnnnnntattaatctggccccaatgtataaaacagaagtgaatgaggtaattagaaagaagatgaataaaatgtttttataacagaacatataaagaataactatttcacagagctttatgaagatgatagaatatgtgtaaatattttgtaaactgcaaggtgctagataagtctaatttttattacttctattattatagcagagaagaggtaataattcctaagaggactagaataggatcttcatgcaaggtattttgaaggaaaacctaacaacgtttggattacatgtaatgtgagggataaggaaaacggaagggtctaaatgaggggtgtccaaccttttggcttctctgggccacactggaagaattgtcttgggccacacataaaatacatgaacactaacaaaagctgatgagctaaaaa

SEQ ID NO: 100015 - DNA, 530 bp, Homo Sapiens
  misc_feature (161)..(208): n is a, c, g, or t
  misc_feature (243)..(285): n is a, c, g, or t
aattctggaaaactcttaacataaagatttggtctaagggtcagaactttgttctagcctgcaagggatccctaagttctgtcattctaccactaaagccaagcttcttggttctcctcagaagcctacatcatagacagaaacggaaaggcaaaaatgannnnnnnnnnnnnnnnnnnnnnnnnnnnnnnnnnnnnnnnnnnnnnnntttctctataattctattaagtgagaatatgtcannnnnnnnnnnnnnnnnnnnnnnnnnnnnnnnnnnnnnnnnnnccacaggcgtgagccaccgcacctggccaaaacaacttctaattattgcacaaactgtatgtcaggctctgtactaaaagcgtaaagactatcattttgttgaattttcataacacttgtttgaggtagataatcttattatctacacttgactgatgaaaaaactgaggcccagcaaggtaagggcacagttaatggcaaatcaccagaaagcggcaaaattgggatttgcctcgtgccgaatt

SEQ ID NO: 100016 - DNA, 482 bp, Homo Sapiens
  misc_feature (161)..(212): n is a, c, g, or t
  misc_feature (247)..(289): n is a, c, g, or t
tttgaattctggaaaactcttaacataaagatttggtctaagggtcagaactttgttctagcctgcaagggatccctaagttctgtcattctaccactaaagccaagcttcttggttctcctcagaagcctacatcatagacagaaacggaaaggcaaaannnnnnnnnnnnnnnnnnnnnnnnnnnnnnnnnnnnnnnnnnnnnnnnnnnntttctctataattctattaagtgagaatatgtcannnnnnnnnnnnnnnnnnnnnnnnnnnnnnnnnnnnnnnnnnnccacaggcgtgagccaccgcacctggccaaaacaacttctaattattgcacaaactgtatgtcaggctctgtactaaaagcgtaaagactatcattttgttgaattttcataacacttgtttgaggtagataatcttattatctacacttgactgatgaaaaaactgaggcccagcaaggtaagggcacagtt

SEQ ID NO: 100017 - DNA, 422 bp, Homo Sapiens
gtctcctgtcctatcaacaagtgagagatgattgttcgaaatctccaaatataattatagttctttgtttctctttttagttctgtcaggtttgcttcatgtatttggaagctgtataattatatgcaaatatgctaaggattattatgtatttttaatgacataattctttcatcattatgaaatctccatctttatcgctgataatattccttgtcctaaagttcaaagagcattgaggtgtgttttggcaggcagttgagttactattgggtcgacttgatcctttgcaatcttgtttgtttttaatgtttgctagggtgggtgtaaagttgtctttatttaaggacggcggttgtcaactttcagtctcatgaccccctgaaactctaaaaacttattgaggactccgaagaattctt

SEQ ID NO: 100018 - DNA, 512 bp, Homo Sapiens
  misc_feature (405)..(413): n is a, c, g, or t
ggcacgaggctgatgttggagcgctaactctactatacaaagctgagttatttaactctaaattgaaggattttttcccctatatgtgtttgatgaaatgcgtatactcttaacccattttctgtagtttgtgtttttaataaaggcaatttaaaatttgggagcctgcatttctcaatcagtgctaacacagccaggtcagaaagacagcccctttgggccagctgtgggggcctgcaggagtggttatctctgtgattcggctgaaataaaacaactatcttagtccttaaggacaaagaaaatataaagttcattgtgacttgaggaagccaaggagtaccattttagagttcaaatttcatttgtttcataataaactttgttaaaatgtgacctggattnnnnnnnnntcatattaacatgaatttaagtaattcaagtctctccagtaaactttacataggagggaaaaatcatgttaaatctttaggaaaaaatttaaacggtta

SEQ ID NO: 100019 - DNA, 427 bp, Homo Sapiens
  misc_feature (106)..(106): n is a, c, g, or t
gtttgtctgtgatcggatgcaatctttgtgggacatttaaatggaagggttcattgatgtgtattgcttgccaagccaaaatgttgcctttggggaaaagggagangaggtgttcatggagtgcaggaaaaggaggttttggggcagagattttgacttaaaataaccagacttcttctggctgctgaaaagaggcaaaagttttaaattgtcaagtttaaaactatgttcagttatgatttgccacttgtgaatattattttggatttcccctttcatgcttattttgttcagaatcctaatgaatagaggttgctggactcagggtaaaagcaggatgaactggagatgggacatacaaggtacttttggaattgccatagattacacctataatcagagtaaatgtcatcaacaaataatcaaa

SEQ ID NO: 100020 - DNA, 504 bp, Homo Sapiens
ggatattctactcagcacacaggatcgcatgagactgtctttgcttttatttaacaagaggcgaaatgagtatatgctgtaattctgcacctgttctatgtatcttgcctgcggggagatactctctataaaactatgcactccatagctcctgtgatgaacagcattcaaattctgcctgttatgaggtgtaattcaataagcaccttttgctgagcagctctttgcaggatacgtgaagggctgagctaagaataaaagcccttttggcaatctgatacttcgccttctcttccactcagttctcagtcgatctcaccatcagataccctgccaaaggcatcactctctcaccagtcacttgcccacatatttatgccagtaacagtgctgggtggggaaatatgatggtaaagtacaatcctattttaagtttcttatctaccacttaggaagggtccccagatggcaagctagctaaaattattatatagctactgagga

SEQ ID NO: 100021 - DNA, 275 bp, Homo Sapiens
tttttactgcatgttacattgaaataaaaacaaagtaaaatgagcaattgccttattgttctgctcttttgcagggggtgggggttggggaagacagcattccacagcctggtcaggagggaaggacctcacttgtttcatcaaatggagtggtttaaaactgatcaagcagctcataataatgaattcctgctctgtcttttattatcttatgtcagagtgcagcaaaatctcatttcataagacttacaataactctatttaaaattcaggta

SEQ ID NO: 100022 - DNA, 883 bp, Homo Sapiens
gaatggcaggtcttgaagataacattggccttttgagtgtgactcgtagctggaaagtgagggaatcttcaggaccatgctttatttggggctttgtgcagtatggaacagggactttgagaccaggaaagcaatctgacttaggcatgggaatcaggcatttttgcttctgaggggctattaccaagggttaataggtttcatcttcaacaggatatgacaacagtgttaaccaagaaactcaaattacaaatactaaaacatgtgatcatatatgtggtaagtttcattttctttttcaatcctcaggttccctgatatggattcctataacatgctttcatccccttttgtaatggatatcatatttggaaatgcctatttaatacttgtatttgctgctggactgtaagcccatgagggcactgtttattattgaatgtcatctctgttcatcattgactgctctttgctcatcattgaatcccccagcaaagtgcctagaacataatagtgcttatgcttgacaccggttatttttcatcaaacctgattccttctgtcctgaacacatagccaggcaattttccagccttctttgagttgggtattattaaattctggccattacttccaatgtgagtggaagtgacatgtgcaatttctatacctggctcataaaaccctcccatgtgcagcctttcatgttgacattaaatgtgacttgggaagctatgtgttacacagagtaaatcaccagaagcctggatttctgaaaaaactgtgcagagccaaacctctgtcatttgcaactcccacttgtatttgtacgaggcagttggataagtgaaaaataaagtactattgtgtcaagtctctgaaa

SEQ ID NO: 100023 - DNA, 339 bp, Homo Sapiens
gctcatagagactgtgtgctctagcgccttgcggcggagggaggcgatgctggtgccccgccacacgtcgctgctgtccggggagctgcagagctggggcgaaccggagacgttgctggggccggggagggaggcgggcaccatgccggggaaggcgggctggtagaggtgcgactgcagccccgcgccgttggaacccgccaggctgttggacaggcccatggagttgggcggcggaccggccgccaggctgcactgggacagcgactgcgccatggcctgctgcctgcccagcgccggcggcagaggcagctgtgacacgccaggcatggcggccgc

SEQ ID NO: 100024 - DNA, 197 bp, Homo Sapiens
gatgcaatagtgaaataaatcactatttcatcattctttagttatcttactgcagtggccaaaatattcctcatctttccaagaaggtataaaagacatctggagataaaatctttatacattttggggtttcttttttcacctattaaagagcacagttgaaaatccagaatttctgatttaacattcataaaggc

SEQ ID NO: 100025 - DNA, 633 bp, Homo Sapiens
taattcaatgccacacagccagtacaaggcagaactttgtgattcaattccagatctctcttactccagagccagtaccccctaaagggcatagtcaaaagaagcaaatagaaagttgatagaagtgcagaataataagagtgaaaaatgtgatgacctttagcatagaaatggcttaaccttctggggatgaaaactagcagctgagctacacaaggtgcctctgtcaaacagctctgtcgaataatgcttttaaatgcgaccaatagatatacatgagccaaaacaaggaggcagctggtgctaatctgattcagtactttaataggggaaagcaccggagcaactattttatagtctttttatatatttatctgtaactaagtatatataaatgttatgaacatgaagagagaattgctgactcaccatcaagtgacatttcagtgaagactgtatatcaagtaggaaaagaaattacatgggtatattcactgatggagccagactgtgaccacccagagtaaggaccagaaccatattcttagtaattattcactctgaatgcacaaagaatttatttcttgaatttctgatcattttaatataatcataaaaatggcgattttgaaa

SEQ ID NO: 100026 - DNA, 460 bp, Homo Sapiens
ggtatacgtaagtctgtaacatcattagctacagtgaatttactttactagaaagcatagcaaaataggattaactaaagatatatttttaataagaaaatgctttgaaataacatgaaatcaatgaacatttgactgtacaatttactcgtcaaagtatcaacgtatgtcagctcatgtatgaattacactagatcattctaaacacagccatgtgctcaggaatgtgtgaaataactcataagctattctctaagggggtatactgaaaacttctaaaagtaccccagatatttggtcatagataagagatatactttaaggcagccttccaagtgaatgtaaacttttcggaagtggcctttccagtaacatattactattgtgaatactctgtacttatgtgtagtgctgttggatattttttgcagcacattatcacactaaacaacattttgta

SEQ ID NO: 100027 - DNA, 128 bp, Homo Sapiens
tttgtaaattccttaagtattctggatacttaccttttgttattctattctagtagtcactgtccccaaaacaatgttcataaatttgttcttataaagatgagaaataaaaaacattgaattttaaa

SEQ ID NO: 100028 - DNA, 500 bp, Homo Sapiens
cagaacgagaagggcggtggaagaaggaatttttcgcatctgtatctgagtctgcagtggaacaaggaaaggcgcgggtttgggttggcggcccatccaccgccatgcactgagtggtgtggccagccatgcagcaggtgtgggggtgaggggcgcctggacacggcggcaggactgggccgagtgcacctggagagggtgcggaagactcttccagggcatcagttggtttgccctgctggaaatgtggctaagaggttcaaataaatgttctcaggttgaccaccccgatagagaattttgtgatttcactgcaatcaagaagtttatgccaattttacacacaaaacaggaatcaaagcaggagagcaacctgcctacagtgaagtctgcatgtggcccgttggacttaacctctgagttaactcaacaggaagcaagtgtgccctgctccaattacacaggatgggcctctcacgcaacataaaactcctttccct

SEQ ID NO: 100029 - DNA, 610 bp, Homo Sapiens
agaaagatggcctcagtactcccatcgaagtaacagtatgttccaggatgcagttggaaattaggttggaatggatgggatctaacaggaacagctcttggaaggatgggctatctcattagtaccttacaacttccaatgcattgtcacatattggagttgggaccagggtgaggcaaaagaggcctttaagagtcatgcaagtacactggcctctgtcctgccacatgccttatctcacgtaatacccatctgacccttgtctggctatttagttggtttcggggtggagagagcaggggaggtaaggagcagagatgggagagaggacaagctggcagagactctttctctatgaaaagccttgcctgagtcactccttccctcacacttgcatgttactccatccaaacgaaaccagccccttttgtgacttcacaaaatctatactcacactccctgtcactgaactccaggtccagaaaactatgccccctgtgtttggctttaggccaatgtcgtgagatattccacacagacatgtgctgtatcttcttttaaatgttgtgacttttgaccccacaaatctagaatttgtcatactttcaaa

SEQ ID NO: 100030 - DNA, 546 bp, Homo Sapiens
  misc_feature (451)..(470): n is a, c, g, or t
ggcacgaggattaaatgtattagctcctttaaaagatatatcaagaaaatacatcgccactggaggaatttcaagaatctgttccaatagttgcaaatatgtttgagtgggcagggtcatcactagtactgtctgaagtcatgacagcaacctgaatttctgctttttctacatgtagacttagggatatactttttacaatttttaaaacttattcactaataggaaacagactcatttaccatctgcttgaaatgtggtgattataatttatccatgaaaatattgaatgtttccttatcaacttgggagtcatcagggaggacccagaagtaaaggttaacagagagggaaaacagattgtctagattaattttgcatatactatgcagtatgaaaaacctcaacttacagtatttaattttttactcaatgtaaaaggaaaccctcnnnnnnnnnnnnnnnnnnnnttttacatccacagataattaatgattttgttgtattgctcactttttttgtatactgtttaataaagttgagatc

SEQ ID NO: 100031 - DNA, 557 bp, Homo Sapiens
tttccttctgaactttataccctcaaggaaataacatacatgaagacacttccatgtttctcttgcatggaccaaacagtagtttggccaaataagtaatgggagcactttctgctatgcttttaacataaaggattcaatgaggatgctgtcaacgtgtaactgtcagataataaatgaatgagttagtgaactttacttaaaacactcaggtttagggtttcaaaaacaaatgtagagaaacaaacaaaagtctgcttatttttttaatgctgacttttgtaatgggaaccaaaaatattaatgtagaccaaaaaagacatttacaggaaaaaggcccaaaattccaaggtagtcaagttactgcatttcattaaatttcaaaattaattggattttgatgtaaacctccttaacttacaaatgtagattattattaaaaatattatacatgtacatgtgcggcgtttgctccccaccagttttggaagacctaactcaaatcatgtacagaatgataggaaaactgtacaaagagctcagacttcattgcttac

SEQ ID NO: 100032 - DNA, 511 bp, Homo Sapiens
tcttccaactctgggaaaataccaacagcaataaccttcttaccaagcctggggataaggagataattcccccacaagaaaatggagagtatacaaagagagactgaaactgagtaacttcaagtaagaaatccccatgatttcattatgaaatggtaaaaagtatatgtgcaatacttctgagctacaaagaacacttgtattttctcctttgcatttataactgaagttcatcctgtttaaaaaactaggtatctcaaacttttaagtgaagaatctcagtttgagtcacattccgtttcattctgccctaatccctagatatatactgattgtgcatgcaggactctagtttcttcttgactaatggcaggaaggtgaacctctatgtcaccattaactacggtataagctagtcctggtagaacaacttgttgaaataggtgatttgcaatagactaagaaacattccctgtagtcaacattcaaaatcctactatcatcaggtctc

SEQ ID NO: 100033 - DNA, 353 bp, Homo Sapiens
aagttgtacaccatcatttctgcaatatactagtgcttacacaggtcagccttactcattgtgggagaggactacataagggtgtgaatactaggaagtggggatcattgaggacatcttggaaactagcttccacagagtaaggtcaggatttgcaggaaagaggaatctcaggtttggggtatgttaaatgtggggttcctattattatactcagacaataataacaggcaattacatctaccactcttagaatttagaggagttatcagcaggtacagggtagtttaaacaactggactaagaaaacctggggagtcaatgtaggtagaggataggtctacggcctgtac

SEQ ID NO: 100034 - DNA, 435 bp, Homo Sapiens
ttgcattcgcatttggagatgtcaaaatggagacaatatgcttggagacatcttaagtctcagcttaaatcctttccactaaattttggctgttagtccttctggaagctgctactgtctcaggaactgagtttcctcatctataaaatgaggtactcatacatatctcctacatttgttataggtttataagagataatatatgcaattcacgtagcacagggcatatagaatatgctcaataaaagatgtggtcatgtttgttatattctataagtttttataaaaatagctagctcttattgagtctctgcttcatgctaagtgcttcacataggtgacttcatttacttctcataactctgtgaaataagtattattcctattcccatttattgatgaatttaaatgacttgacaaagtaaaaatagtaaa

SEQ ID NO: 100035 - DNA, 480 bp, Homo Sapiens
cggccgcactggccagtgaggaggcaccacggtgacagccgcaggggctagacgggcctctccgcctccccctcctgagcccttcgcctggtgaggcagcagcttccctgcctgttcctgagtccacggtgggagccctgcctgcaatcccccgtgcatccacaggtgtgggctggacggcgcatggggcaggggtttctggtggtgtggcttctccacagtctcatgcctggtcttctccatctctcttcatccacgggcctgcccgggcccggggtgatggatcagcaggtgtccaatgtcccgctgttcattcaatgcaccaaaaaatccttgagtcattcagcacacacccttgcctggacagaaacatttttcagcctttttcaaacgtgcctcactcttctctccaacttctgctgcctcctgtcacatgttcatgaccacgttgactcagcccatgtcaggggtattgggagt

SEQ ID NO: 100036 - DNA, 551 bp, Homo Sapiens
ttgatcctaggactttataggctggctcttttcccatgattctttccttagggtgagctgcccgcatgcacagtgccctccctatccttgggaggtgagcacatgcagtgtgtttaggaagttgtacacatgcccacccaaggctttcttcccttttcccatggagtgccacggaaaggtcatactctgccgttttgtctcttaatgcatttgcctgggaagttgcatctccctggcatctgcattcaattaacactttagtgcaataggtgtggaccatcaggaaatggcgtctccctgaccctaggtgccaatgtatgacttttagagaggcaatgtgataactgctgagccatcacccaacattcctggtgggtgggagaagagccctttcctgccctgctcatgctgtctaatggcctgtgacagcatgactttagtaggctttgggaaatcaagagttttgaagattattggtaaaataaagacatttggttgaaattaggtcagacattaggtttgctaaatgctttaaggtaataaactgcttc

SEQ ID NO: 100037 - DNA, 343 bp, Homo Sapiens
  misc_feature (43)..(43): n is a, c, g, or t
  misc_feature (63)..(63): n is a, c, g, or t
taatagcaggtctcaggaagcaagtagaagcaaggggaagggncggaagggaaggggaacaanctactgtagggtgggaaagactaagcaaactaaagcactccaggaagaggccctagaacagaatggacaataaagccttttcatttgagaaacataatcattgaacaattacagagaattctgagcacatagccctgtgctagatacttactgagtatacaaagaggtgaagtataaagctcatgccttcaagaagcttttgagtcctggattcaggaagtagtcataaatatgtaaatagtgtctgaaagtgataaagtagttcaagagtaagagattg

SEQ ID NO: 100038 - DNA, 485 bp, Homo Sapiens
gaatattattcaatgttaaaaacaaatgagccaccgcaccatgaaaagacatggagaaatattaaatccgtattactaagcaaaagaagctaatatgaaaaagttacataccatatgacattctggaaaaggctaaactatggagaagtcgaaaagatcagtggttacctgaggttagggggaaggagggatgaacaggcagagcacagaggattttcagggcagtgaaactactctgtatggtctaatagtggatacatctcattatgtatttgtccaaacccacagaatgcacataaagagtgaaccctaatgtaaactttggatgacaatgatgtgtcagtgtgggttcatcattgtaacgaatgtaccactctggtgggggatgtggataattcaggaggctatgactttatgaaggaagtgggtacataggaaatctctgtatcttcctctcaattttgctgtgaacctaaaactgctct

SEQ ID NO: 100039 - DNA, 722 bp, Homo Sapiens
  misc_feature (636)..(647): n is a, c, g, or t
tttaaagtaatgcaaaagtactttataacagagacaaactagccatatcttaattaagtggtcatacattgctgaacattgtaaaatgctgtaagcttactgaaattattcaacatccatacaaagatccatagcctttctttcaagagacttaaccaaaggaaattcattcattcattcaccaatccatccttccgcctatccttccaccctcttatccatcagccaaacactcactcactcgttccttcctccattcttccatccactcattcatcatttatttatagtctacaacatgttgggcatcagagatacaaaggccaattcaataagctccttgcccttatggggctcacagtctagcaggggaaactgatctgtagtgaagcaatgataatttctgggtggaagaacataattcttaagaatgaaaaaaagggtgttttaagcagttagttgtggcattattcataatatttttaaaaggtggttatacataagaataacagaatggttctgtgaatgacgccatagccactcaacaaggcacaacgcagcaagtgaggttatgaagattcatggaacaagggaaaatgttgatgacagaaaattaaatagaagaggcaggatacnnnnnnnnnnnngtatatgtggtgaataatggcaattaggtttttttaaagaagggatgctcattaaagaatagacactcttttttt

SEQ ID NO: 100040 - DNA, 658 bp, Homo Sapiens
catgtggaggtcgtcctagtaagcactcgcaaacaaaattacatgatgaatttttcacgacaacatgggctcagacatttctacaacagaagacgaaggtcacttaggcgatacccatgaagaatcaaaaagtttattttttttcttccaacatgtgatgtgttgctctccattcttttaaatctcgcactacatctgatatcaggaaatatctgtgaaggacttggtgattacctgaaagcccttctcaagaccgagtgtacaccactttcccacactgtgaactaatgacaagtgacttatttgctcataagtaaatgtcttcatgttgatgtgtccgtgaaagttgtgatctgttgtaatatcagttacagtggcagtattgacaataagaaacagttgaacagaaaaatgaaatttaagcacaaaaaatttaagagattttatgtttaaaatggcatttagcacagtatttaacattcttggtcacaaagctatttaagtggactggatttcagctatgtctcgtgtcgtatgtgattaaattatcatggcttgcgcggtatgtattctctcgtgcgtagagcacattgaaactgtatttacttgttatgttgtaatattttgctgctgaatttggggctacttatattctgca

SEQ ID NO: 100041 - DNA, 392 bp, Homo Sapiens
agggaggctaacaagcaactactgaagccattgcagagtgaggtaagccatacaaaggaaataaagagtgctatgacagatcatcacagaaatggtcctgaaaggcctcttaggagggaacttgcaaggtgagaatggaaggatgagttaggaattaaaagacctaggaagtatgggatatagaacaatgcggtaaaggaaatagcaagtgcaaaggcccaagttataaaagagcttgttgtgctgtatcaacagaaagaagtcctgtgtggttgaaagaataaagagcaataaagagagttccagaagatgacattgccagggcaggtagaagcctgatcatgttagacagttagacatagtaaaggttttattttggagtgatggatttc

SEQ ID NO: 100042 - DNA, 549 bp, Homo Sapiens
tttgacttattgtagacaggttaacacatgagatgcgttaaaagagttaagtgaaataataggcagcattcaaagagcaaatcgtggtctttggcagaaaatagagttaattttgtatttgagctgtccagttattacaattagaaaacgttttaaagaatccaaaaggatttaaaatattgcataaagttttaggagaaaatggtttccaaaaagcaactgcatatgaaataagcactaaaatgacattaaagtacaatgtaagaaaatcggaactagaagcatttgctggagtctgaagaaaaagatttatggatgaatgattctgaaactaacttctatagagacaattttccggcgatggtagatcaaggtgtagattgtactgaagagagagattcaaacaaagtgagtaatctaccgcagttttcagttttcttggtaataccccaacaacgtaaaagaaaaacgtaagaaatcctgtatggatctaaatgtaagaaacgatgataatggtgaaataataacattattttatataatgaaaaa

SEQ ID NO: 100043 - DNA, 556 bp, Homo Sapiens
tgctgaaatcctccctagtgatgctgcgagtgctgttggtcccagttctgtgtagcttgccctgccccatgaagggccaccagccaagggccctggccacgtgtgcgccaccttactttggaagtctctggcttgtgtgctggatgaggctgccagaacttgttgggcgttcatcgctgttagtacatatattaaccgtgaggtgttaaacttttcttttgaaggtttggccagtttctaaaaaatgcacatttaaagagaagcatctaccacggctttaaaacaaaacaactctgagatgaacaatatgtgttatactcagagattaacaatctcaatcatacatactgattctttcagacatttaataaccactacatttttttgcattaatgaagtttgactatatgtgtaaagggactaaatatttttgcaacagcctgttctttgttcattcttttctggatagtgtgtcctctgtattgcggtagatttatacattctgttgcctaaatatgtgtgtaaaatgagctgataaactggagtactacttaaa

SEQ ID NO: 100044 - DNA, 566 bp, Homo Sapiens
ttgacatcagctcgtacccccaccgcagttgtactgtgcacgacgcttttcttgtcttgaatgttttagtcactgttgttggatctactggatcaggcatactgctaaagctttccagtgattcttcatcaaactggcgtcttcttccgtttgtatctaattgatttttgcggttactacttgtagatttttctacagacactgaaaatccagtcttgataaatggtttctctacttcaccttcttgttcatataaccatggtgtcctactgctttccacctcctcttcaggcagttttttattccttggtttctctgctccaatagaggaactgctttcaaaaggttttggaaaagccatatattctgtttttcctgaagaattctgggctaagggttgctgctgttcactgggtgtagagatattatgagaaaaatctccaaaattagaaggaaataaagggctgaaattcatacctaatcagtaaaagcaatgggtaagagaaaaataaataaatgtctttagctttaaaatgaaattaaaagacagttttaattaaacatgt

SEQ ID NO: 100045 - DNA, 424 bp, Homo Sapiens
ggccgccaacttttgcttttaaaccagttaattagtttttattagatgcaatgcaatgttttgaccagacttttctctgtgcttttgggtgggtttccctattagcaggtaaaacatttatctcttgactaaaagtagatgacatctttccccaaccatgagtcctcaggttgttacagaggctgccttcctgtctcactctgtaccccccattgcctctccgagtttaaaaaggaaatgattaattagtcaaaagaatatgtcaaaaatgtaacatattatgtttaacataagtaactaatgattagtcaaaaagaatatgctaaaactttaacacattatgtttaacataagtaactatattaaaatttagaatatatttatgatttccaaatcaatggtttgtttttgcaaaacctgcacc

SEQ ID NO: 100046 - DNA, 633 bp, Homo Sapiens
cacagaacaacaacaaaaataatttccttgaacatattcaactagaatggcaaggcattttcctacataaaacattagaatgttcccattactccaaaggaatccaataaataattttacagtgaaagagcctggatcaaaactggaagtgacaccggcccccgatgaacacaagtcacaggtccctgtgcaggtcccagggctgagtcatccaagaactccaccaccaccgtgagcccggcctccggtttcatctttcccgaatgggactggctggaggggccaagctgctttacagaagagttccatctggtaagcccgggtggtgagcgaagccaaagatgacaacacgagaaggggtcaaagccaaggtttcctcacgctgcctttgtcttcttcctgcagcctggcccgatggctgaagctgggtcccaggaggcgagttcttcagcggggcctcctcacccaggctggagcaagtccgctgcacccgtcaagcggggaagagctcgggcgggctttctccatacaatctttgtttggggtcccggtagtggtatatgctgacgctctgagatgagtacttgcattggcccagcacaactcacagtgatcttcgactggcatgaagag

SEQ ID NO: 100047 - DNA, 549 bp, Homo Sapiens
tttaacattatggaaaaaaaccaatgacctttagtttagcacctcctggcagttcagggtgctagggtgacaaaaatgaatatgatataatcctgacctcatcatctactcagaggtccgctagagctcacaaactaaggcaataaacagagataaaatctctactacactgtattctgtacaatgatggagatatgcgcacatgagcatggggacccagaaaagggctacttagggtggaggaaggggaggcagaaagaatagcaggaacaaaagcacgtgggtaagaaataaagcaaacatgcattaatggagagctattagcagctccgtgctgctggagaggagggagaaatacactggtctttcagtggtatggaaggtcaacaggggacaagtcattctcaattgtatatttctgcataaatgagaatacaagatcattcttctacctttgaggctatacatgtaataatgtagtagctcatatatgatataaagtgttaattcttacttctacataagcaccaaaacctaaatggtcactta

SEQ ID NO: 100048 - DNA, 689 bp, Homo Sapiens
cctgttacctccagaagcttctgagaagaatgatgtgaaaagacagggagtgggttctaggcaaagaaaacataatgaccatttagaggagtcagtagcaaagctcacagataaagtattttattactatctgaagttttcttttgttttcatgcaggacattttaaaaacgtatgtggcagcagaaacttgtttctcaatagaaaaaatacattcagaggcatttctgggatagtctatctgtgttagtatttggtgctatctatgtccagccaagttatctaccctcaaattctgactaatcatgtttgtgctttgggtatttaaaattacatacatatatattctttttgccaaaaacaaaagtcttgcttcttgtcaaatgattgctaaagtagatcttacattttttgttattatgtatatatttatacacacccccaacacacttagtgatttctgttatttcctagggagcacagctttaaggctatgagatacaactaaaaggagcccatctatttggttttccagccaattattgtactcacatttcaggggagaatctgaaattcctgtcatgtttacagcaacaatctatcattcctggctagctctcagcctctctctccttccataggttagaattatgtcattttgttacttagtggccacgtctatttctgaga

SEQ ID NO: 100049 - DNA, 537 bp, Homo Sapiens
actacattgaatcaagcatgaatcatcattccattcattcatgaacctgacctagacccttggtctggccttgctcattgaccctttaatattaggcagtatttacagaactttacattgtaaaatgagaaactagcacacctacactttcctttacttttttggtttagcccttaatcacatactgcttgcagcgtcacttaacttttcaggtatgtagtcaaaatggttttcaggtcttgtagtcaaaaagccaagcagttgcctgtttcttttattccttgtattccttatagtacctagtgtagtccccttaaatatgttctgtgaaaaattaaacacggggaaactgttaagcatttcttattctggtgccctctatctaaagatgaatggaaagctacaagaagtagtttatcttcaattaatatctcagaacatttatgattccttctctttctcttttcctctctcttcctttaattcttctttgaatcctttattctaccctagcatttaaaaaattattccttttat

SEQ ID NO: 100050 - DNA, 779 bp, Homo Sapiens
catttgaacttgatacctgtgcattcagttctgtgaatactgccctttttggcggggtttcctcatctccccagcctgaactgctcaactctaaacccaaattagtgtcagccgaaaggaggtttcaagatagtcctgtcagtatttgtggtgaccttcagattagacagtcttcatttccagccagtggagtcctggctccagagccatctctgagactcgtactactggatgttttaatatcagatcattacccaccatatgcctcccacaggccaagggaaaacagacaccagaacttgggttgagggcactaccagactgacatggccagtacagaggagaactagggaaggaatgatgttttgcaccttattgaaaagaaaattttaagtgcatacataatagttaagagcttttattgtgacaggagaacttttttccatatgcgtgcatactctctgtaattccagtgtaaaatattgtacttgcactagcttttttaaacaaatattaaaaaatggaagaattcatattctattttctaatcgtggtgtgtctatttgtaggatacactcgagtctgtttattgaattttatggtccctttctttgatggtgcttgcaggttttctaggtagaaattatttcattattataataaaacaatgtttgattcaaaatttgaacaaaattgttttaaataaattgtctgtataccagtacaagtttattgtttcagtatactcgtactaataaaataacagtgccaattgcaaa

SEQ ID NO: 100051 - DNA, 472 bp, Homo Sapiens
cgacatcactgaggtacagccagttgcatttcactaggctcaagaggattgctgcctcaagcaggataaccaggcctgcctggaacagtgccatagtccgggatcccagtgacctgggtgagaagttgctattcaggtcaaagaaaatttcttcaggtgaccccactgtctctagccaatagtcctgcttgtggatcttacgtatttgtgtttcaaaaccacctgaggtcctgatgtggggtccttacctcctgtgcacagtgactcatgcctgtaatttgagtactttgggagtgtagacagaaggaaaacttgaggccagaacttggacacccggctgggcaacaaagtgagactccatctctacaaagtaataataatatataaaactaaaaaattagcacagtccaatgtcacaggcctgtacttccagctactcgggagaatgaggtaggaggtgcccatgacccca

SEQ ID NO: 100052 - DNA, 454 bp, Homo Sapiens
ttatctaccttgaggagttagttggtagcaccagcatctttgggtagaattgcttctgaccattggtgcccaccagccccaagaggttcagctgcaagtgtgccactgaactgaggacacagcaccagacctgaatccagttcacatggaggctgcggctctacagggtcctaggctgtgaccacccagcacagcggcgtgacccaggaaaggtggattcaacagtgcaggtgcagtgacaagtacagaggcagctccactccttcctcgtggccaaagtttgctcccttcttcagaagtttgggagtgtgagagaatatgggaaggaaataaggaccctggagagaatggaattgccttcaaagagcaagtgggaagttcctttcatttccagccagtgaaaaatggtcaaggtgtcagcaaacctcacaacaaatcccaacaccaagtaaaa

SEQ ID NO: 100053 - DNA, 523 bp, Homo Sapiens
atccctttttgggacaatcaagaaaaaaactcatgtaaacagtaatcttattacttgtatttgtgactaactccagggaaaagggtagaatatttaggccacttcaggcactaccatggagtgaactgaattcatacggatggcttgggctgacacagtttcttcccagtggaccaataaatcagactcacccgaacccctggggttttggtagaattggacctactctaggactgtggggaactaaaggagcatttggctcactgtagctcttctatcatgagccttgaccgtcaggccgcaatcagaccttactgatgggatctctgcagtttattacgtaggcctcccgttaccctggtacccaaatacgtcccccacctctagctccctagcctcacattgaatgtctcttcaacagcagattgtggtggaagttatagccgtgtgcctctatttattctctgaattgtactgtagaaaaaggtgtttataaagaataaagaaatcaccagaactgcca

SEQ ID NO: 100054 - DNA, 633 bp, Homo Sapiens
  misc_feature (556)..(573): n is a, c, g, or t
cagtacgatacatatcatccccccatactaaacaaatcaacccaaaaattttgatttcgcttaatttcgcctaacaaatatctaacatgtatatagcactttatagattaagtgtgttactattttctgtgcagtgggcaggaattataacttctacagatggaaaatggtctcttattgagaagttttttgtcaaaagataaccgtcaaaaggattcatgtccgggtttcatcactgtgtagtcccatactgtttatcactccatcacaatttgaaggctgtctgaaatatccatgaactccactggtaattcatggagttcaactctcttaaccaccctcctccctgacccatgatttttaccctaacagccatgagagtttccaaaaatgttatgttttacttttctagtgtatgtcaaaagacattttgtactgttttaaaattactattcttgctattcaaagaataaaaagtattgtttttcagatgatgggtggatcatgctataaaatggtaacaaagttttggaaataatagctttagattattccnnnnnnnnnnnnnnnnnngaccgcgtatgaggccgcaagcttattccctttagttgagggttaattttagcttggcac

SEQ ID NO: 100055 - DNA, 571 bp, Homo Sapiens
  misc_feature (41)..(41): n is a, c, g, or t
caggaatcactatctggggtatacagaatagtggcccacanagaggcccacatcctaatccccggaactgagaatatgttaccttccgtggcaaaaggggattcggcagctgtgattaagaaccttgtgatggggagggattcctggattacccaggtgagtttaatgtaaccacaaagatcctttcaagagggaggcaggaaggtctgaggcagacgaaagagctgtgccaagggaagcaggcggcagtgggatgcaggtggcctctagaagctggaaaaggcaagtccatgggttctttcctggagccttcagaaggagcacggccttgctgacccatcttagaacggcaggataatcaatgtgtgttgtttgaggccactaagtttgtggcaatttgttacagcagcaataggaaactactacactgtgtctgattagatcaggccaatgaatggagaaagtattggatttcagttgagtgctaaaacctggtctgtttaaaggttcaaattgtttgaaacagtttttacatctttaaataaataaattaccatctatacttaaaaaa

SEQ ID NO: 100056 - DNA, 445 bp, Homo Sapiens
aggaagattgagaagagtaaatagctccaaaagaaaaaacaaagtaaaacagaacaccaagtaggagaatatcaactgtaagtatacgccaaagtgaattaaaatccaccatggagaagaacacgcatgctgagaggggctctctccttggctctgccgtcctgaaggcagtgtggggagagaaggagctggcttttgatagcaatacggacactctgggagctgtgctgaatgtttcatactttccttaatgtaatttccacagcatcaccacaatcattactgtctctgctgtacatggggaaaagcttgagttaacagaagttaaacaattcaccagtgatcacacttacatgaaaaagccaggtattctatctgtctgataacttgagcctggccattacattcagttctgctgtctttaaaataaaaaccctggattaaa

SEQ ID NO: 100057 - DNA, 141 bp, Homo Sapiens
aagatcattatgtgcaaaacaccaagttttaaaaataactcacagaatggccttagttttcaatgtctgatggtatatttgtgagttgtgttatctgtaatatacatcccagaataaaggagtgaattaaatagttaaaaa

SEQ ID NO: 100058 - DNA, 748 bp, Homo Sapiens
gcttgtgagtaaaaatgtgcatttgtaaatactgtgtttttaggttgaatcaattaagtcttaaaactgtaaatttattaagcttgttgccagtaggtttaagaaaatcatgatctcacatgcctcactttgacatttatcatgccttttattaaaaatatcccttaggaacagtaagtttgccttaactctctgcatggtttaaaaagccattggttgtgtgtgtgtttacagtaattatgcagatgactaaatgagttgacacagtaaaattacttccatatggtacagtaacaacctaactcccttctacctgatgtaaccatttacaaattatagttattgtaccagtctttcaacatttcagggttaatctgacctatgcagaattctagtgtgaatttattgtgaaaatgctaaatgaaacaatttgtcagaaattatgtacaattttcattaccttcaaaatggatcttttgcactgtctgagagtatatatttttgcaactcaagacttggtactagttttaatacttaacacttactgacccaacagaagtttggaattaccttgcatataaaaattgaggttgaataaaatgaaaaattgttgttttctgttacattaagcctcttgaaatctgtaatctttagaatcccaatattttgttttttccattccttcactcgtaacttgaactcaagttttcacttactgacgcgcttcccattaaaaaaaatctgtaaa

SEQ ID NO: 100059 - DNA, 500 bp, Homo Sapiens
aaagggcagggtctctccggatgctccaaggtgctggacgcacaggtccctttctgtagtccttgtcatgtaagatcttttcatttaggctaagcaaatccagatgttcttcaaataattcaggcatatttggcccaagcataaacttgtcttcatttttcatccaatctgacaaacgtttgcaatcgcctcactctgtgagttccaggacaccttcgggctggaaggggttaatgagaacaagccctccctggtggcttcccttccccctggtgctgcccctcggcccctcccaggccagcaggatttgctgtccaaaggccctcaaaagacatccaagcagtcttttcttagaaacaggaaactgtcttcggccaagtacaaatgaagtgaagcacccagaaacctgaggaccgctccaaactgaggcctggaggcagacaggcagggcccaactcctgccagggcctccaggactcaggctctcatgaatgagactg

SEQ ID NO: 100060 - DNA, 539 bp, Homo Sapiens
  misc_feature (176)..(184): n is a, c, g, or t
atcagtaaaaggagtgttagtaaacacttcagaaactttaaaaataatgggcaatgattataaagtcaaatattatgaacactgtctatatagaaataacaagtagagtgtgctggtttcatctttcatagcaggaatcacgtacagtctctaattaaaacatacatgaagctagnnnnnnnnntagcctctttattgttttccgtaattgtccttaattttaggagaaatcttacaagactagattctcttgtggggaaaaaagtatttaaattgagcattttttcagtttcacacttgttttccttttgttaatttgctatatttgttaaatatagcatatgagcccacttttgtaaaactatttgtatatatgtgcctgtatgattaagagagatggttggaatgaatgaagttcaccagatagtacttctttctggctgatgaacttttgaatgatttttaaactttgtacttttatataatgcttattttctttttacaataaacatgttaatttctacaaggaagaaatgaaa

SEQ ID NO: 100061 - DNA, 384 bp, Homo Sapiens
tgccgcgtctcggccgccgggccccgcagtcctgcaagccgcgcgtcgcgagatccgcgctttaaaagccaaactccccgaaagggtcagccccgaaggaacatgatccagaaagacgcagcttcttaaagtaagctccccctgtcctgggtacgccgttgtttcctttgcagttatgaccatgtacagatagtgctctttgatttttcagaaataacaaaacttttaactcgtttacgacataaggtaactgaagagctctttcgttttgtttggtttttaagtttaaattctctaccaattggaatccagtaaaccagaatgattcattaacctgattgctttttttccctgtatttctcgtacatgagaaaaagatttttt

SEQ ID NO: 100062 - DNA, 362 bp, Homo Sapiens
gcggccgcgcggaggggcccctgtggatgccgcgtctcggccgccgggccccgcagtcctgcaagccgcgcgtcgcgagatccgcgctttaaaagccaaactccccgaaagggtcagccccgaaggaacatgatccagaaagacgcagcttcttaaaaattccttttgatgtagaaactcagagttgacaggaccttaaaagtcaccccacccagctgccactctcttgattgtcctctgcagcatcacttccaagtaatgacctgtctgctgtgtgagcacctctcatcacaggatactcactaccctgcacccaggcaggcaggatgtcctgtcactgcagatttcaactattaaaaagt

SEQ ID NO: 100063 - DNA, 418 bp, Homo Sapiens
taaaaaaaatcttgtctgttgcaacaaagaattgtttacactccctgcagtggtgtgccctttgtaatttcctagaaacagaatctcttccccccatggaaatgcataagcctgttgaaatgtaaggacctgccacgatctataaaggtaactgcatcagacacctgatatgacctgcaggtgctcagaattgaattcacatgaagcagaaactttcactatattttaacctttataggtacatgatgattggaatttttaaagtaaagcaaagttaaattctgcaaagacatgagtgaaataagcacactttctttcttaaaatctaaccctcttcttcaaagaaaggtaccaaaaatcggccaagaaacagggaataaccatctagttgtacaatagcctctgatgctaacatgta

SEQ ID NO: 100064 - DNA, 511 bp, Homo Sapiens
agtttgtttattaagagtcctggataagaactgaagcataacataagcttttaaggcattcctaaggtatctagtgacagctggcacataagaactactattaaatgttaaaagaaaaacaagaaaccaaatgaggaaaaattgcccaagataccttaaaaggctatgttgtaaaaatgtaaacatgatggttctattagagaggtgtgtaactgtacaatctcacctggagacatggaagcagagttgtacggcctgggagggaaagtaatctgtgtaccaggaatataagtgattctgtccatgggaggagtgcttgttccccctggatgaggcactaaaattgttggaggcatattggtcaggtcaatgattcctatccaaaagacaatacaatttatgttaagtgttattctaaaggtacagaaccatacatgactttggattttgtctatctctgtgaatcaagggtaatttgtacataatataaataaaaatgtttactatcaaa

SEQ ID NO: 100065 - DNA, 797 bp, Homo Sapiens
tttctcagcatcccaagttgtccatcagtacattccccttcaccttacctgatcttcatttaatgcccagtctgtaactaatgttctgtttaaagctctcttaatttgttggctatgagtgatttgtgaatctgggatgtaaccctgagtgaggagaaaagggcattgagccagcataaatctgaatgggcagaagccacaaacaaatgggagcagaaaagaagggcgagctcccccgcgccgcaccccgtgtataatccagtgttaacctctgaggaacacctcggctctcccaactgaggagagacaaaagagggattctttttacacccaggctggcgcattttcaagtgacaatctcgggctctagttgcctttgagatatccactctgctctttctcccaggcctcagaccaagaaaaacatgctctcaagattagcccataggcagttcttgtgacctggctgaagaaagaaaggagacctgtttgttttaaaagtcgggcgcaaagtgtcaggtggctttgatttatgacagaaagaggaagaagaaagttggagtaatagcactatccaaataaccctgcccaggaaacttgggggtcaagagagcttatcaagagccttttataggtaagctcttccgtgtgaaagagaaaaggccggaaagagggagagagcccagagagcaggctgcgaactcacttccaatgggattggagtctgttgtattcttaagagatagcctgatatgtggtttataggtgaatcaataaacaccaacaacaacaaaaaa

SEQ ID NO: 100066 - DNA, 544 bp, Homo Sapiens
aggtagactggggtaaagacggaggagaggatagtttagtttattacctaacagaaaggctattaaaatggacgagttgtagtcctatccctgacattttatgtccttggttaatgtgcttagccatcttgtgcttcagaaatgtcctcctatctgttcaaacctgtaatttttgaaggtttaaaccatgattttctgataatctcaaactgctcacatctccttgttagaactagtatcttagaaatgctaaaacgattagttctgaaatcacattgctcctaaaagaactaaatttttttgtattatcttcgtcttactattccctttcacttttataaagtcacagagagaagcactaaggtaaaatgaatgctatgttgagtttttaccatatatataacctagagcctaattttacctttcaaaactctagttttccatacctgtcaactcctaattgatgtctttatactgtgagctcactgtgtattcggaacaccaacccctgaaaaagcttaagccagagtagcacaatggaaga

SEQ ID NO: 100067 - DNA, 484 bp, Homo Sapiens
tctaaaatagggataatcaccttgaccttgcaatagagctgcaagggttagcagtgcacaataccttagtagtgtagggaacactgatagagcagaatctattgctttatgtttagcggggaagccaacttttcacagcaaatactggtatttctaatctcaggtatctgaagggttagctgttctgtttctgtgcatacatacacttgcatgctacaatttgttttaataaagcagattttaaggcaataaactgtttaaggggttccattagagtaatggggtaatactgtgtggtttggaaatccccacgtaatacaacagtataaactccagttgtttgtgtttgtggtaagtgtctttgaccacggccatttctagtcttggatattatttggaatttaaataattattcaaataattatttaaattatttatccattgaagttatatctgctttctctaacaagttttgatgtgagaa

SEQ ID NO: 100068 - DNA, 566 bp, Homo Sapiens
tttttatcatcttaccattgccagccttctgcatttcctagaaccagctgaatttgccaaaagaagtattaaaggaaaaacacactaactttgcaaattaagaactggtctttgccttctttatgttttgaaactcaaaacagacaaattttctatttttagtagactaaaaagagtaccctagaaatgacctttactttcaatacctgaacgaaccaagcgtagtgatcctaggaggctgttatcagcccacatttaactgaaattttcttgatactcctaagtcttagataactctttcaatattgtatcactaattcctaacatacaatcaatgaataatctgcagaatggcatgtgtgagtgtataacactgaataaattcatctaaaatatacatatttataacttagtagttacactttctagaaatttccccttgttttgaaaagaatagcagtagcaacagaggcaaactggcctatgactgatgttctaggagagaacagaaatttaccacccaatgtctttgccagtagggtggaaagaacaagatttacaaagtt

SEQ ID NO: 100069 - DNA, 800 bp, Homo Sapiens
  misc_feature (13)..(13): n is a, c, g, or t
gcaacatgaccancctaagtgggaagatcgaattggggaggagatgaaaagcaatcacggtccccactctgtctcccagggcctctctgccgctcagctctggagactcacagcgccacctctcggactaatgcaaggctgcagcctaaacaactcagctgatctttctctgaacttcctgtctttctgcttactctgctggggtagagtggtggggcgggtggggatggtggtagaggggcagtaattacattttatgtgttaaagtttcaccatgcagctcatgctggactagagcaaatagagagtagtgaggtcaatagggggcttccttcaagcggagtggttgatgatagggcggctcggctccaggaaagccggctgtgtcactgcagggctggcacatggcagagatggggagaggtctgccttccctcccttcctgcagaaaattgcccccacagcgcctccttttggataaggcacaaaacaccctttcttaaagttgccggtgttctggggcaacggatgaaacatcctggagaagcgtacaagctaatattagccattagccagacatccatagtcccctaacaaaaaggacaggctgtgacaatgcggggagcaagagctctgggccctgaccccagccagattgaagcctgccatgtggcctagggcaggcaggaagccacctgcagacaggggagggagagaatgtaaaagaccagggtgcagaaaggggccggccccagcatctccaggctccaaccccaccatctgtttcaccagactcatac

SEQ ID NO: 100070 - DNA, 546 bp, Homo Sapiens
aggccagaatgaaagttctatgtctacccagtgccaagttcaccatctctgtaactatttgttggatgaatatgtgaatgagtagaaaataaatcaacatactttttcatcaagacagtaaagtgggcagtgttaaactcttagggtgacacagacgattgctttaaagaaaaaatcataaagagtgaaaaaatagaagacttggcttatggtgtggtggcatttgaccaactgttcttgttgaggtagtgatttttgaggcatctggtttacaaacacctcaagggtatagcccaaacttggcatcttctggtagtggcagaacacccagtattcagggcattgttaagtatgacaaagggagagtcaataaatctcaaatgcattcagagacctggctaagatgctaaagcagccaatctgtgccttcccagtggcttcaatcacaatccccacttgatcattgtttgactctcctttaacccactatgtccatggaattcctttggtcagtgacacccagagtgggcaaaatccaccttgaaa

SEQ ID NO: 100071 - DNA, 527 bp, Homo Sapiens
gaggtattctatcacaagcaaaagagatgtgtgccaggcgccctgcaatgaggcgagcccatcactgctgtttcacgggctgggacttgcctgagtcacgaggctatttttaagttacaagacctgggaggtggagccgagctcgggcgccttcctccacgaccgggggaattcaaggcaattacaccgaaagaggtccgagtaagtgtccctgagagagacgaggcacgggtcagggtgcccaagcactgcggaagagcttttctacacgaaggctcttggagccggagcgcccagcctcaagcgcactccatgcccgctgggcccgcacgtggtcccgggggcccaggacctgcccggagagaggccccagccccgaggagcgcccgccctatgcggcctgtgttcgcggcctggccccggccggaagtgctcagtcgaacggcctggagccgggaaccgcatggagagccgaaagtcaccgccaacaggcagcccggccgccggcccgcgcccgcactcaccga

SEQ ID NO: 100072 - DNA, 348 bp, Homo Sapiens
cggcaacagacaagaaaagaatattatgctctatcagggatcgggtttatggagcaggtggaagatctatggaaccacagacaatctgtgctccagaggttatgaagccatgtatacgctactaggcaatgccaatggagcaacctgtgcattcccgttcaagtttgaaaacaagtggtacgcagattgcacgagtgctgggcggtcggatggatggctctggtgcggaaccactactgactatgacacagacaagctatttggatattgtccattgaaatttgagggcagtgaaagcttatggaataaagacccgctgaccagcgtgacctaccagataaactacaa

SEQ ID NO: 100073 - DNA, 214 bp, Homo Sapiens
aatctctctcatttttgtgtgttctcaggagcaggagagaagggatgttaatatgttgaattaatgttaatcattaaaaccatcacaaccccaaatttctttaatccctacttaatccaaattgattgaatttgtacaattttcatgaatgttgaataatcttgaggtgaaataatcttatttcacaaaaataaaaatttgttgaaatatcaaa

SEQ ID NO: 100074 - DNA, 682 bp, Homo Sapiens
aacattaaaggaattgcatttgtccttaagaatatcagaatacttttcaatctggtcactcttttgggccaaacccaagagaattttaagaaatgtttcataggtataaaaaggtgatcgcctattactgacagtctcattgtagctctaaaaagcctaatgtatccactgtggaataaactccatagactcaactcttctggagttcacaatgcctccctacctctattcttgatagtgagccagtatctctaaggaaaggagagccgtatttttagtcatcctagggcaggagccactgtggcatctgaggaagacccagggtacagtattagcatttctttcaaccctaagtatgggcatgtgaccagagacactgccaaaccctaagaaatcattagggcatgatcatgctcaccatatttcacaaatgaaatcttaatgtgggctgttttttatgatcaaactgtcatccatgttgacctgatgaaaataacaccctccttcacctccctcagggtaatgaaagtagaaatttgactgaagctcctacttccttatacagcctttccttctgtgggcttgtcacttttcagtacatttctagtggggaagagcagggcgacccctctgctgggtttctccttaaatgtgaagcaaaataaatttatataatggaaaa

SEQ ID NO: 100075 - DNA, 523 bp, Homo Sapiens
gaaaaaaacaaaatgatttcttctcatgtacctgatttcattgcctgcctagctccttttaccctgagtcctggaaccttcaccccacctggatgaatggtcacatggcctggtggcttaatcttttgagtttgcccattccaagaacaggctcaactctctcacattaaatgtgatccaaaagccagagagtgcggtgaggccaagctctatttgttgcgttctctccctgctttgtagagataactctgccctgatgctggggtttgtagttcagtaaggaaatggcccactaactttttctcaattttccaagaattttagagaatgactggcacccagcaaaacaaagaaggctgttatctccccttcctttattgtcctgtctacttcatggtgtatcgcctccaccactccagacatccactttcagcctggttcagctaagctatggaaaatattttaaatggaatggagaaatgtaaaatttgccatgaaagtaaagatttgtttaaatcttaaa

SEQ ID NO: 100076 - DNA, 513 bp, Homo Sapiens
  misc_feature (130)..(165): n is a, c, g, or t
ttgtttttttcctaaaaaaagccacttgtaatggctggtagttggagtgtataatcagagcaacttgaatctacgctcctgagtggccatcttcaacaatcaccctggaataaactctttttaaactagnnnnnnnnnnnnnnnnnnnnnnnnnnnnnnnnnnnntctatagagtgaactatatttttccaccttgcaaatagaaggggcaaaaatcaaccttgcctatctgatgatttagtgtcatagggattccaaaatgttatttgtaacgtgtaccttgatatgctaatggtgaaatctcctgtttcttgatttggtcttctcatcttacatttcttacctcaaatccattctgcgacttcaccagcagattaatattctttcctggtctcttggaattttaataaaaacagcatggtcatggggtttcatgaagcttgcagccctctgggggatgcaaataataatcaatcaatctcataattaaatgtaattttaaataagagctta

SEQ ID NO: 100077 - DNA, 530 bp, Homo Sapiens
  misc_feature (456)..(470): n is a, c, g, or t
gaggaaagaatttgaggcagcttaaatcagagcacagatatatactgtatgcactttgataaattttgatttttctataactgctagagaataaaaccatttggagagactcttgccagggcaactgtgtaatctggtggcactgtgtattggtaactactaactcactccttcctctgaaaagtgacctaaaaaacaagagtaagttttgggatagattctgcttctgcccctcagaaatgacaccaccacgagctgactttcaggattcttgaagtaatgtagtttatacaggtaagcatttgatgatttgctgcttatatttggctcataatgatgcaacataaaaggtgagcatatatgtaattcatcctggctctgcaaaccgcaggtctggcaaggcttaataaggagagtggaatgaagagctgcaactaagactaaactaaaactacnnnnnnnnnnnnnnnccctctttcttcaacttctgattgttttgtttaaatgaccagaataagatagaatgcctg

SEQ ID NO: 100078 - DNA, 537 bp, Homo Sapiens
aaatagatatttacaggatctaatagatattcacagaacatttcacccaacagctacagaatatacatttttctcttcagcacatggattattctctaggatagaacatatgttaggtcacagaacaagtcttaaaagattcgaaaaaattgaaataacaccaagcatgttccctgaccagaatggaataaaactagtatgtcaacaacgaaaggaattttggaaaccatacaaacacatggaaattaaacaatgtgctcctgaattaccagtggctcgaggaagaaattaagaaggaaattgaaacctttcttgaaataaaagataatggaaacacaacatactaaaatctatgggcacagtgaaagcagtactaagagggaaatttatacctatgtgcctagttcaaaaagaagaaaaactttaaataaatagcataatgatgcatcttaaagaactagaaaagcaagagaaaactgaaccccaaattagtagaagaaaaaaattataaagatcagagcagaaataaatgaattt

SEQ ID NO: 100079 - DNA, 501 bp, Homo Sapiens
  misc_feature (21)..(21): n is a, c, g, or t
  misc_feature (58)..(112): n is a, c, g, or t
gatgaaaagggtgaagaaaanaatgatgatagtcaatagggtggttttaaaagaggcnnnnnnnnnnnnnnnnnnnnnnnnnnnnnnnnnnnnnnnnnnnnnnnnnnnnnnncctaaaagtatttaactccccattacaccactgatttcaaagaaaaaaagctgaaatgtaagatcatatgatttgtttttaaactgaacactgtacactgtctttttatttttgcaaaattaatgtagtatccagtgtgtctttagataaccctgtccttaatgatattttcaatagccactaaccttgcctggtactgtttcggggtttaaactagaacagaaatctaaggcaggctttattagtgcatagtacaaatcaattacatatatatggagatattatttttccctcttcaattgtttttcatgcagcttacctaatataattgttctgttagttgtacactactctgtgatagcaaataataataataaaataattatgat

SEQ ID NO: 100080 - DNA, 570 bp, Homo Sapiens
gtaatattttaggtaatccaaaatgtactaaattaaattcatttttagttatgagaaatctttgcttatatgacaaatgaaaagaataacaagttgtcaaatgaaaagaatgacattgaaacatttgtattgtctcttcttaaactatcttattgacttattatttaagccttttaatactaagtatgaaacaacctatggtctggaaatttgtatcgcaaagctatatgtgcatatgttatttaattcatctaacgctacacaaaagcataaaataatgatttttcactctctttaaaaatactaaatcatttatgtccatttctcaattttttcattgatctatgctttgagtttgctttctcaacattattgtattttccacttattattactgtataacatatgctagtgtttagttggattaatcttacctaaaagtactgaaaaatgctttttagtactttttcatattttatacatttattttccgaatgtatcccattgaataattttattgagttataaaagtatcttattgctatttaataaaaaattaacacataaaaa

SEQ ID NO: 100081 - DNA, 454 bp, Homo Sapiens
gtctttctcctcctgactggtggtctatctgcccctacctctggccctcgctttaccggagtagggggtgggagagggaagaggagagaaaagacagggactttgaacctaggccatctcctgaggccttttccctcgcccatgtgggtcagtgggagctgcaggtgtcagcttttcgtctagtaacttaagtgagagagaaagggcagcgccacagaagcccctaaacgccgcctcgtcatacgcccctcctccttctctcttggcgaggccccgccacaccgcgctcttcctcccgggactgtgactacagcgctcccggctgagcgcgccccccgagccgccgacttgccgtctccccgtaatgccctcatgtgaatgttcttcgggaaatatttctgcttttattttataataaaattagaaatcataaatatataaatggttatatgcc

SEQ ID NO: 100082 - DNA, 331 bp, Homo Sapiens
  misc_feature (321)..(321): n is a, c, g, or t
ttcctatatcttgtgaataaagatcattcttgtggactagtacgtggatgcattcataggctttgggaagcagtggtgtgcgtatgtgtgtctatatcaatattttatgtttataactctgcgtattaagtttatatagaaaaaaataatgtctttctttagtgtttgggggactcaatggtaatatgaccattgcagtgtaatctgactgctcactctagagaacacttctgttatacacaatgcacatacaaacatacacccctaaagcgtagctaactgctcccactagataattgctgctaaaaacaaaacaaaacntatcaataca

SEQ ID NO: 100083 - DNA, 596 bp, Homo Sapiens
agtctcagctatatgactagtactagcacaggcactgtgctgtcgcttcagtgtctgacgaataattaagcccaacaatagattaggtctatgcagttcaagcccaggtccatcaaaaggcacaagagggtgtggaattttatctgtggcacccaaaggaataaggtacatatctttaacctgcttcatgttgttagcagctactccatagcgctttctgctactgaagtatgcaaagagcaaagtataagaaatttgatcttcttcagttactggtgtgaagcgaaccacacaaatttccttggttcctgatgcttttattttttccacataatcccaaactgtctgaggtgatatcctgccacctacttgaatactatctggtaggtcctctgtcaggtattctggggagccagatactggataggctttggtaacaaattttgccacagaaggcatgttgataaaacctttccagatgaagttcaatcgagccagaaaggtagactcaaagtcaacgttctctcctgctccacgtccagagatgcctggaactgttgaagttgagtctacctttctgatgttggagcggccgc

SEQ ID NO: 100084 - DNA, 341 bp, Homo Sapiens
ttcctggtgagattaaattacttacgtaactaatgcattttatgatactaacaatgaaaatacaatacaatcatacactgatgacagggatatgttctgagaaatgcatcattaggtgatttcgttgttgtttgtacatcacaagagcgtacttacaaaaacctaggtatatagcctactacacacctatgagctatacagttatatcctattattccaatgctacagacctgtgcggcatgttactataccaaatactgcacgcgactgtaatacaacaataagtacttgtgtatctgaacatacttaaatatagaaaaggtacagtaaaaatacagtgt

SEQ ID NO: 100085 - DNA, 466 bp, Homo Sapiens
cttcctgatttgaacctcaagaggccaacctgcatggactgcttccacagatcccttgtcctctgacttacagttgaattcaccaaatagaagacattggaaatgagacccgagggttggaggaggaggaagcctgcaatgtgaacacgatggctggagctccggcagccattctggaccaggaggtagccttgaagatggaagccacatgttgggatggtgaatccaaaagatgaggagcctgtatcccctgtgacaccagaactgccataccagccctgggttcctccatctatactgccttcatatggtaaagaaatattcttggatcttgttaggtgtctgttgcagccaaacacaatcccaactgatattcactgtaaatgattccatggctccctgtagtacttctacaaagcatctatcacaattgtaattaataaaataattatgcaattcctcgtgc

SEQ ID NO: 100086 - DNA, 555 bp, Homo Sapiens
ttttgcttatctaagaaatgcacgctgacttgcaaaaaatttaaatgctatagaaatatataatcagaaacacaaattttcctgtaattccaccagctagaaatgactattgtttaacaatttggcagtatattcagccaaatgttcactctataggagtgtgtgtgtatgtgtatgcatgcatatacatatataaacaaaaatgaattcacattattcatatacttttgtaatttacatgaaatacttcaaatgtaaccaactgtgtagtataaccaatatgtcttgaaaagtcaaggtgaagtaaatgagaaggaacaaaaggcatttgaaggaccccagggttgacgaaaatgacagacatgaagcggtttgtatactacgtatttggggaaggactgctggtttatagagatcttgtctctgttgggtgaaagataacagaatctgatttgctagtatttttcgtttgtctgcttttctactttggtttcaaaacaattaagaatttcatgccatcaggaagtagacatctgagtaaaattttatatttct

SEQ ID NO: 100087 - DNA, 306 bp, Homo Sapiens
aaaaaagctaacaaagtgagccctgattcaaaaatgactgtctacacttggcacatgagggactttatgatattaagagattaattaaacaacagtggatggggaggaagaacagacttttgagctcttcccaatataggaatgtgttagttctaaaaattttcttaagttgtttgcttggaactcagagtatatttttccatacgaaaaattcagaactattttatttatgatatgggctaaaaagacttctgtaatctagcttggaaacttaataatcattaaacttattttcaatgaaaaaaa

SEQ ID NO: 100088 - DNA, 520 bp, Homo Sapiens
ctgagggcgtaccaactgcttgtgaccaggaacaacctggccacagactgggataaaccatctacctcatgatgtcagcttatcacctgtatctggtgggttctctatgaactacctctccagggcacttcttccctcctcatccacatccggcctctaatgatgcctgttcacccctccacccagttatgctcccttacaaaattcagacacagctgaccacttccaactttttggagctggtagagttgtccatttggctcagttccgcacagaacaaaaccatttctgagatgtgtgccaccattcccgtacccatgggagggcagaccagcctccattgttaggggagtataacatttctgaataaatcagagtttcagagcaggaaatagccctcagaggttagccaaaccaacctcttgtggaacaggctatggcccaaaaacgagcaaggacttggtcaagattgctctggaaagctaacagcaaggcccagcataaacaacagctcttcaac

SEQ ID NO: 100089 - DNA, 526 bp, Homo Sapiens
tgggagccccatattctacctcagttaccgaaggctattagaacctctgaatttttcctcctctgaaatcctaagcacaacttcagaaaaccatgtctgatagcggatgtcttcctgctgtgaggagctgcttgatgtggggaccaaggtgtgggtgtgggcggaatgtatcctagtagaaacagtgaacctcagatatgaataaataagcaagagaccgaaagttaagtgtgtgacaacctcagtactgtagttaagctacattctttaaattagcttttgtgaactgattgggaacctaatctcttttgtaactgtttgagaaaaactctgaagcacctgatactcaaacaaacttatggtacttacttaactcatttgtaaattggcgatctagctggctgtagtattgctttgataatttttttcttttaatttacctaatatatataaggaaggggtttggatatattaaaataggtgttaattttatctatttaccaataaattcatcactttaaaaaaa

SEQ ID NO: 100090 - DNA, 389 bp, Homo Sapiens
tttgtttgcatgcaaaaggtatttagttatgtcagtaactgagacttacttaaccattttacaactctttccccaaataaagtacttaaaactctccctgcattagtaggtagccagtttgtattgtgtttataggtttttataaagtcagctactaacctggtactatgtagattgtctaactgtatagatagatagcattaacatttgtgagaaatttcaacaaagaggttaaaccaatacgtttggaattgctggataaaagacccagagcagttaatcttacaattggtgttttccccaaagtatagacatgactgcccgtaaatactgctggggagtctaggactaattccagaaataaaaatacttctggtctacaaaaaaaa

SEQ ID NO: 100091 - DNA, 500 bp, Homo Sapiens
agggttagcttgtcccatgcccttgtggcctgtcagagtcagcttctaacagcttagacccctggctaaggcatatccccagcccacaagggacagatagcaccattactgatctgacccctgtgaacacacaactctgatgccccctcatcgggcctcaactttcagtgcaaaggaccattgtcaggcacagtgaattaaggctttggtattggtgccagagtgccacgatcagatcctagctctgccgtgtcctgccaagctgtgtgatcttgggcaaggaatcctcacctcactgagccttggtttctacttccataaagtgggtttaatgaaacgttaatcctcacagagttgttgagaggattaagtgagaccatgcttattaggtgcttcttaataaattatcctaaagattattatcaatacattaatattattatctgcaacagtggttgagtagttcagaactggagaacataaattcttgattagccaaa

SEQ ID NO: 100092 - DNA, 687 bp, Homo Sapiens
atggaccacttcccctgtcacctcgcccatcctctcctctcacggtctccggtcgcacgcccgatgtccggcgccgtcacacccatctcaccaggcacacctcatacacgaatacgatctcatcccactcacacacgggaacttgcccctcggcgcccacatttcggcaccagtccacactctatatacatatgttcatggcagcttcattcacaatagcaaaaaatggtaaacaactcaaatgtccatcaactattgaatggaaaactaactgtggtatgctcatataatgggatactgttcaacaataaaaaggaacaactgatacagacaatgacatggatggatttctaatgcattatgctaagtgaaagcagccaggcacccaaggctacaaacgaaaattcctgcacttatatggactctccagaaaaggcaaatctataggaacagaaaatcgatcagtgattgccaggaacagcagactgaccatgaaggagatgagacaacttcttgatgtgatggaaatattgtatatcttaattatggtgatggctgtactgcttaaacatttgtcaaaactcatcaaactgttcatttaagaagggtgccttttattgtatataagttatactttcctaaaactgattaaaaaataaaaacaatgggctgggaaagggaagaaaa

SEQ ID NO: 100093 - DNA, 500 bp, Homo Sapiens
  misc_feature (238)..(258): n is a, c, g, or t
tcctctgtggtcctgcagctcccccaatcacctgccacagtgctctccatcctcccagctggcagagatctctcctgctccccctgtggctcttcttgtatggaccgcggctggcaaattagcctctttccacccctcctagcatttttataatccaccctcccctgcagcacctagcccagtgtcctcaggtagggggaggtggggaaataatagatatccctgcagttgcatttannnnnnnnnnnnnnnnnnnnncactttctgtaaaatgggttcttgcaggctcacctcactgacaggtccccacaatcctggcagctccaggactgtcagtcagctgctggcctttccagatgctcgtaggggtcttccatgcttcatggagaaatggctgtgagcactactcagtcatggcaattaaagaaacaggcactaaatttaaagggaacactgaaaggtagcctagaaaatgataccttagtggagcatgtttttct

SEQ ID NO: 100094 - DNA, 559 bp, Homo Sapiens
gaccactggatcactaactcattctgcaggctcccttcagcagccaggccagagcctgacatgctccaccctgggtgaagttgtactgaatcacagaacagccttcctccatctcccacgacaaacagacaaaaaccaaagagtggggaaagcaccttattgtcctcattgtattgggaagggctctcaggacatatgaaacctgtatcaagaagatctggtaagaatcaacaatcttgtagctgctgtgaatgcaacagctgtcatgccccaaccagggcatgctttgatgctaagactggatgtttcacaggcaaaggatttggctacttgttagctattaacccagcttggagtgcaacagtctaataaccttcattccccaaatcagaacaagaaactgcatcctctagggcccaccatgaacggctgtggccacttcccactgcggccttgaatggatgggcccagggatgggcaggagacagagcatcgggtcttaatacatttttaaaacctacctagcaatggcaaggtaaataaattaaaaggacagaaa

SEQ ID NO: 100095 - DNA, 453 bp, Homo Sapiens
  misc_feature (334)..(343): n is a, c, g, or t
tgtcactatgattttgacttaattgatatttgaaggactctgtacaacaaaatggccaaccaccttcttttcaagggtatatgatacaccttataatagtccagataattaaagggtctgaaattatggagagtatattctctgatcacagtggaattacattagagcttaagaaaaatcagataattaaaaaaacccaagatatctgaaaattaaacaacacattctatataatccataggtcaaaaaagaaatcacaaaggaaattggaaaatattttaatctaatgataacaacatattaaattttatcagatgcagctaaagcagtgctnnnnnnnnnntttatagctttaaatgtttgtttatattagaatgaagaaaagcctaaaaccagtgatctgcattcctacctcaataaattggaaaaagaaatgtaaattaaacctaaagt

SEQ ID NO: 100096 - DNA, 525 bp, Homo Sapiens
atctcaaagaagtgcggtctgccatttatctgccattttgaggatttaggtactacataaaatattagaaattcatttagaccagatctgtaaactggtagttcacataggccagtttgacccacagttattttattagatgtacataatgtttcaaaaatgtttgaatttgaaaagtcttttgattgggtgtgtgttccccagtttgccacagcctactggacttccctcttatatcagacaacttctctactttgtagttcctgctcagccctgaagacctctaagtttgagaaccctgatttagatctgtaattacaaaaaggttctgaatttcatgatttgctaatgtaattactattaagtcattttagcatgtgcattttagagtccttctttgtatttttgtaatgtggtgctttctctgcataaagataattgaattgttaacactgtaattgaaattttaaaaatcatttccaaatcttttattatatttcacagtaaaagtctatttaaaaagct

SEQ ID NO: 100097 - DNA, 344 bp, Homo Sapiens
ataaaaagggaaattagtgtttacttagtctagccctcatattttatggagggagaaattgagttctgtggagattaaataaataatacaagaattggaggtagagccagaactggaacccatctttctttttctcagttcatatccttctgcaaattcctctagagcagagaatacaatttttacttctttgagtgccctcaaaaatggagacattggccggggggcggtgactcacgcctgtaatcccagcacaagctaggaggctgaggcaggtggaatacttgagtccaggagttcgagactagcctgggcaacatagacctcatcttcattaaaataaa

SEQ ID NO: 100098 - DNA, 638 bp, Homo Sapiens
gaggtgatgacctcattgagtctcagccacagcagggcattatgcaggaaagaattcaatggagttatttaatacctttccctattcccacaaaaatctggaactgggttctgaactgagaagtctgggttccctgagaattggacatcagttcaaccacaggaagcctctaaatttagcactctactcacagagggccaagaaaaattcacaaatgtcacaaacttaggaacttaggtatctagtcttctctgtcattttgtaatgagaaactgaggcccataggtaaaacatctcacctccagtcacacaggtaagtacatggcagggcaaggacaggcacccagttttcccaagtccagtggccttttcatgatacccatttctgtgtatcatttcattgatttctgtgacagctggccctttgccccacatcaccaaatcttaactctttggactttaataatgtgcaaaattaagaggaagtctggcatcgggagctttacacaactcagagagaactgaggaaagtagttagcatgttaactgtgcctcaccttgacctgaagtgaagagcactcaccaagccacaacctgctatctgcacaccccacaccatgaggtaaaggacagccaag

SEQ ID NO: 100099 - DNA, 585 bp, Homo Sapiens
  misc_feature (523)..(523): n is a, c, g, or t
tctaaagaaaggtaggcaatttacaaaaaaatgaaatacaaatcatcaataagcagaagacgactgaaacaagctggagatgaaattctctcctcagactgaaagatgaaaaagaatcatccatacagcacctatgaggccatgaggaaatgggaattctcatacaccctggcaaagtttggcaatttcaaaattgtaaatgtgcatccactctgacttggcaattccatttacagaaaagcatcctaaagaaataatcataggctgggcactgtgggtgtaggatacagccatccacattaaactggaatgagaacaactagatgctcagggtaagggtgaagggaaagtactggttagcttctccagcctggtccggggaaccactgacaggtagggctcccaggggtctgacaagcaagtgaaaagacttaggcatcaaattattccaagtaattctgaaatgccagtacaccaaaataaccaggcataaaaggacaaacaagactctagaagcaaaaancaaaagcaaaaacaacagatgacatatatccagttccagattttgtctgctggtattcagat

SEQ ID NO: 100100 - DNA, 548 bp, Homo Sapiens
tttggagagggaaaagaacataattcctaaagaaaggccatataactatatcataggccaaccatgtattttatgtgtagtgtcttcctctgtaatatgtgaaaatatccagttagttagttagtgaaagacttaacgaaagaaaaacccacaagaaattattaaacttttactatcgaaaggatttactttggtggagttgagggtgggagagaaatgaatctttatgttctcctgttagagaatagcttttttccttccagctttcacactggcacatgcttattacaattctaccttgggaacatgacagaatttttttcttatgcattcatgcaacataaacagataattctaggaagactgtgattaagtcacttgcattctgacctattattttcatctctccctgactctgggtgagccaaaggctattaagatgatgttctcctgctcactcactaggcagacctctactcgagaagtgatctgacaccgcagtagctgatgctcgtccagtgactaaagcagtcaggctgaaaacagat

SEQ ID NO: 100101 - DNA, 449 bp, Homo Sapiens
tttggggggaatacacaggtgttcaatttactattatttcgcactttccgtgtactttagctatttgacaatacatttaaaaatcgaaaacttatcccataatcccaggctccagaggtgatagtaggtggtgttttccagacctttcccgctgccttgattttctgctaactggccaccatccttgtctcctcgcgctgccggtcgctgcagaacccctgcgcggagggactgccagttcccaggaaggtgcaggacagctggagcctcttcttctctgggcagggatttaaatgttcttgggtagcctcgccagagacctgtgcggccctacagtgaccttctttccagccactttcccatgagctcaaagctttggattctgtcacttgcaaagggtcaggcctgatcccttgcgggttcttgagaagtgagtaagacttccagcg

SEQ ID NO: 100102 - DNA, 539 bp, Homo Sapiens
  misc_feature (43)..(59): n is a, c, g, or t
taggcatcggcacagtaggctccagtgggttccagtaagcacnnnnnnnnnnnnnnnnnaaactgcaagtccagcctctataaatcacaagttcagcccctaattggtcctgggcaaggtcccgagccaagctttcacttcagttccttaataggtctagggccaagcaaagcagcctctacaaatcatcacttaagcccctaattattcccggccgaggtcctaggctaaggtcccgggccaagctttctaattagtcccaggccaaggtcccaggccaacctaaatcacgcattctccaaaacagccgggcaaactaagcacattccttcccgtttccagtccataaaacccccccaagtggcctcatagtaagcaacccattcgggcccccctctctgctggcaaaaggctcagatgtactggactgagcatttgatttggaactgagttacatgggagagaggcagggattcagtttggctgggaatcaaactcttttgataatttcctaataaactgatagtcattagatgact

SEQ ID NO: 100103 - DNA, 443 bp, Homo Sapiens
gtcatcagaaagttagtccagggtaagaaaaaatgtcatctccaggcccagagggatagcctgcagcttagagggcacaggtttgccagtgttcattgaggaggtgaccagagggtgaatgggcagccactggcacaaactagcctgctctctgtggccaagcctgccctctgtggccatagtgaaagtaccaactgggctagggatgcctctgcccttagggttggtgcccagagttcatgccagtggcttttaagtgcctgggaatcaggaacttcctcagttcaccaggcctccaagccccaggatgcctcctgacagttctgttaaagacacactgagtcttctccaaggaaaattgaggaaggacacacccttcccaatattggcttctttcaataaatttctaaaagggagccagacatggtggcgcacctctatga

SEQ ID NO: 100104 - DNA, 812 bp, Homo Sapiens
tttgtggagtttggtgatgctcttgtatggagtttagcatcttcaaatggttgatgtatttaggttgtgtgtaaagctctgtgctttctgcttgttgttgaaatgcagcctggtttcctgcaggtcccttggggtgtgggtgggagctgatgccttggcttgcattgtgggtaagctcagcacagaccacaaggcaggggctcactgtcccacctgcgtgtagaggctgcctcttcctcctgggtgtcatcagccatccaaagctctgacctggtctccaccccagatttcacactgacaggtactgctgggtgcagaagcatcacttcctgacctggaaatcgttcctaataatgcaaccgaaaggccatcccacatttttttccttcacgacactgaccataatgaagagttagtaaatatttactcatttatggctgtatttgcccactaaagcaagctctatgaaggcagagataaagtctgtttgggttaccaccaggtacccagttctcgacactgcatttgacacacacttatttcaagaaatccttattgaataatgtgttgtttaggcttccataacacctttcatttaaagaaagggttcttagctcaacacagtttgaaatcaaccacgagagaggacaccttatcaaagaaggagcaaaggaccttgtgcttctgtgtaggttctgtggggaaaggtacctggtgaggtctgctgcacaggccccttgtccagagggagctgcagtcctgccgctgtcctaggctgacttcaccttcccgagagcagggagctcattttc

SEQ ID NO: 100105 - DNA, 566 bp, Homo Sapiens
ctggaactagataattaatttcactgcaaattagaatcattctagaaaggaaaaaaacaagaaatgtaaattaagatttacctcatttcagagatataatcctgcaaaactgtacatataactttctaaagcccttgattttcactcttttcaattttgctgatccacttatttgagaccaatcaaacgcctgcttcccactttagaccttggaattgcctgtcggttaatttctggtagttcctgcagtttgccttactgacaggccagtgccatctaatggtaaaaaaggacagtctgaagctcttggttttcttaaactgcccagtgaaaagaaatcattttcttcattttacttttcagttcaggaatatattgcagcaaaagagtggagacaacctataatttttgtttatcaaattttgtgaagtctgttatacagctttatttatattttgcctaattccaaaagcatttgtggccattacagaaaacacctaccaataaaagagtaaaatattttttacatgtctagtcatttaataaatgctattttgaattgaaaa

SEQ ID NO: 100106 - DNA, 451 bp, Homo Sapiens
attcaattaacacttttaatgttaacaggtgtggaccatcaagagattgtctctccctggctgccgaattctcattcttagagaggcaatttgttaattgctgaaccatcacctgacatttctagtgggtcgggagagagccctctgctgccctgttgatgcctaactacctgtaacaatctgattattgtaagttttcctgtatccagtatcacctccaatatttatcaaggagttgtgtgaaataccacctcacaaccagatgaagaattttatcaccacctcctccaattcctcatgagggagaagtaggaattgctctgagcctaaggtagaaaccgttcctgaaatgttgaaaaccgtcattgtgagtaggtgagtggagtggtggagtagtgaatcacctgtacaatggcactgtcaaaagacaaaattacaacacatttagttt

SEQ ID NO: 100107 - DNA, 282 bp, Homo Sapiens
attccggcaatatcttcctgtatcttcaaacaggagattgtttcctcatgggtccctcccaatgttgccaggaagtgtctggtcagcagctcagcatccctagcctagcatccaggggcctccaaagaggcccacttgaaagtcaggccaccccatctgccatgggatgtacaaccaccataacatcctggctcagaagagaagggccactgcagtcaatacctggggggaaatgcccatcatcctcatggataacaactagaaactttgctaaatcaccaa

SEQ ID NO: 100108 - DNA, 604 bp, Homo Sapiens
  misc_feature (586)..(586): n is a, c, g, or t
tgcggccgcgtgtgggcacgacaggcttctttgggaaagacaactaaagtttgaaatacaatcctacagacactttttgagtgcctactatgctagtcactgcactaggtgctggggaatggaatgttcaagacgttctccataacctcatagcagcgggctccagcggccatgaggagtacgaggagtattttccttgacttctaggagtatgatgagtattttccttgacttctctccacttcctaggaacaaagcacctatttattaatatttcagaaataggaaaatgctcatgaaagaagagagacaccatcctcactggattaaactgatgactgttccaggaaggagtcttgagacattgctggactgatatgtgaacactgcttgttctctccaaatccacttgcaaagtggacgcacctggtccctgctaaagcctttttctttcctggcttctccaatgccacgagaacaaaagatctctcacttcagtgtcctgacgcccctacttctcttacttccacatcaagtcttttcgtttgtcatctctggaagaatctactgaacctatttctctcanatggcaccacagagtcag

SEQ ID NO: 100109 - DNA, 371 bp, Homo Sapiens
  misc_feature (114)..(187): n is a, c, g, or t
tcacttattgagcacttatggatggggccagtatagtggcctactggtttagagcatgggctttggcatcaggctcaaatcctagctttatcccttaccaagtgacttaactcnnnnnnnnnnnnnnnnnnnnnnnnnnnnnnnnnnnnnnnnnnnnnnnnnnnnnnnnnnnnnnnnnnnnnnnnnnttttgaggagtagagaaggtaacacacataaagcattaacagagcctctgagagctcatatggcatctttgtcaaattagaaaaaggtgtcccttcctccaggcggcacagcctcatgccagggtacggagcaaacagagcaggggctacgtttcagcctcagcttgcccctttggccaggctc

SEQ ID NO: 100110 - DNA, 535 bp, Homo Sapiens
tttctctagagaaactcactgcagagctgggtaagttctgggtgcggggccacagtgctgcctgtcagcggaccctgtgcctgtgcagtgggaggaggggctccctttggacagcggctggcaactatctaattctaaaccatccctgtgagcctccacctcttcccttgctaaggggctgaaaggatggctgcctgccaccgtgcagctgcccgagaccctctgcacagaccctgccagctcctcccctgcaaattagacaattcagttaaaattcatcataaaacgtttactgtctccggttcatcttcttaaaatatccttttctttttaatgcaaatggcactaggaagggtggcacctttaatttgcaccaaaatggaaataatttctcagatccacttttctccccagagggactcagagacgtgaaaccatgggatgtgtctctgtagagaggaagagagagtgaacccaagggagggggaatggaggaaaacgccatcatggtgttggggctgggggggcaattcag

SEQ ID NO: 100111 - DNA, 464 bp, Homo Sapiens
tactatgtgccagacctggtgcaaggtagctggcacacgctgttcggtgctgatcaagacaggtgtgctgcccgctcaatggaacgcaagttcttgcatgcgaagactataaatatcagtaaaaaggcaaagtaaatgcaatttgtgataaatgctgtgaagaaaataagacactaaaataaagacctggtgggggcttactttagaccagatggtaaaggaaggagacatttaggctgagacctggggcgtgagaaggagccagcttccaggagggtaagggcccccaggttccaggcagaagaaagcctgggcagaggcacagaggtgggcataagctccctagtgagcaagacagacaaaggccttggcctttcagagctaaccatccaaggactgtgctacccagcatagtagccatcggccacacgtggctacataaattaatcaaaattaaaagcagg

SEQ ID NO: 100112 - DNA, 555 bp, Homo Sapiens
  misc_feature (91)..(99): n is a, c, g, or t
cagcctggcgatgatggatatgaagaaatcaatgaaggctatggaaattttatggaggaaaatccaaagaaaggtctgctgagtgaaatgnnnnnnnnngggagagctttctttggaaccatggataccctacctccaccaacagaagacccaatgatcaatgagattggacaattccagagctttgcagaaaaaaacatttttcaatcccgaaaaatgtggatagtgctgtttggatctgctttggctcatggatgtgtagctcttatcactaggcttgtttctgatcggtctaaagttccatctctagaactgatttttatccgttctgtttttcaggtcttatctgtgttagttgtgtgttactatcaggaggccccctttggacccagtggatacagattacgactcttcttttatggtgtatgcaatgtcatttctatcacttgtgcttatacatcattttcaatagttcctcccagcaatgggaccactatgtggagagccacaactacagtcttcagtgccattttggcttttttactcgtagatgag

SEQ ID NO: 100113 - DNA, 547 bp, Homo Sapiens
gatgacaaagggctgcagaaacccgggctcctcaggctgtcccaggtgtcctggtctgaagagtgttccaaagcattctctccaggaaacgctgccacctgtgcctgggtcagcctcctaggctctcctgactgagcataaacaggcagcccactgacatcccgggatgagagagcagcacctatagaccccctcctggcttctaagttagccagtgcctgaagctgcgggcccgcctggaacacgctcccattgccaccagaaaccgtcgttgtatggctttcttcagaacggggagagacagtcacatttactggaggggaaaaacctaaacattttgggaaacaggtgaacatggcgtgtactgtgtcatggcccactcactgcactcaccacccaaaaccagctaggccaagtcacctgccctgcagaaaagtcaaagcatcgatgctccttgctccttgggattggtagcaattttaaaaaatacgtccctattctctattcacaaagacagattttgtattaaaaatatgctctaagagcc

SEQ ID NO: 100114 - DNA, 541 bp, Homo Sapiens
gctgaacaagtaagcactaataataccagtgaaccacttgggcaccttgtgggtagagttttgctgccacctagtggaatgggatatcattgcttccatatcaggttcacaagcaagttaagtgggcacagtttatttctgtgtagctcaggctgtaatcttgaaagctgaggagatacccatgcctctcagactcattagctgggtgtcacattaccacctgcacattctgacccaccgcatcttaatatgttttgtcctcttggagaaactaggagtagaagtcaggatatggtaggtaagggggaaaaaggaaagacggcttgatagctatgaatgcatgaggagcgaaatgttgactcagttatctagatcatggtctccaaacctgatgctatttccttacaaaaatatttgttgagcatgtgtccataattatatgtattgaacaatgaaaatatgtgtcaacaaatgtactgctacactaatgtgaacattatggaacaaaatttgaaagagtgaaataaaaggtttacacttt

SEQ ID NO: 100115 - DNA, 814 bp, Homo Sapiens
  misc_feature (20)..(20): n is a, c, g, or t
taacctgaaatgtccaagtntgaacacactagtaatattaccttttgcaatttcttccctcctacctcctctaaactattgaacaagtctagacattactatactgttcacaaaggtggcttcacaattcaatttccaaaagcctttcctatgaattttagcaaaaagatatttacaaagtggtattttactacctatccatttaacatacatcgggcacttctaaacatctagatagactagatgtttcaagtaaggagttaatttgtctactatgtatacagcagtcttgaataaactgcaaacatgtaacaacagttataatttgaaagagtcttccaaatgtgaacattctggcctagaacccttcccatctccatcaacccagaagacatcaaattttcagaagacaatctttcctaggacttgtaaagcaaaatgtacaaaatatactagtttactaactctacttttgtcatacactggcaacctcttcaacatccagaaagactagatgttgtcaattaggactcgtctgtcctttatgtacactatatacacagataagtaaaacaaaatgcacagacataatgattcatcttgcctcgctgtaaacaggatggcatagagctctctgcacctccccctcctctctcctcccctgaaccactgcacaaacacaatgagtattactcaacaggtgatttggccattcccccccaaaaatatttcctatgaattgtaacaaaaaggtatttacaaaatgtgattttgctacctctaattttaacatatcaggcacttcagaacatct

SEQ ID NO: 100116 - DNA, 559 bp, Homo Sapiens
tggactcgggaacagatgagcacacccagctctcacaaacacatccccggtgctgattttaccccatccagggctgggcacatgacccaaagctgccctatgggagttcctcagggccatcagaggagactgctccttttcttaggcattgctaaatagaatgttagttggggactgccagcagccatcttgccagctctagagagagaatttggttgagagggggagaaagggcacccatgacatcctctgaacccctgaagccagccatacctgaagctggtgtattcctggactttccaactacacacatctctagcccctcttctttgcctaagtagtgtgggctgagtttctgccacctgccaataaaatgccaagaataaaaaaaatgggtcacccattcaaggaagccaatctaatagatctggctttatcttgattgtggtggtttcccaggcatatgcaactggtaacattcactaagttgtacactttccgttactgcagcttcttgtaagtaaattctagctcaataaaactgttaaacataaaaaaa

SEQ ID NO: 100117 - DNA, 545 bp, Homo Sapiens
gtccttggttatatcaccaaatttcaattctttgggtgcacttgggcgagctgaaaaaaaatgcactcacgagtcactgttaatagtctgaactaatatttgttaatactgccaaatcaccttagatgataaatgttttgttccttaccaattacattgacatcaatttccccagaaattgttttcacacggttttctaatttcagtgtataaatgcccttgtctgaacgttcacttggagaaatgacaagttcggcataggcagacaaggtcttcattttcacccggtcccctgtttctagtactttatctccaaaacaccaggttgcagttggccttggatagcctgtacttggaaccaggatcgtgataggatttgggacaataacttccagaccatctttaaatgcacttaaatccattgttggttcaactacaaagaagaaaagttaatgagtttgcagtgccatatttaagtccctgttgccccaaagtagctatgtgctattccccgatctaaaaataaaatatctatttaccaaaaa

SEQ ID NO: 100118 - DNA, 459 bp, Homo Sapiens
gcaaagggaagaagaaacaagacgtaattgtgcacttcataattttacctagagttcaaccttgaaaggtcacatattaaggatagaagtttgtgtaataacgagaaaacagaggatatccgtttcttcacatactggataaacaacaatccacggatcctgctaatcatccaacccatatgttgaattgacaagagtatttaatttcctctttctgctttgagaaactaaatatcttgacagtctgagcacagtggcttaagtggccttaattctctgatttcataagttaatgattaggttgaagctataaactatagtccattccatttaagacctggatcaaagttagcttcatccagcatgttttagcacgtcctttctgagctatgttgtcagtagttaccattcagttccaccatcctgaatattctgcagttgataaaccattttgtgaat

SEQ ID NO: 100119 - DNA, 555 bp, Homo Sapiens
  misc_feature (418)..(427): n is a, c, g, or t
aagcaaactaaaatctgattcttcttattagaaagaagagtgaatttctgcaattattttacatttgagaatttaatgtgatcaggtcataggtattctcacaacaaaatttgaagcatttgcttgactttatttcacctgttgaaacaaaagcagttctcagtatccaagtttattgctttactaaccaatgtctctgttttttgctttacaaacatggtattggttctcacaaattagttcaacttcccggtgcattcataaacatatacccacgtttagttttccttccagtgcacaaagtttccccagtaacctaaaagtactaaatgttctacattttgtgacttgtgttctttactttttggaatataaaaataatccttaaagtttaatttaaactgggagcagtgaattnnnnnnnnnntgtaagcttgaaactattgaaaagatcatgaaaatgcagagtattttttaggatgaagctcttcaaaaagaagaaaatttggtgaatctctgtactatagaaatggctgtatcaattggaggtaaaaa

SEQ ID NO: 100120 - DNA, 442 bp, Homo Sapiens
taccatttgaaaggcttgcagctgagtttcttcctaagctccaatctgctctgaatactggagaagagggaaataagattcctttataaattttaagaatagatgggctttctacatcaaacttgaaaatctgctgaggagaacagggttggggcaggtggtgtggtgtggactgcccatgctcctgtgcccacaaccccttcccgccttggcacctgggtagctgaattcaacgctgggggcagccccttacctcccacccccacaccccaagaatccccagtaattgtgagaaggcagaactgccacttactttccataaggaacgtttctagcagaaggcactgctgcataatagaaatttttgtattcatccatccagacctctgctgcccggcgggtgtttctagaaagaaaataaatcttgaggtgtgatttcctt

SEQ ID NO: 100121 - DNA, 438 bp, Homo Sapiens
catacgcaactagaaaggagtgtaactgatatttaaaccctaacagtctggttccagaatctgtgcttttaaagtcaagatgaaaagcatgtctgggccttgacccttggaacccacccctaccacacaggctttagctagcagaggggcagcaaaggaagacagcaagaggtggcctctggtcgtagctctttgtggtttgccaaggctttctggttcactgactcaaaagggtttggggctttacagactggtaagatctcccaaactgggtagttgtactttaattttgttaagtaaaaacatttttaaaaatctgctaacatcactatcatttcataaagtaaatgtaatttcaatgcaaataaaccccaagaaagacacaatctcagagtacagtccaggcctttaggttgaataaatctacctttgtaaaca

SEQ ID NO: 100122 - DNA, 920 bp, Homo Sapiens
tgttgttctcaaaatgccaaatacactttgtcttagtctaaaaatattgaaagctaagcacaagctaggcatggagttactcattgagagttaagaaaacaattgactatgctgaagaaaaagagataggttttaatcaaaattttatcatttttctagctgtcactctacatattggaaatgatgaaatgtatgaaaaggactcaatgtcatattgactcattcataaaagtgtttatagaatgcgtaattgggaaaccctgtttgcagagcccagagtcatgaagaacagaactcaggaaacccatttaagaaaacattgagaatgtatagaaaagacctctatgatggcttctgcattattcagattactcaaagaaaagatgtcagtaatgcaagttaaaataggtattttattgagaaacttgctttgtcagtgagaaagttaacagttacaaatattttcatttaataaaattagcatatttttaattctaaaaatgtctcttaaaagcctttattatctgaaactgcagatcattctgatccagggttttcttttagggtctcccatggaaaaagatattgcagattccattcatgcaaataacagaagtagtatgacttgttcacaaacaaattctccacttgagtttcagttgtctgcatgcatgtgaattaacatctttattactgtaactagaaaaatctcctggtaacagcaatgaggccttagacttacccttgagcattcagagtcataatatggtcttattaaaaaaggaaagttccgcagcaagacaattcagcttaaaaacatccccattccctaatcacaacttaaaattggtataggttaatagtacactaaagtataatttatttgttattaataaatatactaggcttccatgcaggtt

SEQ ID NO: 100123 - DNA, 550 bp, Homo Sapiens
gtttagttttcgtatgaactctcttgaatccttctgacctactcagatcatttcacagccatgtcttttattggccatgagaagctcctaagcagtggtcataactgggctacgggggatactgattgatgaacatgtacagtgtgtgttaacttagttgttgttggctgataaacgtggtctttccaccttttttgtagacccgacccagctttgtattatgtgaggccccaggcagcctttggataaagctttttcttcagcctcctttcactggggatgccagaggcttagaagtagatactgaatgtgaatttacaggaccatagtattaagaagcttacatttatagagtcattgatggaggtggaccactacgttctctgataaagttcaatgcttagaattacttcctggcccaaatctcactagtcttctgttcaacaaacttgtttgatgctgcttaaaacacatattaacctaattgcatcatatttacaaaatggtaggagaaaagagactgtgtgtgtgtatgtatatgtaatccatt

SEQ ID NO: 100124 - DNA, 498 bp, Homo Sapiens
ctatttacttcatcaattgcctcttaatgtgcttggttagctagttcttctctttccactttttctattgtcccctgggctgtaccctcctaaaacacctctttgaggatgttattcatcagctcagaattctagcagtttttgctgccctgcatgatagtgtctagaaaaagctaaatcttttcttgtctgctctccctttaggaaagggagtcatagttacaaccagtgaaaatggtggatgtggtctctagaaacatgtgccaatgcctgttaaaagaaacttgtatatcttccaatctgatgaggtggctggtgccacctgttctccttccttactgccatgaatttgtttacagaggagctgcagcagccattttgcaaccatcagggaataaccaagatgctgctcttgaccttgagcaactgaacaaatgatactacttctagattccttgtttatgtaagaaaaataaacctttgtttaagccacaaaaa

SEQ ID NO: 100125 - DNA, 553 bp, Homo Sapiens
  misc_feature (25)..(25): n is a, c, g, or t
  misc_feature (312)..(341): n is a, c, g, or t
ggctagcacaatacctactagcagnaggctagtattagtacctacagcacattttcaatctcttgtatctgtgttctttaaatcctcaaaacagtatcaattcttatagttgggtttttcttagaacttcaacaattatagtatcataccattcagcacataaagataagaaatcactacgtctgaaggttaaaagtaaactttagtctaacattgtctcttatttagttcatctccaacaaactatgtgccaagcattgtgctacatggtagaatataacagtaaatacgacagaacaccatgacaggaannnnnnnnnnnnnnnnnnnnnnnnnnnnnnattaagcaactgtaatctggtatagtaagtaggaggatacacagggatacaaaaaaatacctgtctcagtcttagaattttagcatacatttcctgaaagaactgatggctaaactgagacctaaaagatgaatggcaactgacttggaaaaagtgagggactgagaaggaaagtgagaaaaatataacaggcagtgggaaaaagcacaggc

SEQ ID NO: 100126 - DNA, 550 bp, Homo Sapiens
tttaaatcacatgttgaccatgcagccaattgttggcccgtagagtgaacaaaaccagaccacaagattgagggcttggagctggagaaagggaaaagaaaaagcagactgtgactctctggggaaagaactgaaagatgacactaggaattctcaaagcgagaggaaaaggaaaggccctttttcggaaatgacctctgataaacacaccctccagggttacacctgccactgtgtcttccacggacagacaagctgcactttagcagtcctgaatacctagagacttccttaacagagagtggggaatctcgtcatcttgcatggggatgggagctcgaagggagaacctcagccttccagaaggttatataaaaccagttgagaatttccctaagaatggagcagtggacaaacaattgttattgtaatccaaatacatgagtctacctacataatggagaaatgctaacttacagaagggtcaggttggtgtttgaatggttttaatttccttttataaaattacaggaattatacaattaaaaaa

SEQ ID NO: 100127 - DNA, 462 bp, Homo Sapiens
acaaaattcacctgcaatgtatccgacagtgggcagctgagttaatattccagagacctttttggaagaacttcttaattcaggcaattaccttgcctctcgggtaagctccccttgctgagagggtcgaccgacttacagggtaaaggtcacctcagctgggatccccaaggaagaagaaggtgttcactgcaaggaatcaacacccgaaaagccttcagaaagttccacccattcaagacccagaagctttttgacagaaactctctcccagtgcctgtcttagaaacatacaatacctgtgatactcctccccctctcaacaatcttaccccttacagggacgatggaaaagaggcactcaaattctacacagacccttcatacttctttgatctttggaaggagaagatgctgcaggacaccaaggatatcatgaaagagaagagaaagcataggaaa

SEQ ID NO: 100128 - DNA, 320 bp, Homo Sapiens
tgctgttgacaggatgagttcatgtctgtcaggtgttttagaacagtgactcccatagtgctcagtaagtgtttccaagctagcagctctggctcagcaattccagtttgtacatgtcccccaaggaaatgactaagtatgtgcagaaagcattctttataacagggttagaattggaaacaacctaaatttccaacaaaaggggagattggctgattgattcatgggatggaatagtatgtgatcacgaaataagtcattttaagacaaagattttatggtaaatttattaagtgaataaacaaaggtttaaaaacaaa

SEQ ID NO: 100129 - DNA, 485 bp, Homo Sapiens
catgaccaagcctcccttggccagctgtgcacctggtaaggccgctctgggataaccaccaccccaggcctgggctgcaggtcttggcatcctgaagatacaagcaagaggagacttctttcctcatagcctgtgagtcactctgctgggtgccctctgacagccctacccccccaatgcctctgacccctggggtcccttgctccttcccccaatgagatctgaagccaccaggatcccaggtcacccatttctctcccttgaccgtcacagtgcatctggggagcctttcagtcttgtcgcaggttgagcaggggcctcctggggtccagggcagtcctgcttcctgaggctagggctccccagccaggccaaaccccaggtgcagggctcactcctatcctgctctcttggcctcctgagcagagcttggcatgcagtagatgctcagtaaacactaaacaaatgccttacattctcctaaa

SEQ ID NO: 100130 - DNA, 243 bp, Homo Sapiens
tacaagacattcctgtttagaccacttggagtactgcaaaagaaaaaacaaacaagatacagctttcataacccatcatatccttgcccagtgcacatcatttgttgcatagtggtgactggatatgatccaggccaagacaagaccaaaattcaaaaaatacattaacagccattcttcctcatactacagtaggagataccacttgggacattcatatccaaagaagtaatggtatgactt

SEQ ID NO: 100131 - DNA, 517 bp, Homo Sapiens
  misc_feature (17)..(17): n is a, c, g, or t
  misc_feature (61)..(94): n is a, c, g, or t
aattacagcacaaaganaactaagcaggtgcatatgaggtattgtctctttatgctcatcnnnnnnnnnnnnnnnnnnnnnnnnnnnnnnnnnntattgttataaattgcatgaaatacatagtgggctcgattcatagcccccgtccgtatctatatctctatatctatagagacataacttctttcttcgtaagttatatatgtctacttctacctgtgttatcataataaaggtgtcatgatgatacaggtggaggtagaaatatataacttatctcttcataagggctaaaatgagaactaaaagtaatgagaattcagttgaatatgattaattatcaggatatgttaattagttctcttgatgcttactgtgatgcaaagtatgtgacgtattttaaacattttataataattgttcgtatgttaaccattaggcaagatttgtatttctaatgcttttaatgttcttttaaaataatgtttggaaaataaaaatactgaaaatcctaaaa

SEQ ID NO: 100132 - DNA, 491 bp, Homo Sapiens
tgcaggaaatcagatatcctgatcagaagtgacacacacaatgatctaggttcatcacagagacatccaaagtgtcataaaggcaccacctaccaaagtgggttgttgtttgtttctaggataagctaagcacagtgatggggatgcctcctggatagagggaactgcatatgcaaacttccaaggaggaggccccagaacctcttggatctgctgggaagactgggctgtaggaagagggtgggaggaacagatggagagtcacctcacctgaactccactttctttcaagaatgcagcatagcggactgcaaaggatgtgggcttcaaagccacagaaatgggctcaggttctgattcctgctcacatctgtgtgaacctgggcaagacaacttctttgagcccagttttttcatgtcggaaatgacaggagtacgtacaacctcagaggttttataaacattaaataagataaagtatgtttaaaaaa

SEQ ID NO: 100133 - DNA, 388 bp, Homo Sapiens
tccagctgaactacaagctctataagaaaaaacaaaacaaaacattatttagtgctgtatcattttagcatcctaaatgtttgtgattggtgaagatctgctgtattggtaggttttttcaacttaggaaatatacactacacccagtcaccataccttggaaagttgctcctctgactgaggttctgtaggcagaacagtccctccttgtgctttcatttcttctatgtatttattcaaagaagttaatttggccttcgcatgaagttttagttttttaattttgttatcagcagcttttctctcttcctgcccaaaaacaatgatggtaaatacataaatgtttattcccctcttatctagcacatactaaaagttggcggccgca

SEQ ID NO: 100134 - DNA, 449 bp, Homo Sapiens
tcagaaaggaaaatctcattagtatcagtcccatcaagccaaacagaatgaagacctttgatagtaatagcaagaggttacaaatagcagggaggaggcgagtagtgaatgtcactgtgattgcaaacccttacctgtattatcacacgtagtcctcacaacaaccttgtgagacaagtgttgtgttcctcattttttcagaggggaacacagacccagagaggttaagaaatttgcccaagataacaagtaaaaggcaaagttggttgcaaaagaggtgtttctgaattcaagggccatactctctctctgacaacatgctctaagtccatagagtaagcactctagtatgaaaaaaagtttcaaggaacgaggccatgaaaatgagactatttgacatctcagatctgtctgggatgttatggaggtttttaaaaataaagttgaaa

SEQ ID NO: 100135 - DNA, 274 bp, Homo Sapiens
gactggttggctgccctggaaggcaagaaaatagatttattttttttcacagggctccagtctcttgatgtgtgagtgttgttgggctggtcttgggctggttccagggaatggaagggctaagagatgggcttggaaggcaagtttctgtttgaggctccatttccttgctgtggaaccaaggaacctgccagccctgctccaccaggtagagctgggaggtttctatcgtcatctgaattaaacagggaagggacactcgagactgggggac

SEQ ID NO: 100136 - DNA, 581 bp, Homo Sapiens
tttttctgagggtcgcccccacctgcgctctctgggcctgccgctcatattggcccgccagcccagggcgcgacgagggcacaccgcggccttcagacaacgcctagacttcgccgcggctcagtaggcctgcgcctagggtccaggcgccctggctgtgccctggggtctatacgagccccaaccccacagtgggcctagagcgcaaagaggagtcggcttccctggcaccgccagcgcccgctgtctgctttggggaccctcgcggagtgtgggttcgagcgctctgcactcttctcaccgggcttcttcccggctcctgctcttccgcttggcccacgcccgcatcctcgcccctaactcgctcttttggtcaaagtttctaagttcagctcggctcccaactccacttaaggctgtaaataaagttaaatgctctttattttcctcttgaatatgttaaactacttgaacagtttaaagtgctttgcacaagtgaagcgaaccatttctaatgttctgatttttcagagccagccaacaacaaagtttagattagtaatatatttctaaccagagta

SEQ ID NO: 100137 - DNA, 682 bp, Homo Sapiens
  misc_feature (584)..(641): n is a, c, g, or t
ttattagaataaatgttgttgccaaatgaaaacatgacactgtatataactgctgaggcctattctcatgtttaaccttcctaagccagttttcttaagttggtggagatggaagactatagtaattttcctagcatgtctggcatctgctgctataaaagagacagcagtaagcatgaagactgtgtttcccatatttgtccaaatcactttgattttgcttttagagtcaagagtcttaaaaattggtgatttttccaattttttctgctaatagtatatttaaaaattagcatatgctttaggtacatgaaactttaaaaaagtaattataatgtacagttaaaaatttatagtaagtggatctcacaattcattttctaattagtaattgatagttttacccattaaaatgacaatgaaaatatttttactatgggttttcctcccatttgtttctaatcatacctttgataatattttataaaggcttataatcatagcagggaattaatttactacttaaattttatgtatatgtacagtacatttaaaaattaagtagtcagggcatggtggctcannnnnnnnnnnnnnnnnnnnnnnnnnnnnnnnnnnnnnnnnnnnnnnnnnnnnnnnnncaagatcagcctagtcaacatggtgaaaccctgtcactact

SEQ ID NO: 100138 - DNA, 537 bp, Homo Sapiens
caagtaaagggaaaacaagtcctttcctgaccagtctgactcactccaaagtcctgctggagctatgataattatctgcaaggccaggcaggggctccgaaggagtgggctccaggagcagggatgagaaaaacaagttctccttatcagtttccctgtttgaaattctctccccataacattattctttgttctgctctcacaactatttttgtaactatttctgcaagtctgtaaagattttgtaagttcttgtttttctttctgtagcatggcaaggtcacaagacatgtttaagtaaggtaggctcatgttgcaaatcctgttgtaaaacctgtcacggtatgattaactgcctttgttctgcttctgtaagactgctttctcacctcgcaggttttgcgccaaaaacccgacttgcccctgcctgatgcatgtataaaagtcaagccctgtctttgttccgggctcagcctttggatgttaatccgctgggccagtggccacctaaataaaaccttcctgttgcacccaaaa

SEQ ID NO: 100139 - DNA, 500 bp, Homo Sapiens
cactccaaagtcctgctggagctatgataacattatctgcaaggccaggcagggaccccaaaagaatgggctccaggagcagagatgagaaaaacaagttctccttatcagtttccgccttgaaattctttccccataccattattctttgttctgctctcacaactatttttgtaactatttctgcaagtttgcaaagatttcataagttcctgtttttctttctgtagcacggcaaggtcacaagacatgcttaagtaagatagggtcatgttgcaaatcctgttgtaaaacctgtcacggtatgattaactgtctttgttctgcttctgtaagactgctttcctgtctcacaggtttcatgccaaaaacctgacccgcccctgttggttgcatgtataaaagtcaagccctgtcattgttcagggctcagcctttggatgttcatcggctgggctggtggtcacctaaataaaatcctcctgttccaccaaaaaaaa

SEQ ID NO: 100140 - DNA, 484 bp, Homo Sapiens
cttccatcctattagtcattaacgtggttaaacttcaattcacaatcaccttggaatcaatgtcagtttgatttattttgttacagagcaataaaatcattagaacaatggtttttaaaagacttaagtggatgcatcctatgcatgtaagcattatttcccaaaccaaagcatcattcatctccatttatttcttttgttcccgctcagtgtgaagttgggaactgagaggggatggctgctggtttcacagaagtttggatgccttactcttatcttaaagccagcatccagaatttcctccctctctgatgccacatgcaaaaccaggtgtacgatgtcaagatggattctttgagagccagggtagatcatatgactgcctttctgtaaaattggatgcctagtacaaatgctctttgcctttaattcagtattccatttaataaaaacaatacagtggctggaaaggagcatcagaaaa

SEQ ID NO: 100141 - DNA, 976 bp, Homo Sapiens
ttttctgagacagggcctcgcactgtcgcccatgctagagtgcagcgagacactcgtagctcttaccagtaacttctttataacacttttgcaatttacgaagcactctcacattatttcattcactctccccaacattaccaaaagttaggaattagatctttttacagatgaaggaattgagactccctgaagtcaagtgtcttatagttaggttttgttcattcattcatcaaatagagtgcctgatgtgagatttattgaaactggatttgaaaacaattttcctgaattcaagtcgagggtttactccactattctcaattactttatcaccagggttataaacccaaaggaagtgagtaacaacagtgtgattttattgaggacccatgcaacactagtctcagaaaggctccagtgtcatttgtaaaattcaaggttaccatcagcagaggcagtcattcctctctgcgcttgttacctaatgcactaactctcactgtaggtaattccattcaagacacatttgatgactatacctacaggttttgaagttattcggatggggttttgacacttactagctggggggacttagaccaagttacttaacctttttgagcttcagttttatcatttgtaaaatggatacaatcctgatgcctttggaccaagtggtcacggaaatgaaagagataagtatgaaaaaatccatgctcatagtagctgtggtttccaactgcgtgataaaactttaaaatctgcattcaaataagaacaactatgtcgacgtaaggttacaagctaactattcttggtaagtactgttctttattctagaggacatcactgtacagtttggtgctaaatgctcttttatgaatttaaggtgccagtagctgtctacttgaacggcatgcttaatctggaacgccatgtcgaccttcatcccccagttctttctccccaaatt

SEQ ID NO: 100142 - DNA, 458 bp, Homo Sapiens
agggctaaatgtgagctgatttcttactagattactcagtgatcaaatagaatatctaattaacctgaaaaaaaccatataaaaatccatttgagcaataggaacattgattgggagtgtcaagatctaggcttgagtgttatatctgctgcttatttgctatctgaccttgtataattcatttatagtctttgattcttagtttacctgatctgtaaactagaaataatgataacaattaaaattttaccacaaataatacctcctgcctggaagagccttgttgacattgagaacttctggatcagacctctgctgaaacccaaacactacaactggaattttccattataggaaccaataaatctttactggttcagttccagttgctggtgttacttacaaacaaaggcatctttatgctaagcattaacactaacctataaaagaatagcaaa

SEQ ID NO: 100143 - DNA, 736 bp, Homo Sapiens
tttttatgttgatttttgggcaggtatgtactggcagtaagttgaaaacgttagataccaaattcttcatttctgaattcttcattcttcatttctggactttacagctatgaaagaacaagacaaaggaattcagagctttcaagaaccaagtatgtcaggatagttgtggaaaacagatctttttctcattttctttgagatgaagataggcaacatttgctgcccattaaataccttaaaagtatacaggtgtatctgcaggattctttttgctgcttttaaatagtatattgttttaaaaggtctgtttttatcttgcctttacaattatatagacttttattgactagctgatcatatagggccttagtatagactaccatattcgccagcatttaagaaatagtccccttccctccaggagagtatttatctggtactcccatattatggattgaaggatgagacaagagactgagtattgctaatagttctgtgtgagcctgcagtgttaagtaaaacctattgagtgcacaaaaaaatcatgttacaattactacaaaatagagaaaccacctaggttaccaagatgtcaaataatggattaatggaagaaagtaatgtacctccttggtagcctacataatccaccttaatttgttatttcttatttaactattttgctatgtcttaagaaatgtatattaagtgaaaatggatgcataaaaataaa

SEQ ID NO: 100144 - DNA, 522 bp, Homo Sapiens
ttttttttatgccttcttgcaacctttattaaaagaggctcagaaaaatagatagagcacatgtaaacttccttcgttctaatgctgtaagacctctacatttctagatggtctatacagatacgtgaaatatttatagttaaaatacaaaacactttttcagtgtgcaaatactgaaacctgtttgttgaaatacagtttgtttctaatcatatcaaggttctacaattaatgaaggatttcaaaaacatacaaaattacaccaatctgatcttattatgccctggtattcctgcgtctcctaaaaaatggttgtagacacactaggcaaagtttagctcgtctggttttttttagacttaaaacacatttttatccagtataacataaagtatagatatttctccccatttaacataaaaaatatctattttgaggggttgttctcagcccaccattggttaaggataattaatttacttcttattgaatggattatctagattgagacaaaaagcaacc

SEQ ID NO: 100145 - DNA, 519 bp, Homo Sapiens
ctactaaaacccgttaccttcttccctgtggtaataggattttgctggatacctggttagactacatttcccaggctcccttgccatttttggggggccctggggggactatgtaacagagttttctccaagggaatgtaaataaaaatgaagtagcctccaagctactttttaaaaatcaaatgagtctcttgaacattctctttttccttctactgtctggatttgaattagaagggcctggtagtataacagagccaggaggtggtaggcaccagggtcgttgaatcaatatggatgaggttaccagtagaccagaaacaccagccttgtattataaatgatcaaaagataaccttctattatggtaaaccactggtatttggagaaaggagtctgtaatggcagcttctcttactttataacatacttttcaaacatctaacaaaatatatctaccacctttcacaattttgcacctggaagggttagggaaaagtgtatcctggggcctcaggg

SEQ ID NO: 100146 - DNA, 578 bp, Homo Sapiens
tgcggccgccatgacctggagcgccacggcccggggcgcccaccagcccgacaacaccgccttcactcagcagcgcctccccgcctggcagccgctgctgtcggccagcatcgcgctgccgctcttcttctgcgcgggcctggccttcatcggcctgggcctgggcctctactactcctccaacggcatcaaggagctggagtacgactatacaggcgacccgggcaccggcaactgctcggtgtgcgccgcggctggccagggccgggcgctgccgcccccctgctcgtgcgcctggtacttctcgctgcccgagctcttccagggcccagtgtacctctactacgagctgaccaacttctaccagaacaaccggcgctacggcgtgtcccgcgacgacgcgcagctgagcggactccccagcgcgctgcgccaccctgtcaacgagtgcgccccctaccagcgcagcgcggccggcctgcccatcgcgccctgcggcgccatcgccaacagcctcttcaacgactccttctcgctttggcaccagcgccagcccggcgggccctacgtcgaggtgc

SEQ ID NO: 100147 - DNA, 362 bp, Homo Sapiens
gctgtaccgtgagtgtctctgtgtttcctgaattccttctggaataaggcaggttgttagtaagcacaggtttctggtccatctcacagcctcaggcagtgggcattgctgtcggtgctccctttccgggttacctgtggtagctctcaagttgcagggctgcgatttgaagcctgatttagtacaccgtgtttctgttgtgttctgtggtggtttgctcctcacatgtgagcattcaccgtggccctgtgtttttccaccacacctctgcctggtggcatcctactggatgtctcagccgagccactctgttctgaagatgcccttgtcctccacccctttgctttgggctctaagcttct

SEQ ID NO: 100148 - DNA, 555 bp, Homo Sapiens
tgcggccgctgacggactgcccgaacctagggcaatgaaagacctgaggcaggaatagatgttgaccgtggcagaggcagtggacctggtgggcagcccagaggaaaaggcctttggcttgctgagagagctcttccagaactgagcaagagcatagtttgttgaagaatggagaggtccacagtccatctcctgtgccaaggattagtatttcatttcaagaagcgattaggtagtcacagagtgaatattattatttttccacaaattcattacctctttcccctcatgagtatcttagcattgaatttcctgactttatgatgaataaacctttgtttaagtgttaattaatgccctatttactttcccctgagtgaagttttggctagtaataagattttgtgtctctgctgtagtgaggcattgctgtagaaagccaggtctaagaaaaatgaattttgttcctttggggaagcataattaccttaaaaaagtttaaagtgtggttttcaacttagtaaaatcctattataaagaaaaacgtacatagca

SEQ ID NO: 100149 - DNA, 460 bp, Homo Sapiens
gcacgaggacgtcttaaaatgagtaagaggactaccatgtattggtgcatctgcccacagtgagtacatgctgggagaaaggtgagtggtataaacagttcttttctgagtaccaaattcactttgggcaggagggagggtggggcagaggctgacgttttcatttgtgagctggtgtatcttcggaattatttttaattttaaaaccatgcaaaatgaataagcaaaaagactagtgcactccagccctaaccatattatcttcacaaaaactgcctcaactttattttctaactgaagctccctgactcatttcattctactgcagttttaacatctctaaaagtctccatccactctctcccccactttccacgcagctgttaatccattctggggaggagagaacttagccatctgctcacattctgactaaagttaatttggcacttcaaataaa

SEQ ID NO: 100150 - DNA, 460 bp, Homo Sapiens
tatgtatctatctgctttggtagatacatataattcctgaaaaaaacagatccttacaaatgtgtagccagtgtatcgtgtgtgcacacatgcatgcatgcagccatgttattaacattctttggtgtacaatggggcaggccttgggtccaattatgttcccaggatccagggtgcagctgaatgcagaacctctactacacaggtgtcatccttggctacttaattgttaaactactttcctttgtgacggcagatgatggatgcaagagagagaaggtctatttacaaccaacttttctttctcatgatactgcctcagagaagagagtaagaggagcaaaatcaaatattcaatagaaatagtaaaatggaattgatctgcctacacaaaatatagatgattcccttaatttcactccattgaacatgatatatacaaaaattaacaaacacctac

SEQ ID NO: 100151 - DNA, 316 bp, Homo Sapiens
tttaaaacaagcaactggcgatgaatgtgtaactttatttatacacgaagttgttggactgtgtcctcatgcctgattttgtatgggctgttgcatttatccctggggaacaggtttagctgaagtcaccaacacagatgtactccacagtgagaaaacaagtgtgggaacatggctctgaagagtgctttccacagtgacatacgacaggataaagttagtgccttttaggctctgcaattttgaattctgtggatatcataaaaggacacttggccgtagtgctcctctgtcttagaaaatctttttgacactg

SEQ ID NO: 100152 - DNA, 434 bp, Homo Sapiens
tggagtgaaccaacattaaaactcagagttcaactttttaatttcctttttcaaagaaatagatatgagctgcaggtgagtgttaacctgtggtaattgggactgcacttctgtacttcaaagatcacaagcttattttgaatacttgaggttggaaaatggagccagaggctatgagattcacctcaacaaatttgcaacaatgtttaagaaattttagaaaattaaacaaaaactctttaaagaagcaatgtgactcaagctgtaaccacctacttcctctagtctctcccccataatagctaaacatttttaatgcttatgtactaggcatattgcatgctttatctcatttaagctcactatcatcttagtttacaggtaggaaaactgaggtataagccgcaatactccccaaggattccctgatagag

SEQ ID NO: 100153 - DNA, 554 bp, Homo Sapiens
  misc_feature (398)..(410): n is a, c, g, or t
aaacagggaagcattggggacccctcccaactttttttcccagtaacgcctgctgtttactgccacctggcactggtgactacagacgttctcaggctggccagaagagacatcttgggttccttggcctcactctctgtaagcatataaaccacaggcgaaagaggatgctgcattgcgaggacccagaaattcatactggtgccacgtttccttcccttatttctaacgtgtatgtttctggtggaaaccaagttcaccctggctgggagcatctctgatgaggcatgctggcgactggatggataatcctgtgcatcaccattgtgtcctgtgctccctcctagcgcagtggccaagccgggaaagcctctaacttgcctttgctgctgctgccnnnnnnnnnnnnngtctctgcctttccatttgttagatgggggcccactcttccttagctctgtctctgagttactgggtggaaataagcttataaatgaaataatcttcttcatctctgttttgctcttaaaaatataaaaaggcaattccccgaa

SEQ ID NO: 100154 - DNA, 905 bp, Homo Sapiens
  misc_feature (77)..(119): n is a, c, g, or t
tttcgtttgctttttgttttattttcttgagagacctcaaaattattaaatccaacagacgctgccggtcggtcagnnnnnnnnnnnnnnnnnnnnnnnnnnnnnnnnnnnnnnnnnnntcatatgctgatgctttgtgagttcttttccactcctttaaagttgggaaaacttgattcgtggggcaggagattgtttcttcattcttctgacagcccccatctgacgcgtaactgcccattttaaggaaactcttggtgctacaaaaccctgaccagacacttggcaaatttacctctttcttcaaaagaaaaactttaagaaaatgagccaatgggcttcattctcagtcatgcccggagatcacccaggagaaataatacaaacaccaccactgtccagagagagtaaagaagcagaaagagaaagaatttgcaaccatgaggaatgttcccacctcccgacgggacgtgcatttggaaaacacagaatcagccctcagggtgcactccagccacctcagtgctctaagctcacagaagtgaaataatgtctgtgggttggcaatggctttgtgggatcatatgtcttggccaaagatgggaaaacctatgttgaagaggcagcccttgagtgttaatttgtcttctaaactgtgtaaggccccttcaagttcctcttgttggtttcaattatattaattataaaacaagtggatgtggtgaccatccacttgtgtttccctaatgatgggcagttggccagggcactgaccagagctgggaaatttgtatctccaaggcggctctgtctctgaaataaatggcatcaagtgcatgtgtgtatgcgacatgccctgcctgaacaggtgctcaataaatccaagtttccttctctagaaaaaa

SEQ ID NO: 100155 - DNA, 1105 bp, Homo Sapiens
  misc_feature (54)..(62): n is a, c, g, or t
cattttcatcctgtttaacagcaatgaaacccaacaacaggctttaatgtacannnnnnnnnaaaagatttcatttgttaaaaaaagtctcaactcattttactgagctctcccttttctagggcaagtatcatcgccatttgccaacatcagtatgaacttccagtttttaagagtagcttgtgaaaggttttagaaaaggaaacaaagatgggttttgaactttagattttcatgtcttttgtctgcagtgtatatttgttctcccctctccttctcctcctttccccccttgtctcccaaagctcaaacttgcttgagtctatcatagagactaaaccttgagcttcccctaaacttagctttaggaagctgagctgtggcctcacctgtctgccatgaacacagatttctctaagaaagccatattgatgagaagcccccaattactgcagcagacgtcgcacaatggtaccaaaaatgagcctctccagctgatacctggtagagtgagaggagccaggaggaataacttaggcctggaaattatctgcaggctttgcaatttgaaggttgagaaagagagcttaaatcaattagcgttctctcatgggactggtatgtttgtgtcaggatgaatggtttttggctctcctgttgcctcttggctaaaactctgattgagccaatggttgcagtctgatgctggacgccaacccaatttctgctaattattgcttttgtgattaaaagaaggtgggggtggggggctcccacagatgctgccaggtttgttttgtacaaactgaaagttaacttaattgtgagaacggagacctcatcactagctgcatgttttggatttgggggcatttacatttgtgttaattatgatttgtccaggtaagatgcagtagctgctccctgagcagctgtttcccccccaccccacttcactataatttccaagatttatttccctttgtttaaagggacacgcttaggtgaaaggttccaaatttacctggaaatggttaccttgtaaatttagcttgtctaatggattgtttccatgatattaaaatgtacagtcaattggaagaaa

SEQ ID NO: 100156 - DNA, 570 bp, Homo Sapiens
tttaacttaagatctggtcaatgctcacaattagtatttgctttaatgattcaagcaattttgagcaaactgatactctaagcagccagaccaggacaattgataattactagaatataaaaattaaaaatatccatgtcatgatttaaatgatcaaaagaacatgaagtctgcatttaacaattttaaacattggggtatgactaaaaaaagctggcttttatgcctgatacaacacgtggtatactaaattaaggaaatgctaatcctatctgcgtaagcagcatgttaatcgataaactttctcattccagagtatgctcaagtagtaggtatctcaacaagacaggggagtaaaaagactcaagctttggtaatgatgcatgcaatctttggaacaaactgaaaggtaacatccccatttattcttatggttctaaaaacacaaaacagccttttaatatgctaaaatcacacatgagaattaataccacaagcaatgtatttttgataggtctctatatacttgtacccatatctttcactctctgtatacttatttatctatga

SEQ ID NO: 100157 - DNA, 456 bp, Homo Sapiens
gaggtgttgagtcgtggatggagtgaggaagagcttcagggtgtccttcgtggaaacctgctgcgggtcttcagacaagtggaaaaggtacaggaagaaaacaaatggcaaagccccttggaggacaagttcccggatgagcagctgagcagttcctgccactccgacctctcacgtctgcgtcagagacagagtctgacttcaggccaggaactcactgagattcccatacactggacagccaagttaccagccaagtggtcagtctcagagtcctccccccacatggccccagtccttgcagttgtggccaccttcccagtccttattctgtggctctgatgacccagttagtcctgccagatgtcactgtagcaagccacagacaccccacaaagttcccctgttgtgcaggcacaaatatttcctgaaataaatgttttggacatagaaaaa

SEQ ID NO: 100158 - DNA, 553 bp, Homo Sapiens
atgacttgtgcacacctgggtggctctcttcaagtggatgaagtgcagacacaaggcagagggctaagacttactccatagaataacgagggccattcattcattcctggtgtgatatacaccagaacaggttagaggtttcctaaaagggattgagctgccctgcctgatagtaagctccctgctattggagatattcaagcaaatagcagacagtctactaagtatgtagatgactttcccatcccgggttggattttgtaatttggaacaggagacctctgagccaaaacccattcagaagatttggaattgcatcctgactcctctctccactttctctgcctctgtttccactctccctccttgctcagcctcaggacagagcacacatgcatgcatgcacactcacatacacacatgtgtgcacacaagcacacaagagggtaaagcaattcagaaagcaagagaggagaagagtgtgagaacctgaatggggagaccatgaggggaaggaggcaggaaagacagagaggaaggaatgaagaagaaa

SEQ ID NO: 100159 - DNA, 702 bp, Homo Sapiens
tgccttggtctggtcaccagggctgggaagtcagcaaaatcattctctcattcacatgaaagctttctctttcctaaagaaagtgaaaactcatgtatttgctagctcagcaagatgggctatctcaaagaatctcctttgatgcagaagcattccagaaatagtgtttttcaagatgggtatctggccggaagaaacggaagaagctcccagaggattccttgccctctgctgtggacaattagtgttgtccatggggctgtgatggccacctgtgtgggtgtccatgggcccaccaagagatgaggcctggtctccaaagggtggactcatgtctgattgttgctcctcttccacagcagggcagcagcctaccccactgcttccaccgatgagccacaggagatcacctggcactttagggatggtgtggtgctgggacacgccaacagcctgacttcctcaacccgtggttcactccagactcagtgaccgagggcatgtgaatgggacacaaaagcaggcctttcactgtgtttttggtgggggataaaatcccctgccttgaaattctcttgctccatgattaaagaatcctgtttagagccctcaatgccttaagagtccattattcttagaaaagtgtaactttcccccaacttctggcattaagcaaacggccaacctgtcaataaaagcatt

SEQ ID NO: 100160 - DNA, 722 bp, Homo Sapiens
aagaaaaccagaaaaccattagtctgagaaccactgctgtgaaggcttcctgaataacctcggctcccacacttcccacactccaagggggccacagagcctgttacgactcacacatcgtggtggggtcctgcagagaccatctggtctccccagccatagcctcctgcttcacagtctgaactggtctgccgtgactacaggagctcaggcagctcccaaagcaggacgctgactccagctttcagattctttgattcagggctgtgagctcctcccgtcacaagtgagcctggctcctggctgacttgacatgacagaacagtgactctctgataaccttaactgtgaaagtcaagccggctactggcatgccaagactatagacggatttaaaaaggaaagagccagtttgcaacaagctcactaaaaagctgtggagagatactggggactctcagacctgcgaataagaaagcaggcggtgggctcgttgttttcatcaatggctctgtgcaggagcgtctgaaggcacccaccaggtcccggaccccagcatgtggcatcacagccatgtctgacctgcagaaaaacataggttattcacaaacactgctgagcaaaggcaaacagttttattaccaagtctgagctctatgtatagcattaaatccactttcagataagatacggttgataataaattgataattactttaaaa

SEQ ID NO: 100161 - DNA, 486 bp, Homo Sapiens
actattaagagcagctttgctgctgcagaggctgacttgatttggagtgcagagcaaaaaactcccatatccaaataggaaaagaataatgaaagccataatactacaatacaagcctgaagttgttatccttggtggggtgagcaacagaaccgagagcaccgtagaagagctagctgaggtcttcacaacacatcactggcagactggaaggccatgcatatgtacagagaagacctgtaaggacactgcaggaagtaaaagtctgatatgtggatgtgctcccattgcacaaacagatccatcaatggggtataagccctactggctcaaggtgctggagcacaacatctggctagtcttgggctgaccactaagctatacatactctgttgatccccaatttagtctgatggagaaaaagcaagagaagacactaattattgtagcaaattcaagaataaaagcacatcactaccacccctc

SEQ ID NO: 100162 - DNA, 1039 bp, Homo Sapiens
acagtgtgttctactcggccttcgtgggctgtgagcgcaaaagacccgaacaagcagcccgggccccagggcggcccgaaccccagccaagccggccagcagcagggccaacagaagcagaagcgccaccggacgcgcttcacccccgcacagctcaacgagttggagaggagcttcgccaagactcactaccccgacatctttatgcgtgaggagctggcactgcgtatcgggctgaccgagtcccgagtgcaggctgcctgtgcgttcctgtatcgagttatctccttctctacccggaaactggtccccatcgccatcccccaatggacacgcaaggcccgtctccggccagtatagcgacatcccggaagaagctcctcaaaatcgaagcccggcgttgtcgggctacagggttcgcctcctccgcctgagaaggcaacctcagcgcccccccgggcggcccagccgagcgcacacctcaactcctgctcgcattattgacaaatattaccccctaatgagtttgtgttaagcgtttggataaaaggaggaatgcaacaattacacagaaaacaagagaaaagagcaaataaggcgaatgagcgccttttaaaaaagtgctacacccaggtttcacggcgtggctttattaccttaagtatcaccctccctctgcactcaggcgaaatattcctagctttgatgtttgcaaggggtttgaactttcgtagtctaccagtgcgctgggggcagctgacgagattcccaaagccggtgagccccgttttgttttggagtcctctaaggaagctacggtgggggaggggaaatgaaggctttctgttgtggatatcatgtctgaagaaggggcattcagaacgggaaaggttgacaggcagtagaggaaatcattgctgaccccttattctcctccaaccactctccaagctgtaaattatatataacctagaaaatcacacctataattattctgaaaattggtgaataaaagtataagcctagtgaatcccaaaaa

SEQ ID NO: 100163 - DNA, 437 bp, Homo Sapiens
actttcttccttttttaaagaaatataataaaagacaagttattttaaaaagacataaaatgccatccgtggggggtgtggccggcgtggccacctcggggcccctcacgtgatctcctcggtccgtggttttctgtggattctctgtccggtccgtctcttcattgccgcctccggagtccactgcagaggggcagagtgaatgccggcggccaagtggcctccgggacaggtcctggagccctgctggactcagggtgggtggaggctgtgcctgtggacggccggggtggccaggacggccaagggctgggaggcacgtcccccagcccagcccccatgtacactgtagtcgttctattgtacagaaaaaaatatttctatatttgcaatgtttgctgtaaaatgagaaagaaaaaaagactatgtctactaaa

SEQ ID NO: 100164 - DNA, 566 bp, Homo Sapiens
gctgtggcttatgtcacagtcagacatctggtgtggactctgttctacccatgcctcctctgcaaggtacccagtaccatgaagctaggctatgcttcaagctgccagaatggatgcagaatttgcttgggagccatgtgaaagtgagctttaaccccactttcctactttccagttgtatggcatagagtaaaatctttattcctgatgagcttcaagctcctcatctgtgaagtgggtaaaataatatctgcttctgagacttattttgaagatcacacaaaacggacctaattggcctgcgataaacggtagctcttgacttttacacttcactgtttcccttggtactcaagttaatctcattttacctgaaggagacacagacccatagcctctgctgggagtgttctggttaaaggtaagccaaccaacccgggagagctatgggtccagaagccatttcaaaaacacttgatgcttcctgcggccctgcctgggggtcatgaaaacaagtccagttacatactctggccaggcagtcccactttgggaatgctatccgc

SEQ ID NO: 100165 - DNA, 505 bp, Homo Sapiens
  misc_feature (419)..(432): n is a, c, g, or t
gtttattcagaatgtcacacagcattatttattaatatttgaaaggtctacccctgagtaaggagggtggatatatatttttttaagtggaagaaaccaaacttcaactcctatagctctctgtgcttgaatcttgtaacaggctgctcttataagcagtgccccagatccttctaatgggggaacctcacctgcccttgtcaggaaagaagggggaagggcccaggaaccttccagtctgagaggctggtattctggttctttcatcatgtgacttatactagtgatccctatcttcttgggggcaagtggggaagccattctcctcttgaagccggttatcagagaactatgaactcatagcgaggtgacaggattttaggatgtgcatttgtcaattccaagttattgtccaggcnnnnnnnnnnnnnnagtatgaataatatattgcatcttgtaatacagtattacattttatattaaattgcattttctaataaataaa

SEQ ID NO: 100166 - DNA, 450 bp, Homo Sapiens
gtattgctgaacggacagcaaacgacaagctgagtctaaactgtggccagaaagatgtgaaactgagcggcaaatagcccaaatatgaaatgttgagggcaacccatgtggttagcgtatttatcgatactacagaagccgcagagaaaaggagagcggacatatattctctctctaaagaatgcgggtgacttaaaaacgtttcccccagaactttactggaacagcgctggaaccagcagcgatagttaaccaggtagtctgaaactgccatagtattcactgcaagtaaagggaaactgaaattaatgaagcagacaaacgtctccgcaggtcatggcaccagaaatgttgatggctgatgtaataccttggttcttatcttcttagtttaaaagaatttaaacaagagacacacagcaaaagaagtacagcataatttattgcaaa

SEQ ID NO: 100167 - DNA, 377 bp, Homo Sapiens
  misc_feature (307)..(322): n is a, c, g, or t
ttgcttgatacccatcctgagctgtttatgtccttgtgcctctcttcacaaacctgctggtctccctctgccacctgggatgcagtgcagtggcctgaccacaggttcaaggaaaagttagtggaagccgttatccatgtcaacattgaaccagaaggttctgggatacatgtgcagaatgtgcagagcatgatttgcaagaggaactgctacacattttacacttatttactccaacctttcctgctaattccaggtttattgtaaaaccactgatcccttcatttgagctcgacttccctgcacnnnnnnnnnnnnnnnncccctgtccaatagtaagacacacacacagagaagaacaacaagaacaagaagag

SEQ ID NO: 100168 - DNA, 519 bp, Homo Sapiens
  misc_feature (35)..(35): n is a, c, g, or t
ctatactcagaatgttctttagctaccacctctcncaagtaacaagggtgcactgaatgcattacataaattacatgtaagcagttgcaatgtacgcacacataaggaaacactgaattaaaagctgccttcctcaaagtgtagtgagacctcaaaaccacactagctctaacctcagttacaaagacagaggatccaccgaacgtttactcctacatacataacaaatgtgactttcttgcacatctgttatctattcaaattattaactaccttcgccttcctagaaaaaggcctattatttaatattaaccatattctaattttaaatgtaattcatgtcttaaaaaataagtctttgaacagataaagaaaaaaatggcttacagaataccacataacttttcacaagcagctagacagactttcccttttagaaaaattagtctgtatgctacaaatattaaagtactataagcatctagagtgccacttgattttttaaaagtatacttagac

SEQ ID NO: 100169 - DNA, 504 bp, Homo Sapiens
caggctcttggagactgaaattactcaaagttattgtgtaggtcaaatgaaaatctaaacttgaaaagcaagatgcttgaaagtatttaaatctttgggtaagaaccttcatttgtttgcactagcaatatccatcccagccccagtaccaagtggtgtgatatttggtgctttttacatgtttctttgggactgtttcctcttctgtaaacaggagttaccagccctttcatgggttaagatgagagctaacatatgtaatatccctcatccagtgggtggcacagaggagcttcattaggagctcaacagatggagggtgttacttgttcctaccagaagggaaagggaatgttctttctccagctttatgggatttcttgtagtccagtgaacttttcaaaggagaaggcaattgtgtttataatgtaattatactcctttccactgcactaagtcactttttgagatcatcttacaagttggtaacaataaacagttaaa

SEQ ID NO: 100170 - DNA, 301 bp, Homo Sapiens
atttgaaagagtgtcactatcacagcatcatactttatgtggcatatgcagtattcattgttgttatttatgaccctgtctgccttccattgtggatttcttccagccttggggaatttacatcattcctaatagcaaaaggctttctggttcccacagagttgttcaaagcctgactcatgctccttatgttaattgttcagctctgaaaatacagcacttacagggtgtggctgtgaggggagaatctactgtacttatagggcatgtttagaagtgtttcacacataaatctcgattc

SEQ ID NO: 100171 - DNA, 520 bp, Homo Sapiens
ccaactttttcttttcagttgatccctttgacatcacctctcatgtttaaaatcaggaaaacacacccctaaaatttgcactctcttccgttttgaaaaagaaaacccacacacaaatgcacactattaccgtctttcaccctgcgctatatttccaaagtgtattataatccagatattgccccatctcaaacatgttaagtcagactgtgctgaaagactttccagggacggtcaacagggtatatgttcagtggctgccctgaaatcctggtggggatgaggatcacgcttcatcatcaaggggatgcccatcccctgataagctcccagtccttttggaagatttctttgaatgttaattgcattttcagttttgctcatttcccaccccaatgttttgtctgcaacatcgcttacactggattctttctatttttattcctatcattaaatggtagtgctgtaaattctgcattctgcaattaatgttaaataaactgctttaattcattgaaaa

SEQ ID NO: 100172 - DNA, 668 bp, Homo Sapiens
caggtcaagatctggttccagaatcatcgctacaagctgaagcgcgctcgcgctccaggggcggcggagtcgcctgacctggcagcatcccccaagatgcaccccgcgccaggcctgctgcgtcgcgtggtggtgccggtgcttgttcgcgacgggcagccgtgcggcggcggcggcggtggcgaggtgggaaccgccgcggcccaggagaagtgcggcgcccctccagccgccgcctgccctctgccgggctaccctgccttcggtcccggctcggcgcttggcctcttccccgcctaccagcacttagcatcccccgccctggtctcctggaactggtgaggccgcagggcggcacctggggctaccctcgactttggagcgcgctctgcgattggagcagggccggagccgaacgcctggaacgctctccgtccgcctccctgcagccccatctccttgggcgccagggtccctggcgcgccctcatcagccgtcgcgcaagcacacacgagggacgtgtgccagagccccctccctcaccttccctccaccgccagccccagagttagattttatgcttgggccttatttgtatatttttaaatagcgatttgtataggaagcaagttatttttttaaaaaatagagtatttttcctcgtaaaa

SEQ ID NO: 100173 - DNA, 448 bp, Homo Sapiens
cctgcaccccgtgatttaccacctgggccagctcgcacttcttggtggagggacctcactccagggcacggcgtgggaggggtagtcgaagagctctggtggcagcgttgagaagggggactcttggccatgctgctggcagtggagaccttctctgagctgccgcaggtccgtgccatggggaagttcttcagacccagtggtcctgtgactgctgaggaccaaggtggcatcctagggcaggatgaactggctctgagcaccctgccgcccgcggccccagcttcaggacaagcccctgcttgctgaagcgtcaggtgaccgagttcagctccgtaaggtggcggcacctgaggaggaagcagccaggagtggctggggaagaatctggagatggagccgcggtgagggtgggcgggaggcctcaggggatactgttaatcataaa

SEQ ID NO: 100174 - DNA, 536 bp, Homo Sapiens
atttagcaattggctttgtgagagggtgagggctttcatcttccctggggaaaatatgatcccagcccatgtgggcgacacatctcaccaaaccccaggccctgggggtgagcgctgcacgtggtaagggcatgggagggtcttgtgagcatcagaagtcttaaacttgaagaaagaagcctcttgtgtgtagcagaggccccaaccccacctgttgactagaaaattgccatgcactgtggtcaccatgtgggagtaaaaccatgaacttccacccaccataggcagaagtgaatcattcagacagagccatccagaaggcacagatggcttcctgaccccatttgacctgggctgggtactccatggagctcaagctcaaggtcggctctgtcagccccaaaccccagctttctgctttggaagtaccagcttatatccccaccctttcccccagcccaggaagggagtaaagccaaaggggttccaggggaacctaagaccttggcctgggaaggtgatggttggcggccgca

SEQ ID NO: 100175 - DNA, 246 bp, Homo Sapiens
attaatgcagcccaggcttcccaaataaatttcaactttctgctctatttggagttgtatagatccaggtaatttctgaacagtttcaccctaagtggtaaaaatacgttcatttgcacaaatgttttcaatttaaaaagcaagcatttgtttaaatttggaggacgaaatatgtttatttctccatgtgtcatttccaaattatatggattctgaaaaatacaacatcatttttctatccaaaaa

SEQ ID NO: 100176 - DNA, 470 bp, Homo Sapiens
  misc_feature (81)..(107): n is a, c, g, or t
gatgtttaataccttctgaaacaggagggtaagatcagatgggaagcccctctgttgaaggatcttgggaaccttggtggnnnnnnnnnnnnnnnnnnnnnnnnnnngatcgagctgtggacatccttcttaattcgattctgaggatttgtttaactaaaaagttcccaaacacagaaagggcctccccacctgctttggggagctgtctgtgctgggagtgccaggcatcccatgggacccatcactgccagtgtctgtgcctcccagaggtcagccgtgtctgccctggctctgtctcctctgtgacagggcagagcatttctggtcagtttctccatggtgcctcccacccctttgtaaagtggatggacatgatggaattcagttgtctcaccctgatagcctgggtgttgatattcactttacccgcactcagacacaggcgaccttgaagcagttctcgggtg

SEQ ID NO: 100177 - DNA, 350 bp, Homo Sapiens
tgcggccgcgagcgcgggagctggagcgctgtcagccgcgctgagcctgcgcctggcgaccgcgatgcaggaggcccgggactgagggaggacggcgagagcggaggcccgcgacccgcaccgccggggcaggcacccgggtctcgggggcagcaacgccggggcccttgcagaacggggactgtttggggaagtggctcccgcacagtgcccggagaggggccctccctctgtgcccccttgggaaacactgcttggtacaattccaatacccagctgtaccctgccctgaagatagaagacaaaaccctggctctgtcactcacgcgaggcataaccaaccattcttt

SEQ ID NO: 100178 - DNA, 481 bp, Homo Sapiens
tttcaataagttttgggggaagaggtggtatttggttacatgaataagttctttagtggtgatttctgagattttggtgcatccatggtgaatcaacttctgtttgtctctgctggtgtatgactacagctttgatcatattttttaggttcaagaaagtattcaaaagtcagagattacactagagtttgagctttcactccaagtcacttaaccacagattgttttcacataaaaacttgttccagaatgtcttttcctggggaaaaataaagccactcttacaaaagtctctcaatcgaggtctatcaaactctatataaagatcctatttcccaacttgcatatcagtctatcaacttgatttggaaaaattattctttgcttgcttttgtttttgctgaatgtattacaattacaaaaagctttcctgtatttgcatttgtgagaagtacctgaaggggcaaaacctttgttgtac

SEQ ID NO: 100179 - DNA, 634 bp, Homo Sapiens
aaagatgagttttcagagctgatgtgatagtcagcttctctggagtcaacagggtgaatccttcccaagtccagccatgcccagatgcccggagggaaaactgacccccagccagtagacattggctaagaacacagaatcttctgaccaaacacgctttcagcagctgcctgctctggactttgaaagaggtcaggtcttgccctaagctcaaaacaagtgagaggtgtcctgacctagctcatagggcaaatggtcctaataggatgggcaatccagatgcctgagccccttcactccgacagcaccagcgcctaatgcagccttttcattcttgccattaggaaatctgtggacttctagcctgtgttttaaaccagccatgtttccttgtatatttccctacccgctgccccacatacccagcatgccgctgtggccaccatgtcctcaaagccttctgtctgtatcaggaatgtagtctgagactgccaggaagcaacaaggagagagaaacactaactagtcttcctttataacccattcatactctctggctgtccccaaccttcatagtctcctgcatccaaatgtcctctttggctcaaaaagtaggccaggcatggtggttcat

SEQ ID NO: 100180 - DNA, 1184 bp, Homo Sapiens
ccatccaccatttctttattttttaaaatacatgattttgctccttttcttcccatgtgcctcaggcccactctgcaaaggttgaatcctggcttgtctgagcccatgtgatcccacggtcattccaatgtgtgaaaaagggggtactgggaacactctggaaacagtttagttgctccttataaaggcacacaggaaaaaggagtatccttttcctgcctttgggagttgttgggaaaaaataacaaacctaaagctgctgcaggggtcaccctaccatctcaggaaagctgacatactgtgtgtgataaagagatgagctatgaagttccagggtcgctggtgatgccactggcctgctgagttgagcaactctggagatgcccagccttggatctatcggctatgtgagataacgggttaaagaaaaataaagccactagatgggatttcctgctattagcagcagaacgcatcttcattgaaatattcattccacacattttggttctaccttgaaattccacaccacaagtctcatataaaatgagaaaatcatttcctcaacttaggaaatgaggcctatttgttgcaactctgtgatcaaacagaacagacataattatcagcttaatatatttctataggatttatactcttacaggatttatatgcacttgtactgctacgtatgtacaagtaacataaaactaaaaataagatatgcataaaaacaacttttaatttgattgaaaataaaataacagtcgtctctgacagtggagaaattatgctcaaatgattattaatttgaaatagacctctgaattatgtacttttagatttgacatttcatactgactctcagatagaacataacggagaactctccatcttctaaatgtgtctttctctgaaatctgtacaagtcctttgataacactgtattattgaagtctctggagtgaaacactatacactaatttacagttataaatacaaaatattgtagacgagatgaagaaagagttctgattgacttgctggctggtttctcatctcatggttgccaagtttgtttcagttgttatagtctgttctcagtttttatgcattgcctttttaaacattaggattacttttttgattgacaagtaaaaattgtatagtgtatttatattgta

SEQ ID NO: 100181 - DNA, 398 bp, Homo Sapiens
  misc_feature (49)..(218): n is a, c, g, or t
tatacaagactttgtgaggatgtatgtgttcattaatcttggataaccnnnnnnnnnnnnnnnnnnnnnnnnnnnnnnnnnnnnnnnnnnnnnnnnnnnnnnnnnnnnnnnnnnnnnnnnnnnnnnnnnnnnnnnnnnnnnnnnnnnnnnnnnnnnnnnnnnnnnnnnnnnnnnnnnnnnnnnnnnnnnnnnnnnnnnnnnnnnnnnnnnnnnnnnnngttggtcattcctaatgggtatgtagaactccttttctgcaaacttcttggcaaaattcaggtcaagagggatttggttgggttgagtaattttctaagaggatcattttcatggatgggaaattcattctgaggatataataagtactccaaaagaaaatattttaaatttatattttt

SEQ ID NO: 100182 - DNA, 488 bp, Homo Sapiens
tcaaaatgggagcttatatagtgacttattaacatctaaaagtgtaaaaccaaatttcaaagaggtaaattgagagatatgtttgattaattcctctggtgaaacaaaatagcttttcatagatctttactaaactttttaaacagctttaaggtatatttgacaataaactatacatattcaaagtgtacaatttggtgtttgacaaatatatttattgtgaaatcgtaacaagatataatctacatattcatccctcccaaaagatgctcctttgtaatcctttcctccccaaacaccaaccacccaccaactccagacaagcactggtcaccatagattagtttatagttttttaatgattttatataaatggaatcatataatatgtacttttcattttacttctactcagcataattatttggagatgtatctatgttattgcagatattagtacattcctgtaaattgcttagtagtagtat

SEQ ID NO: 100183 - DNA, 702 bp, Homo Sapiens
tgttctttcatttgaactgcattcccactggcccttgtaattccctggtgttgctatcctcctatcataactgcctaacaaaacctcaaccatggcttaaggctgcacctagctcttttcaatcctatattgtgccaattgcatagtactaggtaaatcagactgtgaagattatgtagtctacaaattcatggcctttgatcttagtcaggctcctagccctgaaggcacttcttttgtgtttcattccctcttccattacgatattccagacctttaccactctcctcaagatgcctactgagtccctgcccctccatctcctttcctatgacctcaagcataaggtgtccctgctccccctaggtcctggattccattttctcctaaatctcactcttctgtacctttacctcttttactttactggatccttcagcttcactcccaagttttccccattccaaagaagcaaagaaaataaaactttctcttaatcctctgtccttctctatctaccatcccatttccatgcttttcaattaaaactttccaagaagtccaaattaccacttcccagtcagttctctagtcacggtaatctggcttctgtttcactgaaaccacttttacccaaggccacctctaatttccaaatctgctgttcttgatagactataccctctctctttaaaacattct

SEQ ID NO: 100184 - DNA, 540 bp, Homo Sapiens
tattcctgctagtctaaagctccttatcaaaaacaatttgagaatcacttatctttacatgatcccgtaagcttctactaatgtgccttggcaagtgggcatggtttataaatatcatagcatgattcattcccacatctccaagtgtaataatgtggattttaaaataacatgtttttgcctttaagttaaaaatattggtgtgagagaaatcaatatctgtatgtacgtgtgtagatatgtgtgtatattaaatgcatgtatatacacatatatgtatacacacatacacatctatgcatatatgcgtgtgtgtgtgtatgtacgtatataaaagagccgtctcctagaagaaactgggatggtagaacaaatgagaagattttgtaagaaatgtactacctggattcattttgaaaaaataaattattataatcatatttatttgagtaaaaaatatttttcatgtcagtgactaaaaataactacaggaaacttttacccagattccagaataactggaaaagtctaggagccaca

SEQ ID NO: 100185 - DNA, 442 bp, Homo Sapiens
cagtttgtgtccctgagttgctaagtgagagaagaaacgtccaacaaccaggaaacacctgcctccaactgttaataggtctgtgaaatgtgctttgtttatggtcagcatggacacccgctttaatagtggcttcagatgaggcaccttgtgacagaggagctcttccccagcagcaaccctgaagaaggttgtggaagacaatagccattcttacttcactctgaggatcacgatggcgtgcaagggtgtgccaagcacattgctatctttggccattctctctcacattagtacacctggatgtgaatggcacgttatctatgtaagcagtgatggtctctatcttgtggtagaaatgacagaattacacacaatcaggacagctgagattccatttactagctcagtaatcagagaatatgtatgacatcccagcaaa

SEQ ID NO: 100186 - DNA, 484 bp, Homo Sapiens
tgcggccgccggcggccagggctcggcggtggctgccgaagccgagcccggcaaggaggagccgccggcccgctcatcgctgttccaggagaaggcgaacctgtaccccccaagcaacacgcccggggatgcgctgagccccggcggcggcctgcggcccaacgggcagacgaagcccctgccggcgctgaagctggcgctcgagtacatcgtgccgtgcatgaacaagcacggcatctgtgtggtggacgacttcctcggcaaggagaccggacagcagatcggcgacgaggtgcgcgccctgcacgacaccgggaagttcacggacgggcagctggtcagccagaagagtgactcgtccaaggacatccgaggcgataagatcacctggatcgagggcaaggagcccggctgcgaaaccattgggctgctcatgagcagcatggacgacctgatacgccactgtaacgggaagctgggcagc

SEQ ID NO: 100187 - DNA, 499 bp, Homo Sapiens
tttaataacaattttgaataaaaagcctttctaaagtggcttataccactcacaatcaggacactaaacataatgccaccttccacagcaattaagggtcatgataataatcaattttaaaaataattcggtgacatcttttaggtcattcgaggtatatcaggctgtttaattctaccctaaatggccccaaagtgcggtgtttggattagtgttgatgctcattgattttctttgttctgaaagatgaacggatctgctgctgctcattcttaacaatgcctgactccagtggtccccattctccatcttgctgcagtcttgaaaccaaataaaaaagcattttgaaatcgtgttaagaatgaataggctgggggcagtagaggtgccaagttcctaatgtttggcttagagatagatgatatgtctcatcagcaggttaattaggtccttgcttaaaacattatttttgtttcacagctgtgttttctgaataaga

SEQ ID NO: 100188 - DNA, 609 bp, Homo Sapiens
tttatcacagtgaagaaaatgcagtgaataatacgattttcttgaggcctgttacttttagtagcttaatgtgtagtaaagaattggagttgttgacatttctttctgtggtattttgtaatttctgagctacaggatagccttttaaaaatgtgttcactagatgccatatggctttaattgggtctaacaaggtcctcctgaagctttgttgggtccatatactagttctctgatacatttctttgtggctttgcaatgttatgttgcactatgcaggggatgtgtgtatgtgtgtagtgggcgtgggaggacatggtgacgaccagaagcaccaaatactataaaacaacaagtgttcagaatgcaggcttttttgagtggcccttgagaactccatggatggtgctggtgtcctgtggatactggtgctgctttccatcctcacctctgactaacttgcagacattacagatctcacttagtttaggatatcagcagtggcctaaacctaaatttgcagatctctcacaatagtttttttataattcttaagacgatcctcaaagcatttgctcttgaaaagctgaatttatggttagaagcttg

SEQ ID NO: 100189 - DNA, 688 bp, Homo Sapiens
  misc_feature (122)..(122): n is a, c, g, or t
  misc_feature (136)..(136): n is a, c, g, or t
  misc_feature (139)..(139): n is a, c, g, or t
  misc_feature (154)..(154): n is a, c, g, or t
  misc_feature (160)..(161): n is a, c, g, or t
  misc_feature (167)..(169): n is a, c, g, or t
  misc_feature (172)..(172): n is a, c, g, or t
  misc_feature (174)..(174): n is a, c, g, or t
  misc_feature (176)..(176): n is a, c, g, or t
  misc_feature (178)..(180): n is a, c, g, or t
  misc_feature (182)..(182): n is a, c, g, or t
  misc_feature (184)..(184): n is a, c, g, or t
  misc_feature (186)..(186): n is a, c, g, or t
  misc_feature (189)..(190): n is a, c, g, or t
  misc_feature (192)..(194): n is a, c, g, or t
  misc_feature (197)..(198): n is a, c, g, or t
  misc_feature (200)..(202): n is a, c, g, or t
  misc_feature (204)..(204): n is a, c, g, or t
  misc_feature (206)..(208): n is a, c, g, or t
  misc_feature (210)..(211): n is a, c, g, or t
  misc_feature (213)..(213): n is a, c, g, or t
  misc_feature (215)..(220): n is a, c, g, or t
  misc_feature (223)..(224): n is a, c, g, or t
  misc_feature (226)..(226): n is a, c, g, or t
  misc_feature (228)..(228): n is a, c, g, or t
  misc_feature (230)..(238): n is a, c, g, or t
gaataggagaacctaataattaatgtagtctccattatcaccccagattcaactaatgatacggctagaaagagggggaagagcaacagaaacatgtcacatagcagcagggatgacaaggnaagaccaaaggaanagngaaagggagaaagcnccgagnnaagaannnggnanangnnnanancnttnncnnngannannngnannngnnanannnnnnagnncntntnnnnnnnnnaccacaggcctgctccttccttagccttggctaagatggtccttctgtgtcttgcaaagactccccaagtgggacagggagcccctgggagggcagccagtgagggtggggtgggactgaagcgttgtgtgcaaatccagcttccatcccctccccaacctggcaggattctccatgtgtaaacttcacccccaggacccaggatcttctcctttctgggcatccctttgtgggtgggcagagccctgacccacagctgtgttactgcttggagaagcatatgtaggggcataccctgtggtgttgtgctgtgtctggctgtgggataaatgtgtgtgggaatattgaaacatcgcctaggaattgtggtttgtatataaccctctaagcccctatcccttgtcgatgacagtcatcctaatgataataaaacctgcatccagataaaaa

SEQ ID NO: 100190 - DNA, 444 bp, Homo Sapiens
tctgcgccttggtttccccttctataaaatgagcatgattttatacatgtaggattattgtgagagttttaaaaaagtactgtttttaagggcatagaacaatgcctaatacatatcaagtgctataaaacgattgatgatgatgatgatgtgtggtcatcttgttaaaatctagactccagttacaatgacaccctatctctacagcctcatccattgctcttgaactccaatctacactgtcctttagcctgttcctcataaggaccacccttgtacctttcatttatgggcctttgcagatggtaatgcctgtctccctgactagaatgtaagcttcataagagcagggacttctgtctgttttgttccccactctttcccaaacaactagttcaatcacacttgttcaataaataaatatctactgcaacaactagaaaa

SEQ ID NO: 100191 - DNA, 540 bp, Homo Sapiens
agagttcctccaaggtcatatatggtcagtaatgaagcaaaaattcatggtatgtgacttaaagactttctaagacattgtacccatgggatgtttccaagcttcttgatctttaatcttttagcaaccttctgatactgaatttaccttcctaggtgtggtgccctccttctggaatttagatctctggggcaaaccctgtcaggatgtgcctctgtgtagttaacactgccccagacagcagctctgatttcagtcacagttctgctgagaagcctgtctgcccctggcaggggtgaggggagggttgttggtggcagatgtagtcagaggcagaggagaccaatggcagacagggtggacctgcaggaaggtagccagaaggaaagaccttgggttttacccaaggtcaaggtggctgtgatagaagagcgaaaggcaaaagtaactaactgaatttcagaattcagaagtaaaagagaaaggaggaggatccctggaccagggactttcacaggaaccaaacatgattcatgaaaa

SEQ ID NO: 100192 - DNA, 433 bp, Homo Sapiens
atccctaacatcctccccagcctggagcctggaccatggcagctgaatctttgaccccagtgatgtcagtcctgagcacaccattggaatcctaggctcctgtcatctggctggaagagagacaaattcacaaccttttgataatgagcaattattgaatactcactgaatttatcagagaaagtttaaaagtgtacgattatacatatttaccaggaatgtttaaacatagacatttatgaaatttatagaaaatattgaattgtggttctcactttttggtcttggctgtaacaatttttaaatattaatacttcctacaataactgtatcatgctatttttaagtgtcctcacactcaaccaatctactctgcatccataaaataagcatgcagttcagaaaatagattaaacgactaattggctaaaaa

SEQ ID NO: 100193 - DNA, 486 bp, Homo Sapiens
aaatcaccagacttcgagcgatcccagtttccatttcaatctgtattcactcgtagtgagtttccttgaatgggatttcaagcggagaatgggggagtctcacttccccgccgccttgccccattggcctgggccagttctccactcctaggggccaagccacccctagccttggtgggggaaaggcagggcccacccgggccagcccgtgccctgaggggctcttgacacccacgtagaattctctacacaccagtaacgggatttcaattccgatggactctgccgccctggcggcccttcctgtgacttttgcgccccgcgcctggggtggggggtgcgaagagacgctacgttcctttccgatggaggaaggcagacctgccgtcacacgtgtgcttgcacgagtgcgtgtacctggtgcgggactcacccggccgccagactgactgagcctgcccagatggccacctcgtggtgctgcgg

SEQ ID NO: 100194 - DNA, 320 bp, Homo Sapiens
caaacctattcaccccaccatcatcctgatctaaccattccccagtcatcccaggaaaaccactcacagcctgacactgggctgactttcttgaagatcctcatccaattggtgtttttcagaagtgttccaatattatgaattctgtgttgtggagaaaagcaaccatgcatttactggtcaatgccttcttgtatatgtaattcaatacttttacttttaatatcctcaccttatctaatctttgaattttgtcatgtaatttattgcttcattaaggttactttttgttatacaaaataaaagctgatatccaaaaa

SEQ ID NO: 100195 - DNA, 536 bp, Homo Sapiens
tgcggccgcgtccctgtcccaggccttggtaccctggccgttctccgcccgggacttgggggtgctgagtgggcatgcgggtgtgcagagctctgtgctctcctggatttgagaaaaggaggtctcctattcctaccctctgtgctcttgcattccacgcatgggaggaggaggaggcagagtaagggggttcttccccaagggatgaggcggttcaaatttaaacctaagtttgggagggaggtgcggaagagcttttgaaattgaagggtggagtccccacagcggtccgttcagcctccattactgtgcctgtgacctttgggtcaggagccctgttttactgcaacctgggcccagctcagcacccagctaagggcatgagcaagaatccagcgtccttcatggttccttggtgggtgccttactgattccctcagcctcccatttccccttctagaaatggcaggcagagcatttggaaagcagcagtgagagatggagaccaccggacaggccaagcaccaaattgggtg

SEQ ID NO: 100196 - DNA, 527 bp, Homo Sapiens
tagcagcttaattaaatctgttggactgggggaggagagagctgttctctagtggttaacatggtattctttaagaagaaaaaacaaagccaaagaaaactcattatctggcatgttcgccttaaagatggtactgggtagaatctggagttttcatctcttttcaaagctgcatatctctcatatttggtattggcctctaagtctaatattgcagttggaattcttgctgtattattttttaagcaagtgttaggtgcatttaactgctttcttcatccatgacgacattcccaccatgggggtcttgacaaagcagagtaaaaatatgctgtttacattgtttacttacaagtaaggagcctgaaataacctgtagtttcgaatgcaggccctgatttactggcgttgtcagtttcaattatgaaactgaagtttggtgcctcctctttatcatgttttttcccttgtagcagttgtgtttaatgtcattaaaaagaaataaaagttctttgtcagtgaaaaaa

SEQ ID NO: 100197 - DNA, 862 bp, Homo Sapiens
  misc_feature (78)..(86): n is a, c, g, or t
tttcaagcaaagtattaagatttcaatgatggtttgcattgtcgcgagtctcagagtgttccataaggcactgaaggnnnnnnnnntcagtttttcctattgaaaggtcattgcaccatcagcaatattcgtgtcatgcccgacaccaaggagagtgaaatctggctcaggatccttgaagcagccacgttttcggtgatttcctctcatcacatgcctccagtgggaagggatccctagatcttaacactctctgttccatacacgttgtagccttctctgtatgtagcataattctgagtgttggtggcaggagcaggcttaaagttttgggtgttctttgtgagtgtcatgcgtttggactctgccgcgtgatttgtaacagaattctatcaaagccaccatcatggccagccccagacctccgacaagtatatagaaaacgcctgccacattgctcaggctcagagcgctggtcttgtcctaagagaaatgaacaacgtgattagatcttggggaaaacaaaggcaatggaacattataatatattacaacagtacaggggagttctaaattgtaaaataactaaacattgatgtaagtgttatgactcaattctggcaactggctaatgttttgcaatgaccagcaagacggtagattgtgcctctgttaacagtcttgatcctcacctaaatgtcctttcatcttgactccttacgttccttagtgcctcaaaatggtgttcaacaattaataaaacagcacttggccatgggaacaaaagagtaaacacaagcataatttattcctctgccagccttgataaacaccatttgccagagttgagcggtgacataat

SEQ ID NO: 100198 - DNA, 410 bp, Homo Sapiens
  misc_feature (29)..(29): n is a, c, g, or t
agcagagaaggtgctgcactatttcaganagcagccacaggccctgtctggggcatcctcagatgtcagcatctcaaggcagcacaggtgacaggctctctctttgcctcagatcttccctccggacctgctcctcgccttaacccatgccctgggttcccggctctcttgtgtggcagatcctggctcactcctgcttctccaggaagtggttctccttccttctgcagcggccatatccaaagatcttgcagatcctggagctgatgttgaagaaggacctggaaggaaggctccaggtagaaggcaggtggcggggctccagagacaaagcagggtcaataagaagatggtcatcacagcggtctacacagcaagcagcagaaacaaccggcatggccaagcatggt

SEQ ID NO: 100199 - DNA, 543 bp, Homo Sapiens
tctgcctttcccatgagtatgcccctgagtagttttctcaggttctcaggacgggctcttaactggcagaggaagactctaagacgcagcccatagcagctcctgtgagcccaccttccacctcgggctgcctaccaggcccttgagagcactctgttagcatagagaggcaacctcaaagcctttattcaggaacctggctcaggttcccagccactgggtattgagagagctttaaaaccacaaagtggagaatttgggaaatcaagttaaaggtgtgtgcacgtgcacactcgaatgcgtgtgctgaaagtcacctggcctgccctcctgaggcttaactcttgacaggttggtgcagaggccaaaagacatggcctgccgagccgctgctgccttagtggagcccctggaactctgaacagcccttcacagcacccatgggacaagtgcatgcgctttttcctttttctccctttccccctgaggttaaagatattttttttaccataaaagaaaaatgtacagagtgcataaaacaaa

SEQ ID NO: 100200 - DNA, 791 bp, Homo Sapiens
  misc_feature (719)..(739): n is a, c, g, or t
ttttttttgatatttaaagaggtttattctgagccaatatgagtgaccatggctgggagaacaatcccaagaggtcctgagaaagtgtggtcagttacagcttggttttacacatttagggagacagaagttgcaggccaagacataaatcagtatgttagagtaggcagttaggcagaactgagcagggcaggagagggcccctatcaggtcgtcaggcaaccatcaggtgatggtcaggcagttgttaaactgtgtcgctaaaatgataattggttgcagctggttccagggacctgcagtctcccagtagatagaaaatacctggagctagtgatcagcagcttcctgataagatctcaggagctaggcgagtcggttcaaacatgtgcactaagaggcaaaatgggagtttaactggtatatgaccttcctctgggaatgcttgactggtaagagaaaaatgcctcaaacgagcatacacacaacttcagtaaacgcactgcacatgcggcccctcccaagtgctggcaggtcactgtgcatgcagacagcctgccccaaggggaaaattaagggaagaaaaacacaaaccccggaaccatgcccatgtataaaaccccaagcccaaggctgaacagggcacttggatctcttatgttgcccacctgaccctcttccaagtgtactttgcttcctttcattcctgctctaaaacnnnnnnnnnnnnnnnnnnnnngagatgaagtctcactctgtcacccaaggctggagtgcggtggtgtaactcg

SEQ ID NO: 100201 - DNA, 565 bp, Homo Sapiens
  misc_feature (24)..(24): n is a, c, g, or t
ccatggtatttcgttatggcagcntgagcagaggtggtagctatgtggacagtttttggacttctctattgtaacacaggaggcaacacagattcttcaagtctcacagctactccctagggatcactggggaacttggaaaaaatctattggctcagctagtgagcgatcacttcctgtaccactgttctgagggcggacttccagctcaggatcatgcgagggcattttgttgcccttcatcactcagcagtgaagaatgaaaatcaacagagctttccccagcctgctgcttaagcagctgctagcaggctgaggctgcccagcctcattaacccattagatgctgcgttcgcccgggagtcattcttaatgaggctgctgcagatgagaaaacagaagcaaaggcagaaagatgctacattgccagctttgaagatggagggaagaggtcacaaaccaaggaagcaagacggccctcaccagatgccagcacctcctgtgatattggactttccagcctccagattcatgagaaataaatttctattgtttataaattaaa

SEQ ID NO: 100202 - DNA, 156 bp, Homo Sapiens
tttgatgtgagcacattaaataataacaaaaagaaaaggcttatgaagtttactgtgtatcaggcactgttccaagcactatgtactaactcacttgattctcaaaacctatgtggtaggcgctatgataattatcatccttgttttgtaaaacaa

SEQ ID NO: 100203 - DNA, 488 bp, Homo Sapiens
ctctttaggcgcctttcccacggagccagagcaggcgtccgcggagccggcttcgggaaccgcgagcctattcggaggcgcccgtgtgcacgtccgtgtgtgggacgcgtgcggccggaacgttcatccttgcgtccatacacctgtgtgcgggtggaggtgccttctcacctagggttccgtggtatagctaccactgtgagtttttatgtcaccattaattttttaaagtccgctggtcctgtggaccgtgacagatatgtattacataatcctggatgtgtggcagaagctgcttctaagcagaggagtgaagcagaggtgctctggctacccaggtgtttgcaatatactcatcaataaacactgaaaaggccatagggttaaagtttgggaattttgttcttccttttatattacaaactgattaggatggagattatgagtctatttcctggtatatatacaacttgagggtattaaattag

SEQ ID NO: 100204 - DNA, 393 bp, Homo Sapiens
aaacagtagaaaatgaagggtggtcctgaagaaataaagaaatcacaaaatcaaggccagtgatatcaatagaagagtgcagtcttaaagcaagatacacagacagatggcagctcaaactcctcatatctcaactgttattgccagaccaggaaacaagtaatttcaaaacgaacagaaaacaaagcgacagaagaaaaggtaatactgattacaaggtacccaaggacaaatacatctgactgaaaatctaaggagcaccaaagcaaagccatgaaaaagaaccaaaggaacaaaaataaataagaagcaaaatggttgatacattggcaaacagtatttatttaacgtatgtataaatggggtccctgaagaataaaaacaaaacaaaac

SEQ ID NO: 100205 - DNA, 598 bp, Homo Sapiens
  misc_feature (24)..(24): n is a, c, g, or t
ccctttctcttcccagcctaatcnacacctccatgaacccctgcaaaatgggcatttctgactgcacacctgtgcgtgaatccacactgacagatactgatgcagagcaaatactgattgtgtgagggaaggaaataacttgaacttcagactcattcggcaggtcctgattctctttcactatcagcctccccacctattctgagccgctccgaaacaaaacaaacaagacccaactcctgggcagaaagggaacagcagctgagctgagcagcacatgcttggagcgttcctgccatcgacttcggattatttctgctttcttgagacgcagccatcagcatgggactcgatgcagcccggagagcaccgcccgcgcagcgacgcgcacagaccctcccttggagacgcgctccccggcgcgtgcggccgagcccgcgtgaaatgcacagaccctccggtgaggctctgcccacgtgtgaccctgagcactgcgaagcccttcccttccatcctcgcgtggccacccaaagtcttgcctacacctcgtacgtgcagatgccaattccatagaaataaatgatgtaaggacagaaaa

SEQ ID NO: 100206 - DNA, 472 bp, Homo Sapiens
  misc_feature (76)..(113): n is a, c, g, or t
gctaaaactgaggagagactcctcctaacccattctatgaggccagcatcatcctgataccaaaacctggcagagnnnnnnnnnnnnnnnnnnnnnnnnnnnnnnnnnnnnnntttcaggccaatatccctgatgaacactgatgcaaaaatcctcaacaaaatactagcaaacccaaaccagtaccacaaccatgtaggctaggctttattcctgggatgcaagtttggttcaacatatgaaaatcaataaatgtgattcactgcataaacagaactagaaacaaaagccaacaacacacactggggtctacttgatggtggaggttgtgaggatggtgaggattgaaaaacttcctatcaggtgctatgcttattacttggatgatgaaacaatctataggccaaacccctgagatatgcaatttactcatataacaaacctgtacatgtaaccctggacctaaaataat

SEQ ID NO: 100207 - DNA, 509 bp, Homo Sapiens
tgagatcgcaagtatggaatctgttcaggatacacaccctccagtgatacctcccgggagcgggccaagtcgctcttgtttccaacgaggataacgggtaggtcgtggtgcggcctcccagcccggagccgaagtagggtctctggaactttggagaaactccgtcggtcggtgactgagaagacgatgagaaaggcgtccccggtctgaaggcagtggtcccgcagccaccctcctgcatccccctgcagacaggcagaggaacgttagggctggaggcataggagatcctgtccagcacctacacctcaaagaggaggaacagggctgtgaggcagaaagaagccacctgcttaggacagcagagctagttaatggcagaatctccctacccagagtgtttgtggaggcggaagaaattagtaatatgaggatcctagactagggtagccatcctaatttcttaagctcttgattcaaaaatgaatattattcacacgtctgtaaaa

SEQ ID NO: 100208 - DNA, 828 bp, Homo Sapiens
  misc_feature (244)..(244): n is a, c, g, or t
  misc_feature (738)..(768): n is a, c, g, or t
atttactggctgacgaaccaaggcaactacaaactcctggtgaccatggaggactggtccggccgcaaaaagtctttgcagaatacgccagtttccgcctggaacctgagagcgagtattataagctgcggctggggcgctaccatggcaatgcgggtgactcctttacatggcacaacggcaagcagttcaccaccctggacagagatcatgatgtctacacaggaaactgtgccaactaccnagaaggaaggctggtggtataacgcctgtgcccactccaacctcaacggggtctggtaccgcgggggccattaccggagccgctaccaggacggagtctactgggctgagttccgaggaggctcttactcactcaagaaagtggtgatgatgatccgaccgaaccccaacaccttccactaagccagctccccctcctgacctctcgtggccattgccaggagcccaccctggtcacgctggccacagcacaaagaacaactcctcaccagttcatcctgaggctgggaggaccgggatgctggattctgttttccgaagtcactgcagcggatgatggaactgaatcgatacggtgttttctgtccctcctactttccttcacaccagacagcccctcatgtctccaggacaggacaggactacagacaactctttctttaaataaattaagtctctacaataaaaacacaactgcaaagtaccttcataatnnnnnnnnnnnnnnnnnnnnnnnnnnnnnnngaccgcgtatgcggccgcaagcttattccctttagttgagggttaattttagcttggcac

SEQ ID NO: 100209 - DNA, 110 bp, Homo Sapiens
ttaaaatttttttaacaactacctgtaagcactcaggacttaaaaagtattttgactaatatttaaaattttaaagtttttaaaaatttcttttattcatagaaattaaa

SEQ ID NO: 100210 - DNA, 518 bp, Homo Sapiens
  misc_feature (136)..(144): n is a, c, g, or t
tcaaaataaagagaaaatcatcactgtagccagacaaaaaacatatgcagaggaataaatataacaatgacagtaaaattctcagaaaacatgcaatccagaagataatggagtgacaactttaaatattgaaagnnnnnnnnncctctagtcctagtttactgaaattgaaaaattatacccagggaatacatctttaaaaataaattagatgataatttagatgaaatggactaattccttgaaagatacaagctgccaaaactcacacaagcagaaagacactccagataagcctatatctattaaagaaattgaatcaataattgataaccttccaaaacagcaccaagcttgactaagctcactggtgatttctatcaaccatttaaggaagaaattataccagtactctacagtctcttctagaagatagaaacagacgattacttcctgactcattctgtgaggctaacatcaccctaataacaaaaccagacaaagacattacaataaaa

SEQ ID NO: 100211 - DNA, 584 bp, Homo Sapiens
ctataaagtgagtgcgattactttgttcatttcaaaggcaaggagatagatgtgcaaagggattgaatgagcgacttcaggatacgcgattggaaaagcagcagagatagtactggaacccaagtcaacctggtgaaagagtcaacatacagcccattgctttcagtccctttttccctctccatgaggtttttccctcatggagaaaatgaggattctcttgctgcctgcattctactgagtgttcatcactttagatagatgatagtagctgaaggcatggggtaggtgagatcaccagggaaacatacagagaagagagaaaggccttgggaacaagccctaagctcagaaatgggacaccttcccaggtcggggctggtggagaagaggcagcatcagggaaaacacagtggagctaagcttggatctgaacattaatggttgagaaggaaggatggagaagtggaggtgcgagaagaatgccacaagcaaagggagcagcatttgcaaaggcatatcagatgcaagagacaatatgttaccttggaaaatcagcaagcgatttcaggatggcggccgca

SEQ ID NO: 100212 - DNA, 513 bp, Homo Sapiens
  misc_feature (110)..(110): n is a, c, g, or t
agtcatatgcattcagtagaaactattgaaaaaggaaaataaatctcaggacccccaaaccactaagccaaatggaactcactaataaatcttgggaccccaaatatcantaggccacaaggaaattccttgtgaacaaagaacagacagaactcaaagtcctctctttgctcaccatgagacaaatgcttatctgattgcttcctttgccatattgtttcactaagagactaaggactaagtgactattcctgtaaattgtgttttcagtggaaggcttatcagaaactcaaaagaatgcaacgtttgtctctcatctacctatgacctggatgcccccatccccactttgggtcatcccacctttccagatcgaaccaatgtacaccttacatatatttgttgatgtctcatgtctccctacaatgtatagaaccaccatcaggacctcctgaggctgtgtcacagacacattcttaaccttggcaaaataaactttctgaattgacaaaa

SEQ ID NO: 100213 - DNA, 545 bp, Homo Sapiens
tttgaaatgggatgtcattctgagactcagaaacccctgagcttgttagatggacagacatcctttccatcttatgtggatgagtgtttcttcagtgtctttagtatcaatttacccagatactgattttgaaagcctcattcacaccataaactttgttctaaacctctgtcttttacattgtccttctccaatgccttacctcttagttacgattctgaaaccaagagtacatctcaagtatgtagctgcaatgggagctctgcttcacgactgtagctagtgtttaatgctgagtaaaaaatgtgccttaaagggtagcctgagtcctgtcatcaaaataatcacatgctggctgaggaccctcaagctgatgacagtgtttcccaagttaaacagcccaactaaaatttttttctcccttatttgggtctttgagaaacctttacaaaatccctggcctacattgtgttgacaagattcctgtttgttactaaaagtttgattttggtactaaatcttctaaatgtaactataggcttagt

SEQ ID NO: 100214 - DNA, 702 bp, Homo Sapiens
tgcggccgccacagagagaaaggctaaagttctctggaggatgtggctgcagagcctgctgctcttgggcactgtggcctgcagcatctctgcacccgcccgctcgcccagccccagcacgcagccctgggagcatgtgaatgccatccaggaggcccggcgtctcctgaacctgagtagagacactgctgctgagatgaatgaaacagtagaagtcatctcagaaatgtttgacctccaggagccgacctgcctacagacccgcctggagctgtacaagcagggcctgcggggcagcctcaccaagctcaagggccccttgaccatgatggccagccactacaagcagcactgccctccaaccccggaaacttcctgtgcaacccagattatcacctttgaaagtttcaaagagaacctgaaggactttctgcttgtcatcccctttgactgctgggagccagtccaggagtgagaccggccagatgaggctggccaagccggggagctgctctctcatgaaacaagagctagaaactcaggatggtcatcttggagggaccaaggggtgggccacagccatggtgggagtggcctggacctgccctgggccacactgaccctgatacaggcatggcagaagaatgggaatattttatactgacagaaatcaggaatatttatatatttatatttttaaaa

SEQ ID NO: 100215 - DNA, 487 bp, Homo Sapiens
ttggactgagaacaagctccacagcacttcccaaaaccaaacttgcaccaaaaaagtcatggtcactgtttggccgtctgctgccaacttgatccactacagctttctgaattccagcaaaaccattacatctgagaattatgctcagcaaatcaatgagatgcactgaaaactgcaatgactgcagcaggcattggtcaacagaaaagcacccaatttttctccatggcaatgcctgatcacatgtcacaaaaccaacgcttcaaaagtttaatgaaccaggttttgaagttttgcctcatccaccatattcatctgacttctcaccaactgactaccggttcttcaagcatctccacacgcttcttgcagggaaaatgcttccacaccagcaagatgcagaatatgccttccaaaagtttgtcaaatcccaaagcatgtatttttacactacaggaataaacaatttatttctcattggcaaaaa

SEQ ID NO: 100216 - DNA, 401 bp, Homo Sapiens
ttgtgaaataattacaacttctgaatgccattatgagttaagagagaaggggtctagcttttggactttaggtctccccatctaccacctgcctgctacccatcattctggctccccagtcccccagaatctgcctgacagtgggacacgaatgcccacaggcataacaatgaagctgctaggaggccatacccaaagctactatgatgataagatggcaagacatggagtggcaaaggcaccagaagtttaactctgggactatctgtccatcacctttctttcttgcacagcatgcaggttgcatgggcttaaactgtagtggtcaataaagccacacagatcagggtgagcaaatgaaaggcaaatctaactcaggtagaaaaaagttggcggccgca

SEQ ID NO: 100217 - DNA, 467 bp, Homo Sapiens
gtactttgctttaaacggaaagcacttaaatagatgactatgtgtaaaagctctgtgcaattgaaatcatttttcttcattttaaaaaaataacgtattgcacaccaaatgaactcaaagtaagctttagaccaggacgattcaggttatgaatgagtttgttcactgtagttccgtttgttcatgaaccgaagggaaaacaggcctccccgactccctccagtctcccagcctgcctcttggtgaccactgtgctgggcgtgcagggcccgcgggctctggccggagccgctggcctgacgaggcaggatagggagtatccgtgattcagaagctgagacccttccccagtgtctgaggccacagccatcccttccagcacttaatcttgtcttgttgaaatggactgactgctactgacctgccggcgtgcgtgagggtgattataaaaggatgtttccttgaaa

SEQ ID NO: 100218 - DNA, 483 bp, Homo Sapiens
  misc_feature (65)..(109): n is a, c, g, or t
cctctggttagggtgcacatataaatcagagttaatatatgaacgcgtgtgcatgcacaagtgtnnnnnnnnnnnnnnnnnnnnnnnnnnnnnnnnnnnnnnnnnnnnnctggctgtgcgttccggagtgtgtgacgatgctgacctagctgtgtggccttgggcttgctgcttcattactcacctggatggggacgagggatgagaagggtgtgggtttggccccatgtcactggccggaaggatgtgtctcagccctgccctgtggggtgcccccgatgggaggctgtcccatctcccagtccccatctctttttccccacactgtccctggccaagccctgcccagagctgaaccctgtagctgcccccttgccctgtgtgggattcgcagtgtctcatttggtgacgtcttactggtgatcatctcctcaccccatctcccaccttgtggaataaatacatgttagcacttcccagaaa

SEQ ID NO: 100219 - DNA, 492 bp, Homo Sapiens
tatcaatattccccacctgagtgatatatttgttacaatcaatgaacttacattgacacataattattgcccaaagtccatagtttacattaggcttcactcttgattctgtacatcccatggatttggacaaatgtttaattacttgtatcaacaattatagcgtcattcagagtagtttcattgccttgctctaaaagtcctctgctccatcaattcatacctccctacccaaaccctggcaaacactgctatttttactgtcttcatagttgtgccttttgcatatagatatcatatagttggattcaaaccgtaagcagcttgttcagattgagatttttgggagtcttggtaattgcattaagttttctatatttactttcattgcttgaaattgaatttctttgtaatgctaaattgtattctactttcttgatgtgctactgtttatctattcatgtatggaagaaatcttggtcgattataagt

SEQ ID NO: 100220 - DNA, 497 bp, Homo Sapiens
tcagcaaatgttcatggatcaccggctaccaaggtaccaggcaccatgctaggtattggggaagagagactgaagtcacaacccctgactgctcctcaaaagctaacggttgcacctccaagtggctgggtctgttcttactcttggagggaattctgagaagacagcacagaattgtaaaccttcccttttgacccttttggattttatcaggtgtaaacaaaaagctgaacagttacttcaaagatatgtgtgtatattcagttttttattgttaagctgatattttaaagatttctgagctagcaggcatgtgggaaggaaggctctgtcttcaactctttgaccctccatgtgtaccatagaggggggaaaggtggtattttcactttgatgaggttggtaaatgtttttagatcttctggtaagcattatgtttgttaatacatatttattagagtgatgttttaagttaataaagtattaagagtattaaa

SEQ ID NO: 100221 - DNA, 496 bp, Homo Sapiens
  misc_feature (33)..(33): n is a, c, g, or t
  misc_feature (54)..(54): n is a, c, g, or t
cttggacacgtctacctcccagtaatgtttccntgatgtgatactttgagagcncaggatgccagtacaataattgaaattcacaaatgtctggtatcttgtccctcgtgccccatatattatctgtggtttcggagagctcacttgtctcttatcttcagaaatgacagcacatgaaatgttgtttggagccactgtcacatcaactgtagaaaaattaacaggtcagctaagggatataatgtaactttatttgtgatatgagagaaatcttgataaagacttgagagaaaactgggaggaaccttgtttagaagttataaggaggggtaagttatgtgtgtcttggaaggagaatcataaatcttaaaacatgagcctaatagagaacataaaattctaaaagataaagataataataatgataagccgcagggtggcttatgataatgtgacttctccttaccccagtagcgtcggacatctgtcagctctg

SEQ ID NO: 100222 - DNA, 413 bp, Homo Sapiens
ccgctctatgactcagtttcctcattcacaaaattgggataattataaaatcagccttctaaagctattatgagaatcaaatgagatgatacccagaaagaacatgagtgtgagggtcagaaagaatgacaggcaaatgtgcagcctgcgtttccttcctgtcccccttcccaatgcccagcgtgccctcctccactgctcagcacagccccaccttccacacccagcaggtccctcctaacacccggtaagggccccatcatactcagagtccttgacgagggccggcagaagagattaactagcatggtgtctgtgaacaatgtatcctgaatcataagcaagcaaacaacttttgaacttcctagtgctacctttaagtagttaaaaatcaccctttgctaaaagagatg

SEQ ID NO: 100223 - DNA, 643 bp, Homo Sapiens
gtgcagcccgtgttgagagccactacgtgtgagggaacagatgtcaactatcagctgaatgtagctcttcaatctgagaacctggaatgttttacaatgaaaacaggaaacccacatttgctctgtttcgcctcagagtacagttattgtgggtcagttttgataggacagtttggattttctcatttagtctgactgaaaggccgttgcgcagaggcattcgcacaactgctgcaaaaccctgcatcaaactaggtaccacctattacaaatttcagaatcttatgctaagggttgtgaagtactgcaggaggttggaattaaagtgcgacaattctctttgttttgtgataggctttaaattaaacaacccaaaaggatatatctcaggattctctataatacaatttcttttcctccaaggcatttgcatctttggtttagttcacctatgttgtatcactgaaacatgttttataaatactgttaacagactgaaagcatctgaatcatttaaaaaatcctgaatgaataattcataagattaaaataagctgctaaagccattcttgtggcttctacatcaaaggatacaaaaagaaatggacacttatcagggattttgaaggcaaggagaactgat

SEQ ID NO: 100224 - DNA, 397 bp, Homo Sapiens
agtctcctccagtggtactcctaatgactggcagcatctggcgattgttcctctcaatgatggtgtagcagaagacgagctggtacttactgtggaacaaaaaaacaacacagacagaggcattaacatgctgaagtgactctgcggatgtgagctgcatgtgacaactgtacctaccagagaaattgctgaatataacaagtgctagtaaaaataacaatataaagcagaaagtaacacttttagggtaccgttctatgggtcttctatctgcaagtttgctaaggagaaagaaaacgtggctatcactcagaatgtgaaactgggcttatattttaatgagtaatagatattattcattaaaaataaatgtttgcaaggcaaaactcttaaaaaa

SEQ ID NO: 100225 - DNA, 431 bp, Homo Sapiens
actttgtccagcattatgaatgtgatgactgtggcatggcttttgggcatgtgtcacaacttactggacatcagaaaatccataaggtaggggaaacccacgaatatggtgaaaatacaaggggctttaggcatcgctcatcatttacaatgctccagagaatatgtacactatataaacactttgaatgtaaccaatgtggtgaaacttttaacagaccttcaaaggttattcaacatcagagcatgcacagtggactgaagccatacaaatgtgatgtatgtcaaaaggcctttaggtttctctcatccctctctatacatcagagatttcatgttggcaacagagtaaacatgactcggcatcaaaaaactcatactcaaaggacagcccttttcctgtaacttttgtggaaaaacctttcaccgttt

SEQ ID NO: 100226 - DNA, 471 bp, Homo Sapiens
  misc_feature (228)..(236): n is a, c, g, or t
agaagcatcacacttcctgtgttcaaattatattataaagctatagcaatcaaaacaatatagtactggcataaaaacacacatagagcaatggaacagaattgaaagcacagaaataaacccactcatataaggttaactaatcttctacaaggtgtcaagaacaagaatgaggaaagaatagtatcttcaataaatggtgctggaaaaactggatatccacatgcnnnnnnnnntaaggaaattggatctttatcttccaccatatacaaaaatcaactaaaggtggatgaaagatttaaatgtaagacctaaaatggtaaaactcctagaagaaaatatgcagggaaagatacatgacattggtgctagcgttgatttcttttttgatatgacaacaaaagcacaggcaacaaaagcaaaagtaaaggagtaggattgcatcaaagtaaaaagcttttgcatagcaaa

SEQ ID NO: 100227 - DNA, 598 bp, Homo Sapiens
  misc_feature (86)..(86): n is a, c, g, or t
  misc_feature (552)..(552): n is a, c, g, or t
ttggtgagagggtgaattagttaagccactgtggaaagcagttgggagatttctcaaagaactaagaataggattactattccacncagttgtcccattactgggtatatacccaaaggaaaagaaatcattctaccaaaaagacatctgcacttgtatgtttattgctgttgtaaaaagcaaacgtaaacaacctagatgcccatcaaaagtggattgggaaaataaaatatggtacatgtataccaaagaatattatgcagccatgaaaaataatgaaattgggttctttgcagcaacatgggtgcagctggaggttgttatcctaagcgaattaatgcagaaacagaaagccaaatactgcatgctctattgtataagtggaagctaaatagtaggtacacatgggcataaagatgggaatcatagacagtggggactacaaaaggggggagatgcagtggtttaaaaagcacctattggacactatgttcattatttggctgatgggatcaatagaagcccaaacttcagcatcacaaatatataccncatataagaacgcctgcaccatgtatccactgcatctaaaattaaa

SEQ ID NO: 100228 - DNA, 750 bp, Homo Sapiens
  misc_feature (59)..(69): n is a, c, g, or t
aatgattatagcttcctttcagatttgcaacagattgttgatctaaatattgaagtatnnnnnnnnnnngttaaatttaaaggatgagactgataacaatcataacttctcaaatctaaatgaatatttcctgcagataagtcaatatatatgacctcaactgggcagctttactcactcttctctaacataaagacacgctcttcccatgaaggttcacatctgtatacattacaattgctggcattttaagaggctaatgaaacactctattttgcgctattgacagaaggcagatttctaaaaatcagagttaagatgaaccataataaacacgggttaactttgtaaaataaaaaggggtgggggcagggatgatggtagggggagaagtattggttagtggtcaagaatgccttgatttggattcttgctccgtccaccgggtgacctgacctctctgggagccagctcctttagtgtaaaatagggataatagcgctgttgctgttcaattctggagggttaaaagattctgcgtgaaaaggactgtagcagcactttaacacaataaatgttgaataaatgtaagctattaatatgaaattagaattgaaatcctgtctcgagataccattttgcttaattgagagaacttgtcatgtctctgtccagcacttgatctgactcttagctagaaaggttcatactatcagctgtgcctatctcactggcttagagaaaggataa

SEQ ID NO: 100229 - DNA, 486 bp, Homo Sapiens
cgggcaaaagctctgaacatacacctcaccatatgtatatgcatatgaaaagatgctcaacatcatgtcattaaagaattgcaatttaaaaaaacaaatactattacacatttattagaatggctaaaattcagaacactgacaacaacaaatgttgatgaggatctggagcacaaggaactcccatacattcctagtgggaatgcctaatgttagagtctggaagacattttggcaatttcttaaccaagctcttcttaccataagatgaagcaactccacaccttggtatttacccaaacgagttgaaagcttatgcccatacaaacacctgtacaagaatgtctatagcagctttattcataattgccaaaacttgagggcatccaagatatcacttaatgggtggacagataagctgtggtacatctatacaatggaatattaagtgctaaaaagaaatgagctctgaagccacaaaaaaaa

SEQ ID NO: 100230 - DNA, 514 bp, Homo Sapiens
atcttgttgggagaaggatgacaataattggggacttagaataaaggctaaaaatgattcaaagagaatgcaaaaagaatcaggcacacatcctttactctgttgtgcaaatctcaccttactgtgtgtttgtattctattcctccacaatctttattttattttatttttatgttcacagagatttgttggtgccaactaaatgagcccaacagccagtgacaacagaactgcactaaaaaaagtccctcatcagctcttgagagcaggttccttaaaggtgaacaatattccacatacaaggactttttcagcaccatgcattagaaatggaagtgaatgtttattattttttgtataagttggttgatacggcttttcagcttccctcagtatcattatccaaattttgtagatgacactaaagctcagaggagttaaaccattttcctcaaatcacatagctttaaataggaaaaccagatatgaaaagcagatttttttctaaattaaa

SEQ ID NO: 100231 - DNA, 640 bp, Homo Sapiens
tctacacatccggtcacccacagcctgccacactctttcttgactggctgtggtgttctgtgctgggggaagatgagagggaggacaaggactttcccaggactccagagatcaccattagtgccctgcactctggagaacacagagtgttggctgtgtgttggtggacacccttcaagcctgggcacctgagcaatgtcggctcactctcgtgagctttgagcagagacactgtgctttggagcatgtcacccgcagaatccagtaatctggccactgccagaggttcacttaatttattgtagaagtgggttagttattgtggaagttgccttctgataaaaaagttgaagttcagctcctgtgttctctctgtccctcatgcttccttgcccttccacattctgccatgggatgacagattaagaaggccctcaccagaagcaaagcaaaagccagcaccaaggtcttggacttcccagcctccagaaccataagataaataaattacttttctttataaattacctagtctgtgatattttattatagcagcagaaaatgaactaaaacaagtttttttaagttgtgtgcagttatatatgaataattttagccttgatgttatgctagaaacggt

SEQ ID NO: 100232 - DNA, 724 bp, Homo Sapiens
ttcatgaaaaggcatcaatacagggtttaagactgaggaatactgcatcagagaatcttgctccctaatttgatgataaaagatatctgcatgttatttctgcttaacaccctatttcactttatcacaaggtgaatgaatctgctgcataatattcataatatgcattttagaataaatgtatccctactcattatttagaggatgaaaaattacaatcattccactgaactggaagttaagacagccacccagccactttgggctcctcacacctctgaatcaataggcaaggaagggagttacagtgttggctggggtaattgatcctgcccaagaggaactggaactgctacacaatggaggtaaggaggagtatgtctggcttaaggagatcccttaggacatctctgtaccctgccctgtgattacagtcgataaaaataacaacaatccatacaggactatgaatggcccacacccctgaagaatgaaggtctgggtcaccccaccaggtaaaccacgatcagcttgcgagatgagtgcaaagggaatacagaatgggtagtggaaagaggcaaccatgaataccagcaaccaccatgtgaccagctacagaaacgaggactgtaattgttgtatttcttgttttgttacgaatgttttggtgtgaatatctatatatagatatataaaaagaaaatatcttcgcattctttccttt

SEQ ID NO: 100233 - DNA, 580 bp, Homo Sapiens
  misc_feature (335)..(411): n is a, c, g, or t
  misc_feature (444)..(531): n is a, c, g, or t
tgcggccgccccgccggtcagccgggcgcgctcatgggggaccgcgggcgaggccccctgcggggtcaggaaggctcagggcgcccgcggcctggggcgaggaggctggaagagacgcgatgagtcttaggaagagggtatcgctgctcccaccctggctcccagcccggagccctcatcccccagccatgaggaaatcagcattgaggggcaaggggagacctcccagaggaggctggcctgctctggcacctgtgcgagggcctgtatgtgtgcaagagacagcgagagaatgagataatctgtttttaaaggggcaggcgcgtaatcacttnnnnnnnnnnnnnnnnnnnnnnnnnnnnnnnnnnnnnnnnnnnnnnnnnnnnnnnnnnnnnnnnnnnnnnnnnnnnngatggaatctacccagcaataagaaaagaaacnnnnnnnnnnnnnnnnnnnnnnnnnnnnnnnnnnnnnnnnnnnnnnnnnnnnnnnnnnnnnnnnnnnnnnnnnnnnnnnnnnnnnnnngagagatggagttcaagaacagacacaattgatgatgaagtcagcatag

SEQ ID NO: 100234 - DNA, 979 bp, Homo Sapiens
gctctgggattacagagctgggtgcgtgccactgtatccagccctctatgactttaattctcatatggtaatctttcagctcctgctccactgctaagtgatactgtgaattctccattcaaattcctaagtcaaagtgctcaaccgaatacattttggctgcttgtttgtggggtgagggtgccgtccatgtagtttgtatatacagaactgccatttggcagtgactgtgagttgggcagcttcatgtagtagaaggctgtaggttagcaagtacacgattgacgtttccaataagattggcctgatcatccacttcttaacgttgcttattctggtttcactctttgattctaagtttaatttatcgtgaaattgtctgagctcaccacttttgcccaaagtctgtaacagttctaatcttttatatcatgtgaaactgaaattgttgcatggtacagagatgttctgtatttattgattagttattatttgagattactataaaatatatgttaatactttgacatgttgaaatgtatgaaagatagacaaggaataaagaaaagttgacgcccttcaccatcccgcacacctgaggagcgggagtggcggccccaacagcgctacttgaaggtcttaagggaagtgaaagaggagtgtggtgacacagccctgtcatctgatgaagaggatctcagctcatgggtttccgagctctccagcacgttttcctagtcctgcggtgcccctgcgggtggtgcccacactttcaaccccggatatgaaaactgcagataaagtagaactgggggacagtgacctgaagataatgttaaagaagccccccgagaagcggaaacatcagccagatcacccggaccttttgacaggggacctgactctcaatgacatcatgactcgagtaaatgctggcaggaagggctctctggcagccttatatgacttggctgtcctt

SEQ ID NO: 100235 - DNA, 498 bp, Homo Sapiens
tgcggccgccaacttttcagaacaggctggggctggaggtgtagaaggcttgtggcctccacatctgcctcttcctctgcagccaggagtggtcaaggacagcttgcctgtggggaagcctgtgtgaactctgtgtgagccaccccaagccaaatgaggaaggcctgggtggcagtatgtaccaactcttatgcccttttctgaatcttccatttataaactacacaaaggtacaagcaaacagacctctgtcccttcaggaccattcgccaaacaattatggaggttcaaccctctccctgaccctggaggacacaaaaacgaacagggcagtctctggccctggataagctcgcacatatccacaaacaatcctaaaataagacaaagatgtctcagtgccatagaagagtgacaggcagaagaggaccggggtctagagaagagcaaccagacctggagcccataaaagcacttagcacagcctggaacagaagg

SEQ ID NO: 100236 - DNA, 501 bp, Homo Sapiens
ccttctctgccccagcgtatctagatacatacattccatggtctggtgcatttgatgctgtttgagttagtattggtcagtgattttggcacccttccttccttatgttcctataccaaggctttttatacgaggtatcactgtcttcagaaatatggatggaatgaagttccatttagaccctgacatgagactagttctgttctcttttgttctgttagacagcagtattaagcaactcaacgctgaagacatggatgaaattgaaaagattgactattgaagaaagaactttattgtttgtgcagtatcctagtttatgtgagaatgtctcagtgggttttgaaggtaatttttttatgttgaggctttttcgacgtgaaactgtcacagatggcaaaataaatgtcacggtacttagttttaagacataaggtctttttgaagccaaattgatgtgaagcttgtgatccttttgaataaaaaaaaggcaagattaaa

SEQ ID NO: 100237 - DNA, 625 bp, Homo Sapiens
gctaagtggtgacccgtgaaaatgatacaggatggccaccaggtgtctttgttaaccggggagctgaccgggagcagcgagcttccatcattcagaggtttcgggatgggaaagagaaggttctcataacaactaatgtttgcgcccgagggattgatgtgaagcaggtcacaattgttgtgaactttgatctccctgtaaaacaaggagaggagccggactatgagacctacctccaccgcatagggcggacggggcgctttgggaaaaaaggccttgccttcaacatgattgaagtagatgagctgccctcgctcatgaaaatccaggaccactttaacagcagtattaagcaactcaacgctgaagacatggatgaaattgaaaagattgactattgaagaaagaactttattgtttgtgcagtatcctagtttatgtgagaatgtctcagtgggttttgaaggtaatttttttatgttgaggctttttcgacgtgaaactgtcacagatggcaaaataaatgtcacggtacttagttttaagacatgaggtctttttgaagccaaattgatgtgaagcttgtgatccttttgaataaaaaaaaggcaagatttatcaaaaa

SEQ ID NO: 100238 - DNA, 526 bp, Homo Sapiens
agtttcctcatacttacagagttggtttgagtgttaaataggatcatgcctataaaacacttaggtcatcaccttgcatagagcatatgtcagtgaaaattaacttaaattgttatttttattattagcagatttttttcagcctgcacgtgtacatccatgcattgcacattcctttctgttcttgccctccctgtcattgtgaggatactgaaaagttggtcttcctgtctctgggaaggcaatttagtccatgtaaaatgtctcaaattccctgtcctgtcacatggctcatgaactgcctctggcttctgaaggagcctgaaggagttgtcaaacctgccgcagagtgctgacgatatgtcagtgtaggttcatccattgtaacaaatgttctaatctggtgtgggattttgatagtgggggagtctggaggtgggtagcgggtatgtggaaaatctctgtactttctgctcaattttgctgtgaccctaatgctgctctaaaaataacatcttttgggaaa

SEQ ID NO: 100239 - DNA, 535 bp, Homo Sapiens
tgatggtgtgagcttgagcgagatgaatcccgctgccctcagcttgcctttgggattgatttaatctctgaccgaaaccacggtgccacagaggcagcatggggctgtggggacagaagtcttatgctcaagtcccgcctgtgcactggccggagtccctaggcaaggtccttccccactccgaacctcagttttctcatctgcaacatggggaaaactgcgcctgtaaacttcgtggagttggtgagggactgatcgaaaagtgcgttcctaataggcgtgatcattattggttttataaatagtcctcatttagaaacctctccccaacctctgctgtgatatccttaattctttctttctttagaccctgtgttattccacagaaggtctgagtgccttacagaaaacaggctgagtaatattgagaaggtttaaaaagcaaaactaggtccgggagacagagattagaagacgctagcacagctgcacacagagaggcaggtcatgggtcctgcctgggggtcaaagcaaa

SEQ ID NO: 100240 - DNA, 649 bp, Homo Sapiens
gcgttctatgtgaagccgatgctcatctaccctacacactacacagtagacgatggctatgtgagtgacaccgagacctcagtcgtatggaacaatgagcacgtcaagaccgactgggaccgcgcatagtcccagaagatgcgggagcagcaggcactgagccgtgaggccaagaactcggacgtgctccagtccccactggacagtgctgcccgggatgaactctgaggggtagcagccagaaagccaaagcagccatcggtggcccaggctccacgtgcttactgaggacatcagggccacctctggaccccttggcaggccacagagggctctcgtgtggggtggtgtccagccagctcttgctaagcaatcacgtgcacacaggcagcattaatggagtgcctactgcatgccagcaacagggcttggccctggggaattgggaggaaccaagccctcttcatctgttcatgtgcccagcatttattaagcacctgctgtatgcaaggttcccatgttacggcagtgaatgaggcataattgttccctccatcagcgattgattcagtcatcaagcagttactgatcagattaagaatcaggcactagtgatacacattcatttttaaaattcattcaaggattt

SEQ ID NO: 100241 - DNA, 498 bp, Homo Sapiens
aagttatatcccagaaagcagtggatttccagagctgaatgaatgatacaaccaaaagaacctgctggttgaacataagaaatccccccagacccaaggtaaggcttagagcagtggaatgaagctcagctaaaggcaggaattggacagccacccatctgaaggcactggggcccaggacacgctggagattcttggaggtgggaagtaagcagaggctccaccatcaaagtttggaggagaaggggtctgggctcctctcagtcatgtacaagttcctgcagtggaggaaagcccagttccaagaaacacagcgaaggaagcgtgggcagaggcacaaatagcagattggatgccccagcctagagccttcagagtgtggcttccagaaccacaacaaactctaacagactttccacagagatgggaaggaagttgctagaacaaacactatcctgaaacttgccccaaatctgaacctcatcaaaccccaatgtt

SEQ ID NO: 100242 - DNA, 582 bp, Homo Sapiens
  misc_feature (78)..(153): n is a, c, g, or t
  misc_feature (558)..(558): n is a, c, g, or t
ttggaaaactcgatctctaggaggaaagaaaaaaaaggcctgggtcccagaaaactggttgtagccctagcttcttannnnnnnnnnnnnnnnnnnnnnnnnnnnnnnnnnnnnnnnnnnnnnnnnnnnnnnnnnnnnnnnnnnnnnnnnnnncttgatgtgtgttgttcttctcctccacgatatgaaaccaaaggcctttatagcttgttttctgaggctccttccaggtgaaaatcctataactcccaataaaacagctggagaggctgtctctactgccttttctgtctacccaggagtttccttggttgatgggaagctgtttaagaactgaaatgagagagaagaggcagacagacccaaccgctacagctcctatcagaaagggcagcgcccgtggaattgtaggtagcctgttactggctcagagaacaagcaggcctacttatgttaaaccaaaaaccagatgaaaaatgaaagcgccctctctgctgcataaacattttatgtagcttctatcatcattccttttgggaacattctttagtagcacanactggtaatctcccacttgtcttc

SEQ ID NO: 100243 - DNA, 560 bp, Homo Sapiens
ttgcggccgccaacgctctcccacggtgcaactcagcaaaacgcagctcgcccccaccagcgtggagccctggcaacaggtgagggccggaggaaagctgtttctatttctccacgaagggagggaggagcagctccaaggacagctactcaatctgtcctcccacagccatctccactggcctcccaaggagcctctcacttacccagggcagacagagggcaacgaggcgcggactgccaactgcctcaagtctggtcctcaggctcaaccgggctgccagcctcaggaagcgccaggtctcaatttcactaacccacatcttcaacattaacgttgtatatttgtcacacaaacagatgatgaaacaccaaagtacaagatttctctgcaaggaggctttgttcccttcctgcactttggaacttcctacaggtgtactttaaacaccactgatcaacatgaaaaccaggatgccagttacctctgaacgggaggggccagaaactacaatctggagggccactcgagccttctggtaaaatcctgtttttcaagta

SEQ ID NO: 100244 - DNA, 564 bp, Homo Sapiens
tgtctttaggaagttatatagtgaaatgagcttgttcaaggaaggctttaacagtactgtgaaggaggtcatcccctccagattatcagaataaattatgaaacttcaccctgaaccagtgactaagccaaatagataaagcatccccctgtctccttgtattttttagagcattctccatggctagatactcaaagtgaaaaatgctaatggcaaaacttctaaaaaacagacaccagcaaaaatttaaggaagatatgcctcaaaacacgtctcaaaagcggctctcagtctctcagctcagcacccagcaagactgcatgcaactgcccagagagtgggctctattatttgtctggccctgtacagttcaccttctccaatttcacatcataattaaaatctcagtggtaacccaatttggactctcatttcgaaagctgggatgctttttgtctactgaacagtagtccgaaacagaggtgttgcttttctacataagaaaaacaaaaattgagcccaatcttttgtcatcaagattgcctctgtatgaggcaaaagtta

SEQ ID NO: 100245 - DNA, 512 bp, Homo Sapiens
tctggcagaaggaagtccatgtactctgagaaaggcaccaaaggagggaatgggaaggaaaagggcccattctggagcaggtctttgcgatgaccagagaaggggccccctcccttgtgggaaacacgaggttcaaagcaacgtacaagctaggggaaccaactggccccacattcagatgacctcagccctgggaggtcagcacagggtggggatcccagaacaggcccatctcacacaagctcaggggtggggatgctggtgggctgggggactcggaaaagcatgattagaaaccacaacaaattcctaaggttaaacatggattttttcagaaggcatttgtggagttttacaaatgttgatgtaccctcagtaaagggcaaaaatgctctagacttaaaatcatgttgatgtggccatccctagggagattttgtttccattttgtttgtttcaattgatttgtttccattttatttcaagcagcctttctttcaaactcaagccaa

SEQ ID NO: 100246 - DNA, 542 bp, Homo Sapiens
tattgtactgagcaataaagctttaatttagagcatgtctcagtcaacaaggcacctgtgtaaacagccccctgctcaaaaggctgctgtctggactctctccacaaacactcagaggctccagccagcaagggaaagccaccctgtacagtttggaagacagctctttgaaaacccattgtggatgtcacagtgatgcattgccttatcttagggatggagctctgccgaggacaaccagttgctgagaggcaaagctcatcattttgaagggctaggtgaaggcccatttaatttcctccaggagaaaatgtcaccaccaccattggtaagcacaggggatgcagagtgaaatttggctacatcttcatacagagttgctcctagaagagaaagacatgatttatgactgaagagccagtattttcccctaggaaatttatttcatttatgaataaaaaaagggaaagatatttaaacaagaaatttcctagttttgctgatgatctgaaaacctcccctgccacttcggctgtaataaa

SEQ ID NO: 100247 - DNA, 552 bp, Homo Sapiens
  misc_feature (419)..(464): n is a, c, g, or t
cgagaatgtaagtctttcccagaaatttaaaaatgataaagcaagccgaaaaactgtagggaggaattttcattttgttaaatttaggttgttaggggaatcaacgcttatggttagacctctgattcaggaagtctcaaggatttacattcctatttcagaagattgttaaagcaaaaacgattgtcatttgcagttttgatacacctctagttgtcagttcaactttttacctttagttttctctgaactcttccccttgttccaaggggaagctttcaaaaagtgaattatgtcaccatttgcatgttattgaatagaagtgcactcttaacatcccatttatccagtgtcaaagctatgatacattgttgctttatgtggggtctcccacactgaaaagaaaaacccggacttcnnnnnnnnnnnnnnnnnnnnnnnnnnnnnnnnnnnnnnnnnnnnnnctaatgtaaacctctgctagaagtaaataggctctcgcaaatattcaaagtgatacagtaataaacatcaaatatgtttgagaagaaa

SEQ ID NO: 100248 - DNA, 496 bp, Homo Sapiens
tttaattattaaccaaaggtattgattatatgtagtttagaaggggagaaaagggcccattgtagtagagggttaaaatgaagacagtgatttttagcttttgtgtaccatttgctataattactttctgatagaatttgaatttgtaatgtaatggagttaattttaaaatatttgagaaatggctttatatatataatatcatattaattttttagacacataggattctgtaattgtttcatcctaacagatttttaaaaggaagcatataaagtaaatgaaacacactcttattatattcttctacttgaggtagaagaattctaaattaaaacttggaaaaaagaatttttatccgtgcaaaagatttgaggtatgtactatagttttataaatcaacagaaaaaaatggaaggacacagccatggctgggcaattcacaaaaggaaaaataaaaatggcaataaataatgtggcagattgtgtttaccaa

SEQ ID NO: 100249 - DNA, 587 bp, Homo Sapiens
tgaaagactaaatcatgaaagagtaagacacagatacagcaaacaggagcccaacacagaagacatggcctgggaggcccacagaggatggcgagaagtgatcctagggtggcggctctgcaccagacgtggagggcaactgagccatactgcagcagtgcaacccaccgagaggtgaaggcaggccatggtgagcttagaaacaggaagtacagggcagcccccttgctctgactgtatttccactgcaggtccagcgcctggtccccaccttggccctgcctggtgcctgactatgctgagcactgtgtttcccaaaactccaagatcttgctcacgacttcctcaggaggggctttgtcagctcccggagaagcagaagtcagatcacaacctggagattgatgcgctcacctcctggagcctccatccagcaggggcagtgctgccctctccttgcactgccagtgtgcacctgctctctgctttaatattaatcatctttgatattcatttacatgtagttataatagctgcccaaatagtgaaatagtaaataaaattaccaaatgatcttctgtgaaaaa

SEQ ID NO: 100250 - DNA, 541 bp, Homo Sapiens
ttttatataagcaattttttatttcccaattcatgtacaaatctcattatgtatatagcataatttcctggagaacacaaattttgcagtgaattttaagtaattttaattgcagtaagcatcagtttagcctagagatgttgatctttattttaaattatttttcaccattctcattttcttcaaagggcagcaataaacatatgcaagttatttttaattatagaaagtaggtctacaaagataagatctaggttccaattcattgctttaaggaaaagatgcacaattactatcattcagtgtctaatcacaggaccatttctgaggtccacatgtggctctcctctttgtaatatacagggtgaactctttactgatacacacaagacaactgttaaaaagtgaatccagcacttaaatgtcattacacagaatttattggattaaaaatttgtaatatacagtattttaataaagtttctgtattcaatttcaccgcacttatatataaataaacctgtctttaaaagctttaaaa

SEQ ID NO: 100251 - DNA, 359 bp, Homo Sapiens
ctcctacctatggggaccaaagtgctttttccttcaggaagtggagatgcatggccatctccccctccctttttccttctcctgcttttctttccccatagaaagtaccttgaagtagcacagtccgtccttgcatgtgcacgagctatcatttgagtaaaagtatacatggagtaaaaatcatattaagcatcagattcaacttatattttctatttcatcttcttcctttcccttctcccaccttctactgggcataattatatcttaatcatatatggaaatgtgcaacatatggtatttgttaaatacgtttgtttttattgcagagcaaaaataaatcaaattagaagcaaaaa

SEQ ID NO: 100252 - DNA, 620 bp, Homo Sapiens
aacacctctagagaaaattaggggggagaaacccaagcgcgagggtttcaaccaattcctacaggacaggaactggaaaattttttgcaagaagtctttccccccattttcggagggggataggatcccggttcaagggaagatgctagacgaaaacccacattacctgttaggcctcagcatggcttatgtgcacgtgtaaatggagtccctgtgaatgacagcatgtttcttacatagataattatggatacaaagcagctgtatgtagatagtgtattgtcttcacaccgatgattctgctttttgctaaattagaataagagcttttttgtttcttgggtttttaaaatgtgaatctgcaatgatcataaaaattaaaatgtgaatgtcaacaataaaaagcaagactatgaaaggctcagatttcttgcagtttaaaatggtgtctgaggttgtactattttggccaagtctgtagaaagctgtcatttgattttgattatgtagttcatccagcccttgggcattgttatacaccagtaaagaaggctgtactcaagaggaggagctgacacatttcacttggctgcgtcttaataaacatgaatgcaagcaaa

SEQ ID NO: 100253 - DNA, 479 bp, Homo Sapiens
cctgcaagatgtacataaaaatcacataagctggaatgcaacaaaaggtatgtttatgaacttttattctcaaaagttgaaatgctgactttctcgattcctcattttcagacttttatttcagataaatactaaaaacctaagtgaaccttgataatgctgtagtgtagattacttcactaccccatataatagaaggacttgctgtttagttgtagaggataacagcgtttttcagtggaaattgaaagtggaaaaattgaattttgctctacacagttaacatatagtggcctttttttggtatatatgtaaacatgttgacactggaaatacgcagtctgaaataaaattagtaattacttgaaattagtaatctcaaataacttttaagaagttatttctacacccaggaataaattattctgattttgtagacaacacaggaataggccactgaatatgcaggtatttagagt

SEQ ID NO: 100254 - DNA, 206 bp, Homo Sapiens
atacttccctggagtttccaaacttataacaaacaagcattgcttttataataataattttttataaaagtgttactttgaaggaaacattctgtaaactcaaggaaattcagaaggtgctccaaaactgttttgcctggcggcccatctggccctggcctggtggacaagcccttgtgaacaggtttggtttttgtgcagaattt

SEQ ID NO: 100255 - DNA, 464 bp, Homo Sapiens
catttaattagaccgtaacccttctcttggggcagaggtcatcttgcacagatgcacatggttgcctggagtctatcgtacaatcatgtgcactgctgacagtctaaatgacaccagtgtcccagttttgtgctgacagtccacagcaggcaatgtttctgcgactgcaaacctgaaggcgacgaggagtttctactttcttgatcagcatgaaggggcagagatcaccagttggtggcaacatgtggaaggccatgaacccctaaatctaaaaatgtcactaagagtcaaaagttccagagctctctcagtgatggcacacccaactccaccccatgtctttgaggaagctgagaaattggagagaacctgacaattatagaagaagtagctttttattcagcagtctaggtcctgcattcccaatgtgaaattggttcagggggagagggattgcaaaaaaa

SEQ ID NO: 100256 - DNA, 352 bp, Homo Sapiens
tgcggccgccccaaacctgcccggggctccttctccccttcggccccgattcccctttcccactagggctcccctctgttcactggctctcctcaccctaagtctgcagccaccaggaccagggagggggtgggttgcgggggtcctccttcctgccccttggctcaccttcccccatccacgcaccaggagcggagagcccggaactaagaactgtagacccagagaggtgagactggccccaagcacctgggtcctcaagaagagtcaccgtttccgtgccaggaggatccaaggtggggaaactgaggctgagagagaaggacgttgaccaaggtcacagggcaggagc

SEQ ID NO: 100257 - DNA, 522 bp, Homo Sapiens
agtgcaaatttcaaggaaaaggctgcccagctcattggctagctgaataccgtcctgtgtctgcacctgccgggcatgcaaaaggtcccccttgttgcccacgatgatgacaggggctttagagtcagggtggaccttccggatgtgctgataaaggggtcggatggacaagtagctgtcatagtctgtgatggaatagaccagcagaaaaccctcggcccactgcacgcatttggacagggaatcgacgacctgggggaggctgtcttggatctggacgcccccgggagtatcctggatctgcagggagagctggtccccctcgacatagaccagccgtgaatacagcttgcctgtattcggttcatagtctccaatgaatctcttggtcaggaagcgcacgatcattgcgctcttgcccacgcggccggcgcccagcaccgccagtttgatgtccttgggcagtaggtagtccgaggaggactcggggatgggtgcgagcagaaagtgcccggacatgct

SEQ ID NO: 100258 - DNA, 372 bp, Homo Sapiens
tttacaaatagatacaaatacaacgtcgaccagatatgctacattaactatgtacaccttatttctctagaggcaggaatattccttatttttagacaatttatcatttacactgagaccctgaggaggaccatcagcctcctgctccccaatgctgccttcctcccttagaagcttatcctgtgctttcaactcatcactgagcaagaatcctgggaggaaaaaaccaagcccttctgaagatcttgggacttttctacccctgttctagaaacaatcaagattatttactgtgatacagcctagaaacaagcttttcctcaatgatgtccttttgtatagtaaaacgaatataatccctgacactgtttt

SEQ ID NO: 100259 - DNA, 440 bp, Homo Sapiens
  misc_feature (91)..(104): n is a, c, g, or t
aacatcatattattgcacaagaagccagtgaaggcatataatggtcagttcctcactatttcaaaaaaaatctcttaaacccagagaaggnnnnnnnnnnnnnntccagagcatgaaacacacaaaatcaaaggtatcctttttctccttaaagaatgcctgaaggattcttagaccacttaagctgccctgatcttctctttgcaccagtgagcacaacagggcttggtttggttgggtttttgttttctgtgtggacagcccaggttgatcccaggccttggtgattcaatgtcttttctatttacttttggttctttttaattggtttaaagtgtgtagtatcttcggtctatgaacctgcacagactatttagtcataaactctacaaatagcttaaaaggaaaagggggagaaacaagttgtattatatttttat

SEQ ID NO: 100260 - DNA, 480 bp, Homo Sapiens
ttttaacctgaaaagtataattcatggcaggactctatttcttctgccacaatatgatcaatagggtttcagacagtgactctcataacaccctcggagcgctcactctctttttaaagagtttattcttttcaaagtcgtgtggattaattccagtatgtcaagtcaaactttggctataaaatgacatggttgaccaagaaaaacacttatgtgctcacaattttccatccagtggcttctgaacatttaagactacctgcccctgaccaagtcctgttttgaaaatagcttaaacaatctattcaagaaatcatactgagccttttctttactgggggatgggcagaaaagaattagaacacacaacaaagcaaggaagagaaactttgaactttcttatcatatcaaaagcagcaaattccaactcatagttaaaaaataggaggctatctgatcattaaaaagttggcggccgca

SEQ ID NO: 100261 - DNA, 512 bp, Homo Sapiens
tttatatcataataagtgcagaatctctctttaattgtcccttttcctagacagcttggaggaaataactcttctagctgcctgcatctagactgttctaaaaatgagtaggagagaaggcaggaagccaagagcaagagaggcaggatacagagaaaagaatacatgtaggactggaaaactggcctgcgtgtcaattcctgatgcacctaccaaatggtcttaagatctgactgctgatttctctacctaacaagagacactgacaacatatctaataccagaataaatgggatagaaggatagttgacacagagatgtgagatgcggatgagaaattggagcagtttctgttactcaaagttcttcctcactctctggtgcctgttgcagagtctcagatgagatttttttacttctgaaaattatttcctgggtcacagtgaaaaggagaaatagagaaaacctctaggtctagagatgctggaggcccagataatctagcttattcc

SEQ ID NO: 100262 - DNA, 630 bp, Homo Sapiens
taacacaaatctgttacgtgaattaaagacacacaaaggcatttttaccagtgtttggaagtttgtgaatagtaaaggggaacaggccaaaatttcatgcgttgaggatataagtaaaacagaaagtgcaaaaatgtaaactacacaaactcaatctcttgtggaacaattagaaaactaataatacattttactcttgaatgttgatattccactcgaagtttggttggttgctaagcttaaggataaacactatgaaaaatgtgaagacagaagggctggccaaacacagctgattcggcagcaaatcacacattaaatcacagtggcatgtgagtcggtttattcaaattgctgttaaaagatattcttagagtaagtttaggaaaataagagtcatttggcgatgcagagaggattttgtctacagtggaatccagactccggtgaaagttctcattccttcaggacctgggagctaacagctccggactttcttgtgctccactgtgctgcctatgttgtgtgcttcccaaatggcattattcccaccagctcttccagagtgagttctgcccattctgtagaagaaacagtagcggaaaaattaaacaatatctttgctcaaaa

SEQ ID NO: 100263 - DNA, 428 bp, Homo Sapiens
tgcggccgcccaacctctgctcctctgcggagcccgcgggtgggcggagccctcgctggaaccgagctgtcccgacccaccccaaaatccgatagttgattcgttcattcatgtagcaaatgtttatggagcaccgcccctctaaggctcagtgccgggaggcgaaggtggacatggtggatactgtgagctggaaggaaaggttttctaaagggagctcgaggtagggccgaaaagaagtgaagaattttggtttcactcctaggcggcttctagaaaaaagcaatatgtatgcatattcgtacctacctcccctttggtgtacaaaaatgtagcatattatgctcttttcctgaagatcattccatatcaataactggaggggtccctcacttttaaacaacttttaataacataccataaaactc

SEQ ID NO: 100264 - DNA, 483 bp, Homo Sapiens
  misc_feature (17)..(17): n is a, c, g, or t
aagatactagtcagaanagctttttctcaggggtactgagcccctttatcacactagagatctgtggcagagacctccaatactgggggattacagagaatgcggttgacctaggggcccagctgcactttgaaatccattgctgtatttgcattgagcccatgccttccgtggtttctctcagcgactggctgagtatgaagttatactaagacatacttagtctggaaattctaggagacacagaactcctctgacagccgactttggcttgaagactcttcagtggccttgcagaacctttcttagactgcatggcagtctgggatgttctaccataccgctgtctttctcttctcctccctcttccacatggggctcagactaccagtttggaaggctcacccagtgctggattatctggtaggaagaataagttcacgctgagggcaagtagcaaagcaggggcattaaaaaaggaaa

SEQ ID NO: 100265 - DNA, 546 bp, Homo Sapiens
ctacccacctcattgtcatctaaattaggtcaatgtctatatttatttctcagactttttgtctttttccttataatagtcttcgtagtctacaattacacccttgtttgtgtttatttattctatctctgcctgtttcactggatcgtaagctccaccatgggtgggaaatcagtcttatccccagattctctgaccctccgtggtgcctggcagacagcaagcatggagtaaattctggttggatgaatgtactggaagtgtttagaggaaggaaactgacctgaggtagttgggacaaagaatgggcaactttagtttctgtaagattgagatacagataacagtacttgagtacttgtgtacttaccctttctgattaaatagaggctgagatcggataagataattttgctaatgtctgttgtggcctgaaaagcgtgtgttccttggctccttcctaggctcattcattcgctcatcaagctttgagtgagctcctgccccgcgcccacatgtaggaactcccctctcaaaataaaaaaa

SEQ ID NO: 100266 - DNA, 679 bp, Homo Sapiens
gatgttacactcttggtatgttacgctgtttggaaaactgggtgaaactattcaaagatggcctggaattcttgctctctagaatgaaggcctatctgtgtaggaattatatacaagatgttaacaagagttaaaaggcacaaaggtgcagctattaggaaattgcatataatataacttaattttgcacaaaaatagaagtgtccactgcactaagttatcaatgctcagatttactgttttgcaacacctcagcaaccaaatatttcaactgcattctacttgctatttaaaaagttaaatttttactccatgaacactcaagaaatatggatgaatagtcgtagagtagttctgttctaacagtcttggctgaatgaagctttatctgttattcttctgaaactctaaacccaaaacaaatgaaactctgcttttcaaatctttattatataatgcaataaaaataatctgtacaggaacatgaagagaattacactggacatgctcacctgagacattagattttgtaactgtatataaagttaattttttaattagttacataaaggatgtattttaggattggtcacaaactctgattaattgaatacttctgaaaactatggaaactgaatataaataaatctttttagttcctaaaaatataattctcaag

SEQ ID NO: 100267 - DNA, 449 bp, Homo Sapiens
gagtagcctatgtatacacttgtaaatgcataggctactgctaaaagataaataagacataagaaactattctagttactctcaaggaagggaatcagatggctagaggataagagctttatatttgatacataatctttttatatcttttgatttttatactattgcatgtattcttaaaatttttactttatcactctaacctattatttttcctagtcctacctatattagtttcttctaatcctcacattctaattgtaacacactgacttccaggtagacggtatttattacaagtcatcagaaaaaataaagtagttgaagggtagtaagaggccagctttccattcaacaaagtggatgtgtctacacaggacggaggtattaagtttagtactggcactgcctccttgcaatgacttccctttgaactcaatctcactctc

SEQ ID NO: 100268 - DNA, 618 bp, Homo Sapiens
gatgttgtacttcactcctctctgagggtgtctaggaatacagaagctccttgacttacatctcaataaacccatcgtaagtccaaaatattggaagttgaaaatgcattgaatacacccaacctactgaacatcgtagcttagccaagcctaccttaaatgctctgagaacacttatattagcctacagctgggaaaaatcatttaacacaaagcctatcttctaatgaagtatggaatatctcatgtaatttattgaatactgtactgaaggtgaaaaccagaatggttgtatggatatgcgaagtatggtttctactgaatgtgtattgctttcccatcatcataaaatttttaaaaatcctaagttgaatcattgttagtccgggaccttcagtactgccaagtcccagagaaaacgcttttactctggggagaacccactgatggctcattagatctgtcccttccccgaggtccgtgtgtgactttgagcaaaaagtgacttctttttgtgaatgtaaaatttgtgaaacttgagtttttccaatgtgctgtaaagtgttttattgtaaattgctcatctcaataaaatccacttcaggtttaaggacaaag

SEQ ID NO: 100269 - DNA, 385 bp, Homo Sapiens
tttacaatttaggatacaaacaggtgacctattttaggcaatttttggtctcagagccaactgagagcaagcagagttcagcagaactgctcacaggcatggccgcgcccggagcccctgcctgtcccagcacaggcgtgcgagcagccaggtcccattcctcagctctcaccgttcatgtccctctcccttggccaagtgctgatggcgttcatcatgcactcttactgaacaaggataaaaaatctacctgatatataaaagcacctgcttctggcacaaatgcatcctcttagcaaaggggagaaaatatcagtcgagcaaggaagtttttcaatgactttttggacataaacctaatataagctcaaaaaattgagaaaga

SEQ ID NO: 100270 - DNA, 421 bp, Homo Sapiens
  misc_feature (363)..(372): n is a, c, g, or t
cagtagctggtttgccttattggacctactatatttatgttgatttccaggtgtagcaagtgcatgagcatctaaacaagggtaggaaaaccagggctcatgggccaaacctggcccccttcttattttgtgaataaagttttattggaatgcagctaagcccatttacttatagactgtctaatggctgcctatgtaccacaacaggagaggtgacaggtttgacaaaggccatgtagccgtaaagtgtaaaatacttattacctggttcttgcagaaagaatttgcccacccctggtctacagcaactctgttgcaggtcaagtaaaggtaggtcatttcactcagtaccacaattcaatnnnnnnnnnntcttctgatattaaagtaggctatccctcaccctccaaatagaaaaaca

SEQ ID NO: 100271 - DNA, 310 bp, Homo Sapiens
gagcacgctctgaaagggtttgtggagagcccagctcaccagggactctggttgccgtagcaaccttccagactgttctctctatcttctgctttgggcatcaagggagaccaggggactacatcttcccagcttctcaaatgggagcacctcccacatcgtggcttaggggctgggagtgccagggcacggatgtgggacttttggaaaatgtggaggaagcagggcctcaaagcttcctgtctggacttttcttcctagtttccccacccagtcattgaagctgcctcatcttactcctgattcttca

SEQ ID NO: 100272 - DNA, 263 bp, Homo Sapiens
gaagaatcaggagtaagatgaggcagcttcaatgactgggtggggaaactaggaagaaaagtccagacaggaagctttgaggccctgcttcctccacattttcctgagtgctggggcttcatgacgttgctgcagaagtctggacagcagggaccgtagccttcgccatgtgtctagcagagcacctgatacagaattgtcactcatacaatgtgtggtgaatgaatgagtgaggaaataaatgaaggaagtgctggaaaaaa

SEQ ID NO: 100273 - DNA, 474 bp, Homo Sapiens
tttagtaaaaagaatgtgttaatgtattatatgtgtaattaaaattaataaaagctattcttatattaaaaaggagaaaaatctctcttcctccttattaaagcatctgcaacagccaggaatcattgagctatgagtaaaacgctgccttaggtgatttgtcaggggacctgctaagtagagggcaatgtggttgtcatggagacagctgtcttcaacacaaaccatcctgtgcatctatctacacatgtcggatatgtaaccatatcccattcaatgtcatacttttaaatctcggttcacaaactcaacagtaataacttctaacacaatgagagcagtcagtattaaaatctagtatctcatttaaacttttactctttctctctccccaccccacccccagatgagttgacttagatttagagatgtgaaatagcctgtccaaagtcagttgactaatatgtaagaatt

SEQ ID NO: 100274 - DNA, 485 bp, Homo Sapiens
  misc_feature (69)..(69): n is a, c, g, or t
catcactgctctgcattaacgcgggcttctgctgatggagaggaatggaggtcctgacctaccctcgcncaggtttccagcctcccagctcttgcacacaggagcagcaggtggggaaacgccaggatctccaagcaccctgccaagtctgtggcacgcagtaggacctcagctgctcaggtcctttctgctctaacggatacctaagaggtgtcacgtttccctctaattttccacctctttgtgtgaagcgtgcattgccagtccctcccctaggcccctagccctaggggttttaaagtagagcgggaaagcccgaggatcctttcagcagcacagagcagagaccgcgctccccaggagggggatcggctggatgaggagggaccggctggggctgagcacgtcctccaacaggcgctgaccggtgtgaacaaaagtcagtaactcgggggccacaacggcgggagacgcgcgcggccgca

SEQ ID NO: 100275 - DNA, 408 bp, Homo Sapiens
ggggaaggacacacacagcctgggtgagtccccgaatcactgtaccgagtggaagatgtcagaggaaaccacgtacgcactgcaggaggccattatgcaaagctctagaagatgcaaattaacctacagtgactgaaggcagaaagaaaacaaaaagcagcccaaggcgaaaaagtcgatcctgtgccctgagcacaggcagtcctgaggtgcgagcggtttcccaccaggctcttcttggcctttcgagaacttcagcccctctctgctgtttcctgttgctggcatccactttcccatctcacaatattttctcctgtctggtctcctgtatctgaaacccactgctacgggatctcccctctttctggaaaatgttcattaaacaggaaacaaacccaaaaaaaa

SEQ ID NO: 100276 - DNA, 516 bp, Homo Sapiens
aacgtgaaaatgaggaggaatagatggatttggcctatattttggaagtctactaaagcctggagatgaaatacctgatccttattgctgtttccagatatttcaccctctcacattcctaaaaacctatagcttttactctcaggtcactagaatataccacctactatctcttgttgcattgtcaatttatcagctcccccaaagtcactcctgctttctcaaaaaaactggtttctggctcactgtctgtccaactccattcctgtcttaattcttggctttttcagtgtatatgtaaatggtccttccaacaccctcacctctctgttccttcaactcatatccagtgatcgtgtcctatactcctcagctattcacttccatgatcatataactttgtcattgtgaaaccctccttaatctcattctttgacctctacctcttatctttccactccctctaatactgtactccagcctgggtgacagagcgagaccgtgtctcaaaaaaaa

SEQ ID NO: 100277 - DNA, 399 bp, Homo Sapiens
cccacccactcacctctccccagagggagaaccctccggggcctcccatagcggcatcagccccaggaccctctcagagtcttggtctcaatgtccacaacatgaccccagctacctccccaataggtgcatcaggtttaggtattatctctgatgacaagatgattaagactgaatttggttctgctgattttaatatcatctaataatttgatagccttctgaatcatctgtcttcttgatctagaatcgtgtcaattaaaagtatttgcagagtttttgttgctgtacttctcgttaggtatcagtgtagactatagatatatataaatgtttatacctaatgtggttcaaccaaaacatctgttagtaataaagaagatccttgcctataaaaaa

SEQ ID NO: 100278 - DNA, 414 bp, Homo Sapiens
tttggagaaagcagtgtggtttaatctggaaggagcagaagctgtggagtccaaaggacccgtgttcctatccttgttgtgccacttgatacgtttagcacaagggtccccacagtgttagttcaccgtctccagcaatcacgatgactccctgaagggctgtcaaacgaaacaaaggcgcaaactgagacaattccattggttacgtaactttcgccaaatcggctctttcctacgaaatatccagctcatagagcaggctgagatgctttgttgctttaattctctttaagagtcacagctgtccattttccacgtgcggctgaagaatggatttcagagcgctctccctccggccgtgttcacctagtaaccccagcttcgggataaggacctgcagcccgggcgcgaccc

SEQ ID NO: 100279 - DNA, 275 bp, Homo Sapiens
tcgttctggaactcaccttctaaagcatgttcaaaactgtcttgattaactgaaagagaaatcaggaagcattggtcaatgtaaagtgaattcacttcgtttgcatgaaatgaggccaaaaaatttgatgcaaaagcccatgccatgctttggtgaaattagtggtatgtttttacttatcttgggccactataatcagtgaacgtgcctggactattcacttcctaagttcccaagagaagatgagatagataagacccaagatcaacaacagt

SEQ ID NO: 100280 - DNA, 664 bp, Homo Sapiens
cgagaagactaacagaaaaagccatatgacctgaagattagatacattggtacagattgctaaattttatcaatagatatttctgtttactgggcacacagttaaattctatttctctgccagcctccttgtatcaacttacagctaagtggttgagtctgactgattgaatgtgggctaaagtaatatataccactttagggcctgactcgtaaatatatccttatgatctctctatctctacctctaattcctttccagtcatagtggtaggaagcaaatgatttcaaagcccagatgatgacagagacccatcttggaaggggcttggatccctgagtcactgcttggaggagagctgcctgagatggcttcctgatcatgaacatccacgttggactttgcctgagcaaggaataaacatcctatcttaagacaatgtgatttggagtttttggcatatgaccagcttcaattacgctgcataatttacatgtcttttccctctttcccaggtaactcatatgcctcccagatgtttatatttggaaagagggaagaagacccaaataataactgagatcaaatttctcaccaactcactgggactctgagagatgcatttcatttgatttaaagaaaataaattacttaaaaactaaaa

SEQ ID NO: 100281 - DNA, 683 bp, Homo Sapiens
  misc_feature (50)..(50): n is a, c, g, or t
  misc_feature (502)..(523): n is a, c, g, or t
aacttttgctagcttttataggacagttttttagtagttatttcttaatnagtgtcttatcatttccaggtagtagtttagactcattaagcctttgaagttactggtgctattaagtgcatcattgctctgtgcattgaaggacagtgaagtggtggctgcttgtctgtgtgcccagaaccatcaggaaatggcttgagtaccccctgggaaaaaggctttgttaaaaaggaactgcttgttcactctgggacacttagccttctgcttattagtccttttgctgtgttcttaccaggttgagggacacttctttccataaatgcagacactgaagctggaatctggaacatgtgttttcagtatttagagatctgcagagtggacacatactggcacatcacaagcatgattgttatggtctcaaaagtgtgggaggatctcccaatcccaagagttttgagagcagcctgggtgacatagtgagaccttgtctctatgnnnnnnnnnnnnnnnnnnnnnnttagggcatgatggtgcacgcctgtggtccccattactcgggaggctgaagcgggaggataatttgagccaggaggtcaaggctgcaatgaactataatcacacctctgcactgcagcctaggtggcagggtgagatgctgtctcaaaaacaggaaaaaa

SEQ ID NO: 100282 - DNA, 363 bp, Homo Sapiens
aatttgctctgtcaggtttcctccgatatcacagggcagggagaggcggggatggggccacatcagcatgatcccagtgacaactactaaacactttctagtagcctacaacacagctgtgtgactgagccaggggaggtgtaaacaaggtcgcactagaatgcataataggggtatggccttaatgctccaagcccattggtctatgagaaagctgaaagggaaaggaggcatggtcaggcagcagcgtgtccagagggacctgtggcctcacaaggaaagctgctcatgcaaccgctgtctccgctcactctgggagagaggcagggccagctttcattttagaaactttaaaactttaaa

SEQ ID NO: 100283 - DNA, 488 bp, Homo Sapiens
ggaattcctgtattagttatctactgttatgtaacaaattactctaaaactagcagcttaaaaaacaacaaatatttattgtctcaatgtttttgaaagtcaaaaatatggaagaagtttagctggcaagttctggatcagggtctttcataaggttagatttgagatgtcatctggggctgcagtcatctgaaggctggactggggctgaaaaatctacctcctgcatagctcaaccccatggctgttggcaggaggccacaggtcctcactgactattggcactaatcataaaaaagttggagtggctatattaatgttaggctaaatatattataagataaaaagtatattttgagatgaagaagaatatttcataataaaaaaaatgccatttgccagtaagatataacaattataaatgtgtacatgcctcataacaaattcaaaatacataaagcaaacgtgaaagaactaaagggagaaat

SEQ ID NO: 100284 - DNA, 197 bp, Homo Sapiens
ccccgagggtgacgggacggttacgctgattcatcctggccagggaccccaaacatctcccctcctccggcccaggcgccgtcacccaggctccaccggtccgcgggacagagccgcggagagcgcctggaagcgtcgcgccctcaaagccaagcgattaacttggttcctcaaattgttcccgacaggaggggcag

SEQ ID NO: 100285 - DNA, 605 bp, Homo Sapiens
  misc_feature (512)..(512): n is a, c, g, or t
tttctccataggaatacagactccactaagacaagttcctggtgccaaaaaacattaactgacgtgttatatgagctctgtaactttttcttagatagatgaatgaatgcatgaatgtatgaaagaatgaaaaatttgttgttgcctaagaacattggaaggaatattgataattaaaaatgctaaagttatgtatctttagagtccagttaacaccactaatgcctagaatttgacacatcccttgggatccatattgaatttcctagagaaattaaggatatttccttcttacagctagaagaaatactatctctgcaaaaagttactctgtatttagtcaaagcctgatttttggcagtgtagggagaaatatcaaattcattcatgtatgtaaaaaactaattatgatacatttacatatatacatttggaaagagatacatgaacatgttatcaacagtaatctctataattcggaaaaatgtttttgttgttgattttattctatnttttaattaattaaggtctacaatttgcatcagagtttactctttatgttgtacagttctatgagtttggacaagtacattgtgtcatgtatt

SEQ ID NO: 100286 - DNA, 382 bp, Homo Sapiens
atttaaagcaaacctcaaacattattgggtatcaattaccacctggttgtattaaaatagtaacttatcaatgccatgtaaaaattaattccattttcgaagccacctggcagacaggtttagctgtttcatcagcagcctaatatatactgttaaatttgttaaggatttcactttgaaggatacatgcaaaacatatagttactattttcatgagtcctgcttctagctccattgtggaatacagaaaattaaatatacctgttaagttcgtatctaaacctaagacattaccaaggtttgtacaaattctactacctgacatttattccaagaagatctggaaagttaaataaatttataaatttaataacattcaaaa

SEQ ID NO: 100287 - DNA, 381 bp, Homo Sapiens
ttttacgattaaatgacataacacatgcaaggtccttggttccacatagtgggcactcaacgaatattagttctcgctaaacagtcacttaaatatttgtaggccttggctttcccgttccttccccgacctttttactggggctagggaaggtatccggtggctggaggcgcttcacactgggtcgggtgagagcgtgaagcgagccttttccctaacgtcacgggagcagctgggaagagaccgaagaacgagggtcactctcccctgtatacgtggcatgtccttcctctgagacatttattcctcccaccaacaaacattaatggaacgcctcacaagtgctagaccccagcgacacaaacaagggcgaggcacact

SEQ ID NO: 100288 - DNA, 477 bp, Homo Sapiens
  misc_feature (65)..(65): n is a, c, g, or t
cactactctcctctttcccagtcccacctcaaaacctcaaggccaactttgtcactctgtccttntagctctcataaaaccccaatcacagaagattaggggtggaggaggaagtgtgggccagaatcatggccccagagctcgagcctccagttgtctgtcaatcctggtcaagtctttgagctccatgtggaccacctgcagcccaggtcggccagggccttccagccagcacagtctccatgtgagtctgcctgaccaggtgtatcaagtgcacaaagatggcatgcatccttagagagaaaactctgacacctcctattctacctttgttaggaaatgaaccatgacataacaagatcatagcaaaggagaaaaacaaatggttaataaatatatattttatcaatataaatcaaagaaatgcagactaaacaatgatgtactgagtagacaaatattaaaagttattttaat

SEQ ID NO: 100289 - DNA, 487 bp, Homo Sapiens
tgcggccgccaacatctctcaaagccacaaggacagagtctgcacctttgacaacggctccatccagctcttcagcgtgggagtgagggattccggctactatgtcatcaccgtgacggagcgcctggggagcagccagtttggcaccatcgtgctgcacgtctctgagatcctctatgaagacctgcactttgtcgctgtcatccttgcttttctcgctgctgtggccgcagtattaatcagcctcatgtgggtttgtaataagtgtgcatataaatttcagaggaagagaagacacaaactcaaaggtaaccccctgggccttgtgataatccatgagtggttttgaggccagaggtggcatgtgttatcttgttctcacgaagaaagcactatgtggcttgatttccaactcattgacttgtctttgctttacagaaagcacaactgaggagattgagctggaagatgttgagtgttagccaag

SEQ ID NO: 100290 - DNA, 504 bp, Homo Sapiens
tttgtttcctttttcctaattggaaatcactgaaatctaagctatgctttcctcaagccctgtaaactgaagactaaacttgggaagaaaacagcagcaacctacttctatgtgtggctgttgcatcctattacgtttcagcaggtgctgcctcgaagcccccagaacagaaagtgctaccgggaacaaatccacctcttccactccagcgctgtgtttggtgccccatgacgacaaccctctctcagcaggaagcagccagaaagattacaatgcttcatctccctacgattctcgtgattaataaatacatatacatgcatgataaaaagcatgagcaaattgacagtggggattgtggcaggccaggtctcactaacgcaggcctctgtaacaagtgttttagtactgtctgagtagttaaatattaaaagccaaggcccttatacaaaggctgggatataagaaaagcccaccaaaagtttagcttaggcctttcctggg

SEQ ID NO: 100291 - DNA, 418 bp, Homo Sapiens
tttctcactttttattaaggtatagtttctgtacaataacatgcatatattttaaatgtacaggctgatgagttttgctgattaaattttaatttctctgaaggtaagagaagtatgcttgagtacgtgattgattgctgaccaaaataagatattggcaataaacacttaagtactttttagaaagcagacttcataaactgatttgtgattcttctttccttcctttagacagtaaaagaaaagggatgtaacaggtgaaacaagactgaccatgttttaataagctggctaataggtacttaagttcattatgctttgtattctctacttttgtatatgtttgaaggcttttacaataaaagtttttaaaagtaaatgcagatgctcacacacacataaaattcaaactaaagtt

SEQ ID NO: 100292 - DNA, 263 bp, Homo Sapiens
tttaaaatttagtagctgccaaactaatttttttaacttttcctttaaaatcaattgtctactgcacctttttattttctttttaatatggacagggagtctcattgtgtttatcatatcaattaatattacagtacatccttggtaatacaaaattgtacaccttcatcaaataaattaggataaattaaaccaataaattatgcaaagtcttcagaacaatagacaacaacaaaaattcacaattgaaattgcctctagct

SEQ ID NO: 100293 - DNA, 653 bp, Homo Sapiens
  misc_feature (531)..(543): n is a, c, g, or t
gagacataggctgaaatacaataataataggggacttcaacaacacatttgtagcatttgacagaccattgagacaataatcaaccaagaaacatcacagttaaatggcactgtagagcaaatggacctaacaggcagttacagaacattccatccaacagctgcagaatacatattcttctcaacagcacatggaacatctaagatagatcatatatgataccacaaaaaaagtcttggtgattttttaaaaatcaaaattatattaagtatcttttctgaccacaatggaataaaactagaaatcaacagaaggaactttgaaaactgtacaaatacatgaaaattaaacaaccatgctactgaatgactaatggatcaatgaagaaattaaaaagaaaaatttaaaaattattctgataaagggaaatgaaaacacaacttttcaaaacctatacatacaacaaaagcagttctaagaggcaagtttatagcaataaatacctacgtctaaaaggtggaaagatctcnnnnnnnnnnnnnctactctaacattgcacctcaaggaactagaaaaatgagaacaaccgaaatcccaaattagtagaataaaggaaataataaaaatcaggcagaaataagtgaaatagaga

SEQ ID NO: 100294 - DNA, 502 bp, Homo Sapiens
  misc_feature (389)..(389): n is a, c, g, or t
  misc_feature (449)..(449): n is a, c, g, or t
  misc_feature (472)..(472): n is a, c, g, or t
tgcggccgcctttgtcctgctcttgctgtattatcatttgtgattctgagttgtgactttcatcccagacagcattcttagttgttcacagcccaatttatttgtaggagcctgccttgttcgtatttgtggatttgtaaagtctcctgaaccctgggtcgctaacagctgttaacctccagccagtggtcttggactttctttgtattcaccgccggtggctttctctgtgatttatgacaagtagaaaggacttctgccaaaagcgatctgccgcatcagcttgccctgacggattgtcataaatggctcttgtgaggaagggaaatgaaagccagcggctgggctggctctgctgcctgcgaagggcacctcctctctcctctcangatggcgagagctggggtgagcccctttgcacctatcctccctacctaggaggtgctcanctctcattcccagtcacctgcangagggctggctgggtcacttgtccctgcca

SEQ ID NO: 100295 - DNA, 292 bp, Homo Sapiens
tttataagtgtgtcccattcaatatttgaaatatactaagtaattactcattcactcagttcacatcttgtgttttatctggcaactctaggaactcttaagtattattagtgagaactgtatgcaatgggccaggaatttaaagaaattggggactacatttgcacacaggtggaaacagagccaactagaatcacggacagccagaaacactagttttagacatttcagtttaacgtgcccttttcaaatcttctggggttttgttgttgctttatgttagtagttttag
